United States Patent Application Publication US 2013/0332133 A1 - sequence listing, part 48

SEQ ID NO: 301213 - DNA, 946 bp, Unknown
  Bacterial polypeptide expressing nucleotide sequence isolated from the Sargasso Sea
atgaaaaatataaacaaaatagtcctctccggagttcaaccaactggaggcttacatatcggtaattatttaggtgcaataaaaaattttgtatcaatgcagactgaatatgattgttttttttgtgtagttgatcttcatgcaattacagtaaaacaagatccaaagcttcttaaaaataacacttacgaggcagtagcaacttatttagcttcaggaattgatcctgttaaaagtgtaatttttaatcagagtaatgtttcgtctcattcagaactggcttggatatttaattgcatcacaagaatgggctggctcaatagaatgacacaatttaaggataaggccggcaaagataaagagaatgctagctcaggactttttatttaccccaatttaatggctgctgatatattactttacaaagcaacccatgttccagttggcgatgatcaaaagcagcacttagaattaacaagagatatagctcaaaaatttaatcgtgactatgaatgtgatggtttttttccaattcctgaaccaataatagataaaaatatctccagaataatgtctctcaaaaatggagaacaaaaaatgagtaagtctgatccatcagattattcaagaatcagtttaactgatagtgctgatcagatagaaaaaaaaataaaaaaggctaaaaccgctgacacacctatgccagacaataatgaggatgtatcaaaattacttgaagttaataacttattaaatatattttcaggtttttcagaaatagataaatctaaactaattgagaaatataaaggacagaacttttcaaattttaaaaataatcttgctgaagtaattattgagcacattaaacctatatcaaaagaaatagataaattaatgagtgataaagcttatttgaatcaaaataatttcaagtggagctgaa

SEQ ID NO: 301214 - DNA, 754 bp, Unknown
  Bacterial polypeptide expressing nucleotide sequence isolated from the Sargasso Sea
atctagtgtggctgctcatgcagaaggagcatggatattaagctgtgttgctagaatgggttggttgaatagaatgactcaatttaaggagaaagctggtaaagataaagagaaagccagcataggactttactcttatccagttttaatggcagctgatattcttttatatgatgctacacatgttccagtaggtgatgatcaaaagcaacatttggagttatgtagagatatagctcaaaaatttaataacgattttaaagtagaaaatttttttcaagttcctgaacctttaattcaaaaagaattttcaagaataatgagtttaaaagatggttcaaaaaaaatgagtaaatcagaattgtcagatttaagtagaataaatttaacagatgataaggatcaaataataaacaaaatcaaaaaagcgaaaacggatcctttgcctatgccactagatataaaggatcttgatgaaagattagaagcgaaaaatcttctaggaatatattcaagtttaactaattctaaattagaaaactcagtaaaaaatttttcaggtaaaaatttttcagaatttaaagaacaattagctgaagaacttgtgaataaaattgaacctatttctaatgagataaaaaaacttttaggggataaaagttatttagataaaattcttctagatggagttgaaaaagctaatttgattgcatcaaaaaagattgaaagaattaaagaaatagtaggtttttaa

SEQ ID NO: 301215 - DNA, 1003 bp, Unknown
  Bacterial polypeptide expressing nucleotide sequence isolated from the Sargasso Sea
tttgaacagtaaaaaaattcttacaggtataaccactaccggtacaccgcatctaggaaactatgtaggtgcaataagacctgcaatagcttcttcaaaggagcaagatcatgattcttttttctttttagcagattaccatgcattgattaaaagcaaagattgtgaaggattgaggcaatcatgcttagagattgcggcaacatggatagcatctggcctcgacattgatcacacctatttttatagacaatcagatattccagaaatattagagttaaattggattcttagtaattttacagcaaaaggtcttatgaatagggcacatgcatataaagctgctgttgatgaaaatgagaaagtagatccagataagggaattactatggggcttttttcataccctgtcttaatggcagcagatattcttatgttcaatgccacacatgtgcctgtgggacaagatcaggttcagcatattgagatgacaagagatatagcgcaacgctttaatcatcattacggtgagatttttgcggtaccagaaggtgtcattgataatgaatcgtcaattttgcctggcttagatggaagaaagatgagcaaaagttatggcaatattattccacttttctgtgattcaaaatctcttcggaagcatgttatgaagatcaaaaccaattcattagagccaggtgagccaaaatcgacagaagattgtctattgtttgatatttataggagttttgcatcagagtcagaaatcaattcaatgaaaaaaggcctcgaagatggaatgtcatggggcgatgcaaaaaatgaactttatgagctgcttgatggtcagctatccaaccatagattgatatatgatgatctgattggcgatccctcatatctcgataaagtccttcgacaaggagctgaaagggcaagagaggtggcaaaatctaacttacatgaaattaaaagcgcaattggtttaggcacattaagctaa

SEQ ID NO: 301216 - DNA, 682 bp, Unknown
  Bacterial polypeptide expressing nucleotide sequence isolated from the Sargasso Sea
atgaagaaaaaaattttttctggggtccaaccaactggaaatttacatttaggaaattatttaggtgcaatcaaaaattttgtagctttgcaaaatgaaaaacaaaacgaatgtgtttattgcgtagtagatttacatgcaattactgtaaaacaggatgcaaagactttaaagcacaatataagagaaacaacagctgcttttcttgcaagtggactagattacaaaaaaagtataatttttaatcagtctcttgtacccgcccatgcagaaggttcttggattttaggatgtattgcgagaatgggatggttaaatcgtatgactcaatttaaagaaaaagctggaaaagacaaagaaaaagcaagtgttggtttatatatttacccaattcttatggcgtctgatattttgttatatgattcaacccatgttcctgttggagaagatcaaaaacaacatttagaattatcaagagacattgctcaaaaatttaatttagactttaatgcaccagattttctgatagctccagaaccattaatacaaaaaaattttgcaagaattatgagtttaaaagatggtacaaaaaaaatgagtaaatctgatccatcagacttaagcagaattaatttaacagatgaaaaagatgaaatagtaaataaaattaaaaaagctaaaa

SEQ ID NO: 301217 - DNA, 980 bp, Unknown
  Bacterial polypeptide expressing nucleotide sequence isolated from the Sargasso Sea
tgtgcagcctacaggtaaccttcatttaggaaattacttaggagctataaagaattttgtagatttaaataatgataacgataataaatgtattttttgtgtggttgatttacatgccattacagttaagcaagaacctaaagaattaaaaaataatatcagagaaactgttgcaacttttatagcaagtggaatagatccaaaaaaaagtataatttttaatcaatctagagtagccgctcatgctgaaggagcttggatattaagctgtgttgctagaatgggttggttaaatagaatgacccaatttaaagagaaagctggtaaagacaaagagaaagctagtattgggttatattcttatccagttttaatggcagctgatattcttttatatgatgccactcatgttcctgtaggcgatgatcaaaaacaacatttagaattgtgtagagatatagctcaaaaatttaataatgattttaatgtagaaaattttcttcaagttcctgagcctttaattcaaaaagagttttcaagaataatgagtttaaaagatggttcaaaaaaaatgagtaaatcagaattatcggacttaagtagaataaatttaacagatgataaagatcaaataataaacaaaattaaaaaagcaaaaactgatccattgcctatgccacaaagcataaaggaacttgatcaaaggttggaagcaaagaatcttttaggaatttattcaagtttgacaaattcttcattagaaaattcagtagaaaattttgtaggtaaaaacttttcagaatttaaagaaaaattaacggaagaacttgtaaataaaatcgaacctatttctaaagagataaaaaaacttttaggagataaaagatatttagatgaaattcttctagatggagttgaaaaagctaatttgattgcatctaaaaagattgaaagaattaaagaaatagtaggtttttaat

SEQ ID NO: 301218 - DNA, 1015 bp, Unknown
  Bacterial polypeptide expressing nucleotide sequence isolated from the Sargasso Sea
atgataccaaaagcaaaacctatagtacttagtggtgctcagccttcaagccagcttaccataggcaattatcttggtgctttgcgtcagtgggacaggatgcaggatgactatgactgtttgtactgtattgtggatctgcatgctattaccgtgcgtcaggaccctgcggctctgcgtagtgcctcactcgacagtctggcattgtatctggcctgcggtatagacccaaaccgctccagcgtctttatgcagtctcatgtaccagagcacagccaactaaactggatacttaattgttatacgcagtttggtgaactcagccgcatgacgcaatttaaagacaagtctgaacgccatgccaataacgtcaatgcaggtttatttacttacccagtgctgatggcggccgatattctggtttataacgcgcatcaaatcccggttggccatgatcagaagcaacatctggagttggctcgtgatattgctaaccgttttaatgccttgcatggtgagatttttaccgtgccagaaccttatattcccggagtagcggcacgggtcatgagtttgcaggagccgacgaaaaaaatgtccaagtcggatgagaatccatggaattttgtcggtttgctggaagacccaaaaatgatcagcaagaaattcaaaaaggccatgacagactcagaggatccacctcgtgtggcttatgatctggagaacaaagcgggtgtcgccaacctgttaagtattttaagtggggtaacaggtaagtcgattgatagtctggtcgctgagtacgaaggcaagatgtacggtcatttaaaaggcgatgtggcggatgctgtcattgcactattggaacctgtacaggcgaagttccatgaaattcgtcaggatcaaagcttgatgaatcaagtgctaaaacaaggtgccgcagaggccagggctcgcgctgctgtgacgcttgagaaagtctatgatgctgtgggttttgtgttaccaggctaaa

SEQ ID NO: 301219 - DNA, 1000 bp, Unknown
  Bacterial polypeptide expressing nucleotide sequence isolated from the Sargasso Sea
aatgagtaataattttaaacaaaaagttttttcgggtgtacaacctactggaaatttgcatttaggtaattaccttggagctattaaaaactttgtagaacttcaaaagaaaatggaatgtatatattgcgtagtagatcttcatgcaattactgtttttcaggatccaaaagaattaaaaaaaaatatgcttgaaacaaccgcaacattcattgcatgcggtttagactttaaaaaaagcattatatttaatcaatcctcagtaagtgaacactctgaactggcgtggatttttaattgtatttctagaattggttggatgaatagaatgactcaatttaaagaaaaggcaggaaaaaataaagaaaatgccagtgttggtctttacgtctatccaaatttaatggctgctgatattttgttatacaaagcaactcacgtaccagtaggcgatgatcaaaaacaacatttagaacttgtaagagatatagctcaaaagtttaataatgattttaaatcagataatttttttcctattccggagcctttaattcaaaaaaaactttcaagggttatgagcttaagggacggaaaaaataaaatgagtaaatcagatgagtctgaatattctagaattaatttgcaagacacagaggacgaaatatataaaaagataaaaaaagcaaaaactgactctgagcctattccatctaagattgaagatttaaaaaataggcctgaggcattaaatttgataaatatttattcctttataacaaataaaactttagaaaacactttagctagtatggcaggtaaagatttttctaaattaaaaaaagaactttctgatgttcttgtagctacaatttgtccaatcggaaaaaaaatcaaagaacttaaaaaagatgagaagtatttgatagacattctcaaaaaagggtctaataaagcaaaggaaatagcaaaaataaatataaacaaagtaaaagatatttag

SEQ ID NO: 301220 - DNA, 1012 bp, Unknown
  Bacterial polypeptide expressing nucleotide sequence isolated from the Sargasso Sea
tatggacaaagttactaaaagaattttatcaggcgttcaaccttccggtgatttgcatttaggcaattatctaggtgcaattaaaaactttgtatctcttcaaaaagaatttgaatgttttttttgtgtggttgacctacatgctattacagtttggcaagatccaaaactattgaaacaaaaaacaagagaggtagcagccgcctttattgcctctggtattgatccagaaaaaaatacattatttgtacagtcgcaagttccacaacacgcacaattagcatggatctttaattgtgttgcacgcatgggatggcttaaccgcatgacacaatttaaagataaagcaggcaagaatagtgaaaatgtatcggtaggattattttcttacccaactttaatggcagcagatattctaatatatttagctacacatgttcctgtcggtgaagatcaaaaacagcacttagaattaacacgagacattgcacaaaaatttaatagtgattttaacacagatatatttcctatccctgaacctctaattttaggtgaagcaactagagtaatgagtttacgtgatggtttaaaaaaaatgagtaaatcagatccatcagattattcaagaattatgctatctgatagtgaagaggagattgtaaaaaaaataaaaaaagcaaaaacagatccactacccttacctgaaaatttagaagaagctaaaaaaagacctgaggctattaaccttttaactatttatgctgctttaaatgatttagatctaaagaatgtagttgataattatgcaggaaaagaattttcccaatttaaaaaagacttaggagaacttgcatcctctaaattatctcctatttctttggagattaataagttaatgaaggatgagaaatatttagacacaataattagtaacggtaaagaccgtgctattaacattgcaaatccagtattatcaaaaatttatgaaataattggcttttttagccaataa

SEQ ID NO: 301221 - DNA, 1006 bp, Unknown
  Bacterial polypeptide expressing nucleotide sequence isolated from the Sargasso Sea
tatgacaaaaaatagaattttatcaggggttcaaccatcaggcgatttgcatcttggtaattacttgggggcaattaaaaattttgtgtctcttcaaaaagattatgaatgttttttttgtgttgttgatttacatgcaatcacagtatggcaagatccaaaagaattagcacaaaaaacaagagaagtaactgcagcgtttatagctagcggcattgatcctaatgaaaatattttatttgcacaatcacaagtgccacaacattctcaattagcttggatatttaattgtgttgctcgcatgggatggttaaatcgtatgacacagtttaaggacaaagcgggaaaagacagagaaaatgtttctgtgggtttattttcttatcccaatttaatggcagccgatatattaatttatttagcaacacatgttcctgtgggcgaagaccagaaacaacatttagagttaacacgtgatattgcacaaaaatttaataatgatttttcaactgacttatttcctattcctgagcctttaatctttggtgaagcaacccgtgttatgagtttaagagacggaacaaaaaaaatgagtaaatccgatccttctgattattcacgcattatgttgagtgataatgttgattcgattgttcaaaaaattaaaaaagctaaaactgatcctcatccgcttccagcaacaaaagaagaggcagagaaaagacctgaggctttaaatctaattactatatttgcggctctaagtgatcagtctacagataaagttttagaacaatattctggaaaagagttttctctttttaagaaagatcttgctgatttagctgctgaaaaattacaacctatttctaaagaagtgacaaaattaatgagtgatcaagactatttagatcaaattatgaaaacaggtaaagacaaagctattgcagttgcggaaccagtattgactaaagtttatgatattgtgggttttgccaacacataa

SEQ ID NO: 301222 - DNA, 1009 bp, Unknown
  Bacterial polypeptide expressing nucleotide sequence isolated from the Sargasso Sea
atgaaagaaagagtattttctggggttcagccttcaggatctcttcatattggtaattatcttggtgctattaaaaattttgtagaagtacaaaatcaatttgattcaatcttttgcattgttgatcttcacgcaataacggtttggcaggatcctgaagttctaagtgagaatattattgaagtggctgcggcttatatagcttctggtatcgatccagataaggcaacaatttttgttcaatctcaaattccagctcatgcagaattagcatggatattaaactgtgtttctagaattggttggcttaatagaatgactcaatttaaagagaaagccggtaaaaatagagagaaagtttctgtcggtttatatgtttatccaaatttaatggcctcagatattcttttgtaccatgcaaatttagttcctgtgggagatgatcagaaacaacatctagagattactagagatatcgctcaaaaatttaataatgattttggaagggttaatgaaaatgaattttttcctttgcctgaaccaatgattttgccagtagcttcaagagttatgtcattacgcgatggtgaaaagaaaatgtcgaaatcagatagttctgaaatgacaagaattgaattttctgatgagaatgatcttattatgaaaaaaattgctaaagctaaaactgatccacttcctatgccatcagccattaaagaattaaatgaaagacctgagataaataatttaattaacatatatagtgctttttcaggtgaaaagattgaaggagtcattaataagtttgaaggaaaaaaactgtcagagtttaaaagcgatctttgcgatgttgtaataaacgagatggaaccaataagaattagattcaaagaattaaaaaatgataagacatatttaaaaaaaatactccatgatggaatgcttaaagccaaagaaaaatctgatcctataattaatgaagtaaaatctattgttggcttaggatgat

SEQ ID NO: 301223 - DNA, 418 bp, Unknown
  Bacterial polypeptide expressing nucleotide sequence isolated from the Sargasso Sea
aatgaaaaaaaaaattttttctggagttcaacctactggaaatttacatttaggcaattatttaggagcaattaaaaattttgttgcactgcaaaatgaaaaagataatgaatgtgtttattgtgttgtagatttgcatgcaattactgttaaacaagacccaaaaattttaaaagataatataagagaaacaacagctgctttccttgctagtggattagattataaaaaaagtattatttttaatcagtccttggtgccagcacattctgaaggctcgtggattttaggatgtattgcaagaatggggtggttaaatcgaatgacacaatttaaagaaaaagctggtaaagacaaagaaaaggcgagcgtaggtctttacatatatccgatacttatggctgctgatattttgtta

SEQ ID NO: 301224 - DNA, 822 bp, Unknown
  Bacterial polypeptide expressing nucleotide sequence isolated from the Sargasso Sea
ttagagaaactttggcaacttttattgccagcggattagattatgaaaaaagtataatttttaatcaatcatcagtcactgctcatgcagaaggagcttggatacttagttgcattgcaagaatgggatggttaaataggatgacacaatttaaagaaaaagctggaaaagataaagaaaaagctagcgttgggctttatgcttatccagttttaatggcagctgacatactgctttatgattcaactcatgtaccagtcggtcatgatcaaaagcaacatcttgagttgtgtcgagatattgcccaaagatttaatagtgattttaatgttgaagattttttcaaagttccagagcctttaatccaaaaaaatttttcaagaattatgagtcttaaagatggtatgaaaaaaatgagtaaatcagatccatcagatttaagcagaattaatcttacagatgaaaaagatttaatagttaataaaataaaaaaagcaaagacagataatatgcctatgccaactatagaagaaaatttagaaaaaagaccagaagttgaaaatttattaggaatttattcaagtttatcaaatcaaactttagatcaatcaaaaaaagaatttagtggaaaaaatttttcagattttaaagaaaaactttctgatttattagttgaaaaaattactccaatttcaaaagaaataaaaaaattattaaatgatgagaaaaatttagatcatattttatatgatgggtcacaaaaagctgataaaattgcattaaaaaagattaaaaaaattaaacaaataataggtttttaag

SEQ ID NO: 301225 - DNA, 994 bp, Unknown
  Bacterial polypeptide expressing nucleotide sequence isolated from the Sargasso Sea
atgaaaaaacgaattctaacaggaattacaaccacaggcactccacatataggtaattatatcggtgcgattagaccagcattagatttggtagaagattctaacgattcttttttcttccttgctgactatcattcgataataaaaaatcaaaattcagatgatataagcgcctctgttaaaaatatagctttagcatggttatcttgtggattggatactaattcttcatatttttaccgacaatcagatattccagaaattatagagttaagttggatattaaattgtgtcacagcaaaaggtttaatgaatagggcacatgcgtataaagcagcatcatccttaaataaaaaagatcctgataaaggtattactttgggtttatttgcatatcctgttctgatggcagcagatatattaatgtttgattcaacacatgttccagttggctcagatcaaatacaacatttggaaatgacaagagatatagcatctagatttaatcatttatataaaccattatttacaatccctgagcctattattcaagataaagaaaaagttgtattgggtttagatggtaggaaaatgagtaaatcatatggaaatgttattccattgttagaaagtgaaaagaatttaaaaaaatctataatgaaaattgttacaaattcattagagcccggtgagccaaaagactcaaaagggtgtacagtatttgatttatataaaagctttgcttcagatgaagctataagtgattttcaacaatcatatgacgatggaatatcttggggagaggcaaaagaaatattatttaacttaattaataaagaattagaaccaatcagaaacagatataacgatcttgttaatgatcaagctttaattaatgacttattgaatgatggtgcgaagaaggctagattaattgctaaagataaattatcagaaataagagaagttattggtattaaaagtatttcttaat

SEQ ID NO: 301226 - DNA, 1000 bp, Unknown
  Bacterial polypeptide expressing nucleotide sequence isolated from the Sargasso Sea
atgaccaaacccatagtactcagcggtgcacagccgtccggcgaattaaccataggtaactacatgggtgcattgcgtcaatgggttgccatgcaagatagccacgactgcctttattgcgtggtggacttgcatgccattaccgtgcgccaagaccctcaagcattgcgtgaagcctgcttagatacacttgcactgtatttagcctgcggcgtcgaccctaaaaagagcacggtatttatccaatctcaagtgccgcagcacactcagctgggttgggcgttaaattgctatacccaaatgggtgagctgagccgtatgacgcagtttaaggataagtcacaaaagcacgccaacaatattaacgtcggtctgtttggttatcctgtactgatggcggcggatattctgctgtatcaagcgaatgaaattccagttggtcaagatcagaagcaacatcttgagttaacacgtgatatcgccactcgctttaacaacgcttacggcgagacatttaccattcctgagccttttattcctgagcatggcgctaaggtgatgtcgcttcaggatccgctgaagaagatgtctaagtcggacgacaaccgtaacaacgtaattggtttgcttgaagatcctaaagcggtcatgaaaaagctgaaaaaagccatgaccgacagtgatgagccgccagtcgtgcgtttcgatatggaaaacaagcctggtgtatctaacctgttgagcttaatgtcgggtatcacaggccagagcattgccagcctcgaagccgagtttgaaggcaagatgtatggccacttaaaaggtgccgcgggtgaagcggtcgtgggcatgttagagccgctgcaagagcgttaccgtgcgctgcgtgccgaccgtgcttacctcgaccaagtgatgagagcgggcgccgaaaatgcccaggctcgcgccgaagtgacgctgaaaaaggtgtacgagaagattggtttgttagtgtaat

SEQ ID NO: 301227 - DNA, 931 bp, Unknown
  Bacterial polypeptide expressing nucleotide sequence isolated from the Sargasso Sea
tttgaacaataaaaaaattcttacaggtataactactaccggaacaccacatttaggaaattatgtaggtgccataaggcctgctatagcttcttccaatgagaaagagcatgattctttcttgtttcttgcagattaccacgcattgatcaaaagcaaagatcctgaagcattgaggcggtcttgtctagagattgcggcaacttggatagcatcagggcttgatattgataaaacctatttctataggcaatcagatattccagaaatattagagttaaattggatccttagtaattttacagcaaaaggtctaatgaatagagcacatgcatacaaagctgctgtcgatgataatgagaaagcagatccagataaaggaataacgatggggcttttttcttaccctgttttaatggcggcagacatcctcatgtttaaggccacacatgtgccagtgggtcaagatcaggttcagcatattgagatgacaagagatattgctcagcgctttaatcatcaatatggagagatttttgtaataccacaaggcgttatagatcaagaatctgctgttttacctggtttggatggaagaaagatgagcaaaagttatggaaatattatccctcttttctgtgattcaaagacacttcgaaaacatgttatgaagatcaaaacaaattcattagagccaggtgaaccgaaatcaagtgaagactgtttattgtttgatatttacaagagctttgcatcagattcacaaatcagttcaatgcaaaaggatcttgaagatggaatatcttggggtgatgcaaagaatcaactttatgagctgcttgatgagcagctttctagttatagattgagatatgatgaattgatgagtgatccatcttaccttgataaggtacttcgagatggagcagaa

SEQ ID NO: 301228 - DNA, 1000 bp, Unknown
  Bacterial polypeptide expressing nucleotide sequence isolated from the Sargasso Sea
atgagtaaaaacgtgattttttctggcgttcagccaactggtgaaatacatttaggtaactaccttggtgcaataaagcaatttgttgattatcaaaaggattataatagtattttttcaattgtagaccttcatgcagttactgtatggcaagatccacaacaactcttaaataatattcacaaagttttatctatttttcttgcttgtggcttagataaggaaaaaaatattatttttaatcaatctcaagttccagaacatactcagctagcatggttattgagttgtacagctaggatcggatggctaaataggatgacccaatttaaagataaagcaggcaaaaatagagagaacgcatcagtaggtttatatacatatcctatactgatggccgctgatattatgctttataaagctagtcatgttccagttggtgatgatcaaaaacaacatcttgaactcgctagagacatagctcataaatttaatacagattataatattgatttttttgtattacctgagccattattcaattcggattcaacgcgaattatgagtcttagagatggtacaaaaaaaatgagcaaatcagatacttctgattattcgagaatattgatgacagatgacaatgatactattgcattaaaaattaagaaagcaaagactgattccttatcaatgccagaatcaggtaatgatcttagtaagagaccagaaatagaaaatctaatcaatatatactcaagttgttcagggatatccaaaaacaccgttatagagcaattttcttctaaggaaatttcctattttaaaaaagaattatctcaagtgataattaacttaattcaaccaatatgtagtgaagcaaaaaaattatacgaagataagaattttttaaatcaagtactttcaagcggagcaataagagctagacagatatcacagaatactatctctgatgtgtataaaatagcaggtatgatttaat

SEQ ID NO: 301229 - DNA, 994 bp, Unknown
  Bacterial polypeptide expressing nucleotide sequence isolated from the Sargasso Sea
aatgaaaaaacgaattctaacaggaattacaaccactggtacaccgcatataggaaattatataggtgcgataagacctgcattaaaaatggcaaatagtgaagatcagtcgtttttttttcttgctgactatcatgctgtaattaaaaatcaagattcagataaaattgaaaaatcggttgaggatatcgcgcttgcatggctagcatgcggcttagatccaaaagaaactttcttctacagacaatctgatgtgccagaaattttagaacttacttggatattaaattgcattactgctaaaggattaatgaatagggcgcacgcatacaaagctgcaatggcattaaacaaggaagatgctgataaaggtatctctatgggcctattctcttatccagttttaatggctgctgatatattaatgtttgattcgactcatgtgcctgtcggctcagatcaaattcaacatttagaaatgactagagatatagctgcaagatttaatcatttgtataaacctttattaaccttacctgaacctataatccaagatgatgaaaaagttgttttaggattagatggaagaaaaatgagcaaatcttatggaaacgtaattcctctattagaagatgaaaaagtgttgcgtaaatctgttatgaaaatagtaacaaactcacttgaaccgggtgttcctaagaatccagatgattgtactgtttttgatttatataaaaattttgcagatgacaactctgtttctgaatttaaaaagcaatatgaaaacggcatatcatggggcgaagctaaagaaatactatttgatgtaattaacgccgaattaaaacctattaggtcgcgttatgaggatttaattaaagataagaactatattaatgatgttttatcagatggctctaaaaaaactagattattagcacaagaaaaaatatctgaaattagagaagttattggaataaaaaaaatatcctga

SEQ ID NO: 301230 - DNA, 1003 bp, Unknown
  Bacterial polypeptide expressing nucleotide sequence isolated from the Sargasso Sea
atgggaaaaaaaattttttcaggtgttcaaccaacaggaaatcttcatttaggaaattatattggtgcaataaaaaattttgttgatcttcaaaatcaagaaggaaatgattgtgtttattgtgtagtagatttacacgcaataacaactaaacaagatccaaaaattcttaagagcagtataagagagacgactgcagcttttttagcaagtggaattgacccaaaaaaaagcataatatttaatcaatctttagtgcctgcacattcagagggagcatggattttaggatgtattgctcgaatgggttggttaaatagaatgactcaatttaaagaaaaagcaggtaaagataaagaaaaagctagcgttggcttatatatttatccggtattaatggctgcagatattttattatatgatgcaacccatgttcctgtaggagaagatcaaaagcaacatttagaactatctagagatattgcaaataaatttaatttagattttaatgcaccagactttttgagagctccagaacctttaattcaaaagaatttttcaagaataatgagtctaaaagatggtaaaaacaaaatgagcaaatcagatccatcagatttaagtagaataaatttaactgatgataaagatcagattgtaaataaaattaaaaaagcaaaaactgataatgatccattgccaggtgatgataaaaatttaagtgatagacctgaagttgaaaatttattaggaatatattctagtttaagtaatcaaaatttaaaaaaatcaataaatgaatttagtggaaaaaatttttctgactttaaaaaaaaattagcagaagttgttgtagaaaaaatctccccaatatctaatgaaataaataaaatacaaagagatattaattatatagataaagttctaaaagaaggaggtgaaagagcagacttaattgcttcaaaaaaagtcagtgaaatgaagaaaattattggattttaaa

SEQ ID NO: 301231 - DNA, 1024 bp, Unknown
  Bacterial polypeptide expressing nucleotide sequence isolated from the Sargasso Sea
atgagtaaaattaataacaatactgtcttatcaggggttcaaccatcaggtgatcttcatataggtaattatcttggggcaattaaaaattttgtaaacatgcaaaataactataattgttttttttgtatagttgatttacatgcgataactgtaaaacaagaccctaagattttaaaaagaaatactctagaagttgcagcaacttatatagcatccggtatagatccaaaaaatagtgtaatatttaatcaaagcagtgtatccgcccattcagagttagcttggatatttaattgcgttacaagaatgggatggttgaatcgaatgacacagttcaaagacaaagctgggaaagataaagagaatgccagttcgggtctatttatttatcctaatttaatggctgctgatatactagtttataaagcaacacatgttccagttggagatgatcaaaagcagcatcttgaactcactagagatattgcacagaaatttaatcgggattttaattgcgagaacttttttccgattcctgagccaattatagataagaatatttcaagaattatgtctcttaaagatgggagtcaaaaaatgagtaaatcagatctatctgaatactcacgtataagtcttttagatgagagtgatgaaattataaaaaagataaaaaaagcaaaaaccgcagatgcagtgatgccaggaaaaattgaggaagtaaaaaaattagctgaggttaataacttgcttaatatctattcaggtttttctgcaattgaaaaacataagctagttgaacaatatgaaggtcaaaatttttctaaatttaagtctgatttatctgatgtgttggtagaacgactaaaaccaataacaaaagaagttaaaaaactaatgcaagacataggctatctttcagaaatattattagatggccaaaataaagcaaatcaagttgcgcaaaaaacaattaatgatgtatatgacattgtaggactacatagaaatgaagcataga

SEQ ID NO: 301232 - DNA, 848 bp, Unknown
  Bacterial polypeptide expressing nucleotide sequence isolated from the Sargasso Sea
gatgggtaaaaaaatattttcaggagttcaacctacgggtaatttgcacttaggaaattatctaggagctattaaaagttttgtagaattaaataacgatgatgcaaacgagtgtattttttgtgttgtcgatttacatgcaattacaagcaaacaagatccaaaaaaacttagagataatataaggaaaacagtagcaacatttattgcttgcggaataagcccagaaaaaagtataatttttaatcaatcaactgtatctgctcattcagaagcagcatggttattaagctgtgttgcaaggatgggttggttaaaccgaatgacccagtttaaagaaaaggctgggaaagaaaaagaaaaagcgagcattggactttattcatatccaattttaatggctgctgatattttattatatgattcaactcatgtaccagtgggagaagatcaaaaacaacatctagaattgtgtagagacatcgctcaaaaatttaataatgattatggtgttgatgatttttttaaagtcccagagccgcttattcagaaacaattttctaggataatgagtcttaaagatggaacaaaaaaaatgagtaaatctgaattgtcagatcttggtagaataaatttaacagatgataaggatttaataattaataaaattaaaaaagcaaaaactgatccttttttgttaccttcagatgtgaataaattagaagagagacctgaggcaaaaaatctattaggaatatattcttgtttaactaattcatcattagacaaatcagttaaagaatttaatggtaaaaatttttcagaatttaaagaaaaattatctcaag

SEQ ID NO: 301233 - DNA, 1003 bp, Unknown
  Bacterial polypeptide expressing nucleotide sequence isolated from the Sargasso Sea
tatgtctaaaaaaattttttctggagttcaaccaactggaaatttacacctcggtaattatataggcgcaataaaaaattttgttgatttacaaaacaataaagataacaactgcattttttgtgttgttgatcttcatgccatcacagtaatgcaagatcctatagagttaaaaaataatattagagagacagcagcagcgtttatagcaagcggtattgatccaaaaaatagtataatatttaatcaatctttagttcccgcacatgctgagggttcttggattttaggatgtgttgccagaatgggttggctgaatagaatgacacaattcaaagagaaagccggaaaagacaaagaaaaagctagtgttggtttatatatttatccagttctaatggcctctgatattcttttatatgatgctactcatgtgccagtaggagatgatcaaaaacagcatctagaactctgtagagatattgctcaaaaatttaataacgaatataaatgtccagatctcttgagacctcctgagcccctaatacaaaaacatttttcaagaataatgagtctgaaagatggaacaaaaaaaatgagtaagtcagacattgctgcaggaagtaggatcaacttaacagacacagaggatcaaattgttaacaaaataaaaaaagcaaaaactgataatgatactttgcctggaaatgaaggtggacttaaaggtagacctgaagcagaaaatttaatgggtatttattctagcttaagcaatcaaaatattactcaaacattaaatgaatttgaggggaaaaatttttctgaactaaaaagtaaactttctgaaataattgtgactaagctgtcacctatatcaaaagaaattcaaaaattgttgtcagataaagaatatatagatcaaattttagttgatggtgcacaaaaagcgcagaatatttcctctaaaaaagtaaaaaaaataaaagaaatagttggtttttaa

SEQ ID NO: 301234 - DNA, 799 bp, Unknown
  Bacterial polypeptide expressing nucleotide sequence isolated from the Sargasso Sea
tatggacaaagttactaaaagaattttatcaggtgttcaaccgtcaggtgatttgcatttaggcaattatttgggtgcaattaaaaactttgtatctcttcaaaaagaatttgaatgttttttttgtgttgttgacctgcatgctatcacagtttggcaagacccaaaactattgaaacaaaaaacaagagaggtagcagctgcctttattgcctctggtattgatccaaaaaaaaatacattatttgtgcagtcacaagttccacaacatgcccaattagcatggatatttaattgtgttgcacgaatgggatggcttaacaggatgacacaatttaaagataaagcaggaaagaatagtgaaaatgtatcggtaggattattttcttacccaaccttaatggcagcagatattttaatatatttagctactcatgttccagtaggtgaagatcaaaaacaacacttagagttaacaagagatattgcacaaaaatttaatagtgattttaacacagatatatttcctatccctgagcctttgattttaggagaggcgacacgtgtgatgagtcttcgagatggtttaaaaaaaatgagtaaatcagatccatcagattattctagaattatgttgtcagatagtgaggaggagattgttaaaaaaataaaaaaagctaaaacagatccgcttcctttgcctgaaaatatagaagaagcaaaaaaaagacctgaggctattaaccttttaactatttatgctgctttacatgatttagatctaaagaatgtagttgat

SEQ ID NO: 301235 - DNA, 795 bp, Unknown
  Bacterial polypeptide expressing nucleotide sequence isolated from the Sargasso Sea
tatgttaaaaaaaattttttcaggtgttcaaccaacaggtaatcttcatttaggaaattacttaggggccattaaaaactttgtagaattaaataataataaagaaaataaatgtattttttgtgttgttgatcttcatgcaataactgttaaacaaaatccaaatgatttaagagataatattcgtgagacggtagcaacctttgttgctagtggtattgatccaaaaaaaagtattatttttaatcaatctagagtgtctgctcattctgaggcagcatggattttaagttgtactgcaaaaacaggttggttgagtagaatgactcaatttaaagaaaaagctggaaaagataaagaaaaagcaagtgttggcttgtattcctatcctgttttaatggctgcagatattttattatatgattctactcatgtgccagttggtgatgatcaaaaacaacatttggagctatgtagggatatagctttaaaatttaataatgattttggagttgatgatttttttaagttaccagaacctttaatacaaaaagaattttcaagaataatgagccttaaagatggtaaaaagaaaatgagcaagtcagacttgtcagattttagtagaattaatttgacagatagtaaggatcaaattgttaataaaatcaaaaaagcaaaaactgatactttgccaatgccatcaaataaaaacgagttagataatagagacgaggtaaaaaacctaattgggatatataccattttaacaaattcaagtttggaaaaagtttt

SEQ ID NO: 301236 - DNA, 1012 bp, Unknown
  Bacterial polypeptide expressing nucleotide sequence isolated from the Sargasso Sea
atggaaaaagttactaaaagaattttatcaggtgttcaaccatcaggtgatttgcatctaggcaattatttgggtgccattaaaaactttgtatctcttcaaaaagaattcgaatgttttttttgtgttgttgatctgcatgctattacggtttggcaagatccaaaaatcttaaaacaaaaaacaagagaagttactgctgcttttgttgcttctggtattgacccaaacaaaaatacgttgtttgtccaatcacaagttcctcaacatgctcaattgggttggatttttaattgtgttgctcgtatgggatggcttaatagaatgactcaatttaaagataaggctggaaagaatagtgaaaatgtatctgttggattattttcttacccaacattaatggcagctgatattttgatttatttggcaacacacgtccctgttggagaggatcaaaaacaacatttagaattaacaagagatattgcacaaaaatttaataatgattttaaaacagatattttccccattccagaacctttaatttttggagcagctacaagagtgatgagtttacgtgatggtctaaataaaatgagtaagtcagatccatctgactattcaagaatcatgatgtctgatagtgaggataaaattattaataaaattaaaaaagcaaaaacagacccgctcccgctccctgaaaacttagaagaagcaaaaaaaagaccagaagctataaatttactaacaatttatgcggctctaagtgatttagaagtagaaaaagtagttgctaattatgctggaaaagagttttcgcaatttaaaaaagatttgagtgaaattacatcatctaagttatcaccaatttctaaagaaattaataaattgatgaaagatgaaaagtatttagattccattattattaaaggcaaagagaaggctataaatgtagctgatccagtattatcaaaaatatatgagataattggcttttttaggggataaa

SEQ ID NO: 301237 - DNA, 1000 bp, Unknown
  Bacterial polypeptide expressing nucleotide sequence isolated from the Sargasso Sea
tatgaaaggaagaatattttcaggcgtgcaacccactggaaacttacatttaggaaattatttaggtgccataaaaaattgggttgaattacaaaaagagttcgaatgtatttactgtgttgtcgatttgcatgcgattacaataccaaggacaccagaagaaatacatgaagatactctagaggttactgcaggattaattgcttctggaatagatccaagtaagtcagttttatttaatcagtcacaggtgccacaccattctgagttagcttggatttttaattgtaccgctaagttaggctggttaaatagaatgacacaatttaaagagaaagcaggaaaaaatagagaaaatgctagtgtaggcctatatgtttatccaactttaatggcagctgatatcttagcctacaaggcaactcatgtacctgtaggacaagatcaaaaacagcatttagaattaactagagatatagcatctgcatttaattcttcatatgtaaaagagttttttcctttacctgaaccccagatattcgatacagcttctagagtaatgagtcttagagatgggttgtctaaaatgagtaaatcagatgcttcggactactctagaataaatcttagagacaccattgatgaaatttctttaaaatttaaaaaggctaagtcagatcctaacccgctgccttattcagtaaaagaattagaagataggcacgaagctaaaaatttagtcggtatttattcagcattatcaaaaaaaactgaaagagaagtacttaatgaatttggtggaaaaggatttggtgcttttaaacctgctttggcggatttagcagtttctgttttagagcctataaatcatgatcttaataagcttttggaagacaaaggttatttaattgatatattgaataaaggcgctcagaaagcagctaaagtatcaggttctgttttgtcagaagttcgcaatttggtcggatttgtaagataa

SEQ ID NO: 301238 - DNA, 1009 bp, Unknown
  Bacterial polypeptide expressing nucleotide sequence isolated from the Sargasso Sea
atggaaataccatcaaaaagaattttatccggcgttcaaccatctggtgacctccatttaggaaattatcttggtgctataaaaaattttgtttctcttcaaaaagaatatgaatgttttttttgtgttgttgatttgcatgccattaccgtttggcaagatccaaaagttttagcaaataaaactagagaagtaacagctgcctttattgcctctggtattgacccaaagaaaaataatatttttgtacaatcacaagttccccaacatgcacagcttggttggctatttaactgtgttgcaagaatgggctggttaaaccgtatgacacaattcaaagataaggcaggaaagaatagtgaaaatgtttcagttggtcttttttcctatccaactttaatggcagcagatattttaatttatttagctactcatgtaccagttggtgatgatcaaaaacaacatttggaattaacaagagatatcgcccaaaaatttaataatgattttaagacagatttttttcctattcctgaaccgttaattttaggggaggcaactagagtaatgagtcttcgtgatgggtcaaaaaaaatgagtaagtctgatccttctgattattcgaggataatgttaactgatacagcagaaaatattgttcaaaaaattagaaaagcaaaaacagatccagaaccactacctgaaaataaaactgatttagaaaaaagacctgaagctgaaaacttgatttccatatttgcttctttgaaagatacctcagttgaaactgtcattgatgaatattctggaaaagaattctctatttttaagagggatttagctgatttgtctgtctcaaaattggagccaattacaagtgaaatgaataaacttatgaatgatatttcgtatatcgattctgttttaaataccggaaaagataatgcaatttcagttgcagaacctgttttacaaaaaactaaagaaattgttggttttttgacataaa

SEQ ID NO: 301239 - DNA, 812 bp, Unknown
  Bacterial polypeptide expressing nucleotide sequence isolated from the Sargasso Sea
aatgaaaaaacgaattctaacaggaattacaacaactggcacaccacacattggaaattatatcggtgctattcgtcctgcaattgagatgacaaaagattctgatgaatctttctttttcttagcagattatcactcaattattaaaaatcaggactcagattctataaaaaattctgtaaagaatgttgcattagcatggttatcttctggattagacccaaataaatcctatttttataaacagtctgatgttccagaaataattgagttgtgctggattctaaactgcgtaactgcaaaagggttaatgaatagggctcatgcctataaagcagcaacgtcaataaatgaaaatgatcctgataaaggaattacaatgggattattctcatatcctgtactaatggctgcagatattcttatgtttgattcaacacatgttccagttggatcggatcaagttcaacatctagaaatgacaagagatattgctgctagatttaaccacttatataaaccaattttaactctaccagatcctattattcaggataaagaaaatgtagttcctggattagatggacgaaaaatgagcaaatcttatggaaatgttatacctcttttggaaagtgaaaagatattgaggaaatcagttatgaaaattgttacaaattctttggagcctggggagccaaaagattcatcagattgtactatttttagtttgtttaaaaattttgttgatgattcagagatgaaattaatacaaaaagcctataacgagggcattgcttggggtgaggccaaag

SEQ ID NO: 301240 - DNA, 664 bp, Unknown
  Bacterial polypeptide expressing nucleotide sequence isolated from the Sargasso Sea
aatggaaaggtcaacatcttataaggataaaattgataaaggccttaccccgcatatgggattattttcatatccagtacttatggctgcagatattttactttatggtagtaatgtagttccagttggtaaagatcaaaaacaacatcttgagattactagagatatagccattaagtttaataatacatatggggaaatattaattgttcctgaggcagatattgaagaaaaaacaatgttagttcctggaatagatgggcaaaaaatgagtaaatcttatggcaatacgattccaatctttgcggatgataataaattgaaaaaaatagtaatgtctatagtgactgattctgctggtattgatgagccaaaagataaaaatacaccgctatataaattatattctctatttctgaataatgatgaaaagaaaattttaagtgaccgttatgatacgccaggtctgagatatggtgatattaaaaaagagctccttgaaaaaatctacgaacattttagcccatataaaaagaggagggagtatttatttaacaacctcgatgaagtagatgatatactcaaccaaggtcgagaaaaggctactgtagtagcttctgaatatattaataaaacgcgcaaggcaatgggcatagcttattaa

SEQ ID NO: 301241 - DNA, 745 bp, Unknown
  Bacterial polypeptide expressing nucleotide sequence isolated from the Sargasso Sea
atgcacaaccccgttatcctgaccggcgaccgccccaccggcaaactgcacatcggccactacgtcggctccttgcgccagcgcgtggccgcccagcaccattaccgccagttcgtgatgatcgccgatctgcaggcgctgaccgacaacggccacaacccggccaaggtgaccgaccacgtgctggaggtgatggccgactacctggccgccggtctcgacccagccaagaccaccttctgcctacagagcgccctgcccgccctcgccgaactgacgacctattacctcaacctggtcagcgtcgcccggctggagcgcaaccccaccgtcaaggcggagatccagcagaaagggttcgagcgcagcctgccggccggctttctgatctacccggtcagccaggccgccgacatcactgcctttcgtgccacccatgtgccggtgggcgaggatcagctgccgatgctggagcagaccaacgagatagtgcgccgcttcaataccctggttggcaaagaggtgctgaacgagtgccaacccattctgagcgacaccggccgcctgcccggcatcgacggcaaggccaaaatgtccaagtccctcggcaacaccatagagctcggcatgtcggcggaggagatcaagcaggcggtattcgccatgtataccgaccctaaccacctcaaggtgagcgatcctggccaggtggaaggcaatacggtgttctcctatctggatgcct

SEQ ID NO: 301242 - DNA, 799 bp, Unknown
  Bacterial polypeptide expressing nucleotide sequence isolated from the Sargasso Sea
ttagcgagcggcatagatcctaaaaaaagtattatttttaatcaatctttagtatcagcccactcagaaggtgcatggattttagggtgtgttgctcgaatgggttggttaaatagaatgacacaatttaaagaaaaggcaggtaaagataaagaaaaagcaagtgttggtttatatatttatcctgttttgatggcagcagatatattgctatatgatgcaacacatgtgcctgttggcgaagatcaaaaacaacatttagaattatcaagagatattgcgcaaaaatttaatttggattatgacgcaccaaattttttaaaagttcctgaacctttaatacaaaaaaaattttcaagaattatgagtctaaaggatggaactaaaaaaatgagcaaatctgatccttcagacttaagcagaatcaatatgactgatacaaaggatcagattgttaataaaattaaaaaagcaaaaactgatcctgatctattaccaagtactgataaagattttcaaaaaagaccagaattagaaaatcttttaggtatctattcaagtataaaaagtcagtctttattagaaagtattaatgaatttagtggaaaaaatttttcagatcttaaagataagttgacggaggcaattgtcgaaaaaattacgccaatatctaatgaaataaataaactgcaaaaagattctaagtttatcgatgacgtcttacatgaaggtgcacaaaaagcagaagagatcgctagtaaaaaagttaaagaaataaaaaaaattattggtttttgat

SEQ ID NO: 301243 - DNA, 1036 bp, Unknown
  Bacterial polypeptide expressing nucleotide sequence isolated from the Sargasso Sea
atgaaaagcttacaatcagatgatttacaaaaaagaattttttctggaatacaacctacaggaaatttacatcttggtaattatttaggagcaattaaaaattgggttaatcttcaaaatgatatttcttcaattttttcaatcgtagatttacatgcaattacagtacctcaggagccaacaaaacttaaatcttctactcatgaagttactgctgcaattattgcttcaggcatagacattgataagtcaatacttttcaatcaatcctcggttaaagaacatgctgaattagcctggatattgaattgtgtatgtagaattgggtggttgaatcgtatgactcaatttaaagaaaaagctggcaaaaatagagaaaattcttcagttggtttatatggatatccagttttgatggctgcagatattctcttatacaaatcaactcacgttcctgttggtgatgatcaaaaacaacatatagaattggctagagatattgcatcttcttttaacaatatgtttacttccgatgaagaagacgacttttttaatttacctgagccacaaattataggtgaggccactcgtgtaatgagtttaagagatggtacgaaaaaaatgagtaaatctgacgcttctgacgcttctcgaattaacctaactgacactgcagaggaaatatcaaacaaaattaaaaaagccagaactgatcctcatccactgccagatactatagaggagctaaaagatagacctgaagcacataatttaatgaatatttattcttcattatcagatcagacattagaaaaagcattaacagaattttcgggtaaaggtttttcctattttaagccaagattgatagatttggcaattgaaactttaagtcccatttcacgtgaaatgagaagtctcctaaagtatagaaatgaaatcgataaaattttaaaaaatggagaacaaaaggctaaagaaatagctgagccagttttaaaagatgttaaaaatttagttgggtttgttaattgat

SEQ ID NO: 301244 - DNA, 1003 bp, Unknown
  Bacterial polypeptide expressing nucleotide sequence isolated from the Sargasso Sea
tatgaaaaaaaaaattttctctggtgttcaacctactggaaatcttcacctaggaaattatttaggggccataaaaaattttgtagatttaaacaacgagactcaaaatgaatgtatcttttgtgtagttgatcttcatgcaataacggtaagccagaatccaaaagatttaaaatcaaatatatatgagacagtagctacatttgttgctagtggaatagatcctaaaaaaagtataatttttaatcaatctcaagtgagtgctcactcagaggcagcgtggattttaagctgtattgctagaatgggatggctaaataggatgactcaatttaaggaaaaagctggcaaggataaagaaaaagcaagcatcggtctttattcttatcctgttttaatggcagctgacattttattatatgactcaacccatgtaccagttggagatgaccaaaaacaacatttggagttatgtcgtgatatagctcaaaaatttaacaacgattataaagttgaaaatttttttataactcccgaacctttaattaaaaaagaattttctagaattatgagtttaaaggatggtcttaaaaagatgagtaaatcagaggtatcagacttgagtagaattaatttaactgatgataaagatcaaataataaataaaattaaaaaagcaaaaactgatactttgcctttacccagcaaaattgaggaattagaaaaaagacctgaggctaaaaatttaatcggcatttattcaagtttgatgaataaaacactccaaaaaacgatcgatgaatttgctggaaaaaatttttcagaatttaaagaaaaattatcagaaatagttgttaaagaaataaatccaatttcagcaaaaattaaagaactattagatgataaagcttatttagaaaaaatacttaaagatggatacgataaagctaatgaaattgcctcaaaaaaaataaaaaaaattcacgaaatcgtaggtttttga

SEQ ID NO: 301245 - DNA, 644 bp, Unknown
  Bacterial polypeptide expressing nucleotide sequence isolated from the Sargasso Sea
gaaagcagatccagataaaggagtaacgatggggcttttttcttaccctgttttgatggcggcagacatcctcatgtttaaggccacacatgtgccagtaggtcaagatcaggttcagcatattgagatgacaagagatattgctcagcgctttaatcatcaatatggagagatttttgtaataccacaaggcgttatagatcaagaatctgctgttttacctggtttggatggaagaaagatgagcaaaagttatggaaatattatccctcttttctgtgattcaaagacacttagaaaacatgttatgaagatcaaaacaaattcattagagccaggtgaaccgaaatcaagtgaaggctgtttattgtttgatatttacaagagctttgcatcagattcacaaatcagttcaatgcaaaaggatcttgaagatggaatatcttggggtgatgcaaagaatcaactttatgagctgcttgatgagcagctttctagttatagattgagatatgatgaattgatgaatgatccatcttaccttaataaggtacttcgagatggagcagaaagggcaagagaggttgcacatactaacttaaatgagattaaaagcgtcaccggcctgggttcattgagttaat

SEQ ID NO: 301246 - DNA, 1003 bp, Unknown
  Bacterial polypeptide expressing nucleotide sequence isolated from the Sargasso Sea
aatggctaaaaaaatattttctggagttcaaccatctggtaatttacaccttggtaattatttgggagcaataaaaaactttgttaatcttcaaaacgaagagaataatgaatgtgtttattgtgttgttgatttacatgcaattacagttaaacagggtccaaatgaattaaaagatagtattagagagaccacagcagcttttttagcaagtggtcttgattacaaaaaaagtattatatttaatcaatcatcggtagctgctcacagcgaagtatcatggatattaagttgtacagctagaatgggatggcttaatcgtatgactcagtttaaagaaaaagctggcaaagataaagaaaaagcgagcgttggattatatatttacccaatcttgatggcagctgatatattattgtatgactctactcatgtaccagttggtgaagatcaaaaacaacatttagaattatgtagagatattgcccaaaaatttaatatagaatttaattgccaaaattttttagttgctcctgaacccttgattcaaaaaagttttagtagaattatgagtctaaaagatggaacaaaaaaaatgagcaaatcagacccttcagatttaagtaggataaatttaaatgatagcaaagatacaattattaacaaaattaaaaaggcaaaaactgatgacaaaactttaccttcggataaaaaaaatttaaatgaaagacctgaagttgaaaatttgttaggaatatattcgagcttatctgatcaaaacttagagtcaactgttaacgaattttcaggaaaaaatttttctgaattcaaaaaaaagctctccgaattagttgttgagaaaatatcaccaatttcagatgaaattaataagttatataaagataaagaatttattgataaaattttaaatgatggggcagaaaaagccaataaaatagcatcaaaaaaagttagtgaattaaaaaaaatagttggtttttag

SEQ ID NO: 301247 - DNA, 883 bp, Unknown
  Bacterial polypeptide expressing nucleotide sequence isolated from the Sargasso Sea
tgtgttgtcgatttacatgcaattactacaaaacaagacccccaaaaattaaaagacaatatccttgagacgactgcagtttttttagcaagcggaattgatccaagcaaaagtataatatttaatcaatctatggtacccgctcactcagagggaacatggatacttagctgtattgcaagaatgggttggttaaacaggatgacccagttcaaagaaaaagcaggtaaagataaagagaaagcaagtgttggattgtatatttacccaattttaatggcagctgatattcttttgtacgatgcaactcatgttcctgttggagaagaccaaaaacaacatttagaactcacaagagatattgcccaaaaatttaatacagattttaaagtacaagatttttttaaaataccagatcctctgatacaggaaaaattctctcgtattatgagtcttaaagatgcgaaaaacaaaatgagcaaatcagacccatctgatgctagtcgtataaatctcactgacacagaagaacaaatccataataaaattaaaaaagcaaaaactgatacaaaatcatttcctgcagatgaaaaagatttgaacaaaagaccagaaatacaaaatttgattggtatatactcaagtttaaaatcccaaaaaattacacatacaataaatgaatttgagggaaaaaatttttcaaattttaaagaaaaactatcagaggttgtgatagaaaatatttcacctatttcaaaagagatatcaaaattaaaatcagataagggtcatattcttcaagttttaaaagatggaagtgaaaaagccgaagcaattgcttcagaaaaagttaaaaaaattaaagaaattattggcttttaaa

SEQ ID NO: 301248 - DNA, 778 bp, Unknown
  Bacterial polypeptide expressing nucleotide sequence isolated from the Sargasso Sea
aaaagtattatatttaatcaatcatcagttagtgaacatgcagaacttgcatggatcttgaattgtgtttctagaattggctggatgaatcgaatgacacaatttaaggaaaaggcgggaaaaaatagagaaaatgcaagtgttggactttatgtttatccaaatttgatggcggcagatatcttattatataaggcaacacacgttcccgttggagatgaccaaaaacaacatttagaacttgtaagagatattgcacaaaaatttaataatgattttaaatcagaaaatttttttcctactcctgaaccattaattcaaaaaaaactctcaagagttatgagtttaagagatggaaaaaataagatgagtaaatcagatgagtctgaatattctagaattaatctccaagatagcgaggatgaaatcagtaaaaaagtaaaaaaagcaaaaactgactcacaacctatcccatctaaaattgaagatttaaaaaatagacccgaagctttaaatttgataaatatctactctttcataacagataaaactttggaaaaaactttagtaaatatggcgggtaaagatttttctaaattaaaaaaagaactttcagatgctttaatagctacaatttgtcctatcggaaaaaaaattagagaactaaaaaaagacgagaagcatttgatagagattctcaaaaacgggtcaaatagagcaaaaaaaattgcaaaaacaaatataaataaagtaaaagatattgttggatttatttaat

SEQ ID NO: 301249 - DNA, 229 bp, Unknown
  Bacterial polypeptide expressing nucleotide sequence isolated from the Sargasso Sea
aatgagtaaaaaaatcttttctggagtgcaacctactggaaatttgcatttaggtaactaccttggcgcaataaaaaactttgtaaatcttcaaaaagaaaaagacaacacatgtatttattgcgttgttgatttgcatgcaattacagtaaaacaggatcctaaaattttaaaaaaaaacattagagagacaacagcttcattcttggcaagtgggttagactcaaaa

SEQ ID NO: 301250 - DNA, 592 bp, Unknown
  Bacterial polypeptide expressing nucleotide sequence isolated from the Sargasso Sea
cttgttatatgatgcaactcatgttccggttggagaagatcaaaaacaacatctagaacttactagaaatatagctcaaagatttaatggagattttaactgtcctaattttttaaaaatacctgaaccacttatccataaagatttttcaagaataatgagtttaaaagagggaactcaaaaaatgagtaaatcagatccatctgatcaaagcagaattaaccttacagatacaaaagatcaaattgtcagtaaaattagaaaggcaaagacggatagcgaaccctttcctgaaaatattaatgaactcaaaaatagatatgaattaaaaaatctacttggcatatattcaagtttgaaaaatcaaaatttagatgaatcaattaatgagtttagtggaaagaatttttcacagttaaaagaaaaattagccgaagttttagtagaaaaaatttatccaatatcaaatgagattaataagttgttaaaggaccaaaagcatatagacgaaattttactagatggatcaaaaaaagcagaaaaaatttcaaaaaaaaaggtagatgaaatcaaaaaaaaaataggattttaa

SEQ ID NO: 301251 - DNA, 328 bp, Unknown
  Bacterial polypeptide expressing nucleotide sequence isolated from the Sargasso Sea
aatgaaatttacattagactggctaagagaacatttagatacttctgaaaatttaaataccataacagatactttaaccaatattggtttagagattgaaagtgtagaagataaatcagaaatatttaagaattttacagtagctaaagttttaaaagcagaaaaacatccagatgcagataaacttaaagtatgtcaggtagaaacaataagtggaaattatcaagtagtgtgcggtgctccaaatgcaagagaaggaatgcttggaatttttgcaccagaaaatagttatattcctggaacagacttacatttaaaaaaaactaaa

SEQ ID NO: 301252 - DNA, 457 bp, Unknown
  Bacterial polypeptide expressing nucleotide sequence isolated from the Sargasso Sea
atgtctgatattaaaaaaataaaagatgattatatcgctaagcttaatacagaaaataacattgaaaaagtaaataacatcaaatccgaactatttggaaaaaatggaattatatcgaacgaatttaaaaaattaggttcgatttctgtagaggaaagaaaaaaattagcctcagatttaaataatattaaagatgaacttcaaaataaaatattaatcaaaattcaagaaattgaaactaaagaaattaatttaaagcttgagaaagaaaaaattgatgtaactcttccagaaagaaatattgaaattggtaaaattcatccagtctcccaggtaatagatgaaatttcatctatattttctgagattggatttagtgttgaggaaggcccagatgtagaaaatgagtataataattttacagcattaaatacaccagataatcatccagctagag

SEQ ID NO: 301253 - DNA, 601 bp, Unknown
  Bacterial polypeptide expressing nucleotide sequence isolated from the Sargasso Sea
aatgaaattaacaagagaatggcttaaagatcatttaaaaactaataaaacagagttacaaataattgaaaaattaaacaatattggtctagaggtagaaaaagttgaacctgtaaaaaatgaattaagcgattttcttattgctaagataatcaaagcagaaaaacatcctaatgccgatagattaaaattgtgccatgtagatattggtcaaaatgatttagtaaaagttgtttgtggtgggccaaatgcaaaagataatttactcacaatatatgctcctccaggatctgtaattccaaaaaataacatgaaattggagatttcaaaaattcgaggagaaacatcctatggaatgctttgctcagaatcagaattaaatatatcggacgaaagcgacggtataatagagttaaataaaaaatataaatcacaaataggaaaaagttattttaacgaatctcaagataacgttatagaattatcaataactcctaatagacctgattgtttgggtataagaggtatagctagagatttatcctcagctggatttggaaaattaatagataacaaaattaaaaaagtaaaaagaagtggg

SEQ ID NO: 301254 - DNA, 305 bp, Unknown
  Bacterial polypeptide expressing nucleotide sequence isolated from the Sargasso Sea
aatgtcatctaacaaagacatttcacctcctaaaataattaaggacagaggctcaattcatccaataaataacatgaaagactcaatcatgagtctactagtttcatttggctttgaaattgttgatgggcctgaagttgaaacagaggagtttaattttgatatgctcaatatcaaaaaaactcatcccgctagacagatgcatgatactttctatgttgaaaaaaaatcaaaccttttaagaacccatacttcaccagttcaaattagagggatgttagaaaaaaaaccacccttagccttta

SEQ ID NO: 301255 - DNA, 921 bp, Unknown
  Bacterial polypeptide expressing nucleotide sequence isolated from the Sargasso Sea
gaatatccagggaaattcaagtcaaaaaatatatccattagaagaagtgaattggatttatttgctggttgcaaaataacagataaagaagtaaaaatgattcttgatggtttaaatatcaaacatgaaaagaaaaaagatttttggaaatgtacgcctcctagttttcgtccagatttagaaagggaagcagacttaatcgaagaaattattcgtgtgtatggatatgataatattccttctgctatgaattattcatcttcttacttattagaacgcccggatccagaacagtcattagaggatttgcggaatttattttacgcctttgggtatcaagagtgtcaatccaatacgttgcaaagcaagcactggactacgattcatggaaaaaaatcgatcgccatgatgaatccgctgacagagcatatgacgcatatgcgaacagatttattacctggtttattagaagcactggattttaatattaaaaatggttcttctgatttgtatttatttgaactcggaaatatttttttacaggaaaagaaaggatttgctggaatgaaagagattcctatggtttgcggaatcatgcacgggaatcgagtatccctttctgctcatgaccaggcaaagcctgtaacggtatttagcgttatgggtcatatagatagattatgcaatgttcttggtgtaaatgcgcccacgtatgatccattagaaatgaaagggtatcaaaaagcatttacagtttgcatgggaaaagaggaaataggtgttttaggaacggtagatccagattttatacaaaatctaggattggaaattgataatccagtccattgttttaatttagaagtaaataagttagttccgctaatgcaacatgaacaaaaattttcaccaattaatgtgtat

SEQ ID NO: 301256 - DNA, 951 bp, Unknown
  Bacterial polypeptide expressing nucleotide sequence isolated from the Sargasso Sea
gatgaaatttacaataggctggcttaaggaacaccttgatacaaagttcaaggatagcgaaataattgagaaattgactgatgttgggcttgaagttgagagctttgaaaaggtcagttccgacttagataattttaaagtggcaaaaattataaatgcagagcaacatccaaatgcagacaagcttaaagtatgtgatgttgatattggtgaacaagatactgtaaaagttgtttgtggagcacccaatgcaaagaaagaccttttgactgtttatgctggtcctggatcagtaattccaaaaaacaacatgaaactagcagttagtaaaataaggggcgtaacttcatatgggatgttatgttcagaatcagagttaaatttatctgatgaaagtgacggaataacagaactaaagtcaaataaatattcagacaaagtaggaaaaattttttttaaaaataatactgaaaaagttattgatttatcaattacccctaaccgacctgattgtttgggggtaagaggagtagcgagagatcttgcagcagcaggagtcgggaaattaaaacatacttcaaatataaaaattaaaaataacggtgctcaaaaaattaaagtttctattacaaaagaaaaaaatcaaggctgcactatttttggtagttgcctaattaaagatgtagcaaacaaagaaagtccaaaatggctaaaagataaaatcgagtcattaggtcaaaaacctatttcagccattgtagatataactaattatgtaatgttagatttaaacagaccgctccatgcatacgatgcagacaaaatcgataaggaaattattgtaagaaattcggtaaaggatgaaacttttgaagctcttgataataaagaatataaattagataacgatatgtgcgttatctctgataagtctggggtattaggtttagg

SEQ ID NO: 301257 - DNA, 670 bp, Unknown
  Bacterial polypeptide expressing nucleotide sequence isolated from the Sargasso Sea
ttttaagaataatgacctcatccaagaagaagttttgaatggagcaatttttggcaatagaaaatttggagaatgggtatattcaggcaaggataacgatcttaattattaccaagctagaggaaagttgaatgaagctttatcatgtttgaatattaaaattgacgataaacctactaattcaattgattttcttcatccaggaagaacagcgaaattatttattgaaggtaaagatgcaggatattttggtgaaattcatcctaaacttatattacaaaagaaggctttaaaaaaagtttatttatttagcctaaatgtaggcattctcttgggagctagtacaaggaaaaataaatggattccaatttataggcaatacccaactgtcccaaaaattgaacgggatattaattttattttcagtaaaaattatttaattagcgaaataacatcagaaataagaaaaacaggaaaaaatctgttagaggatgtaaatttaattgatgtttttgaggatattaatctaggagatgattttgtaagttatacatttcgattatcttatagagataaagataaaacattacttgattcagatattacctcaattcactcaaatattgtttctaaagttgaaaaaagatttaatactaaattaaggaattaa

SEQ ID NO: 301258 - DNA, 925 bp, Unknown
  Bacterial polypeptide expressing nucleotide sequence isolated from the Sargasso Sea
atatgaacttggtatctcaaatgagcatgatggaataattcgacttgatgaaaaagaaactattggaagatctttttcagagatttatggccttaatgatattgtaatagaaattggtatcactcctaatcgacaagattgtctaggtgtaaaaggaattgcccgagatcttgcttcagctggtatgggggaattgatagagagaaaaatatctaaagaaaaaggctcctttaaatcaccaattaaaattgaaatacaagataataaaatatgctcggcttttgctggaagatattttagaaatgtaaaaaatactgaaagccccgagtggcttaaaaacaaacttaagtcaataggtttaaggccaatatctgcgctggtagatataactaattttgtaatgtatgacgagaaccggccacttcatgtttacgatgcagacaaaataaatggcaaaattatagtacgcgctgcaaatgatggagaaagtttcctagcgctagatgaaaaagattatcacctaaaaaatggtatgtgcgtaatagcggatgaaaaaaaagtactaggcttagggggtatcatgggtggcgaaagtacaggttgcagcactgagacaaagaacgttttacttgaatcagccttatttgatgagattaatacagccaagacgggaagaaacttgtcaattctaagtgatgcaagatatcgttttgaaagaggcattgatccaaattcaactttaaaagggatagaccttgcaacacaattaattcttgaaatatgtggtggtgagtgcagtgaggttgagttggctggaaatataaaagaaaataaaaatgaggtatcaacttctagtagttatatttcgagaagacttggttttgaagtgtctgacaaagaattgatatcaatacttagttcttta

SEQ ID NO: 301259 - DNA, 676 bp, Unknown
  Bacterial polypeptide expressing nucleotide sequence isolated from the Sargasso Sea
atgaaattcacactatcatggcttaaagaccatcttaccacaaatgcaggtttggatgagatttgcgataaattaaatatgattggcctcgaagtagaggatgtttttgatccatctgagatttacaaagattttaccatctgtgagatttcaagcataaaaaaacatccggatgctgataagttaaaaatttgtactttaaatactataaacggaatacaggatgtggtttgtggggctaataacgtcaaagaaggtatgaaagcggtttttgctccagaaggctcttacattccaggactatcaatgaccttacaagccacaaagatccgaggtgtcaagtcaagtggaatgctactttctgagagagaattgtcactttctgatgagcatgatggtatattggagctagatccaaaatctcaaattggtaataatatttacgatcaaattaataagtcagaccccgtaattgaaatatccataacacctaacaggtcagatgcactcggtgtgagaggtattgcgcgcgatctaagcgcagcgaatatcggaaaattaaagcccctgaaagcgacaaagattattggaaagtatgatattccaaaaaagataaaaataaataaagatgtcgaaaataatatatatgcaagctttagattaattaaaatataaa

SEQ ID NO: 301260 - DNA, 382 bp, Unknown
  Bacterial polypeptide expressing nucleotide sequence isolated from the Sargasso Sea
agaattgagaacgttttgggttttgaaatctttttagataacataccggaaacaagaaaaaaaataagagaaaagaaacctcaatttgttatttcggattaccaaaaagtggttagagattttgctttcgttattgatgaaaaatatagttctggagaaattattaatttagttaaaaaagtagatgataaattaatcaaacatgtaaaaatttttgatgtttatcaaggagataatattacccaagggaagaaatctattgcatttaatgtaactttagaacctaaagataaaactttaagtgaaaaagatatcgatcaagtaagcaaaaaaattatatctaaagttcaagaaataactggcgctaccttaaggtcctaat

SEQ ID NO: 301261 - DNA, 838 bp, Unknown
  Bacterial polypeptide expressing nucleotide sequence isolated from the Sargasso Sea
tgaaaaattaacctttattgggcttgaagttgaaagttttgaaagtatttcaagcgagcttgataatttcaaagttgtcaaaatagttagtgctgagcaacatcctaatgcagatagactaaaagtatgtgaagttgatacaggcaaaaaaaatacaatcaaagtagtttgtggcgctcctaatgcaaagaaagatcttataacaatttatgcttccccaggaactgttattccaaaaaataaaatgaaattatctataagcaaaataagaggtgtaacatcttatggaatgttatgctcagagtctgaattaaatatttcaaatgaaagtgatggaataatcgaactttcttcaaaaaaataccaaaataaaattggtaataaatactttaaaaataatagtcctaaaatactagatttatctattactcctaacaggccagattgtttaggcgtaagaggtgttgcaagagatttagccgcagctgggtatggaaaattaaaaaaaattaatcataaaaaattaaaactagatggatcacaagacataaaaatttcaatcaaaaaagagaagtatcaaggatgtgagtccttcggaagttgtcttataaaaggtattaagaatgtagaaagtccacaatggttaaaaaataaaattatatcacttgggcaaaaaccaatatcagcggtagtcgatatcacaaactatgtgatgatagatcttaataggccattgcatgcatatgatgcagataaaattgataaagaaattatagttagaaattcaaaaaaaggtgagtcatttgaagcacttgataacaaaaaatatattccttga

SEQ ID NO: 301262 - DNA, 869 bp, Unknown
  Bacterial polypeptide expressing nucleotide sequence isolated from the Sargasso Sea
tgtcttgggtgtaaaaggaatagctcgagatcttgcctcagctggcatgggggaattgttagagagaaaaatatctagagaaaaaggctcctttaaatcaccaattaaaattgaaatacaagataataaaatctgctcagccttcgctggaagatattttagaaatgtaaagaatattgaaagcccggaatggcttaaaaataaacttaagtcaataggtttaaggccaatatctgcgctagtcgatataactaattttgtaatgtatgacgagaaccggccacttcacgtttacgatgcagataaaatagatggcaaaattatagtgcgttcagcaaatgatggagaaagtttcctagcactcgatgaaaaagattatcagctaaaaaatggtatgtgcgtaatagcggatgaaaaaaaagtactaggcttaggggggatcatggggggcgaaagtacaggttgcagcactgagacaaagaacgttttacttgaatcagccttatttgatgagattaatacagccaagacggggagaaacttgtcaattcaaagtgatgcaagatatcgttttgaaagaggcattgatccaaattcaactttaaaaggaatagaccttgcaacacaattaattcttgaaatatgtggtggtgagtgcagtgaggttgagttagccggaaatataaaagaaaataaaaatgaggtgtcaacttctagtagctatatttcaagaagacttggttttgaagtgtctgacaaagaattgatatcaatacttagttctttaggaattaaaacgagccaaacaggtaatgttatcaaatgttcaataccttcttggagacaagatattcacggagaagctgaca

SEQ ID NO: 301263 - DNA, 352 bp, Unknown
  Bacterial polypeptide expressing nucleotide sequence isolated from the Sargasso Sea
gatactggcttagaagtggagtccataatagacccaaaaaagcgtttgggaaaattgtctgtaggagaaatactgagagtggaaaaacacccaaatgctgacaagttgaaaatatgtgaggtaaagtcaagtacaggaataatcaacatagtttgtggtgcaccaaatgttaagagtggtatgaaagtggtagtcgctaggccaggagattttatacctggattagatgttcacctaaaagcctcaaaaatcagagatataaagagtgagggaatgatgtgttcagaaagggaattagaaatttgtgatgaacatgatggaattatagaattaccctcaaaaacagaagtgg

SEQ ID NO: 301264 - DNA, 829 bp, Unknown
  Bacterial polypeptide expressing nucleotide sequence isolated from the Sargasso Sea
catgtttatgctagtccaggatcaataataccaaaaaataaaatgaagcttacagtaagtaaaattagaggagtcacttcaagcggaatgttatgttcagagtccgaattgaatttgtctaatgaaagcgaaggcataacagagcttaaacaagcgaaatactcagatcaaataggaaaaaatttttttcaaaacaaaattgaaaaagtagttgatttatcaataactccaaatcgtcctgactgtttaggtgtgagaggtatagccagagatcttgcagctgctggagtaggtaaattaaaaaaaattcagattaaaaatattaaaaaagaaggatctcaaaacattaaaatttcaatttctaaagataaaaatcaaggatgtactatatttggaagctgtttgattaaaggcgttaaaaacaaagaaagcccaaagtggttaaaagataaaattgagtcacttggtcagaaaccaatctcagcaatagttgatataactaattatgtaatgtttgatttaaatagaccgcttcacgcttacgatgcagataaaattgacaaagaaatcattgtgagaaattctaaaaaaggtgaaacttttgaagcacttgataacaagagatataaacttgataataatatgtgtgttatatctgataagtcaggtgtattaggtttaggtggtataatcggaggtacacgatctggaactgaatttaatactaaaaatattcttttagaggccgcatattttataccgagatctataagaaaaacttcaaagctattaaatatagatacagatgcaaagtttagatttgaaaggg

SEQ ID NO: 301265 - DNA, 721 bp, Unknown
  Bacterial polypeptide expressing nucleotide sequence isolated from the Sargasso Sea
tcatttagatacttctgaaaatttaaatactataacagatactttaaccaatattggtttagagatcgaaagtgtagaagataaatcagaaatatttaagaattttacagtagctaaagttttaaaagcagaaaaacatccaaatgcagataagcttaaagtatgtcaggtagaaacaataaatggaaatttccaagttgtctgtggtgctccaaatgcaagacagggaatgctaggtatttttgctccagaaaatagttatattcctggtacagacttacatttaaaaaaaaccaaaataagaggagttgagtcctgcggaatgcttgtatcagaaagagagatgggtatttctgacgaacacgatggtattattgaaataaaagataattataaaattggtgatttttttagtaaaatttttacaatagatgaacctgttattgaaattaatttaactccaaatagatctgactgtttatcagtcagaggtatcgcaagagatttatcggcagcaggaattggtaaattaaaagatataaattataaaaaatcaaaagaatcattcaaaagcccaattacgtggaaaaaagaatttcaaaataataatctatgtcctggagtagcaggtcgatattttaaaaatgtcaaaaatgtagaaagccctaaatggcttcaagatagattaactgcaatcggattaagaccaatttcagctctt

SEQ ID NO: 301266 - DNA, 511 bp, Unknown
  Bacterial polypeptide expressing nucleotide sequence isolated from the Sargasso Sea
tatgaaatttacacttagttggttaaaagatcatttagatacaaatgaagatcttgagacaattgttgatacactaacaaacattggactagaaattgaaagtgttgaagacaaatcaaaagattttaatgattttactgttgctgaagtgcttaaagctgaaaaacatcctgatgcagatagacttaaagtttgtaccgtaaaatcaatagatggaacatttcaagtagtgtgtggtgcccctaatgcacgagaaggaatgaaaggtatatttgcaccagagaatagttttattcctggcacaggagtgaaattaaaaaaatctaaaattagaggagtagagtcatgtggcatgttagtttcagaaagagaaatgggaatatctgatgagcatgacggtataattgaagttgactcaaaatattcattgggggaaaaatttatagaaatatttaatcttgatgaccctattattgaaataaacattacaccaaatagaggagattgtctt

SEQ ID NO: 301267 - DNA, 934 bp, Unknown
  Bacterial polypeptide expressing nucleotide sequence isolated from the Sargasso Sea
ctgagtggtgaaacaaaaattaatcgctattgccttaatccaatcaacaacattgttgatgttacaaattatgtcatgtatgaatatggcacaccacttcatgcatttgatgctgatagtttaaatggtaaaattgttgttaaaaatgctaataaaggatccgaattcataacattagatggcgtttctcataaaatgaaagaccaccatttaatgattacaaatggaaaagaaaacctttgtattgcaggtgtttttggaggagaaaattctggaataacaaataagactaaaaatatatttttagaatgtgcttattttgatcctacctgcataagaaaaaccgctaaagatttaggtctaaatacagacgcaagttttagatttgaaagaggaattgattcctctagcctaacagattcaatcaaaagagccgctctactcattcaagaattaacgaagggaaaaatttcaatgccacttaaatgcgttggatcaaaattagatgattttaaaaccgttaatttcaatcctaataaagcaagaactttaattggaacggatataagtgatgaactcattaagcaaattcttaatgaactagaaattgacatttgctcctcagaaaatgaaaattgggaattaaacgttccaagctatagagttgatgtaaacagacatgcagacgttgtagaagaagtattaagaatttatggatttaataaaattgaaataccaaacaaattaaatacatccattccttcctttgcgaaacctgatcttgaaaaagtcaaagaaaacatttctaatatgctggtttcaaagggatactttgaggtcttaaacaattcattaagtaaattaaaatatcttgaatttgataatgaatcatcttcagcgattcacctattaaatccattgagtcaagacctga

SEQ ID NO: 301268 - DNA, 131 bp, Unknown
  Bacterial polypeptide expressing nucleotide sequence isolated from the Sargasso Sea
aatagattctgagaattggactggttttgcagcgggattaggagttgagagattttgtatggtgagacatcaaatcgacgacatcagaaaattttatacaaatgatattagattcttagaacagttctaat

SEQ ID NO: 301269 - DNA, 899 bp, Unknown
  Bacterial polypeptide expressing nucleotide sequence isolated from the Sargasso Sea
ctttatagtaaaaatagaaaaaagcaaaaatcaagcttgtacaatctttggtagttgcctcattaaaaatataaaaaatcaagaaagtccagaatggttaaaaaaaagaattctttcattaggattaagaccaatttcggcggtagttgatataacaaactatgtgatgtttgatttaaatagaccacttcatgcttatgatgcagataaaataaataaaggaataattgttcgaaattctaaaaaaggagaaaattttaaagctttagataataaaaattataaattagatgatggtatgtgcattatttcagaccatgaaggagttttaggacttggaggaataataggaggaacaagatctggaacagaactaaacacaaaaaatattttgttggaatcagctttctttgatccagaaattacaagaaaaacggcaaaaaagttggagctaaatagtgatgcaaagtttagatttgagagagggattgatccaaattctattacaaaaggattagaaaaagcttctgaaatgatagttaaaatttgtgggggcgaagtatcaaaatttgatattcaatcaacaaaaaaagtggagattaaaaaaatattatttgactcaaatcttgcatctaaaacaattggaatacaaataaaaaccaatgaagtaattaaaattttggagggcctaggttttaaaattaaaaaaaaaggcaagaatttaattgtagaagtgccaagttggagaccagacgtattcggtcaaattgatttagtggaagaagttataagaattaaaggatttgataaaattcaatcagttgaacctgataaaaaaagattaaaaccaacactaaatttttttcaaagacattttcatttggctcaccgatctgtcg

SEQ ID NO: 301270 - DNA, 412 bp, Unknown
  Bacterial polypeptide expressing nucleotide sequence isolated from the Sargasso Sea
catggcagatatatttactaatttaggcctagaatgtgaatcttcaaataaaacactgaactttgatattacaccaaatcgaggagatgctttaagtttgagcggactagctagagaattttctgctagccaaaaaaatgcaagatttatacaaaaatcctttaataaggtatctttccagaattcaaaagattatatcggtaaggtaagcaatgaatgttgccaaaattatcatttactagaattacgtgaaataaacaaatttaaggcgctaccaaaagaaattgtcagattattggaaaaggcagatattccattaatacacccagtggtagatataggaaattatgtaatgcttgaattgggaactcctcttcatgtttttgatagggataaacttacactacctttg

SEQ ID NO: 301271 - DNA, 98 bp, Unknown
  Bacterial polypeptide expressing nucleotide sequence isolated from the Sargasso Sea
tggattaggtgtagagagattctgtatggtgagacatcagattgatgatataagaagattctatactaatgatctcagattcttaaagcagttttaat

SEQ ID NO: 301272 - DNA, 913 bp, Unknown
  Bacterial polypeptide expressing nucleotide sequence isolated from the Sargasso Sea
gtagagagtgttcaagatacaggcctagcctataagacttttattgttggccaggttttggaagaagaaaaacaccctaatgcagataaactaaaattatgcaaagtagatatcggtagagaaaaagttgatgtagtatgcggagctcccaatgttacaaaagggatgaaagttgtttatgcacctgttggatgtgtcattcctgtaaaccaaatgaaaataaaagcagccaagattcgtggcgttgagtcttatggaatgatgtgttccgaatatgaactcggaatttcaaatgagcacgacggcattatcagtttagagcaagatacagaggttggcagttcatacgcagacacgtcaggaatgaatgatattttaattgaaataggtattactcccaaccgtcaagactgtttgggggttttgggagttgcacgggatttggccgcagcaggtgttggaaagttaaagaatcgagagttcaagacagaaaaaggttcgtttgagtccccaattaaaattgaaatacaagataatgatatatgcccagcattcgcaggaagctatattaaaaatgtaaaaaatgtagcaagtcctgactggctacagaaaaaattaaagtcaattggcttaaggcccatttccgctttagtcgatattacaaattatgtaatgtttgaccaaaatagaccattgcatgtctacgatgctgataaagttaaagggaaaattatagttcgagcagctcaagacggtgaaagctttaaagctttagatgaaaagacctataatttaaaaaatggtatgtgcacaatttcagatgaagaaaaagttttaggtttgggaggcattatgggaggtgaaagtacggggtgtaatttggataccattaatgtccttttagaatctgcac

SEQ ID NO: 301273 - DNA, 211 bp, Unknown
  Bacterial polypeptide expressing nucleotide sequence isolated from the Sargasso Sea
catggtacacccaaacgttctaaagaatgtaaatgttaatacagataaatatcaaggttatgcttttggtattggtattgacagacttggaatgcttaaatatggaataaatgacttaagagcttttttcgagactgactatagatggcttaatcattttggatttgatccattagatgtaccatcaaactataggggccttagcagatga

SEQ ID NO: 301274 - DNA, 904 bp, Unknown
  Bacterial polypeptide expressing nucleotide sequence isolated from the Sargasso Sea
attcccacgactaacgtttacatagagaaagatttgtctataaatgaaaatattgaaaaaatgagattaagtgctacttcgtccttactttctggaagaaaagatgttgtagtagttgcttctgtttcttgtatttatggaatagggaatccagatgaattcggtaagaatgtaatcaaattaaaaattggggatagagttgaattaaaaaaattactatttagtttagttgatattttatatgaaagaagtgaagaagattttaaaagaggtagttttagaattcagggtgatactattgacatttatgttgcatatgatgattttatttatagaattattttttggggagatgaaattgaatctatttcaaaagtggatccattgtctggaagaaaaatatcagatcaagattcaataattatttatccagcaaatctttttgttacaaataaagaaataattgaccttgccattaaagaaattgaagaagaccttttaaatcaaattaaattttttgaagcggaaggtagatttgctgaagcaaaaagaatcaaagaaagaactgaatttgatttacaaatgatagaagaaattggttactgttctggagttgaaaattattctaggtattttgatagaagacaatctggcatgaggccattttgtttattagattattttccaaatgactacttagtctttattgatgaaagtcatgtaacaattcctcaagttagagctatgtggggaggagaccgctcgaggaaaacaaatcttgttgattatggttttagattgccatctgcattggataatagacccttaaattttgaggagtttgaatctatgataaatcaagttgtttttgtaggtgctactccttctgaatatgaattaaatt

SEQ ID NO: 301275 - DNA, 751 bp, Unknown
  Bacterial polypeptide expressing nucleotide sequence isolated from the Sargasso Sea
gcgccagaaaatagttatattcctggaactgacttacatttaaaaaaaactaaaattagaggagttgagtcttgcggaatgcttgtttcagaaagagagatgggtatttctgatgaacatgatggaattattgaagtaaaagataattataaaattggtgatttatttagtaaaatttttgcaatagatgaacctgttattgaaatcaatttaactccaaatagatctgattgtttatcggtcagaggtatcgcaagggatttagcagcagcaggaattggtaaattaaaagacttaaattataaaaaatcaaaagaatcactcaaaagccctattaagtggaaaaaagaatttcaaaataataatttatgtcctggagtagcaggtcgatattttaaaaatgtcaaaaatgtagaaagccctaaatggcttcaagatagattaactgcaatcggattaagaccaatttcggcactcgttgatattacaaactatattacctttgatttaggaagaccactacatgtttacgatgctgaaaaaatatctggaaatttaacaatgcgattagccaataaaaatgaggaatgtttagcacttaatgaagtaaattatacatgtgacagtgatatgattgtaatttctgatgatgaaaataaacttcacggaattggtggagtcatggggggcctcgatagtggttgtagtatggagaccacaaaatgtttttttagaagttgcgttatttgat

SEQ ID NO: 301276 - DNA, 615 bp, Unknown
  Bacterial polypeptide expressing nucleotide sequence isolated from the Sargasso Sea
ggaataaaaaatttggggcatgggttaattcagggaaggataatgatctaaattattatgaggcaagaggaaagttaaaagaggccttatcatctttaaatataaaagtggatgataaacctactaattcaattgattttcttcatcctggaagaacagcaaaattatttattgaaggaaaagatgctggatattttggtgaaattcatccaaaactaatattggataagactgctttaaaaaaagtttatttatttagcataaatgtagctaatctcttgggtgctagcactaggaaaaataaatggattccaatatataagcaatacccaattgttccaaaaatggaacgggatattaatttcattttcagtaaagaacatttaataagcgagataacatcagaaataagaaaaacaggaaagaatcttctagaggatgttaatttaattgatgtttttaaggatattaattttggagaagattttataagttatacctttagattatcttatagagataaagataaaacattactagattcagatatttcatcaattcattcaaatatagtttctaaagttgaaaaaagatttaatacaaaattgagataat

SEQ ID NO: 301277 - DNA, 805 bp, Unknown
  Bacterial polypeptide expressing nucleotide sequence isolated from the Sargasso Sea
gttcttgctggtattatgggaggtctaaactctagtgtatcagaagataccactgaggtttttatagaagttgccaattgggttgctgaagatgttcgtcaaacctctactaggcttggactcaggactgattcttcgcaaaggtatgagaaatcattagactctcatcaatgttacaaaacattattgagaacactagacttaattttaaatttaaatccgaaggcaaaaattgttggtaagcctcaatatgatggagaagatttatccttatcaaaaccaagagttattaagactagttttaaaaacatttcaaatgttttgggtcatgatgtaccaagtgataagatattggccatttttaactctcttgagtttaagactaaagttgaaggtgataatgttacagtaaccttgccgagttttagaacgacaaaggacatagaatatgaggcttgtttaatcgaagaagttggtaggatgattggttatgataatatagttcctgtaagtcctacttctgggattgaagcaactagatttcatcctgcaaaatcaatgcatcgaaaaattcaagattttcttgtgtttaatgctaaagctttagaagttatgacttatccattgctaggaaaaaaacttttagataaagcaaattggaataactttaacgaagagttagttcttgtaaattctctttcaaaagatgcggatagaatgagaccgtcaatgattcctcactctcttaatacagttgccataaattctaaaaactttgataagttcaacttttttgaattaggtc

SEQ ID NO: 301278 - DNA, 208 bp, Unknown
  Bacterial polypeptide expressing nucleotide sequence isolated from the Sargasso Sea
attagttagttggaaagatggagattggttagaaatactaggttgcggtatggttgatcccaatgttttcaaaaaagttaaatataaaaaaggaactcaaggatttgcttttggtgtaggagttgaaagattagcaatgttaagatataacattgaccatattaaaaatttttatgacaatgatttaagatttttaaggcaattttaa

SEQ ID NO: 301279 - DNA, 607 bp, Unknown
  Bacterial polypeptide expressing nucleotide sequence isolated from the Sargasso Sea
tatgaaagtttctcaaaattggttgaaaaatttagtagaaattacttctactccagaagatctctctgagaaattatctattggtgggtttgaggttgaatcattagaagattgttcagaaaatgtaaatggtgttgttttaggtaaggtattatctgttttaaaacacgaaggatctgacaaactttcaatatgccaagtcgatattggggcttcaaagaatttacaaattatctgtggtgcgcgcaatattaaaccaaatatttatgtttatgttgctactgtcggcgcaaaattaaatgctgttgatttaactattaaaagaagtgaaattagaggtgtcatgagtgaaggaatgatttgttcactgcaggaactgggtttagaggacactagcgaagggatagagatcattgatgatgatttagccttaaaacatgaactgggcaccccagggtctgacttgcttcaattaaatgattttatatatgatttagccattacagctaatagacctgacggtatgtctgttgtgggtatagcccgcgaaatttctgcccttttggaatccaccttaaattttccaaaattaaaccataaatacaat

SEQ ID NO: 301280 - DNA, 542 bp, Unknown
  Bacterial polypeptide expressing nucleotide sequence isolated from the Sargasso Sea
cctaaagttatagatttatctataacaccaaatcgaccagattgtcttggtgttagaggtattgcaagagatcttgctgcagctggagttggttctttaaaaaaaataaaagatagtaaattaaatcaaaattttgatcaggatttaaaagtaactattaaaaaagaaaaaaaacaaggctgcacaatttttggtagttgtttaataaggggagtttcaaataaagaaagtcctcaatggttaaaagataaaattgtttcgttaggtcaaaaaccaatttctgcaattgtagatataacaaactatgtgatgattgatttaaataggccacttcatgcatatgatgctgataaagtaagtaaagaaattatagtaagaaattcaaaaaaaggtgagacttttgaagcactagacaataaaaaatactccttagatgatgatatgtgtgtaatttctgatcattcaggagtgctaggattaggtggagtcataggtggaacacgttcaggaaccgaactagatacaaaaaatatattattaga

SEQ ID NO: 301281 - DNA, 559 bp, Unknown
  Bacterial polypeptide expressing nucleotide sequence isolated from the Sargasso Sea
tgatgccaaatcagatgccgaaatggcacttggggtgttgggtgtgcgcaaagccagcttgtcggtagacaaatctgcaccagattattttcatccagggcgttccggcgtgctaatgcaaggccgcagaaaattggcaagttttggtgaactgcacccaaatattgcgtcacattttagcttgcgtgggccggttgtcgggtttgagttgtttctcgatgacgtgccattggcaaaagccaaaggatcggcgaggagcttgttacaaatgtcctcgtttcagccggttaaccgcgattttgcttttgttcttgatgcggatgttgctgcgagtgaattgttgcgggctgttaaatctgccgctgggccgctgttgagcgatatacagcttttcgatgtttatcagggcaaaggcattgaagatgggaaaaaatcactggcggtgtccataactctgactccacaaaaagcgacgttgaccgaagaggagattgaaaaaatctctgaagtggttgtggcgtttgccaagaaaaactgtggtgccacattgcgcgggtaa

SEQ ID NO: 301282 - DNA, 850 bp, Unknown
  Bacterial polypeptide expressing nucleotide sequence isolated from the Sargasso Sea
aaaattctccctcacaattttgttgaattaattgatggatcaatcaagtgtttgaagggaagaaaatttcaattatatcctgattttccaacctctggagttgttgatgtaacaaactataatgatggaaaaagaggaggtaggattaaagttagagcaaaaataaaccagttaaataaaaatactttaataataacccaaataccttacacaacaacaagcagtagcttaattgattcaattttaaaagccaatgaaaagggtaagattaaaattaaaaagattgaagataatactgcctctgatgttgaaattctaattcaccttccaaacggagtttcacctgataaaacaattgatggactatttgcttttaccaattgtgaagtatcaatttctccacttggttgtattattgaaaacaacaaaccattatttaccggagtatctgatatgttgattaaatcaactatgaatacaaaggaactactaaaaaaggaattagagaacaaattgaaagagttaaatcaattatggcactcatcaacccttgaaaaaatatttattgaaagaagaatttacaggctgatcgaagacaaagattcttgggaattggttttggaggcaataaaagatggtttgaaacctcatttagaattacttaaacaagtagtgactcaagatgatgtgattaaattaacagaaatcagaataaaacgaatctcaaagtatgatattgataaagctgataaaaaaattatcgagatagaaaatcaaattgaagaaactaattacaatttggaaaacctaaatgattttgcaattaattatttcaaagatttaaaattaa

SEQ ID NO: 301283 - DNA, 729 bp, Unknown
  Bacterial polypeptide expressing nucleotide sequence isolated from the Sargasso Sea
tatgcacctccaggatcgattattcctaaaaatcagatgaaattgtctgtaagcaaaataagaggtgtaacatcatatggaatgctctgttctgaatcagaattactattatccaatgaaagcgacggaataatagatttaaaaaataataaatattcaaataaaattggagaaaaatattttaaaactacttctgaaaaagtaatagatttgtcaattacgcccaatagaccagattgtttaggggtaagaggaattgctagagatttatccgctgctggtgctggtaaattaaaaattaataaaaaatctaatttaaaatatagaggtaatcaaaatataaatgtaactataaaaaaagaaaaagttcaaggatgtacaatatttggaagttgtttaataaaaggtgtaacaaataaagaaagtccaaaatggctaaaagacaaaattaagtctttaggccaaaaaccaatatctgcgatagttgatattactaattatgtgatgtttgatttaaatagaccattacacgcttatgatgcagataaaatagataatgaaattattgttagaagctcttctaaaggagaaagtttccaagccttggataataaaaaatatattttagataatgatatgtgtgttatttctgatagatctggagtgcttggtcttggtggcataattggtgggacaagatctggaacagaatattcaactaaaaacata

SEQ ID NO: 301284 - DNA, 811 bp, Unknown
  Bacterial polypeptide expressing nucleotide sequence isolated from the Sargasso Sea
aaataacaattttaaagaagaaatagacactataaaaattgttaatccaatcagttctgatctaaatgtcttaagaaattcattatatccaaatttgattttttacatggaaaaaaattctaacagaggctttgatgatcagtcgctttttgaaattggaccagtttttaaaggaaaaaaaccaggcgaacaaataacagttgtgtgtggcttaaaaagacaaagtggtagtgacaaacaacacaggcaaatggatgtatttgaaataaaaaaggatttagtccaaacactaatggaactaggaattaataaagatgagtttaaaattgaagcaaaaactcctagctattatcatcctggaatatccggatctatttattcaaaaagatacaatctattgcttggttattttggtgagcttcatccaaaaattacaaaaaaaacatttggttttgaagtacttctcgaaaatatagtagaatataaaagtagaacaaataaggttaaagaaagccttactttttcggattatcaaaaatcagatagagattttgcattcgtagtagataaacatattaatgcacagaatttaatagaagtaatctcagatatcgataattctttgataaaagatgttaaaatttttgatgtatacgaaggtgaaaatattccttctggaaaaaaatcaatagccttaaaagtaacaatacaatcggactataaaacattaaatgaaaacgatttaacagatatctcaaacaaaattattaattctgttgaagaaaaaattggtgcaaaactaagatcataa

SEQ ID NO: 301285 - DNA, 250 bp, Unknown
  Bacterial polypeptide expressing nucleotide sequence isolated from the Sargasso Sea
gttgatatatactgggggtctagagactgagactgatcacagaattacaaaaggaactggatggctagaaattatgggttgtggaatggttgatccaaaagttttacaaaattgtaatattgactcagaaaaatacactgggtatgcgtttggattaggccttgaaagaatagcaatgctaatttatcaaattccagacattagacttttctttgaaaatgacgtgaggttccttaaccagtttaagtaa

SEQ ID NO: 301286 - DNA, 594 bp, Unknown
  Bacterial polypeptide expressing nucleotide sequence isolated from the Sargasso Sea
gtgatgtctataatgaaaattggaatgtcgataaccaaccaggagcttttttctattttaaaggagtcttaaataaagttcttaaaaaaaacacctctaaagaatgggaagaaaaaaatactcgtttagatattttttctgaaggtttatcttatttcatagatgaccaacctttactcgaatttggatttttaaaaaaacaaatccttaaaactttcgacatagatcaagacgttctttatgctgaaattgattttgaagcactttcagaagttgctaaaaaaaatcatatcgagtataaagaaatccccagattccctaattctaggagagactttgctttattattagacacctcggttaagtttgacagtataaaggaaattgcattcaaaactgaaaaaagtattctctccactgttgaactttttgatgtttatcaaggtaaaaatctacccgagggtaaaaagtcatatggagtaagtttttacttccaagacccacgaaaaacattgacagataaatatgttgacaagattatgggaaaacttcagaaacaatttgaaggtaagcttggagctcagttacgttaaa

SEQ ID NO: 301287 - DNA, 880 bp, Unknown
  Bacterial polypeptide expressing nucleotide sequence isolated from the Sargasso Sea
ggttgtgcgacatttagagacagataaaactgcaattgaaattggtgatgcgctgacaaatttgggacttgagctggagagttttactgattattcctcatattcaaaattcgttgtagctacaattaaagattttaaaaaacatcctaatgcagatagattgaatatttgtaaagttgacgatggaaccaatacatatcaagtaatttgtggagcaaataatgtaaagaagggattaaaaggaatatttgctaaagatggaatgtatattccaggaacacagatacatttaaaaaaaggtaaaattcgaggagaaatatctgaaggtatgcttttatcagagagagaacttaacttgagtgataatcatgagggcattattgagttattaggtaattttgaaaatggcacttcagcaatagaagcattgaaattaaatgatcctatctttgaaataggcattactccaaatagaggagactgtcttggcattagaggagttgcaagagatttatctgctaaaggctttggaaaattaaagcctttaaaatttgataaaattgagcatttagaatttgaaagtccaatctcatggaatatcaaaaatgatgataatagctgtgaatatgtagtaagtaggtattttaaaaacgtaagcaatgccaaatcaccagattggttacaaaaaaaacttataagccttggcttaagaccaatcaatgctttggttgatatcacaaattttatcactattgatttaggcagacctttgcacgttttcgatgcagataaagttgaaaaacaacttgatatgagacttgcgaattcaaatgaaaaaattcttgctttagacaacaaagaatacagcttagacgtaaac

SEQ ID NO: 301288 - DNA, 922 bp, Unknown
  Bacterial polypeptide expressing nucleotide sequence isolated from the Sargasso Sea
agagagggccttcttactgtatatgccccaccaggagcaataatcccaaaaaacaaaaccaagcttgttgttgctaaaataagagatgtcacatcctatggaatgctctgttccgaatctgaattaaatttatcagatgaaagtgatgggattactgagctttcgtcatccaaatatgccaaaaatattggaaaaagttatttttctaaatcaagttctaatcttattgatttatcaattacaccaaacagaccagactgtctaggtgttcgagggatagcgagagatttatcagccgcaggttttggaaacttaaaaccagagaaagataaaaaaataaaatctgataaaaaacagaccttaagagtaaaaataataaaagaaaaaaatcaaggctgtttatcatttggtagctgcttgataactaatgtaaaaaatacagaaagccctaaatggcttaaggataaattaatttctataggccaaaaaccaatatctgcaattgtagatattacaaattatgtaatgattgatattaatcgtcctttgcacgcatacgatgctgacaaaattgataaaggaataattgttagaaattcaaaatcaggagaagaatttactgctctagataataaaaattataaactagatgatggaatgtgtgtaataagcgataacaagggcgtcttaggtctaggaggaattattggaggtacaagatctggtacagagctatatacaaaaaatgttttattagagtcggcttattttgatccaagatcaattagaaaaactgctaagaaattgaatattgatacagatgctaaatttagatttgaaagaggtattgaccagttatctattgaagatggattaattaaagcagcttttttaattagggaaatttgtggtggtgaaatta

SEQ ID NO: 301289 - DNA, 929 bp, Unknown
  Bacterial polypeptide expressing nucleotide sequence isolated from the Sargasso Sea
tagtctcaaaataaaattcccaaaaaataaattgtgtgtagatattggatctaatgatggaactttattgaaaggttttaaacaatttggctttagagtacaaggaattgaagcaactaatattgctaagatagctaataaagatggtattgatactattcaagctttttttaattctaaaatttctaaagaaattattgaaaaaaagggaaaagcttcagtaattaccgcaactaatgtttttgctcatgtgccaaatatgtcttctctaatgatgggcgttgacaaacttattgaaagagagggagtttttattacagagtcccactacttattagatttaataaaaacactgcaatatgattctatatatcatgaacatttaaaatattacactctacattcacttaaagttttttttgattattataactttgaaatatttgatgttgaatttataaaaaattacggcggttcaataagagtgtatgctgcaaaaaaaggagtatataaagtaaaaaaaacagtgattaattgtattaaaaatgaaattaaattgttcaaagattcagataaagttttcaaattatttagttctaaaatcaaaaataataaatctgaaataattaatttaataaacaaatatttaaaaaaaggacaaaaagttgtaggtattggttgcccaggtagatgtagtactatacttaattattgtaaaataaataaaaaaaaaatgatgtacatagccgagcaacaatcttctttaaaattaaaaaaatttcttccaggtatgcatattccaattattgatgaaaaagaaatgtttaaaagtcctcctgatctttcaatactactttcttggcattattcagatgagataattaaaatacttagaaaaaaaggttttaaaagtaaaatattaatttcat

SEQ ID NO: 301290 - DNA, 335 bp, Unknown
  Bacterial polypeptide expressing nucleotide sequence isolated from the Sargasso Sea
ggagtctagaaaaaaaattagagaagttaaacctcaatttgtcttttctgattatcaaaaagtggttagagattttgcttttgttattgatgaaaaatacagttctggagaaatcataaactttgttaaaaaaattgataaaggattaattaaaaatgttaaaatttttgatgtttatcaaggagaaaatataacttctggcaagaaatctattgcttttagtgtaactttagaacctaaagacaaaactttaagtgaaaaagatattgaagaagtaagtaaaaaaatcatatcagcagttcaagaaacaacaggcgcaacactaagatcctaat

SEQ ID NO: 301291 - DNA, 777 bp, Unknown
  Bacterial polypeptide expressing nucleotide sequence isolated from the Sargasso Sea
aatggaagttgatgttcaatcgaaggaagattctcctgttttcatgacgagagtcataaagtctataaataggaatgcaaagagtcctaaatggctcaaagaaaaactcgatcaatcaggatataagtcaatcaatgcagttgttgatatagctaattatgtaatgttagaaacgggccaaccacttcatacttacgatttaaaaaagataaataaaacaattttagttagacgagcaaagaaaaaagaagcaattgatattctagatggcactagaaaaatcttagatccaaactaccttgtcattgccgatgtagaaaagccacttggaattgctggaatcatgggaagcttggaatcaggaatatctgaagatacggaagatattgtccttgaatctgcctactttaattttgaaaccattatgggtagagctagggctcttagtctccatagtgaagcgagcatgagatttgagcggggcgtagacccagcaatacaagagcatgcgattcaaagatttactaacctaatcaatgagattgcaggtggtgaaaatggtccgatacattcatccatcaacaagaaggaaatgcctaagaataaattcatcacacttagaaaagacaagatcaaacaaatattaggtattaccatcccaaatcaaacggtcaaaaatattcttgatagattggatatggaaattgatgaaaaagattttggatacattggctggagtgtaaaagcaccgagttaccgctttgatattaatgaaga

SEQ ID NO: 301292 - DNA, 813 bp, Unknown
  Bacterial polypeptide expressing nucleotide sequence isolated from the Sargasso Sea
aatgaaattagaagtttcaaaaataagaggagagacttcttatggcatgctttgttctgaggctgaactaaaactctccgacgaatccgagggtattatttcattgagtagcaaatataataatagtgttggaaaaccttattttaagagtaaaaataataacaatgttatagaattatctattacaccaaatagaccagattgcttgggcgtcagaggaatagctagagatctttttgcaagtggtatgggtaatttaaaagaaataaggaaaacaaaatttaaaaaaaattcgaagcataatttaaaagtaaaaatagagaaaagtaaaaatcaagcttgctcaatatttggaagctgccttattaaaaatataactaacaaggaaagtccaagttggttaaaagaaagaattttagcattaggtttaagaccaatatctgcagttgtagatattacaaactatgtaatgtttgatttaaacagaccactccacgcatatgacttagataaaattaaaaattcaattacagtacgaaattcgaaaaaaggtgaaacactcaaggcgctagataataaaacatatacattaaaagagaatatgtgtgtgatttctgatgacgagggtgcccttggcttgggtgggataattggaggagtcagatcagggacagaattagaaacaaaaaatattttaatagagtcggcatattttgatcctagtattacaagaaagacctctaaagaattagaaataaatactgatgctaaatttagatttgaaagaggaatagaccctgaatcagttgaaga

SEQ ID NO: 301293 - DNA, 788 bp, Unknown
  Bacterial polypeptide expressing nucleotide sequence isolated from the Sargasso Sea
ttttggaagctgtttaatcacaaatgtaaaaaattctcaaagtcctaaatggcttaaagacaaattaatttcagttggtcaaaaacctatctcagcaatagttgatgttacaaattatgtaatgcttgatatcaatcgtccattacatgcatatgactatgataaaattgagaaaggtataattattcgaaactctaagtttggagaggaatttacagcacttgataataaaaattataaattagaaaatggtatgtgcgttataactgataacaaaggtattttagggcttggaggaattattggaggcacaagatctggtacagaatttaacacaaaaaatgtattgctagagtcagctttttttgagccaagatcgataagaaatacagcaaaaaaattaaatcttgacacggatgcaaagtttagatttgagagaggtatagatcctttatcaattgaacagggtttaaataaagctgcaaaattaataaaagaaatttgtggaggcgaaattagcaaaatagatattcaaaaaacagaaacttacaaaacaaaaaaaattatatttgacccaaatatatttgaaaaaatatctggttttaaaatttcttcaaaagaaatgatcaaaattttagaggatcttggttttagagtaaaaaaacataaaaaaagattcgaaatagttattccgtcatggagaccagatatttcacaggaagtagatgtcgttgaggagttggtaagaataactggttatgataagataaagtttatagacccaatta

SEQ ID NO: 301294 - DNA, 968 bp, Unknown
  Bacterial polypeptide expressing nucleotide sequence isolated from the Sargasso Sea
ggctggtttgggaaagttaaaagatctaaaaataaaaaaaataaaaggtagttttaagagcgatgttaaatggctcagaaaatttaatataaaagaagatcatttatgtccaggagtttctggaaggttatttactaatgtaaaaaatactcaaagtcctgaatggttaaagagaagattagaattaattggattgagatctataagtgctttagttgatataacaaactatgtgacttttgatttgggccgtcctttgcatgtttatgatgctgataaatttaatggaaatctggtaatgagaaaagctcaaaagaatgaaaagtgcaaaacattagatgaaaaagaatatttattatctgaagacatgattgtaataagtgatgatgactctcttcatggaattgggggagttatggggggtttaaatagcggttgttctttggaaaccaaaaatgtttttttagaagtagctttatttgatccaataagtattacaaaaactggtagaaaattaaatttacagagtgacgcaagatatcgctttgaaagaggagttgattttacttctattgaatggggcgttgatgcagctacacaaatgataatagacttatgtggtggcgaggttagtgaaattgtttttgataaaattcaaaatcctaaattaaaaaaattagattatgatataaatttaaccaaaacatatggtggcatagatgttgaaattaaaaaacaaattaaaattttagaaaatttaggctttaaaattaattcaaaaaataacttaaaattagaaattgtaatcccatcttttagaccagatattattggtccagcagatatagttgaagaaattttacgcatttatggatttgataaaattcagcctatttctttaactaataaaaaagataaaaatttagagattttaaattcaaatttacaagcttattataaatctaagc

SEQ ID NO: 301295 - DNA, 301 bp, Unknown
  Bacterial polypeptide expressing nucleotide sequence isolated from the Sargasso Sea
tcagtataaagaatttaaaaatcattgttctgttcctgttttagcaaatattactgagtttggaaaaactcctttatttacccaaaagcaacttaaagaagttggcgttgatatggctctttatccactcactgcttttagagctatgagtcaatcggcagaaaaaatatacgattcaataattaaagacgggacacaagaggctctcttagatataatgcagacccgtgaggagttgtatgaggttttagattactacaatttcgagaaacaacttgacaaaaaattgtcaaataattaa

SEQ ID NO: 301296 - DNA, 493 bp, Unknown
  Bacterial polypeptide expressing nucleotide sequence isolated from the Sargasso Sea
aatgaacattaaggacacaattgaatcagttcgaaaacaatttcggactgattctgatccgtttcctgatgataatgataaaatagattctttaaaaattaaatatttgggaagaaaaggtttaattgcgaatctttttactcaaatgaatcaagttgaagccgaagatcgtccgttatttggtaaatatttaaatcaacttaaaaatgaaatcaattctgtttttgattcatctcaacaaaaagattcaaacagtaaaactgatcaaattgactattcattacctggtttaaatttcaatattggctatcaacatcctcttcaaactacattaaatgaaattaaatcgatctttcagaatttaggtttttcagttgcgtatggacctgaggtcgatgatgactttcataattttagtgcattaaacttccctccagaacatccagctcgcgatatgcaagatacattttttattgaaaaagatatagtttta

SEQ ID NO: 301297 - DNA, 484 bp, Unknown
  Bacterial polypeptide expressing nucleotide sequence isolated from the Sargasso Sea
agaagattaaaagctgcagttgatgcgaaaaaagatgaatccttttttattatggcaagaacagacgcacttgcatccgagggaattgaaaaagcaattgaaagatgtggtgaatacttaaaagttggtgctgacggaattttctttgaagcagctttatctttagatgaatacaaagaatttaaaaaaaatttttcatttccattactagcaaatattacagaatttggaaaaactccattatttactcaaaaagaacttagcgatgttggggtcgatattgttttatatcctcttacagcatttagagccatgagtttatcggcagaaaaaatttataattcaattatcaaagacgggacacaagagcctctgttagatataatgcagacccgggaagagttgtatgaagttcttgattactacaattttgaaaaacaacttgatgaacagtttgaaaatactaaaaaggaaggctcatgac

SEQ ID NO: 301298 - DNA, 358 bp, Unknown
  Bacterial polypeptide expressing nucleotide sequence isolated from the Sargasso Sea
atgattattacacttccatggttaaaagagcatttaaaaactaatgcaagcgaaaacgaaattataaacaaactcactaatatcggcttagaggttgaaagtgtaaaagaaaactctggagagctgagtgaatttaaaatagctaaaattatcaaatctgagaaacatcctaacgcagataaattaaaagtgtgcgatgtaaacattggtggaaaagaaactttaaaagttgtatgtggagcgcctaacgcaagagatggtcttataacaatttacgctccgcctggggctgtaatacctaaaacaaaatttcaattaaaaattgctaaaataagaggagttgagtctcgtggaatgt

SEQ ID NO: 301299 - DNA, 322 bp, Unknown
  Bacterial polypeptide expressing nucleotide sequence isolated from the Sargasso Sea
ttgatcgctgagataattgactgcaaaccacacccgaacgcagataaactgaaggtatgcactctcgattggggtggcaatgagccagcacgagttgtgtgtggtgctccgaatgttaaaagcagattgaaggtcatttttgctcgtgtcggtgtcaaaattccttccacaggagaggtgattaccaggaggccactaaagggtgtaatgtctgagggaatgatactgtctgcagcggaattgggttggacagaaaatgctatcggaattgtcgagtgcccaaggaaatctgttgttggcgagcctgcgccccagagatcca

SEQ ID NO: 301300 - DNA, 888 bp, Unknown
  Bacterial polypeptide expressing nucleotide sequence isolated from the Sargasso Sea
caagtgttggtgcagcggggttacagtgaagcaatcacgtatagttttattaaccctgcgataccggcagacttctctgttgcaggggagatcattgaggtcactaatccgatttcttcagcgttgtccgtgatgcgacaaagctgctggccaggcttgctgtcggcgttgcagcataatgtgaaccgccaacagtctcgagtgcgtttatttgaatttggtcgggtgttttggtctgacggtgatcgtcagataaaacaaccccgacggattgcttgtctagctgcgggtccgttatatacgaatgcctggtcctcatcgacaaatcaggaagtggatttttttgcggtgaaacaagatgtcatggcattgctttccacaacgcgtcacgccgaacagtttgagtggcgagtgggtacgcatccggcattgcacccggggcaacgagcagaattgtatttggctaatcaatgtgtcggccatttaggtgtgctgcaccccgagttgggcgccaattgggatttaacaaccatgccggtgctatttgaaatggattggtcggctttggtggaagcgacattgcctcagtttactggagtagcgcgttttcctgaagtgaagcgtgatttggcgttggtggtggatgagcaggttactgccgcctcgttattggcggcagtgagagagtttgcaggggatcagctggttaatgtagaagtatttgatgtttatgtgggtaagagtattgaaagtggtcaaaaaagtgttgctctggggttgacctttcaggatccatcgcgcaccctaatagatagtgagattgataaacttcagtctcatgtaattgagtcattgggtaagaagttaaacgcaaccatgagggcataa

SEQ ID NO: 301301 - DNA, 807 bp, Unknown
  Bacterial polypeptide expressing nucleotide sequence isolated from the Sargasso Sea
tatggatattgctgtaacaccaaatagaccagattgtttgggtgtaagaggtatcgctagggatttagcctcttctggtttaggtcaattaaaaaggcagccccctattaaaataaatcagaaattcaaaagtccaattaaagtttcaataaaaaaagaaaaaaatcaaggttgtggtatttttggaagtgtatatataaaaaatatccaaaataaagaaagccctgattggttaaaaaaaagaattatagctttaggattgagcccaatatcagctatcgtagacatcactaattatgtcatgtttgatttaaatagacctttacatgcttatgatgcagacaaaattgataaagaaattattgtaagaaattcaaaaaaaggtgagtcctttgaagccttagataataaaaaatatatgctccaaaataatatgtgcacaataagcgataagtctggagtcttaggcctcggcggtattattggtggaactagatctggtacagaactgtctacaaaaaatattttgttagagtcagcatatttttttccatcaatgattagaaaaacttcaaaaattttaaacatagatactgatgcaaaatataggtttgaaagaggcatagatcctaattctattaaactaggattagaacttgctatgtgtatgatattggatatttgtggtgggacagccagtaaattttcagtagttgggaaaataagagatgagagaaaaataattgaattagatccagaaaagttttctaaagttattggatttttcattacaaatttaaaaattaa

SEQ ID NO: 301302 - DNA, 434 bp, Unknown
  Bacterial polypeptide expressing nucleotide sequence isolated from the Sargasso Sea
acttgcatactttggggaaattcatccaattattcttaaaaggcttgatattaaggctgataacgttttaggttttgaaattattttggagaatatacctctgtctagaaaaaaaattagagagtcaaaagatagatttattttttcagattatcaaaaagtagttagagattttgcttttgtttttgatgaaaaatatagttctggagaaattattaatttagttaaggaagctgataaagaattaattagggatgtaagaatttttgatgtttatcaaggagataacattgaatcaggaaaaaaatctattgctttcaatgtaacgctagtacctaaaaacaaaactttaagtgataatgagatagaagaggtaagcaaaaaaattatatcaaaagttgaaaaaactacaggcgcaaccctaagatcgtaat

SEQ ID NO: 301303 - DNA, 592 bp, Unknown
  Bacterial polypeptide expressing nucleotide sequence isolated from the Sargasso Sea
gatgaagcttacaaaaaattggttaaatgatcacctgaaaacaaataaaagtgagagtcaaattattgagaaactcaacagaattggactagaagtcgaaaaagttgaatcgattaagagtgaattaaacgattttgtagtcgcaaaaattattaaagcaaataagcatcccaatgcagacagactaaagttatgtgatgttaatatcggtggaaaagaaaatataaaagttgtgtgtggagccccaaatgctcatgatggtttattaactatttatgccccacctggatcaacaattccaaaaaatggaatgaaattagaagtatcaaaaattagaggagaaacctcatatggaatgctttgttccgagtcagaattaaaactatctaatgaatccgagggtattattgaattaggtcaaaaatttaatagcagcattggaaagccttatttcaaaaataagtcaaataacaacgttatagaattatctattacaccgaatagacctgattgtttgggcgtaaggggaattgcaagagatttatttgcaagtggttacggggagttaaaagaaattaaaaactttaaattt

SEQ ID NO: 301304 - DNA, 673 bp, Unknown
  Bacterial polypeptide expressing nucleotide sequence isolated from the Sargasso Sea
atgaaatttactataggttggcttaaggaacatttagacacaaaatataaagataataaaatcattgaaaaattgacagatgttggacttgaggtcgagaaatttgaaaatgttaattctgaatttgatagttttaaagttgcaaaaattataaatgctgagcagcatccaaatgctgacagactaaaagtttgtgatgttgatattggcgaaaaaaatacagttaaagttgtatgtggcgcaccaaatgcaaaaaaagatcttttaacagtctacgctggtccaggctcaataatgccaaaaaataaaatgaaacttacagtaagtaaaattaggggagttacttcatatggaatgctatgttcagagtccgaattaaatttgtctaatgaaagtgaaggtataactgagcttaaacaacaaaaatactctgatcaaataggaaaaagcttttttaaaaataatagtgaaaaagtagttgatttatcaataactcccaatcgtcctgattgtttgggtgttagaggtatagctagagatcttgcggctgctggagttggtaaattaaaaaaaatttcagataaaaaaattaaaaaagaaagttttcaaaatataaaagtttcaattacgaaagataaaaatcaagcctgtactatatttggtagttgtttga

SEQ ID NO: 301305 - DNA, 862 bp, Unknown
  Bacterial polypeptide expressing nucleotide sequence isolated from the Sargasso Sea
ctcaaaacatcctaatgcagataaattgaaactttgtgaagttgatataggttctggaaatttagtcaaagttgtttgtggagctcaaaatgctagagatgggctatttgcggtctatgctcctcctggtgcggttattccaaaaactaatttaaaactaaaagtagcaaaaataagaggaatagaatctcacgggatgctttgttcaggttatgaacttgatgaatctatagataaagaaggaataattgaattaaataaaaaagaaaaaaatattggtgaaagatattttcaaaatattggagaaaaaactatggatatttccattaccccaaatagacctgattgtttgggtgttaggggtattgctagagacttagcatcttcaggtttaggtcagttaaaaaaacattttcctattaaaataaatcaaaaatttaaaaacccgattaaaatttcaataaaaaaagaaaaagatcaaggatgtggtgtttttggaggtgtttacataaaaaatgttcaaaataaagaaagtccagactggcttaaaaaaaaaattatatcattaggtttgaaaccagtttcagcaattgtggatattaccaattatgtaatgtttgatttgaatcgacctttgcatgcttatgatgctgataagattgatagagaaattattgttagaaactcaacggttggtgaatcatttgaagctttagacaataaaaaatatacacttcaaaacaatatgtgtgcaataactgataaatcaggagttttaggtctaggaggaattattggaggaactagatctggcacagaactttctacaaaaaatattttattagaatccgcatattttttt

SEQ ID NO: 301306 - DNA, 436 bp, Unknown
  Bacterial polypeptide expressing nucleotide sequence isolated from the Sargasso Sea
atgtcagacttaaaaaatataaaagaggaatataataccaaacttaataacaatttaagtttggatgagatcaatcaaattaagacagaattgtttggaaaaaatggtttaatttcatcacaatttaaaaatattggatcaatacctgataatgatagaaaaaaatttgcatctgatcttaataatatcaaagatgagttacagaatttaatttcaaataaaataaatgaaattgagtcaaaaaagataaatgaaaaattagaaaaagaaaaaattgatgtcacactacccgagcggtcttttgtaagaggtaaaattcatcctgtttctcaaactatagatgagatttcatcaattttctctgaaataggttttagtgtagaagaaggacctgatatagaaaatgaatataacaatttcacagcattaaatactc

SEQ ID NO: 301307 - DNA, 465 bp, Unknown
  Bacterial polypeptide expressing nucleotide sequence isolated from the Sargasso Sea
aatgattattactataccatggttgaaagagcatttgaaaaccaatgcaaaagataacgaaattataagtagactcactaacatcggtttagaggttgaaagtgtaaaagaaaactttggagagctaagcgaatttaaaatagctaaaattatcaaggtcgaaaaacatcctaacgcagataaattaaaggtgtgcgatgtaaacattggcaaaacagaaactttaaaagttgtatgtggagctcctaatgcaagagatggtcttataacaatttatgctccgccaggggccacgatacctaaaacaaagttccaattaaaaattgctaaaataagaggtgtcgagtctcgcggtatgttgtgttctgagagtgaactaaatttatcagatgagagtgacgggataatagaattaaatgctaaagaaacagaaataggaaaaagttactttaaaagtaaatcaga

SEQ ID NO: 301308 - DNA, 498 bp, Unknown
  Bacterial polypeptide expressing nucleotide sequence isolated from the Sargasso Sea
tatgtttgtttccatcgactggctgcgtgagtatttagatattccgacagatataaacattggcgagttcgctgatcgtataactgcagcttcagcggaagttgaaggcattcgtacagtgggtgccgattggggcgaattgataactgttggacaagtgcttgaagtaaatgcccaccccgacgcagataaacttagactggcaactgtcgatcacggtgcagatataccggccactgtggtttgcggcgctcccaaccttgcggtcgatcaaaaaatagctttcgctcaagagggcgcaatggtcactaatcctgctaacgggcaattaacaaaattaaagaaagccaaaattcgaggaatcgaaagttcgggaatggtcctctcagaagctgagcttggcttatcggaggcacatgacggaatcttggttctagacgaatcagccccgattggtaaaacacttgaaaatcatctcggagacatcattcttgacgt

SEQ ID NO: 301309 - DNA, 946 bp, Unknown
  Bacterial polypeptide expressing nucleotide sequence isolated from the Sargasso Sea
aacaaatattggtttagaggttgaaagtgtagaaaatttatctgaagatcttaatttatttaaagtagcaaaaattataaaaacggaaaaacatccaaatgcagatcgtctaaagatttgtgatgttgatattggagaaaaaaattttaaaaaagttgtatgtggtgcttctaatgcaagaaaaggattgattacaatatatgctcctccaggagcaattatccctaaaagtaaaataaaactggttgtggcaaaaattagagatgtcacttcttatggaatgctttgttcagaatctgaattaaacttatcagatgaaagtgatagaatagcagaactatcatcaaaaaaatttgaaaaaagtttgggaaaaagctatttttcgaaatcaaactctaatcttattgatttatcaataacaccaaatagacccgattgtcttggtgtaagaggaatagctagagatcttgctgcatctgggtttggtaaattgagaaatataaaagaaaaaaaaattaaatcaaatttgaagcaaactataaaagtaaaaattaaaaaagaaaaaaatcaaacatgtaatgcttttggaagctgtctaattactaatttaaaaaatactgagagtcctcaatggcttaaagataaactagtttcgattggtcaaaagccgatttcagctatagttgatattacaaactatgttatgctggatatgaatcgtcctttacactcttacgatgctgacaaaattgataaaggcattgtagttcgaaactcaaaatcaggggaggaatttaatgctctagataacaagaattataaattggataatggaatgtgtgtaataagtgataataaaggtgttttaggactaggaggtattattggtggcagaagatcaagtacagaatttaatacaaaaaaatgtacttttggaatcagctta

SEQ ID NO: 301310 - DNA, 520 bp, Unknown
  Bacterial polypeptide expressing nucleotide sequence isolated from the Sargasso Sea
atgaaagtttctcataattggttgaagaatttagtagaaattacttctactcctgaagatctctctgagaaattatctattggtggatttgaggttgaatcattagaagattgttcagaaaatgtaaatggcgtcgttttgggtaaggttttatctgttttaaaacacgaaggatccaacaaactctctatttgtaaagttgatgttggtacttccaataatttacaaattatctgtggagctcaaaatattaaaccaaatatttttgtttatgtagcgactgttggtacgaaattaagtgcagttaatttaactattaaaaaaagcgagattagaggtgtcatgagtgaaggaatgatatgctcattgcaggagttgggactagaggactctagcgaagggatagagataattgatgaagatttagccttaaaacatgaattgggcaatccagcatctaatttgcttgaaataaatgattttatatatgatttagcaattacagctaatagacccgacg

SEQ ID NO: 301311 - DNA, 274 bp, Unknown
  Bacterial polypeptide expressing nucleotide sequence isolated from the Sargasso Sea
gaagttgaccttggttatgaattgaaagatggcaaaataattatcggtgagggagataaatggttagagattttaggttgtgggatggtgcttccatatgtacttaaaattgtaaatatatacccagacaagtatcaaggttacgcctttgggattggtatagatagattagccctgcttaagtatggaataaatgatctaagagctttttttgagtctgactataggtggctaaatcactttgggtttggtcctttagacgtaccatcaaatt

SEQ ID NO: 301312 - DNA, 835 bp, Unknown
  Bacterial polypeptide expressing nucleotide sequence isolated from the Sargasso Sea
atgaaaataacatttgattggttaaaagatcatctaaagacaaatctaaaagaaaaaaatcttttagagcaacttacaaacataggtttagaagtagagagcgtagaaagtccttctgatgataatggattattcaaaatagttgaaatcataaaaacggaaaaacatccaaatgcagatcgattaaaaatttgtgacgtaaatataggagagaatgaaattaaaaaagttgtatgtggtgcagagaatgcgaaagagggattgcttactatatacgctcctccaggtgcaattatccctaaaactaagatgaaattagtaatcgctaaaataaggggtgttacttcatacggaatgctttgttctgagtctgaattgaatttgtctgatgaaagtgatggaattactgaattacctaaaggatataaaaaagatattggtaaaagttattttacaaaattaaaatcaaatcttattgatttatctataacacctaatagaccagattgtcttggaattagaggaattgctagagatcttgctgcgtcaggttttggaaaattagtagatttaaaagaaaaaaaaattcgctcaaaaattaagaataccttaaaagtaaaaattaataaggaaaaaaaacaaggatgtactgcgtttggaagctgtttaataactaatgtaaaaaatactgaaagtcctcaatggttgaaggataaattgatttcagttggtcaaaaaccgatttcagcaatagttgatattacaaactatgttatgctagatataaatcgtccactacacgcttacgatgctgataagatgaaaaaagtataat

SEQ ID NO: 301313 - DNA, 487 bp, Unknown
  Bacterial polypeptide expressing nucleotide sequence isolated from the Sargasso Sea
tatgatttttgaactaaaggaagatctccaaaacttattaaatagtattacaataagtatacaaaattccaaatcatcatctgaacttgaaaatattagagttaattctttaggtaaaaaaggttctattactttatatttaaaaaatataagagattatgatttagaaacaaaaaaagaaattggtgcttatttaaatgatataaagagccaaataaataaattaattctagataaaagaaatttttttaaaaaagaacatttaaaagataaacttaattcagaaaaaatagacatttctcttacaccctatgagactgaaataggtaccttacatcctctttccagaacaattgaagaattatgtgctattttcgcagatatgggtttttctattgtagatggtcctgatattgaaagtgattattataactttactgcattgaatatccctgaagaacacccagcacgtcaagagcatgatacg

SEQ ID NO: 301314 - DNA, 811 bp, Unknown
  Bacterial polypeptide expressing nucleotide sequence isolated from the Sargasso Sea
tttagaagttgagagtgttgagcctgtaaaaaatgaattaagtgattttgttattgcaaaaattattaaagctgaaaaacatccaaatgctgatagattaaaattatgtcatgttgatataggaaaaaaagaattagtaaaagttgtttgtggaggaccaaatgcaaaagatgacttgcttacaatttatgctccaccagggtcaataattccaaaaaataaaatcaaattagaagtttcaaaaataagaggagaaacttcctatggaatgctctgttctgagtcagagcttaatttatctaacgaaagtgacggtattattgaattaaatcaaaaatataaatctaaggtaggaaaaagctattttaataataatttggagaacgttatagaattatcaataacaccaaatagacctgattgtttaggaattagaggtatagcaagagatctttctgcaagtggatacggaaaactacttgataatagaaatattaaaataaaaaaaaatggtaaacaaactttaaaagtgaagattgaaaaaagcaaaaaccaggcttgtacgatatttgggagttgtcttgttaaaaatataaaaaatcaagaaagcccagaatggttaaaaaaaagaattcattcattaggtttaaggccaatttctgcggtagttgacataacaaactatgtaatgtttgacctaaatagaccacttcatgcatacgacgcagagaaaataaaaaaaggaataactgtaagaaattctaaaaaaggagaaaattttttggctttagataaaaaaaattataatcta

SEQ ID NO: 301315 - DNA, 613 bp, Unknown
  Bacterial polypeptide expressing nucleotide sequence isolated from the Sargasso Sea
tatttttcaaaatcaaaatctaaccttattgatttatcaataacacctaatagaccagattgtcttggtattagaggaatagccagagatcttgctgcagcaggttttggaaaattattagaattaaaagaaaaaaaaattaaatcaaaatttaaacaatctctaaaagttaaaattaacaaagaaaaaaaccaaggatgtaatgcttttggaagctgtttaatagtaaatgtaaaaaatacagaaagcccccaatggcttaaagataagttgatttcaattggtcaaaaaccgatttcggcaatagttgatattacaaattatgtaatgtttgacataaatcgtccgttgcatgcgtatgatgccgataagattgaaaaaggtataattgttcgaaattctaatgctggagaagcatttactgcactagataataaaaattataaattagaaaaaggtatgtgtgtgataagtgatcacaaaggcgttctggggttaggcggaattattggaggaactagatcaggaacagaattagataccaaaaatatactgctggagtcagcttattttgatccaagatcaattagaaatacttcaaaaaagttaaatc

SEQ ID NO: 301316 - DNA, 876 bp, Unknown
  Bacterial polypeptide expressing nucleotide sequence isolated from the Sargasso Sea
gaaattagaagtgtcaaaaattagaggagagacttcttacggaatgctttgttctgagtctgaattaaaattatccaaagaatctgagggaattattgaattaggcaaaaaatatatcaataaaattggtaaatcatattttaagaataatgaaaaaagtaatgttatagaactgtctataacaccaaatagacctgattgtttgggtgtgagagggatcgcaagagatttatccgccagtggctatggcgatcttaaagatattaaaaaagttaaatttaagaatattttaaaacataatttaaaagtaaaaatagaaaaaaataaaaaccaagcttgctcaatttttggtagttgtttaataaaaaatataagaaataaagaaagtccaagttggcttaaagagagaattctagcattaggtttaaggccaatttctgcagttgtagatattacaaattatgtaatgtttgatctaaatagacctctccacgcatatgatttagacaaaataaaaaaatcaatcaaggtaagaaattctataaaaggtgaaaaattaacagcactagataataaaacatatacattaaaagaaaatatgtgtgtgatagcagatgaagaaggcgctttaggactaggaggtataattggaggggtgagatctggaactgagcttgaaactaaaaatatattgattgaatccgcatattttgatccaggaataacaagaaaaacagcaaaagaattagaaataaatagtgatgctaaatttagatttgagagagggatagatccacaatcggttaaagaaggtttagaaatgtctgcccgactaattgttgatatatgtggtggtgaagtctcaaatttcgatat

SEQ ID NO: 301317 - DNA, 416 bp, Unknown
  Bacterial polypeptide expressing nucleotide sequence isolated from the Sargasso Sea
tatgaaagtttctcaaaattggttgaaaaatttagtagaaattacttctactcctgaagatctctctgagaaattatctattggtggatttgaggttgaatcattagaagattgttcaaaaaatgtaaatggtgttgttttaggaaaggtattatctgttttaaaacacgaaggatctgacaaactttcaatttgccaagtcgatattggtaattcaaagaatttacaaattatctgtggtgcgcgcaatattaaaccaaatatttatgtctatgttgctactgtcggcgcgaaattaaatgcagttgatttaactattaaaagaagtgaaattagaggtgtcatgagtgaaggaatgatatgttcactgcaagaactgggtttagaggactctagcgaagggatagagatcattg

SEQ ID NO: 301318 - DNA, 529 bp, Unknown
  Bacterial polypeptide expressing nucleotide sequence isolated from the Sargasso Sea
tatgaaatttacatggtattggctccttgaccatcttaaaacagacaagaatttaaatgaaatagtagaggctttacccaaattgggcttggaagtctcctcagtaatcaatcttgctgaagaactcaagcaatttatttctgtaaaagttctagaggtaaaaaaacatccaaatgccgatactcttaacttatgtaaagtatttgacgggaataatacattcagtgtggtttgtggtgcgcctaatgtaaaagctggaatgattggtgtttttgctagtgttgatacgtatgttccgggtataaatttgacattaaaaaaagctaaaattaggggtgagtcttccgagggaatgttatgttcggaaaaagaattaaccttatcagataatcatgaaggtatcatagagctcccaaaggattcaaaaattggcttgcctgtcagagatgttatggaattaactgatccagtaattgaaatagagattactcctaacagaggggattgcctaggggttaggggaattgct

SEQ ID NO: 301319 - DNA, 839 bp, Unknown
  Bacterial polypeptide expressing nucleotide sequence isolated from the Sargasso Sea
ccaaaataatgtagaacttgtagtagctaaaattaggggtgtaacttcttttggaatgctttgttcagaatctgaattaaatttatctgacgaaagtgatggaattatagaattatcatcagcaaagtatgaaaaacgtgttggaaagagttattttttaaaatcaaattcaaatattattgatttatcaataacacctaatagaccagattgtctaggtgttagaggtatagcaagagatcttgcagcttcaggttttggtaagataaaggatattaaagaaaaaaaaattagttctaatactaagcaaactgtaaaagtaaaaattaataatgaaaaagatcaagcatgtacagcttttggcagttgtttgattactaatgtaaaaaacactgaaagtcctaaatggctaaaagataaattaatttcaatcggtcaaaagccaatttcagcaatagttgatgttacaaattatgttatgcttgatatcaaccgtccacttcacgcttatgatgctgataaaattgaaaagggaataatagttcgaaactctaaatctggagaaaaacttactgctctagataataaaaattatgaattagacaatggtatgtgtgtaataactgataataaaggtgttttaggcttaggtggaattattggaggcactagatctgggacagaatttgatacaaaaaatatactattagaatctgcatattttaaacctgcattaactagaaggacagcaaaaaaattaaaccttgatacagatgcaaaatttagatttgaaagaggtattgatcctttatctattgaagatggtttaaataaagcag

SEQ ID NO: 301320 - DNA, 715 bp, Unknown
  Bacterial polypeptide expressing nucleotide sequence isolated from the Sargasso Sea
atgcgtataaacctcgaatggcttagggaatggatcagttttgatttcgaaccctatgaacttgcacaccaattgacaattggtgggttagaggttggttcaattgaaacgattagctgtcatagcaaaggagttttaatagcaaaaataattgattgtcgtcctcaccctaatgctgatcgcctgaatatatgtcaagttgatacaggaagtagcgttcattcggttgtctgtggagcacagaatgcgcaaaaaaacatgttaactgcatatgcgcctcttggatcaatccttccagatggacgaactattgagcccgtcaatcttagaggagaagaatctgaaggaatgttatgttcatctgctgagcttggattaatagaggatcattccggattagtagaatttgaggaaaatgctccacttggggcttttattaaggattacttaaagttagacgatgtggcgcttgatcttgagttaacgccaaatagaggggattgctttagtgttattgggattgccagagaggcatctgccttaaatgggaagtcctttaaagaatctagtgttaaagcagtatcagaacaaattacagatagttttgacgtttcaatcaaagctaaaaaagcgtgcccacgatttgttgggcgcgttattaagggcatttctacaaatgctattaccccatcttggatgcgcgagcgtttaagaa

SEQ ID NO: 301321 - DNA, 124 bp, Unknown
  Bacterial polypeptide expressing nucleotide sequence isolated from the Sargasso Sea
gaaaaatatactggttatgcgtctggtatgggcgttgatcgtttggcaatgcttcgttatggagtagatgatcttcgaatctttttcgaaaatgatcttcgctttatagagcagttttcttgag

SEQ ID NO: 301322 - DNA, 676 bp, Unknown
  Bacterial polypeptide expressing nucleotide sequence isolated from the Sargasso Sea
atgaagtttactctttcttggttagatgaacatataaaattaaataagtctgaaatagaggtttcagaactgttaaccaacttaggcttagaagttgaaagtctagatagtctaaatgaaaatttcaaaaattttttagtttgtaaaatagtaaaaacaaaaaaacatcctaatgcagaccgattaaaagtttgtgaaattaattatggaaaagagaattttaaagtagtttgtggtgcttcaaatgcagtagaaggactaaaaacaatttttgcccctaatggcacgtatattccaggaaccaattttaaacttgagaaaaaaagtattagaggagtggaaggagatggaatgctttgctctgaaaaagaattaggccttccagaaaaagtagatgggattatagagttagataataattatgatgttggtaaaactttaaaaaactacattcaaaacgattttttatttaatatagggctcacacctaacagaggtgattgtgcttcagtgagaggaatagctagagacctagcagcaagcttaagtttaagcttaattaaaagaaaaattaacagtaaatcaggtacttttaaaagtgatattaaatgggacataaagtctttgaaagatataaatgattgtcctttaatatatggaagatatttaaaataac

SEQ ID NO: 301323 - DNA, 904 bp, Unknown
  Bacterial polypeptide expressing nucleotide sequence isolated from the Sargasso Sea
catcattggtagtgaggcatcttcagtatcatcaaatacaaataacatagctgttgaagcagcattttttaggcccgagattattgtaaatcaagctagaaagtatggactggcaaccgatgcatcttaccgttttgagagaggtgtagatcctgagatacagcaactagcgctagaaagattcatatttcttctaaatcaattagcagaatatgattcagttaagatttattattctgagtcatccaaggctaaaaagaataatgtaaagttcaatttagaaagatttaataaattttctggattaactttaaaggcaggcgaatcaattcttattttgaaaaatttaggatttaagctgcttactaaaactaagaattatctgacattcaaaattcctagctatagatttgatatttcattagaagaagatttatatgaagaattattaagatcttatggatatgacaacattcctacatctaagcctaaagcaggaccaagaattaaaaataatcaaataaatgttttagacaaacttaggctcggcttagtctattctggctttagagaacttatgcacatgccatttgtttcaagagagtcctttatgcgactaaattctaatggttggacggctgctgaattgcaaaatccaattaatgataatgaacccttgctgagaggcagtcttttcagatcattatttgcagcaataagtgcaaatttaaaaaaaggatattcatctataaaagtttttgaagcaggcaacgtatttaaaaaagaaaaaaataactttactcaatcattgcatgtatctggaatgatttatcaccatgaacctcaacaaacgtgggatcaaaaagaattgaactatgactttctttcattaaaagcagaaatc

SEQ ID NO: 301324 - DNA, 742 bp, Unknown
  Bacterial polypeptide expressing nucleotide sequence isolated from the Sargasso Sea
atggcagatatatttactaatttaggcttagaatgtgaatcttcaaataaaacactgaactttgatattacaccaaatcgaggagatgctttaagtttgaacggactagctagagaattttctgctagccaaaaaaattcaagatttatacaaaaaccctttaataaggtatctttccagaattcaaaagattatatcggtaaggtaaacaatgaatgttgtcaaaattatcacttactagaaatacttgaaataaacaaatttaaggcgttacctaaagaaattgtcaaattgctggaaaaggcagatattccattaatacatccaatggtagatataggaaatttcgtaatgcttgaactgggcactcctcttcatgtttttgatagggataaacttgcactacctttgtcagttaattttgcagatgaagatgaaacagtaactataattggtggtgagaaaaagatccttgattcaaatattgcaacaatacgagatagaaatgctactgttgcgattgcaggaatcataggctgtgataattcttccgttacatcggagacaaagaattttttggtcgagtctgctgcttttttacctaatgtgataatgaataaggcaagaaagctaggtttaaacactgatgcatctttaaggtttgaaagaggtgttgattccaccatgcaggtaaatgctttagttaggtttttagagcttttaaatgagataacttcggtaa

SEQ ID NO: 301325 - DNA, 808 bp, Unknown
  Bacterial polypeptide expressing nucleotide sequence isolated from the Sargasso Sea
aatattggatgtacaattaaaccagaaaaaaatgatcagtttataatcaaaaaaagtaagataagaggtgttgaatctttcggaatgctgtgttctgaagaagaactcaatttatcagatgattcagagggaataattgaactttcaaaagattgtaaggttggggaaaagttttcaacttatgttagtgacgaaaatatagagatagaaattgcaattactccaaatagagttgactgtgcgggagtttacggaatagcaagagatttgagtgctgctggttttggcattttaaaacttagaaaggcaaataaagtagcggttgagaaaaagagctctataaaacttaaaaatacattacaagatagtgtatgtcctcaatttttgttaagagaaataactcacttaaaaaatcgaaagtcttcttctgcaattattaaaagatttaaaggatctggtttaaaggtcatctcgtctttagttgatattacaaattatattacaattgatttttgtagaccattacatgtttttgatttagataaaattcaaggaaacatcacaataagactttcagaaaagggtgaggaatttctaggtttagatgaaaagaattattctttagatgaaaatatgattgtgatttgtgatgaaaaaaatatcatcagcttagctggaattctcggtggaaaaaatacctgctgtgatgacaacacaaaaaatatcttagtagagtctgcatatttcgatcctgaaataatagcttctgcaggaagaaaacttaatattacaagtgacgctcgatata

SEQ ID NO: 301326 - DNA, 1003 bp, Unknown
  Bacterial polypeptide expressing nucleotide sequence isolated from the Sargasso Sea
gatgttgtgttcagagtatgaattgaatttatcaaatgagagtgaaggaataacagaattaaaaacaagtaactactcagataaaataggtaaaaattttttcaatagccgtgctgaaaaagttgtagatttatcggtcacacctaatcgtcctgactgtttgggagtaagaggtatagctagagaccttgcggctgcaggagccggtaaactaaaaaaggtatcaaaaaataatattaaaaaaaatggatctcaaaaaatcaaagtttcaatctcgaaagataaaaatcaaggttgtactgtatttggcagttgtttgattgagggtgttaccaatcaagaaagtccaaagtggctaaaagaaaaaattgcgtcacttggtcaaaaaccaatttcagcaattgttgacattacaaattatgtgatgttagatttaaatagacccttgcatgcatacgatgcagataaaattaataaggaaattatagtaagaaattcaataaaaggtgaaacttttaaagccctcgataataaggagtataaattggatgatgatatgtgtgttatttctgataagtctggagttttaggattgggaggtatcattggaggaacacgttctggaactgaaatcgatactaaaaatattttattagaatctgcgtattttattcctaggtctataagaaaaacttcaaaattattaaatattgatactgatgcaaaatttagatttgaacgagggatcgatcctcaatccatcgaattaggtttatcaaaagctgctgaacttatatctgagatttgtggtggcaaaataagtaattttgatattcaaaaaactgataagcatgaaaagaataaaattaaattcagagtttctctatttgaaaaaataactggttttaaagtaaaagataatgagataattaaaattttaactgatctaggatttgaggttgctaagagaaaattagaaatagatttaaaagtgcccacctgg

SEQ ID NO: 301327 - DNA, 904 bp, Unknown
  Bacterial polypeptide expressing nucleotide sequence isolated from the Sargasso Sea
tgaaactatagttaatcaagcaagaaaatatggacttgccacagatgcttcgcatcgctttgaaagaggcgtagatccagaaatccagaaattagctttagaaagatatttatgtcttttaaacgaaatagctacatacgattcagccgaactctatcattcacaatctaaaaaatctaaaaaggcaaatgtacgacttcacatagaaagatttaataatttttctggcctaaatatgaaggcaagccaagcgattcttatattaagcagcttaggctttgaaattgcagctaagagctcaaaaagccttgcattcaatattcccagtcacagatttgatatttctcttgaggaggatttatatgaggaattattgagatgttatggctatgacaatatccctatatcgaaacccaaggctggaccgattattaaaaacaaaaaggacaacgcattagaaaatcttagagttgggtttgttcatgctggctttaaagaattgatgcatatgccatttgtttcacaagaatcttttcaacaattaaattctgagaattggactgccgccgaactgcaaaatcccataaatgaaaatgagccatttcttagaggcagtctttttaaatccctctttagcgcaataaataacaatgtaaaaaagggatactcatctattaaagtttttgaagcagggaatgtatttaaaaaagaaaaacgaggttttgctcaatcgctaaatttatcaggaattgtctatcaccatgaacctaatcaaacctggagtcagaaaaaaattgtatatgactttttttccatgaaagctgaaatttttaagctattacaaaccctaggtattcataatgccgaattacaaaaaaccagtttctgtacgccattttcatga

SEQ ID NO: 301328 - DNA, 820 bp, Unknown
  Bacterial polypeptide expressing nucleotide sequence isolated from the Sargasso Sea
ggcatcagaggtatcgcaagagatttatcctctaccggaatcggaaaattaacatctttaaaaaagaaaaaaattactcaaagctctaaacacaaaattaaagtatcaatagctaaagacaaacatcaaggatgtcttgcttttggaagttgttatataaaaaatatagaaaataaagaaagtccagaatggttaaaaaataagcttctctcattgggtttaaaaccaatttcagctgttgttgatattactaattatgtaatgttcgatctaaatcgtcctttacatgcgtatgatgcaaataaaatagacaaagagattatcgtaagagactcaaaagagggtgaagaatttgaggctttagacaataaaaaatataaactcaaaaaaggaatgtgcgttattgctgataagtctagtattcttggtctcggcggtatcattggtggcacgaaaacttcaactgagtttgataccaaaaatattttacttgaatctgcttattttcttccttcatcaataaggaaaacttcacgagaattaattattgatacagatgcaaaatatagatttgaaagaggtatagacccaaagtctataacagaggggctagaagttgcaacggagttgatattaagcatatgcggaggtcaagctagtaaattcataattacaggaaaaaattctccaaaacaaaagattattaaatttaatataaacaattttgaaaatttaattggaattccgatatctatcaacgaagcacaaaaaattttagcatcattaggttttaattgtaaaaaaggaaaaaaagatctta

SEQ ID NO: 301329 - DNA, 284 bp, Unknown
  Bacterial polypeptide expressing nucleotide sequence isolated from the Sargasso Sea
tatggacaaaatatctttaccttctgttcctagggctcttggaacaatacatccaattaatcagataaaagatcatatactaaaaatcttatctgagatgggctttatagaggtttttgggcctgaaattgagactgaaaaatttaatttcgatatgttgaatattaaagaatctcaccccgcaagacagatgcatgacactttttatgttgacaataaatcaaaagtattacgaacacatacatctcctgttcaaattaggagtatgctggaaacaagccctc

SEQ ID NO: 301330 - DNA, 502 bp, Unknown
  Bacterial polypeptide expressing nucleotide sequence isolated from the Sargasso Sea
ttgtccaatagactttttcaattaggtcacgaacatgaaatagaaggtgaaattttagatctcgaaattacccctaatagaggcgattgtctttcgctgaaagggatagcaagagatttaaattatttttatgactcaatttcagatcaggacatttatacggatgagattccgaaattagatctcaaatttaaaaaccaggcaaaagatgtttgcccaaatatttcttttttagaattagaaatagatggaacaatagcagactataagccatacctagaaaactatttcactgatctcagcatcaataaaaacaatttctttacagatatatcaaactatttagcttatgaaactggacaacctacccactgttttgatgcaatgaagatgcagggtgaatttgcactaattaaaagaaaaaaatcagaaaaatttcaaacccttctcaatacagaggttgaattagaaggagaaaatttagtgttcaccttagatggac

SEQ ID NO: 301331 - DNA, 577 bp, Unknown
  Bacterial polypeptide expressing nucleotide sequence isolated from the Sargasso Sea
atgcctgagttaaatcttgataagattttagcttctttagatttaagaatttctgaagttactttaacgaatgaatatgatcaaatttctaaagattttttaggtaaggattcacttttagctgaagaaagaaaaaaacttcctaccttatctaatcaagataaaaaaacatatggaaaaaaacttactgaaatatctaaaaaaatagaatcaaaaatcgaatcatctaaaaaacaatttatattagatacttatcaaaaaaaagagaaagaagaatttactgatataaccatagattggaatcgtaatgaaggatcgtacaaacatataatctcatcagtgatggatgaagttgtaaacatattttcatctattggatatgaagttgcttacggtcctgaagcagagacttcatggcataattttgatgctttaaacactcctgactggcatccagctagatacgaatcagatacaatttatcttaattctaatttgcaaaccctcttaagaactcaaacaagtactgtacaaataagacacatggaacaaaatgatccacctgtttatatagtgc

SEQ ID NO: 301332 - DNA, 89 bp, Unknown
  Bacterial polypeptide expressing nucleotide sequence isolated from the Sargasso Sea
agtctatttcttagaaagtgctttcttcaagccttcagttattagaggtagagcaagaaggtttgtttccaaacagatgcttcaataag

SEQ ID NO: 301333 - DNA, 337 bp, Unknown
  Bacterial polypeptide expressing nucleotide sequence isolated from the Sargasso Sea
gatgaaattcactctctcctggctcaaggaccacctcgacactgatgcaagcgttgaggagatcaccgagaccctgaccgacctcgggctggaggtcgaggaggtcgtgaaccctgccgatatgctcggtgcgtttacactggccaaggtggttggcgcagagcagcacccggatgcagatcgtctgcgcgtatgtcgcgtgatgaccgatgagggcgaaaaacagatcgtttgtggtgcacccaatgcgcgggaaggcatcaccgtggttctgtgtaaaccgggcgactatgtgccggggctggatttcaccctctctgttggtaaaatccgtggc

SEQ ID NO: 301334 - DNA, 871 bp, Unknown
  Bacterial polypeptide expressing nucleotide sequence isolated from the Sargasso Sea
gttaaggaaaattattatcaattgggtcagaaaccaatttcagcaatagttgatattacaaattacgttatgatagatatcaatcgtccattgcatgcttacgatgcagataaaattgaaaaaagtattgtagtaagaaattcaaaatccggagaagaatttaatgccttagacaataaaaaatataaattagatgataacatgtgtgtaataactgatagcaaaggagttttagggttaggtggaattgttggtggcacaagatcaggcactgaatttaaaactaaaaatatatttttggagtctgcctattttgatcctaaatcaattagaagaacggcaaagaaattaaatatcgatactgatgctaaatttaggttcgaaagaggcatagatcctttgtctatagaagagggattaaataaggcagcattattgattaaagaaatttgtggtggtgagatcagcaaaatagatattcaaaaaattaaaacttacaaaactaaaattataaaatttaatcctaacttatttgaaaaaatatctggttttaaaatttctattaaagaaatgctaaaaattttagattgcctaggatttggatataaaaagaataaaaactatttagaattattcataccatcctggagacctgatatcacactagaaatagatattgttgaagaattagtgagaataagtggttatgaaaaaataaagattgttaacccaattaaagaaagaatcaaatcaactcttactcaaacccaaaaattatttcattttttacagaggtctatagcttccaaaggctatttagagacaattacatggtcatttacagactctaattataataattatttttaag

SEQ ID NO: 301335 - DNA, 436 bp, Unknown
  Bacterial polypeptide expressing nucleotide sequence isolated from the Sargasso Sea
atgaagttatcaataaactggttaaaagattacataagtttaaataaatctgttgatgaaatagcagactcattaactatgataggcaatgaagttgaagaaattattacaactggagatattcccggagtaattgtagctgaaatcaaagaaattattcctcatcccaatgcagataaactgcagttagctaaaatttatgatgggaaaaatactctaagtgttgtttgcggagccccaaatataaaagaagggcaaaaaatatttcttgcaactattggaaccaatctacctgatccaagtaataatagttattttgaaataaaaaaatcaaagataagaggagtattatctgagggtatgatttgttcagaaaaagaattgggaataagcgatgatcatgaaggcataatggtcttaccaaatgaattatgaa

SEQ ID NO: 301336 - DNA, 888 bp, Unknown
  Bacterial polypeptide expressing nucleotide sequence isolated from the Sargasso Sea
accatggaatttagaaaaagcatgggtaaaagttatttttcaaaatcaaaatcaaatcttattgatctatctataacacctaatagaccagattgtcttggaattagaggaattgctagagatctggctgcatcaggttttggaaagttagtagatttagaagaaaaaaaaattcattcaaaaaataaacacaccttaagagtaaaaattaataaggaaaaaggacaaggatgtaatgtgtttggaagctgtttaataacaaatgtaaaaaattgtgaaagccctaaatggcttaaagataaattaatttcaattggtcaaaaacccatctcagcaatagttgatattacaaattatgttatgcttgatattaatcgtccattacatgcttatgacgctgataaaattgaaaaaggtataattgttcgaaactctaagtctggagaagagtttacagcacttgataataaaaattataaattggagaatggcatgtgtgttattagcgataataaaggtgttttaggacttggaggaattattggtggaacaagatctggtacagaatttgatacaaaaaatatattacttgagtcagcttattttgaaccaggatcgattagaaatacagcaaaaaaattgaatcttgatactgatgcaaagtttagatttgaaagaggtatagatccgctgtcaattgaagatggtttaaataaagctgcaaaattaataaaagagatttgtggtggtgcaattagcaaaattgatattcaaaaaatagaaacttacaaaacaaaaaaaattatatttgacacaaatatttttgaaaaaatatctggttttaaaatttctttaaaagaaatgattaaaattttagaggatcttggt

SEQ ID NO: 301337 - DNA, 394 bp, Unknown
  Bacterial polypeptide expressing nucleotide sequence isolated from the Sargasso Sea
gcagattgaggggctggtgatcgatgaagggatcaccttcgtcgatttcaaggccacgctcgctgagttcgcccggcgctactggggaccagatactcaggttcggtttcgcccttcctattttccgtttaccgagccgagcgcagaggtcgatgttaaacggattatcacccgcccagatggtactcagtatgagacggaatggttggagatcatgggctctgggatggtcgatccgaatgtgatcgcgaacgccggctatgatcctgaacgatatacaggttgggcattcggaatgggccctggccggattgcgatgctaaagcacggcgtccaagacctcaggacctttttcgaaaatgatatacgattcctcgaacaattcgctcggtga

SEQ ID NO: 301338 - DNA, 372 bp, Unknown
  Bacterial polypeptide expressing nucleotide sequence isolated from the Sargasso Sea
gctggggggcggacccgaggagatctcggagcacttggcactacgtggggcgccggttgacgatatcacgtctccgggtagggatctgagtgacatcattatcggtcgggtgattagggcgcggcagcatcctaatgcggaccggcttcgggtgtgtgaggttgataacggagcggaaacagttcaaatcgtatgtggtgcgccggtggtgaaggacggggcgtgttacccgttggctccggcagggtcaatcctcccgggtgatttcaaaatcaagagatctaagattcgtggtgaagtgtctcacggcatgttgtgctctgccaaagagttaggtctcggagacgatcactcgggaatcatggagttggt

SEQ ID NO: 301339 - DNA, 906 bp, Unknown
  Bacterial polypeptide expressing nucleotide sequence isolated from the Sargasso Sea
aggcattagaggaatagcaagagatctttctgcaagtggagttggaaaattaattgataataaaaatattaaaataaaaaaaattggtaagcaaaatttaaaagttaaaatagaaaaaagcaaaaaccaagcttgtacaatatttggcagctgtcttattaaaaatattaagaataaagaaagtccagaatggttaaaaaaaagaattctttcattgggattaagaccaatttctgcagtagttgatataacaaactatgtaatgtttgacttaaatcggccactccatgcatatgatgccgataagattaacaagggaataattgtaagaaattctaaaaaaggggaaaattttaaagctctagataataaagattataaattagatgatgaaatgtgcgttatatcagatcatcaaggaattttaggattgggaggaattataggaggtataagatctggaacagaaataaatacaaaaaatattttgctagaatcagcttactttgatccagagattaccagaaagacagcaaaaaaattagaattaaatagtgatgcaaagtttcgatttgagagaggaattgatccaaattctatttccatagggcttgaaaaagcttcagaaatgattgttaagatatgtggagggaatgtaactaagttagacattcaatctataaaaaaaatagagaagaaaaaaatatcttttgatccaaatcttgcatccaaaacaattggaatacaaataaaaactaatgaaattgttaaaattttgcaagatttaggatttaataataataagaaaggcaagaatcttattgttgaaataccaagttggagaccagatgtaaaaggtcaaatagatttagttgaagaagtaatcagaattaaaggatttgataa

SEQ ID NO: 301340 - DNA, 783 bp, Unknown
  Bacterial polypeptide expressing nucleotide sequence isolated from the Sargasso Sea
ataggtcttgaggttgagaatatagaaaatttatctgagggattagatttatttaaggtagcaaaaattataaaaacagaaaaacatcctaatgcagacagacttaaagtttgcgatgttgatgttggtaataaagaaatcaaaaaagttgtttgtggagctgcaaatgcaagagagggcctccttactgtatatgccccaccaggcgcaataatcccaaaaaacaaaactaagcttgttgttgctaaaataagagatgttacatcatatggaatgctctgttcagagtctgaattaaatttatcagatgaaagtgatggaattactgaactgtcatcatacaaatatgcaaaaaaaattggaaaaagttatttttctaaaccaagttataatcttattgatttatcaattacaccaaatagaccagactgtcttggtgttcgggggatagcgagagatttatcagcagcaggttttggaaacttaaaaccagaaaaagataaaaaaataaaatctaataaaaaacaaaccttaaaagtaaaaataacaaaagaaaaaaatcaaggatgtttatcttttggtagctgcttgataactaatgttaaaaatacgcaaagccctcaatggctgaaagataaattaatttctgtaggacaaaaaccaatatctgcaattgtagatataactaactatgtcatgattgatattaatcgtcctttgcatgcatacgatgctgacaaaattgataagggaataattgttagaaattcaaagtcaggagaa

SEQ ID NO: 301341 - DNA, 774 bp, Unknown
  Bacterial polypeptide expressing nucleotide sequence isolated from the Sargasso Sea
aaaactaagataagaggagttgagtcttgtggaatgcttgtctcagaaagagagatgggtatttctaatgaacacgatggtattattgaaataaaggataattataaaattggtgatttatttagtaaaatttttgcaatagatgaacctgttatagaaattaatttaacaccaaatagatctgactgtttgtctgtcagaggtatcgcaagagatttagctgcagctggtattggcaaattaaaagaattaaaatataaaaaagtaaaagaatcatttaaaagcccaattacgtggaaaaaagaatttaaaaacaataatctatgtcctggagtagcaggtcgatattttaaaaatgttaaaaatgtagaaagccctaaatggcttcaagatagattaattgcaatcggattaagacccatttctgctcttgttgacattacaaattacattacctttgacttaggaagaccacttcatgtttatgatgctgacaaagtctcaggtaatttaacaatgcgattagccaacaaaaatgaagaatgtttagcattaaatgaagttaattataaatgttacagtgacatgattgtaatttctgatgatgaaaaaaaacttcatggaattggtggagttatgggtggtcttgatagtggttgtagtatggagactaaaaatgcctttctagaagttgcgttatttgatccaatttctgtaactaaaactggaagaaaactaaatctacaaactgatgcacgttaccgtttgaaagag

SEQ ID NO: 301342 - DNA, 586 bp, Unknown
  Bacterial polypeptide expressing nucleotide sequence isolated from the Sargasso Sea
aatgctagaacagataaacaatcttagtgaaaaggcacaaaacgaactcaatgcattaaccggcgctgaacagttgccgcaatggtaccaaaggtatcttggtagaaatggagacctgacatcattactaaaaaaattaaagaccattcctgcagaagatagacctgagataggtaaggtcattaacaaagttaagcaggaattgcaggaattatttgattctagacagcaaactctccttgaaagcaaacttgatcagcaactagaaattgatgatcttgatgtttcactcccagggcgcccctgcactcctgggcatctacatctgacaacacagaccttgcggcgtatataccatatattcagggaaatgggattccaggtttatgaggctccagaagtggaaagtgatgagtttaatttccaacttttaaatattcctcagtatcatccttcgcgagacatgtgggacacattttgggtaaatgataaagttgtattgcgtactcacacttctccaggacaaatctgggctatgcgggaatattttccagaaccaatcagagtgatacttcctggaaagtgc

SEQ ID NO: 301343 - DNA, 667 bp, Unknown
  Bacterial polypeptide expressing nucleotide sequence isolated from the Sargasso Sea
aataaaactgagtttattcaagaagaagttctgaatggtgctatttatggaaataaaaaatttggaaaatggataaattcgggtaaggataacgatcttaattatttccaagccagaggaaagttaaaggaggctttatcatctttgaacataaaaattgatgataaacctactgattcaattgattttcttcatccaggaagaacagcaaaattatttattgaagggaaagatgtaggttattttggtgaaatacatcccaaactaatattagaaaagaagtcattaaaaaaagtttatttatttaacataaatttttctaacctcttaggagctagtacaagaaaaaataaatggattccaatatataaacaatacccaattgttccgaaaatggaaagggatataaattttgttttcagtaagaaatttttaattagcgaaataacatcacaaataagaaaaaccggaaaaaatctattagaggatgtaaatttacttgatgtttttgaagattctaaatttggagatgatcatataagttatacatttagattatcttatagagataaagataaaacattactggactcggacattacatcaatacattcaaatatcattactaatgttgaaaaatgttttaatactaaattgaggaattagt

SEQ ID NO: 301344 - DNA, 826 bp, Unknown
  Bacterial polypeptide expressing nucleotide sequence isolated from the Sargasso Sea
gataaattttttaaaacccttcagggcaaagaaattaggcttgaatcaggtgaccttgtttttcaacaagattcagaagttataaatctagcaggaataatgggaggatctagttcctcatgttcgccagatacaacaaaagttttgatagaagcagcacatttttcacctgattcaattattggtaagactataaaatataatataaattccgatgctgcatataaatttgaaagatgggtcgatcccaatatgcaagaggaggcaataagaagatttataaagatagtttctgaccatgcaaatattatctctataaggatgagttcttccgatcaaaatgattctgataaaaaaataattcctttttcaaatgataatattcaaagaatcttaggagtaaaaatcgatgaagatttatctaaaagcttcttaaattctttaggatttgaattccaatcaaaaaaaacagtacaagttccatcacatagaaatgatataaaagatagcaatgatttatctgaggaaatagccagaatgatcggctacgataatattgaaagaaaaacttttaagattgctaacaagatagaatttagcaataaagaagatattgaacttaagcgatatcttacaaataaaggattttcagagattataaatattccctttgtttcaaaatcatcaaaatcatcaatacttctagataatcctctggactccaataaagattctttgaggacaaatatcatagattcattacttcagaatcttctttataatgaaaggaggcaaaaggattcaattaaattatttgaaattgctg

SEQ ID NO: 301345 - DNA, 157 bp, Unknown
  Bacterial polypeptide expressing nucleotide sequence isolated from the Sargasso Sea
tagatccgaaggtcttagaaaattaggaatagattctgagaaatggaccggtttcgcagccggattaggcgttgaaagattttgtatggtaagacatcagattgatgacatcagaaaattttatacaaatgatcttagattcttagaacagttctga

SEQ ID NO: 301346 - DNA, 526 bp, Unknown
  Bacterial polypeptide expressing nucleotide sequence isolated from the Sargasso Sea
catcggccaaataaacagatagtgagtgttacagaaatgcaagatagaataaaagctgcagttgatgcgaaaaaagatgaatctttttttattatggcaagaacagacgcacttgcatctgagggaattgaaaaagctattgaaagatgtggtgaatacttaaaagttggtgccgacggaattttctttgaagcagctatatctttagatcaatacaaagagtttaataaaaatttttcagttccattactagcaaatattacagaatttggaaaaactccattattcactcagaaagaactaagcgatgttggagttgatattgttttatatcctcttacagcatttagagccatgagtttatcggcagaaaaaatttataattcaattatcaaagacgggacacaagagcctctgttagatataatgcaaacccgggaagagttgtatgaagttcttgattactacaattttgaaaaacaacttgatgaacagtttgaaaatactaaaaaggaaggctcatgac

SEQ ID NO: 301347 - DNA, 416 bp, Unknown
  Bacterial polypeptide expressing nucleotide sequence isolated from the Sargasso Sea
aattcatccatttattattaaaaagttagatcttaaaactgataatgttttaggttttgaaatcattttggacaatatacccgattcaagaaaaaaaattagagaagcaaaaccacaatttattgtttctgattatcaaaaagtagttagagattttgcttttgttattgatgaaaaatatagttctggagaaattattaatttagttaagaaaattgatcaaaaattaatcaaggatgtaaaaatttttgatgtttatcaaggagataatattgctaaaggaaagaaatctattgcttttaatgtaattctggaacctaaagacaaaactttaagtgatagtgatatagaacaagtaagcaaaaaaattatatcaacagttcaagaaactacaggcgcaacattaagatcgtaat

SEQ ID NO: 301348 - DNA, 943 bp, Unknown
  Bacterial polypeptide expressing nucleotide sequence isolated from the Sargasso Sea
ctgcaggatagattaagagctataggtttgcgaccaatttcaacattagtagatattacaaattatcttacgtatgaccaaaatagacctcttcatgtatttgatgcaaataaagttaagggaaatttggaggtaaggaaagctcgagaaaatgaaaagataattgctttagatgaaaaggaatatgttcttgacccaactatgacggttatttcagatgatggaggtgttgaatcaattggaggaatcatgggtgccatgaactctggttgcacctatgaaaccaccgatgttttcgtggaggctgcatattttaatgctatagctacagctaaaactggacggcgattaaggattgaatctgatgccagatatagatttgaaagaggtattgatccggagtttacggaaacaggtatggagttggctactaagcttatactgaagtattgtggtggtgaggcttcaaatctgattatttctggtgctccacccaacaaacctcccactattagcttggaccctgagaaattaaatgcagttgtaggtatgactgtatcttcgcgggagcagtgcagaatcttaaacgatctggggtttaaagtttctggaaattcaccttatgaagtcagtattcctagctggaggccagacataatgggtgatattgatcttctcgaagagatatctcgagtgatatcactaagaaatttagaagggaaaccatttgaaaaaaatgactttggagtacctaagccgattttgacaaaaatgcaacggagggtttcaaggttgcgtcgagcttttactatggaagggtatgacgaatgtataacctatagttttcttgataaggctagtgctgagctttttagagaagggaaggcgcaagcatttatttcgaatcctataagttcggaaatgactgatatgaggccttccc

SEQ ID NO: 301349 - DNA, 111 bp, Unknown
  Bacterial polypeptide expressing nucleotide sequence isolated from the Sargasso Sea
aatgagcattacaactttactgcattgaatacacctgaaaatcatccagcgagagatatgcatgacactttttatttagataataataaagaattattattaagaacacac

SEQ ID NO: 301350 - DNA, 870 bp, Unknown
  Bacterial polypeptide expressing nucleotide sequence isolated from the Sargasso Sea
gatgaaatttacaataggctggcttaaagaacatcttgatactaagttcaaggataatcaaataattgagaagttgacagatgttgggcttgaagttgagagctttgaaaaagttaaatctgacttagataattttaaagttgcaaaaattataaatgctgagcaacacccaaatgcagacaagttaaaagtatgtgatgttgatataggggaacaaaatatagtaaaagttgtttgtggtgcacctaatgccaagaaagatcttttgactgtttatgctggacctggatccgtgattccaaaaaataacattaaactcacagttagcaaaataaggggtgtaacttcatatgggatgctgtgctcagagtccgaattaaatttatctgatgaaagtgacggaataacagaactaaagtcaaataagtactctgacaaagtaggtaaaaatttttttaaaaataatactgaaaaagttattgatttatccatcactcctaatcgacctgattgtttgggtgtaagaggagtagcaagagatcttgtagcggcgggcgttggtagattaaaaaatatctctaatatgaaaattaaaaatagtgggcctcaaaaaattacagtttctattacaaaagataaaaatcaaggttgtaccatatttggtagttgtttaattaaagatgttacaaacaaagaaagtccaaagtggctgaaggataaaatcatatctctaggtcagaagcctatttcagcgattgtagatataactaattatgtgatgctggatttaaatagaccgcttcatgcgtatgatgcagacaaaattgataaagaaattattgtaagaaattcaaaaaagggtgaaacatt

SEQ ID NO: 301351 - DNA, 896 bp, Unknown
  Bacterial polypeptide expressing nucleotide sequence isolated from the Sargasso Sea
attgagaaaagtaaaaaatggttttatagaaaatggttttaacgaggtactaagttactctcttgttcctgaagatgatgaaaaacttataaaaatttctaatcctttgttattagaaacaagctgtcttagagataatatttggaaagaacatttggagatagtgaaccgtaatataaaagctggacaagcaagttgttacatatttgaaattggaaatatttttcaaaagaaaaatgagttcattcaagaagaagttctgaatggtgctatttatggaaataaaaaatttggcaaatggataaattcgggtaaagataacgatcttaattattttcaggccagaggaaagttaaaggaggctttatcatctttgaacataaaaattgatgataaacctactgattcaattgattttcttcatccaggaagaacagcaaaattagttattgaagggaaagatgcaggttattttggtgaaatacatccaaaattaatattagaaaggaagtcattaaataaaatttatttatttaacataaatgtttctaatctcttaggagctagtacaagaaaaaataaatggattccaatatataagcaatacccaattgttcctaaaatggaaagggatataaattttgttttcagtaagaaatttttaattagcgaaataacatcacaaataagaaaaactgggaaaaatctcttagaggaagtaaatttacttgatgtttttgaggatactaaatttggagatgatcatgtaagttatacatttagattatcttatagagataaagataaaacattactggactcggacattacatcaatacattcaaatatcatttctaatgttgaaaaatgttttaacactaaattgaggaattaaa

SEQ ID NO: 301352 - DNA, 840 bp, Unknown
  Bacterial polypeptide expressing nucleotide sequence isolated from the Sargasso Sea
aataaagatgtcgaaagtaatatatatgcaagctttagattaataaaaaatataaaaaattgcgagtcaccaagatggttgaagaacagattagaagcaataggattaagaccgattaatgcgcttgttgatgtaacaaattatctaacatatgatttgaatcgtcctttgcatgtatttgattatgataaaatcaataagggcttagagattcgaaaagcaaaagctggcgagaagattcttgcactcgacgacaaagagtataacctcagtcgatctcatacaattttctcagatgataataatccagagtcaatcgcaggtattatcggtggaaaaagaaccggctgtaatatggatactgtgaacgtcttggtcgaaagtgcagtttgggacaaaattaatatcgcggatactggtagggagttaaacatcaactccgacgcgagatatagaaatgagagagggatagatagcggattcaataacagtggtttggataaggccattgagatgataaaagaaatatgtggtggcgaaatatcaaatataaaatcagtcggaaagctgctgaatcgtcaagaaaagataaattttaacttggatgaagtatcaaggctactcggtgtatcctttaaaaaatctgatataaatcagatacttacagggttagggttttcattattagaaaaaaataacaaaattgaaatcaccgtaccatcatggagacatgatatttctgagaatgcctgcattgttgaagaaatcatgcgtatcaagggaactgacaatataaagccaattcctctcaaaaaatctgttggcgtggcatctaagaag

SEQ ID NO: 301353 - DNA, 415 bp, Unknown
  Bacterial polypeptide expressing nucleotide sequence isolated from the Sargasso Sea
acttgcatctgagggaattgaaaaagcaattgaaagatgtggtgaatacttaaaagttggtgctgacggaattttctttgaagcagctttatctttagatgaatacaaagaatttaaaaaaaatttttcatttccattactagcaaatattacagaatttggaaaaactccattatttactcaaaaagaacttagcgatgttggggtcgatattgttttatatcctcttacagcatttagagccatgagtttatcggcagaaaaaatttataattcaattatcaaagacgggacacaagagcctctgttagatataatgcagacccgggaagagttgtatgaagttcttgattactacaattttgaaaaacaacttgatgaacagtttgaaaatactaaaaaggaaggctcatga

SEQ ID NO: 301354 - DNA, 163 bp, Unknown
  Bacterial polypeptide expressing nucleotide sequence isolated from the Sargasso Sea
atggtacatcccgtcgttctaagaaacgggggttatgatcctgatgaatggaatgggtttgcttttggtatgggagtagaaagacctgctcttctaaaacataacatagatgatattcgttatttttacaataacgacctcagattccttcaccaattctgat

SEQ ID NO: 301355 - DNA, 879 bp, Unknown
  Bacterial polypeptide expressing nucleotide sequence isolated from the Sargasso Sea
catggaatgctttgttcagaatcttgagttaaatatatcagatgaaagtgcaggtattattgagttaaatcaaaattataaaaaaaaaattggaaaaagttattttaaaaataatttagaaaatataatagaactatcaataacaccaaatagaccagactgcttaggcatcagaggtatagcaagagatcttgctgctagcggatttggaaaattaattgataataaaaaaaatataataagaaaaaatggtaatcaaaagttaaaagtaaaaatagaaaaaaacaaaaatcaagcttgtacaatatttggtagttgctttattaaaaatattaaaaataaagaaagtccagattggttaaagcgtagaattctttcattaggtttaaggccaatttcagcagtggtagatataacaaattatgtaatgtatgatttaaatagaccacttcatgcttatgacgcagataaaataagcaaaggaataattgtaagaaattcaaaaaaaggtgaacattttaaagccttagacaataaagattataaactagatgatggaatgtgtgttatttcagataatgaaggtgtcttgggtttaggtggaataataggtggtacaaggtctggaacggaaataactacaaaaaatattttattggaatcagcttattttgatccggtgattacaagaaaaactgcaaaaaaattagatttaaatagtgatgcaaagtttagatttgaaagagggattgatccaaattctatttctataggtctagaaatagcttcaaaaatgatagttaaaatctgtgggggagaggtttctaaattagatattaaatctacaaaaaaaatagatataaaaaaaatatcgtttga

SEQ ID NO: 301356 - DNA, 930 bp, Unknown
  Bacterial polypeptide expressing nucleotide sequence isolated from the Sargasso Sea
gctaaaaataacgaacaaattacaacactttgactcacaagtgagaaaattagattcaaatgatcttgttattactgataatgataaaccgattgctctagccggagtaatggggggattagaaactgaagtatcagagacgaccacaaatcttcttattgaaagtgcgtattttgacaaagtatccattatgaaaacttctaggaaattgaacttgatatctgacgcatccataaggtttgaaagaggtattgattataaaattcaacgatatggcttagaacaatttttaatggaattaaaagataatcaatctattaattattcaaaaataaatgtagatgataaaggcaacttgaaaaacaacaaggtagttcttaaatattctgaaataaaaaaactacttggtattcatttaaaagaatcatttataaagaaggttctaaaatttttaatgatcgaatctgaagttgacaaagagagtgtaaagttcacaccaccctcatggcgttatgatcttgataggcctgtagaccttatagaagaattcgcaaagcattatggctttaataattttgagtcaactctacctcaaggtgttcataagaattacaaaggaagttattgggatcttaagagttacttatccaatgtactaacatctaataattttcaagaagtccaaactttaagctttgtaaataaagataaaaatttgctatttaatccagaaaaaaaatatattcaagtatttaatgcaatcgatcaatcgagtgaatttatgaggtcaaacctaatgtctagcttgatagatgtatacaaattaaatgatgaacaaaataatttatcaaatagttattttgaaataaatactgtttttgatacttctaaaaataaaatatatgaagatgtacctaatcagaatattgt

SEQ ID NO: 301357 - DNA, 547 bp, Unknown
  Bacterial polypeptide expressing nucleotide sequence isolated from the Sargasso Sea
ttgatagaagctggatatgataaacaaagtttttttataagagataaatctcctacatactatcaccctggaaaatctggctcagtttatcttgataaggatgatattgatcctgttgcatattttggagaacttcatccaaatattattaagaagctcgatataaaaactgaaggagtagtttgttttgaaatctatcttgattatttaaaagataataaaataaaattaaaggatcaaaagtcaaattttgaatattcggactatcaaaaatcagagagagattttgcttttgttgtagataaaaattacaaagcacaggatttaatagaaattatatcatcaattgataaaaatctaataagatcaattaaaatttttgatatttatgaaggtgaaaatattccagatgggaaaaaatcaatagctcttaatgttacaattcaatcatctgaaaaaacattagaggaaaatgatcttgaaaaaattaataaattaattatttcaactgttgaaactaagtctggggctaaaattagatcctaaa

SEQ ID NO: 301358 - DNA, 874 bp, Unknown
  Bacterial polypeptide expressing nucleotide sequence isolated from the Sargasso Sea
aatgcacgagaaggaatgaaaggtatatttgcacccgagaatagttttattcctggtacaggagtaaaattaaaaaaatctaaaattagaggagtagtatcatctggcatgcttgtttcagagagagaaatgggaatatctgatgagcatgacggcataattgaagttgactcaaaacattcattgggagaaaaatttatagaagtatttgatcttgatgaccctgttattgaaataaacattacgccaaatagaggagattgtctttctattagaggtgtcgcaagagatttagcagcagcaggattaggaaaattaaaagaaaatacattaattaaaaatattgaaggtacatttgaaagtcctgttaaatgggaaaaagatttcaatggagatatagagtatatttgtcccggtgtatcgggaagatattttaaaaatgtcactaataaagaaagtccagcttggttgcagcaacgattaaaggctattggtctaagaccaatttctgcccttgttgatataacaaattacattacttatgatttaggaagacctttacatgtatatgatgctgataagattaatggtaacttaaaaatgcgttacgcaaaagaaaatgaagactgccttacccttgatgaagaaaaacgaaaatgtacaaaagatatgatcgttatctctgatgataaccaacttcatggtattggtggagtgatgggaggtttggatagtggttgtagcttagataccaaaaatgtttttctcgaagtagctttatttgatcccatttctgtaacaaaaacaggaaggcatcttaaactacaaagtgatgcaagatataggtttgagagaggtatagatcctacttcaa

SEQ ID NO: 301359 - DNA, 694 bp, Unknown
  Bacterial polypeptide expressing nucleotide sequence isolated from the Sargasso Sea
atgaagttcacagttgactggttaaaaaaccatcttgaaacaaaatttaacaacaatcaaataatagataaattaactaatattggtctagaagttgaaagttttgagaattctacatctgaattagatacatttattgttgcaaaaattataaatgccaaaactcatccaaatgcagacagattgaagttatgtgatgttgatataggtagcgacaaaacaattgaagtagtatgtggagccccgaatgcaaaaaatggtcttttgacagtttatgcacctccaggatcaattattcctaaaaatcagatgaaattatctgtaagtaaaataagaggtgtaacatcttatggaatgctctgctctgaatcagaattactattatccaatgaaagtgatggaattatagaattaaaaaacaataaatatgcaaataaaattggagaaaaatattttaaaaacacctcagaaaaagtaatagatttatcaattacgcctaatagaccagattgtttgggagtaagaggaattgctagagatttatctgctgctggtgctggtaaattaaaaattaataaaaaatctaatttaaaatatagaggtaatcaaagtataaatgtaacaataaaaaaagaaaaagttcaaggatgtacaacatttggaagttgtttaataaaagggtgtaacaaataaa

SEQ ID NO: 301360 - DNA, 185 bp, Unknown
  Bacterial polypeptide expressing nucleotide sequence isolated from the Sargasso Sea
tgtaaaagttaatccaagcaaatatcaaggatatgcctttggaattggcatagacagacttggaatgttaaaatatggaattaatgatttaagagccttttttgagactgattatagatggttaagtcactttggctttgatccattggatgtcccttcaaattatagaggactaagtagatgaa

SEQ ID NO: 301361 - DNA, 502 bp, Unknown
  Bacterial polypeptide expressing nucleotide sequence isolated from the Sargasso Sea
catgaagttcacgcttagctggctcaaaacgcatctcgccaccgatgccgacctgacgacgatcctcaagaagctcaacgccatcggcctggaggtggacggcgtcgacaaccccgccgacaagctcgccgcgttcaagatcgcgcgcgtgctgaccgccgatccccatccgcaggccgacaagctgcaagtgctgaccgtcgatcagggcgacggcaccccgctgcaggtcgtctgcggcgcgcccaatgcgcgcgcagggctgatcggcgtgttcgggacggagggcgcggtcgtgccatccaacggcatggtgctgaaaaagaccgcgattcgcggcgtcgattccaacggcatgatgtgctcctcgcgcgagctggaactgggcgacgatcatgacggcatcatcgaactgcccggcgacgcaccggtgggacagggctatgccgactgggcgggcctcaatgatccggtcatcgacgtgtcgatcacccccaatcgc

SEQ ID NO: 301362 - DNA, 682 bp, Unknown
  Bacterial polypeptide expressing nucleotide sequence isolated from the Sargasso Sea
atgaaatttactctgagttggctaaaagatcatttagacacgaataaagatctagatacaattgttgatacgttaacaaatataggtcttgaaattgagagtgttgtcgataaatcaaaagattttaatgactttactgttgctgaggttctaaaagcagagaaacatcctgatgcagatagacttaaagtttgtacagtaaaatcaattgatggaacttatcaagtggtatgcggtgcacctaatgctcgagaaggaatgaaaggtatttttgctcctgagaatagttttattcctggtactggagtgcgattaaaaaaatctactattagaggagtagagtcatgcggaatgcttgtttcagagagagagatgggaatatctgatgagcatgatggtattattgaagttgactcaaaatattcactaggagaaaaatttattgaagtttttaaacttgatgatcctgtaattgaaataaatattactcctaatagaggtgattgtctttctatcagaggtgtggcaagagatttggcagcagcaggcttaggaaaattaaaagaaaatacattaatacaaaatatcgaaggtacttttgacagccctgttcattgggaaaaagaatttactggtgatgaagagtatatttgtcctggtgtagcaggaagatattttaaaa

SEQ ID NO: 301363 - DNA, 721 bp, Unknown
  Bacterial polypeptide expressing nucleotide sequence isolated from the Sargasso Sea
tatgtccggaactataagtcctttagatatgtttagagatttagttggtttgaggccagattcagttctagaaagaaaggagtctatttttcctaaaggtaataaaaaaattgtttatctaacagatgtgactacgtcatacaatgaattaatcagtaaatcaagtacttgggataaaatagtgtctaaattagaattaataacctctaatttcaaaggcaatatagctctattctttccatcatacaagcttcttgaatctgccttacaaggaattaaaattaaaaaacccatttacaaagagtatttaggtatggaacaagaagagttaatgcaaacagttgaaagtttcaaatcagatagtagtgcagttttagcaggcgtgatgggaggtcgcttagctgaaggaattgattatccaagcaccacattagaaatggcaataatagtagggattccatatcctgcaccaggtgtaagacaaaatgcattacaacattattatgatatttcttttagtgggcaagggtggaaatttgcagtagaagctccagcagtaagaaaattattgcaagcagcaggtagagtagtcaggtcagaaactgacagaggattcatagttatagccgatagtagaactggtcgtttcttagaatacattccagaattagaacaatcagatgatattgtgtctgaaataggtgaattcttcgaagcctaa

SEQ ID NO: 301364 - DNA, 891 bp, Unknown
  Bacterial polypeptide expressing nucleotide sequence isolated from the Sargasso Sea
aatgacattaagaaagttgtttggtggagcacaaaacgcaagaacaggtttagtaactgtttacgcaccaccaggttctattataccaaaatcaaaaacaaaattaaaaattgcgaaaataagaggagtagagtcacatggaatgttgtgctctggaaatgaattaaatatttcagacgacagtgagggaattattgaattaaaaaatagagaaaaagatattgggaaaaactacttcaagagtaaaggtgaaaaatcaatagatatatctgtgacacctaatagaccagattgtttaggcgttaggggaatagcaagagatttagcttctgccggtttaggtaagttctcaaatttaaaaaaaataaagataaagcaaaactttaaacaaccaataaaaatttcaattacaaaagaaaaaaatcagggctgtttaaattttggtgcttgttatataaaaaatattcaaaataaagaaagtccagaatggcttaaagagaaaataatttctctcggtttaaaaccaatttctgccgtagttgatattactaactatgtaatgtttgaccttaacagacctttgcatgcttatgacgctgataaaatagataaagagataattgtaagaaactcaaagtctggtgaaacttttgctgcacttgatggaaaaaactataaacttggaaataatatgtgtgttatttccgatagaaccggacctttaggtcttggcggtataataggtggttcaaggtcaggcactgaatttgatacaaagaatattttattagaggcagcatattttcatccttcatctataaggaaaacggcaagtaatttaggtgttgatacagatgctaaatatagattcgagaggggtattgatccaaa

SEQ ID NO: 301365 - DNA, 832 bp, Unknown
  Bacterial polypeptide expressing nucleotide sequence isolated from the Sargasso Sea
attgtcatcagaacagttggcgttgagaaaattaaaaaatggttttatagaaaatggttttaacgaggtactaagctattctcttgttcctgaagatgatgaaaaacttatcaagatttctaatcctttgttattagaaacaagctgtcttagagataatatctggaaagaacatttggagatagtgaaccgtaatataaaagctggacaatcaagttgttatatatttgaaattggaaatgtttttcaaaagaaaactgagttcattcaagaagaaattctgaatggtgcgatttacggaaataaaaaatttggaaaatggataaattcggggaaggttaacgatcttaattattaccaggccagaggaaaattaaaggaggctttatcatcattgaacataaaaattgatgataaacctacagattcaattgattttcttcacccaggcagaacagcgaaattagttattgaagggaaagatgcaggttattttggtgaaatacatcccaaactaatattagaaaagaagtcattaaaaaaagtttacttatttagcataaatgtttctaacctcttgggagctagtacaagaaaaaataaatggattccaatatataagcaatacccaattgttccgaaaatagagagggatataaattttgtattcagtaagaaatttttaattagcgaaataacatcacaaataagaaaaacaggaaagaatctcctagaggatgtaaatttacttgatgtttttgaagatactaaatttggagatgatcatataagttatacatttagattatcttatagagataaagaaaaacat

SEQ ID NO: 301366 - DNA, 403 bp, Unknown
  Bacterial polypeptide expressing nucleotide sequence isolated from the Sargasso Sea
attagataattcaacaaaagttggaacgcctctaaaaaaaattataaaatctgaaacagatcatatttttgaaattggattaacaccaaatagatcagatgctatgagtcacatgggtatagctcgagatttaaaagcagtatttgattttaataaaacaaaatataaatcaaaaaaaattgagaaagatttatttaaaattgataccaactccaaaattattccaatagaaattttaaatccaaagaaatgtcataattatcatggtataacaattagtaatgtaattgtaaaagaatctcctgattggttaaaaaataaattgacttcaatcgatatttctccaaaaaataatatagtcgatattacaaattatgttttacatcacttaggacaaccactc

SEQ ID NO: 301367 - DNA, 310 bp, Unknown
  Bacterial polypeptide expressing nucleotide sequence isolated from the Sargasso Sea
atgcagcagttaactgagatcgtagaacaagccttagtcattattgaccaggccagtgatctaaaagcactggatgatatccgtgtcgattacctgggtaagaagggtaagatcaccgacatgatgaaaatgatgggcagcttaagtcctgaagaaaaacccgcttttggtcaggcggtcaatgatgcgaagcaggccattcaacagaaattaactgagcgcatcgacggcctgaaaagtgccgaactggaagccaagttaatcgccgaaaagattgatgtgacgctaccaggccgcactatcgatatcg

SEQ ID NO: 301368 - DNA, 724 bp, Unknown
  Bacterial polypeptide expressing nucleotide sequence isolated from the Sargasso Sea
gcagccaagtccgttcaattggcccgagcaggcgctgtgctacctgcccgaaggcctgcccgatccggcggcgcgcgggtttggcaccgcgctgatccagaccttgcggccggtgttgcaggcctcgcagggcagggccttcctgttgttcgcctcgcaccgtgcattgcgtgaggccgccgaggcattgcgcgacgggccgtggccgttgttcgtgcagggtgaggcgccgcgtgcgacgctgctgcagcgcttccgtgaatcgggcaatggcgtgctgctgggctcggccagtttccgcgagggcgtggatgtggtcggcgaagcgctgagcgtggtgatgatcgacaagctgccgtttgcggcgccggatgacccggtgtacgaggcgcggctggaggcgatccgcagccagggcggcaatccgttccgcgacgagcagttgccgcaggcggtgatcgcattgaagcagggtgtcggccgcctgatccgcagcgagagcgaccgtggcgtgctggtactgtgcgacccgcgcctgctcaaccggggctatggccgggtcttcctcgattcgctgccgccgttccggcgtactcgcagcctggccgatgtgcagtccttctttacgccacaatgggcgcccgtgtccgatgatgcggctgccccagtcgctgttgcgaccggccctgagccggcgcccggtgccacgttccccctgttctga

SEQ ID NO: 301369 - DNA, 339 bp, Unknown
  Bacterial polypeptide expressing nucleotide sequence isolated from the Sargasso Sea
aatgtcatccaataaagacattttacctcctgaaatagctagggacaaaggttcattacatccaataaatcatatgaaagattcaattatgagccttcttgtttcatttggttttgaaatagtagatggacctgaaattgaaactgaagaatttaattttgatatgctcaatataaaaaagacacatcctgcaagacaaatgcatgatactttttatgtgcaaaaaaaattaaatctattaagaacacacacctcgccagttcaaattaggggaatgttagaaaaaaaaccacctcttgcttttatttctggagggaaagtctatagaaaagatgacga

SEQ ID NO: 301370 - DNA, 853 bp, Unknown
  Bacterial polypeptide expressing nucleotide sequence isolated from the Sargasso Sea
ttttactgaattaattccaaaattatataaaccaggtataaattatttttcgtatgacatcgaggaatcaattgatatttcaataactccaaacagaggtgattgtttaggcgtaaatggtttagccagagaacttaatgcatcaggtataggtaaacttaaaaaaaaacctccagttaaaataaaacaaaattttaaacaacctattaaagtttcaattaaaaaagagaagaatcaaggctgtggtatttttggaagtgtttatataaaaaatattaaaaacaaagaaagtcctccttggctaaaatcaaaattattatcaattggattgagacctatttcagccattgtagatataacaaattatataatgtttgatttaaatagacctttacacgcttatgatgcagataaaattaaagaaaatattattgttaggaattctaaaaaaggtgaaagttttgaagctttagacaataagaagtatacacttcaagacaatatgtgtgttatatcagataaatctggtgttctaggacttggaggaataattggaggtactagatctggaactgaactagatacaaaaaatattttactagaatcggcatattttaatccaaagtctataagaaaaacttctaaattattaaccatagacactgacgcaaaatttagatttgagagaggaatagatccagattcaatcgaagaaggcctttttaaagcagctacattaattcaaaaaatatgtggtggagaaataagcaaatttaatgttcaaaaaaatgaaacttttttaaaaaccaaaattaaatttcctatagctttatttcaaagtattactggcttt

SEQ ID NO: 301371 - DNA, 754 bp, Unknown
  Bacterial polypeptide expressing nucleotide sequence isolated from the Sargasso Sea
gatgaaatttactataggctggctaaaagaacatttagatacaaaatataaagataataaaatcattgaaaagttgacagatgttggacttgaagtagagagttttgaaaatgttaactccgaactagatagttttaaaattgcaaaaattataaatgctgagcagcatcctaacgcagatagattaagagtctgtgatgtagatataggagaaaaaaatacaattaaagtagtatgtggtgcaccaaatgcaaaaaaagatcttataacagtttatgctggtcctggctcaataataccaaaaaataatatgaaacttacagtaagtaaaattagaggaattacatcatatggaatgttatgttctgagtcagaattgaatttgtctagcgaaaatgaaggaataactgagctaaaaaaagaaaaatactctgatcaaattggaaaaaacttttatagaaataatagtgaaaaagttgttgatttatcaataactcccaatcgtcctgattgtttgggtgttagaggtatagctagagatcttgcggctgctggattaggtaaattaaaaaaaatttcaaataaaaaaattaaaaaagaagactctcaaaatataaaagtttccattacaaaagataaaaatcaaggctgtactaaatttggcagttgtttaattacaggcgttacaaataaagaaagtccaaagtggctaaaagataaaattcaatctcttggtcagaaaccaatctcagca

SEQ ID NO: 301372 - DNA, 577 bp, Unknown
  Bacterial polypeptide expressing nucleotide sequence isolated from the Sargasso Sea
gatgaaatttactataagttggttaaaggagcaccttgatacccaaaaaaaagataatgagctaattgaaaaattaacagatattggtttagaagttgaaagttttgaaaatgtaagctctggtttagacagttttaaagtagcaaaaattataaatactgaacagcatccaaatgcagatagacttagaatatgtgatgttgatattggtttggataatattgttaaagtagtatgtggagcaccaaatgcaaaaaaagatcttttgactatttatgcaggccctggatcaataattccaaaaaataacatgaaactttctgtcagtaagattagaggtgttacttcctatggaatgctgtgttcagagtctgaacttaatttatcaaatgaaagtgaaggaataacagaactaacagctagtaaatactctgataaaattggtaaaaattttttcaaaagtaatactgaaaaagttgtagatttatcaattacacctaatcgtcctgattgcttaggggtaagaggtatagctagagatcttgctgctgctggagttggtaaattaaaaaaaatt

SEQ ID NO: 301373 - DNA, 742 bp, Unknown
  Bacterial polypeptide expressing nucleotide sequence isolated from the Sargasso Sea
atgaaatttacacttaactggctaaaagatcatttagatacttcaaaaaatttagatactatcgttgaaacgcttacaaatattggtttagaaatagaaaatgttgaagataaatcaaaaactttcaatgactttacagttgctgaggttttaaaagcagaacagcatcctgatgcagacagacttaaagtatgtagtgttaaaactattgatggaacttttcaagtagtctgcggcgcacctaatgctcgtacaggaatgaaaggtatttttgcgcctgaaaatagttttattccaggcacaggaataaaattaaaaaaatctaaaataagaggagtggagtcttgtggaatgcttgtgtctgagagagaaatgggaatatcagatgagcatgatgggattattgaagttgatgcaaaacataaacttggtgaaaaatttattgaagtatttaatcttgatgatccagtcatagaaataaatattactccaaatagaggtgactgcttatctgttaggggagttgcaagagacttagccgctgcagggttaggaactttgaaagaaaatgctcttacaaaaagtataccaggtactttcgaaagtcctattaagtgggaaaaagcttttagtggtgatgaagaatatctttgtccaggcgttgctggtagatattttaaaaatgttaccaataaagagagcccagcatggcttcaacaaagattaaaatcaattgggttaa

SEQ ID NO: 301374 - DNA, 198 bp, Unknown
  Bacterial polypeptide expressing nucleotide sequence isolated from the Sargasso Sea
tcaatcccaaagttttagagaattgtaatattgactcctcggtgtaccagggttttgcatttgggatgggaatagaaagattatcgatgctcaaatacggtattaccgatatgcgaggtttatttgacttaaatattaagtggttagatcattacggtttttcaccactggatcttaggaatagagcagaggtttaaa

SEQ ID NO: 301375 - DNA, 829 bp, Unknown
  Bacterial polypeptide expressing nucleotide sequence isolated from the Sargasso Sea
cttcaaatataaaaaaaatgttggaaaaagttttttttcaaaatcaaatactaatcttattgatttatcgattacacccaatagacctgattgccttggtatgaaaggtatagctagagatcttgctgcatcaggttttggaaaatttattgatttcaaggaaaaagaaattaaatcaagcactaaacagactttgaaagttagaataaatagagaaaaaaatcagggatgcactgcgtttggtagttgtttaatcaaagatgttaaaaataccgaaagtcctcaatggcttaaagataaattaatttcagttggtcaaaaaccaatctccgcgattgttgatattacaaactatgtaatgcttgacataaaccgcccactgcatgcatatgacgctgataaaatcgaaaaaggtataattgttagaaattctaaacctggagaagaatttactgctttggataataaaaattacaaactagaaaaaaacatgtgtgttataagtgaccaaaagggagtcttgggtttaggtggaattataggtggaacgagatcaggaacagaacttagtacaaaaaatatattgttagagtcagcctattttgacccaagatcaataagaaatacggcaaaaaaacttaatcttgatacagatgcgaaatttagatttgaaagaggtattgatccattatctatagaagctggtttaaaaaaagcctccttattaatacaaaaaatttgtggtggtgaaataagtaaaatagatgttcaaaagattgaaaattataaaaccaaaactatcaaatttgattataatttattcgaaaat

SEQ ID NO: 301376 - DNA, 793 bp, Unknown
  Bacterial polypeptide expressing nucleotide sequence isolated from the Sargasso Sea
agtgatttagatgttttaagatcatctctctattctaatttgattattagcataaaaaaaaatattcatagaaattttgaagatttaatgatgtttgagataggtccagtttttaagtctagtaagccaggagaacaagcgacaattattggtgcaattaaaactggaaaatattctagaaaaaactggattgaaaaagaaagaaattttgatgtttatgatattaaaaatgatgctttaagaactttaaatgagattggaattaagcatgataaaatagtagtgagcaataaaacaaaaaaatggtatcatccaggaagatctggattgttatcattgggctcttttgatggaccagaactagcatattttggtgaaattcatccacttatcgttaaaaaattagatcttagaactgataccgttttaggttttgaaatttttttagataatattcctgagtcaagaaaaaaaattagagagtctaagccacaatttactatttctgattatcaaaaagtagttagagattttgcttttgtaattgatgaaaaatatagctctggtgcaattgttaatttagttaaacaaattgacaaagaattaattaaagatgtaagaatttttgatatttataaaggagataatattgagcagggaaaaaaatctattgcttttaatgtaactttggaaccaaaagataaaactttaagtgatcatgatatagatcaagtgagcacaaaaattatatcaacagttcaagagaatactggcgcaacacttagatcgtaat

SEQ ID NO: 301377 - DNA, 425 bp, Unknown
  Bacterial polypeptide expressing nucleotide sequence isolated from the Sargasso Sea
aatgattattacacttccatggttaaaagagcatttaaaaactaatgcaaaagaaaacgaaattataaataaactaactaatataggcttagaggttgaaagtgtaaaagaaaactcaggagagctaagtgaatttaaaatagctaaaattatcaaagctgagaaacatcccaacgcagataaattgaaagtatgcgatgtaaatattggcgggaaggaaattttaaaagttgtatgtggagcgcctaatgcaagagatggactcgtaacaatttacgctccgccaggagctattatacctaaaactaagtttcagcttaaaattgtcaaaataagaggagtcgagtctcgcggtatgttgtgttctgagagtgaactgaatttatcagatgagagtgatggaattatagaattaaatgctaagg

SEQ ID NO: 301378 - DNA, 865 bp, Unknown
  Bacterial polypeptide expressing nucleotide sequence isolated from the Sargasso Sea
gacatcaccaattatgtgatgatggaattggggcaaccgttacatgcatttgattatgacaagcttatcaagcgggctaatggaggtaaaccaaaaattatcatacgtcgtgctaaagaaggagaatccctgatagcattggacaatatagaacgcaaacttgacagtaatatgctgatgatctctgatcaagttggccatataggtattgctggcataatgggcggagcggattcagaagtgactgatgcaacaaccaaaattttgcttgaagcagctaactttgaatttataaataataggcgtaccgcacagattttgaaattgcgtacagaagcaagtgagaggtttggtaaacaagttgatccagaaggtacacttagagctgctttgagggcagcacaattaatgattgctcattgttcagggaaactagaaaagactgccggagacctttataaaagacctaaagacgctctcgcacttgaaattaatcctgaatatgtagaacgacttttaggagtaaaaattcccattgatcagattaaaaaaattttaagagctcttgattttaaagtctcaggaaaggagatcttaaaagtaattgtacctggacatcgtatggatattagtatccctgcagatcttgttgaagaaatagtcagagtttatggttttgaaaacctaactccaactctaataaaagatgaactccctccccagcatgaaaatcagaatcttgacggaacagaacttgtgagggatattttagtggcttcaggaatggacgaaattattacatactccatcatggatcctatggacgaagcacgtttgtgcatggaaaataacattgatcttgatg

SEQ ID NO: 301379 - DNA, 724 bp, Unknown
  Bacterial polypeptide expressing nucleotide sequence isolated from the Sargasso Sea
atggagtcgtctacggctccggcgcagatcagcggtgtctcgagctcagtgcagacgacgagcagcatcactttgacgtggtctgctccgacggctgagggtgctggtcaggaggcgactgggtacattgtgtaccggaacgacggcttgggtggtacgtcgatgagcactgttgggtacgacggtcgtggtgtggatgtgccgacgggtgtgatctctggtcttgttggtggtcgtgagtacgagtttgtggtgagcggtttgagtgctggcggtgagggcgacgtgagcgctgtgttgcatcagtcgacgtctccggctgctcctacggcgcttcgcagcactctgcagacgacgtcgagtatcgcgttggcgtggagtgctcctgtgacggaggacggcgcgtcggcggtgacggggtacgtcgtgtatcggaacgacggtagtgtggaaggcgacgcatctcaagtggcgtacgaaggtgcggctcggacagctgtggtggataacctggttggtggccatcagtatgcattcacggttgctgctgtgagcgatgcgggtgttggcgatcgtagcgtggctttggtgacacttggcggtatcgaggtgagtgcggaggagctgcatcgggcgtccacggctccgggaattcccggtgctccgacgtcgacgcaacagacggcatcgtcgatctcgctgtcatggtcggctccaatcgtaa

SEQ ID NO: 301380 - DNA, 701 bp, Unknown
  Bacterial polypeptide expressing nucleotide sequence isolated from the Sargasso Sea
attggctttaaaaaacaacaaaacttatcttgaaaacttgcaactagaagcaaccaattcaattaaaatgatttcttctgaggaagagatagaaaattggaggattgattatataggaagaaaaggtaaaatttcaaatttttttcagacttttaaagatttaaagtccgaagaaaaaaatgaattgggatctttagctaataaactgaaaaatacattagaaaagctatacaaagaaaagctcaaaataatagcagatagcaaaagcaatattcaaacagaattttttgactttacgcttccaggcactccgttttcttcaggaagtattcatccaacaaatcaaatgatgcaagaaatatgtgctgctttcaacaagcttggatttaatatatttgaaggcccagaaattgaatcggaaaactacgcttttgataaattaaatatcccaaccaatcatcctgcaagagatatttgggatacaatttatgtaaatgatattgaaaatattaaatccctggttctaagaccgcatacatcaccaatgcaaataagaataatggaaaacaatcagcctcctatacgtgttgttataccaggaaaatgttaccggtatgaagcaacagacaatacacacgaatggcacttccatcaaattgaaggtttagtaatagataaaaacattaattttttaaatatga

SEQ ID NO: 301381 - DNA, 895 bp, Unknown
  Bacterial polypeptide expressing nucleotide sequence isolated from the Sargasso Sea
gaagaattaacgagaattaaaggttacgacaaagtacctttaataaacccaaaaaaagaaaatgttaaagatacattaaattatagacaaaaaatttttcattttgcccaaagatcagttgcgtcgaaaggttatacagaagcagttacctggtcatttactgattcaaaaacaaatattttattttcagatttaaaaaacgagattaaactatcaaatcctatttcggctgacttagatgtattaagatcatctctttattcaaatttaattattggggctaaaaaaaacattcatagaaattttgaagatctaatgttgtttgagataggacctattttcaaaggtaataaacctggcgagcaatcaactatgattggagcaattaaaactggaaaatattcaagaaaaaattggattgaaaaagaaagaaattttgatgtttttgatattaagaatgatgctttgagaactataaacgaaattggtattgataactcaaaaataataacaagtaataaatcaaaaaaatggtaccatccaggaagatcaggtttattatctctaggatcaactaatggtccagaactagcgtactttggagaaattcatccatcaattattaagaaattagatttaagaacagataatattttaggttttgaaatttttttagataacatacccgagtctagaaagaaaattagggaaacaaaacctcaatttattgtctccgattatcaaaaagtagttagagattttgcttttgttattgatgaaaaatatagctctggtgaaattataagctttgtaaaaaaaatagataaaggattgataaaaaatgttaaaatttttgatgtttaccaaggagaaaatattacaacgggtaaaaaat

SEQ ID NO: 301382 - DNA, 841 bp, Unknown
  Bacterial polypeptide expressing nucleotide sequence isolated from the Sargasso Sea
agttgtctgtggtgcagcaaatgcgaaagaaggattaattactatatatgctcctccaggtgttataattcctaaaacaaaaacaaaattagtagtggcgaagattagaggcgttacctcccacggaatgctttgttcagaatctgaattaaatctatcagatgcaagtgatgggattgcagaattatcaaaatcaaaatacgagaaaaaaattggtatgaattatttttcaaaatcaaaatcaaatcttattgatttatcaattaccccaaataggccagattgtctgggcgttaaaggaattgccagagatcttgctgcttctggttttggtaaattaagagatataaaagaaaaaaaaattaattctaaaacaaaacaatctttaactattaaaattaataaagaaaaagttcaaggctgtagcacttttggaagttgtttaattaccaatctaaaaaatactgaaagccctcaatggctgaaagacaaactaatttctgttggtcaaaagccaatttctgcaatagttgatataaccaattatgtaatgctcgacttaaatcgaccgctacatgcatatgacgctgataaaattgaaaaagggataatagtacgaaactctaaatttggagaagaattcacagctctagataatagaaaatataaattagagaatggcatgtgtgttataagtgatagaaaaggtatactaggattaggtggaattataggcggaacacgatcagctactgaactatatacaaaaaatatattattagaatcagcatattttaatccaaaaaataataagaaaaactgcaaaaaaattaaatatcga

SEQ ID NO: 301383 - DNA, 291 bp, Unknown
  Bacterial polypeptide expressing nucleotide sequence isolated from the Sargasso Sea
tatgcagtttagtaagaattggttgaaagatttcattgatattgaactatcaacggaaactatttgctcgcagctgaccatggccggactagaagttgaaggctatgaagatataacttcaaaaataactggcaaagactcaattattaagctggacatcaccccaaatcgaggggattgttttagtattcttggtgttgctcgagagttatctgtaataaataatttgaaatttagcttggcaaatatttctcccattgatggttctttcagagacatgattaaagtaaa

SEQ ID NO: 301384 - DNA, 850 bp, Unknown
  Bacterial polypeptide expressing nucleotide sequence isolated from the Sargasso Sea
actgggtgctaatttagaaaaaataatagaaaaacttaccgacataggtcttgaagtggagggaataaaagaaaatcaagctgaactatcatattttaaaattgtaaaagttttaaaagcagaaaaacacccgaacgcagacaagttaaaactttgtcaagtaagtttaggtaatagcaaaactataaatgttgtatgtggtgccaaaaatgcaagagacggattggtaagtgtttatgctcccccaggttcagtaattccaaaaaataaaatgaaattaaaggtagccaagataagaggggttgagtcacatggcatgctctgttctgagagtgaattaaatatttcaaatgaaagtgacggaataattgagttagcaaatagagagaaggatattggaaaaaattattttaaaagcaaaggagaaaaatcaattgatttatcaattaccccaaatagaccagactgtttaggtgttcgtggaatagccagagacttagcttcggcaggtttaggaaaattatctaaattgaaaaaaataaaaattaaacaaagtttttctcaacctataaaaatttctattacaaaagaaaaaaatcaaggatgcatgtcattcggtgcatgttatataagaaatattaaaaatagagaaagtccgaaatggttaaaagaaaaaattgtttctcttgggctcaaaccaatatctgcagtagttgatattacaaactatgtaatgttagatcttaatagacctttacatgcttatgatgcagacaaaatagataaagagattatagtaagaaattcaaaagcaggagaaagcttcgaagctttagatggaaaaaaatat

SEQ ID NO: 301385 - DNA, 786 bp, Unknown
  Bacterial polypeptide expressing nucleotide sequence isolated from the Sargasso Sea
cttgtcagtaagaggaattgcaagagatttagctgcagcaggtgtagggaagttaaaagaccttaaacttaaaaaaataaaagatacttttaaaagtccaatgaaatggaaaaaagaatttaaaaataataaattatgtcctggagtagctggcaggtattttaaaaacgttaaaaatgttgagagtcctatctggcttcaacaaagactaaaagctataggattaaggccaatctcagctctagtcgatataaccaattatgtgacatttgatcttggtcgccctcttcatgtttatgatgctgacaaagtatcaggaaatttaacaatgcgattagctcacaataaagaagaatgtatggcattaaatgaggtaaattataaatgtgatgatgagatgattattatctcagacgatgacaaaaaacttcatggtattggcggtgtaatgggtggattaaatagtggatgtagcatggataccaagaatgtttttttagaagttgctttgtttgatccaatttctgttacaaaaactggtagaaaactaaatctacaaagtgatgcaagatacagatttgaaagaggtatagatacagagtctatttattggggtgtagaagcagcaagtcaaatgataaatgatttatgtggtggagaggcaagtgaatatgtatcctcagagacacatatagaaacaagagaaataatttcttttaatacaaacatggtaaaaacttttggaggtattgaaattgaaattaaagatcaggtaaaaattcttaa

SEQ ID NO: 301386 - DNA, 133 bp, Unknown
  Bacterial polypeptide expressing nucleotide sequence isolated from the Sargasso Sea
aggaatagattctgagaaatggactggttttgcagcaggattaggagttgagagattttgtatggttagacatcagatcgacgacatcagaaaattttatacaaatgatattagattcttagaacagttctaa

SEQ ID NO: 301387 - DNA, 583 bp, Unknown
  Bacterial polypeptide expressing nucleotide sequence isolated from the Sargasso Sea
gatgtttttgacattaaaaatgatgcacttagaactttaaatgaagttggaattgatggttcaaagatagttgttagcaataaaacaaagaaatggtaccatccaggtagatctggacttctatctctgggttcgtctagtggaccagtgctagcgtattttggtgaaattcatccatctattattaaaaagatggatttaagaacagataatgttttaggttttgaaatttttttagataacatacctgaggcaagaaaaaaaattagagaggcaaaacctaaatttactgtttccgactatcaaaaagtagttagagattttgcttttgtgattgatgaaaaatatagctctggtgaaattattaattttgttaaaaaaattgacagagaattaatcaaggaagtgaaaatatttgatgtttataaaggcgacaaaatagtttctggtaaaaaatctattgcatttaatgtaacattagaaccaaaaaataaaactttaagtgaaaaagatattgaaataataagtaaaaaaattatatcaacagtaatagaaacaactaacgcaactttaagatcttaat

SEQ ID NO: 301388 - DNA, 898 bp, Unknown
  Bacterial polypeptide expressing nucleotide sequence isolated from the Sargasso Sea
acgattgtaaatcaagcaagaaaatatgggcttgctaccgatgcttcacatcgctttgaaagaggtgtagacccagaaatacagcaattagctttggaaagatatgtatgtcttttaaatgaaatagctatttatgatttagctgaactctatcgttcactaactgaaaaaactcaaaagaaaaatgtacaacttagcatagagagatttaacaatttttctggccttaatatgaatgcgaaccaagcaattcttatattaagtaatttaggctttgaaattgcggccaagggttcaaaaagacttctgttaaatgtacccagtcacagatttgatatttctctagaggaagatttatatgaggaattattgagatgttatggctatgataatattcctatatcgaaacctaaggctggaccaatcataaaaaataaagaggataatgcattagaaaatcttagaattggatttgttcatgcaggctttaaagaacttatgcatatgccatttgtttcaagagaatctttccagcaattaaattctgaggaatggacagcggcagaattgcaaaatcctatcaatgaaaatgaaccatgtctcagaggaagtctttttaagtcattatttagtgcgataaataataatgtaaaaaagggatactcatctataaaagtttttgaagcgggcaatgtatttaaaaaagaaaaaagaggttttactcaatccttacatttatcggggattacctatcatcatgagcccaatcaaacctggagcaagaaacaatttacatatgacttcttttcaataaaggccgaaattttgaagttattacaaacattaggcatacataatgctgagtttaaaaaagctagctttgtttccccatttagtg

SEQ ID NO: 301389 - DNA, 811 bp, Unknown
  Bacterial polypeptide expressing nucleotide sequence isolated from the Sargasso Sea
gatgaaatttacaataagctggcttaaggagcatcttgatacaaaatttaaggatagtgaattaattgataagttgactgatgtagggcttgaagttgagagctatgaaagagctagttctgacctagataattttaaagtagcaaaaattataaatgctgaacaacacccgaatgctgacaagcttaaagtatgcgatgttgatattggagaaaaaaaccccgtaaaagttgtttgtggggcacctaatgctatgaagggattatttactgtttatgctggtcctggatcagtaattccaaaaaataacatgaaacttaccgttagcaaaataaggggagtgacctcttatggaatgttgtgttcagagtctgaattaaatttatctgatgaaagtaacgggataacagaactaaagtcaaataattactctgaaaaagtaggaaaaaatttttttaaaaataatattgaaaaagttcttgatttatccatcactcctaatcgacctgattgtttaggagttagaggcgtagcaagagatcttgcggcagcaggagttggtaaattaaaaaatactcctaacataaaaatcaaaaataatgggtctcaaaaaattaaagtttcaattacaaaagataaaaatcaaggttgtactatatttggcagttgtttgatcaaagatgttacaaacaaagaaagtccaaagtggcttaaggataaaataatatctgtaggtcagaaacctatttcagcgattgtagatgtaactaattatgtgatgctggatttaaatagaccgcttcatgcatat

SEQ ID NO: 301390 - DNA, 133 bp, Unknown
  Bacterial polypeptide expressing nucleotide sequence isolated from the Sargasso Sea
agatagactagctatgcttaagtatggaataaatgatctaagagctttttttgagactgattataggtggctaaatcactttgggtttgatccattagacgtgccatcaaattatagaggtcttagtagatga

SEQ ID NO: 301391 - DNA, 496 bp, Unknown
  Bacterial polypeptide expressing nucleotide sequence isolated from the Sargasso Sea
aatgtcagattttcaaaaaaaaattcttgattataaaaataagttaaataacaccaaagatttagaagagatcgagtctataagaacagaaatttttggtaaaagtggatttattaattcagagtttaaaaaaattggatctttacctattgatgaaaagaaaaatattgcgtcaaatataaatatagcaaaacaggcacttcttgaaatatttaaattaaaatcattagatgtattggataaagatctaaatgagaaaattaataaagaaaaaattgatgtaactttacccgaacatgaattcaaggttggtaaagtacatccagtatcacaagttattgatgagatatcatgtattttctcggaaattggatttagtgttgaagaaggacctgatgttgaaaatgactataataattttactgctttaaataccccagaaaatcatcctgctaaagatatgcatgacacattttatttagatgaaaacatgaaa

SEQ ID NO: 301392 - DNA, 673 bp, Unknown
  Bacterial polypeptide expressing nucleotide sequence isolated from the Sargasso Sea
gatgaaattcacaattgattggttacaagaacatttagatactaaatataatgacaaaaaaataattgataagttaaccaatattggacttgaagtagagagctttgaaaaccaatcttcagaacaaaatcaatttattatcgctaaaattgtaaaagtagagcaacatccaaacgcagatagattaagtgtgtgtgatgttgatataggaaaaaaagaaactgtaaaagtagtttgtggagccccaaatgcaaaaaaagatttaataacagtttatgctccacctggagctataatacctaaaaatcagatgaaattatcaataagtaaaattagaggcgttacttcatatggaatgctttgttcagagtcagaattaaaattgtcggatgaaagtgaaggtataactgaattatcttcaaaatataataatcaaataggtaaaaaatactttaaaaataatagttcaaaagtaattgacctttcaattactccaaatagacctgattgtttaggggttagaggaattgctagagatttagctgccgcaggtgctggaaagttaaaaaactatagccagagtaaaataaaatttaaaggatctcaaaaaataaaagtaaaaattataaaagaaaaaaaccaagggtgtgatgtatttggcagttgtttaata

SEQ ID NO: 301393 - DNA, 750 bp, Unknown
  Bacterial polypeptide expressing nucleotide sequence isolated from the Sargasso Sea
gtagttagattttctcctaccgatacggtcaccttgagatttactgggcaaactacctttagagcgcctcatccagacgaaacttctagaactagggttactgcacttcagtacgtaaaccaaaccggtgcttttaaagctgtcgacttaactggaaacaccaatttggagccagaagaagctaccacttataacattggtttaataactgattttggaaccgacaattggacggcgactttagattattataactttgagtttgacaatccaattattaacgaaaaccatcagcaattagccaatgcttatggagcaggcggtgctggtaaagctgccattcaaagccaaatctttggtggaactaacctagtgaacgatggttcctttggagttggagatatcgctagaattcaatcaaattacgttaacggtccaaaaactgaaaccgacggattggatttatttattaagtacgatactgatgttggtaatggaactttatcaaccggtttagaagctaacgctatattggggtattctgttgcagattataatgttggcggagctctggtagctgcggcttacgagtgtgctgggttcttcaatatcaacaatacttgcagaccaatgccagaacaaaaaggtaaaggttttgtaaattatgtggatgctaaacataatttctatggtgctgtaaattatatttcaagctattacaaccgaagagattctggaagagtagctgaa

SEQ ID NO: 301394 - DNA, 856 bp, Unknown
  Bacterial polypeptide expressing nucleotide sequence isolated from the Sargasso Sea
agagacacaaatcctcaactcgcttgatggcgtagtagtagcgcgagtcgctgaccttaggccccacccgaaagcagacagaattcagcttgtagacgtcgaaatagacaatggcgaaccaatgcaagtttgctgcggagcattcaacatgtcggtcggtgacctgatcccgttcgcgactattggcacagttatgcctgacggcatggaaatcgcgcagcgaaaaatgcgaggggagatgtctaacggcatgtgctgctctgctgcggaactgggcttaggtgccgaccacgacggcatcatgattttgcccgacaatcttgagaccggggccccgctaatgcaagagctcgggctcgttggggatgtcttatgggatcttgagatcaatcccaatcgtccggatgcgatgtcaatcgcgggcgtagcacgggacttggcagctcgactaaatgttccatttcaaatacctgaacggtcagtaactccaaccggttcggatcaaggtctggcgagcatcgaaattgctgatggagatctatgcccgagatttacgggtcgagtactaacaggtgtcagcgttggagagtcccctctatggatgcaaatgcgcttgaccttgttggggatgcgtcccatcaattctgttgtcgacgtctccaactatgtgatgcttgaacttggaacccccaaccacacgtatgacttatcgcttctcccgaacggtcatataggagtgcgacgggcaacagcgggagaaaagatcacaacccttgacgatcaagagcgcacacttcaatccaacgatggggtgattgtcaacgaggcggatgaacctattggtattgctggcgta

SEQ ID NO: 301395 - DNA, 733 bp, Unknown
  Bacterial polypeptide expressing nucleotide sequence isolated from the Sargasso Sea
tttgattacagtccttaccgaggaggaagttctcgacaagtcatttagccgaggaaagaaagctgcagatagagtcgacgatccagtcaaggttttccgagtgcgtaagcaactggtaagaatggtacagacctcttcagatgtagctgcacaatatttggaagatacaatgaaggcttggcctagtctagaccaaatgccattattcgataagtcgatggttgaggcttgcgttggttgtgatgattatcgccatcatctctcgatgctaggatggggttgtaagcagataagaaaaatctctaaacaaaactctgccaagataattagaactgcacgttttgaaataatgcatgatgcaagaaaagaagcatatggccgcatttctagcattttgcgtagagtaggcccttctcttgattggttacatgaaagcaggatgatacttcgtaaactaccagtaatcgattcattatgtcctacaatcgttgtctgcggtgctccaaatgttggtaagtccgctttcatatcggcactttcctcgggtaatatggaaataaaccattatccgtttacaaccaaaagattgcatgttggacattttactcatcgaagagttcctcatcagatggttgacacccctggtcttttggaccgaccaatgcatgatagaaatgcgatagaaatgcaagctattgctgcgatagagcatatagggactatctgtatcttt

SEQ ID NO: 301396 - DNA, 849 bp, Unknown
  Bacterial polypeptide expressing nucleotide sequence isolated from the Sargasso Sea
cttggaagttgatagtcataaaaaattaggtaatgattatgttattgatatcgacttgacgccaaatagatctgattgtctttcaatttacggcgttgctagagatctaaacgcttcaacctataattataaatttaagaaaacacagtcttgtaaacctgtaaaattaaatacagttaaaagtaattatgttgaaattaaagatttagatgcatgtccaaattttaattacttgattctcgactgctgtgataaagcaccaaaaacacctaaatatataattgaaaaacttaaatctagtgatatagattctatccattatgtagtcgacatattgaattacataatgcttgaagttggccagcctatgcatgcttatgaccttgataaattatcgggaaaattaaggatatctacatctattaaaaaggaaattttccaagggctcaataatgaagaatataaattagaaaaaggttttttgactattaaagacaatgaacacattcaatgtctagcaggtatattaggttcaaaaaatagtatggtcacaaagaaaactaaaaaagtactaattgaaagcgctttttttaatccaaaatcaataattaatagagcaagatcattaaaattacaaacagaatcttcatacaggtttgaaagaggtgttgattatttattacccaactcagcattagataagtttgttaattatattaaagatacagatatcaaaatattggagagaaaatccttaggtaagaattcaagtctcccaaaaaacaaaaaacttaatataaatcttgaagcaataaattcaacgataggcacaaatttaagtaaaaacga

SEQ ID NO: 301397 - DNA, 687 bp, Unknown
  Bacterial polypeptide expressing nucleotide sequence isolated from the Sargasso Sea
ctgtttttaggggcagcaaaccaggggagcaatcaaaaatgattggtgcaattagaacaggaaaatattctagaaaaaattggatagagaaagaaagaaattttgatgttttcgatattaaaaatgatgcactaagaacattaaatgaaatagggatagatctttctaagatagctgtaagtaataaaacaaaaaaatggtatcatcccggaagatcaggtttattgtcactaggatctatgagtggaccaccactaggatatttcggagagattcacccatcaattattaaaaaactagacttaagaacagataatgttttaggttttgaaatttttttagataacatacccgagtcaagaagaaaaattagagaagcaaaaccacaatttattttttccgactatcaaagggtcgttagagattttgcatttgttatagacgcaaaatatagctcaggagaaattgttaatctggttaaaaaaattgacaacgaattgattaagaatgtaaaaatttttgacgtttatcaaggagacaatatagaatctgggaaaaagtctgttgctttcactgtaactttagaacctaaagatagaactttaaacgaaaaagatattgagcatataactaaaaaaattatatcaacagttcaagaaaaaacaggcgcaacactaagatcctaat

SEQ ID NO: 301398 - DNA, 877 bp, Unknown
  Bacterial polypeptide expressing nucleotide sequence isolated from the Sargasso Sea
tactttaagaataaaaataataataatgttatagaattatctattacaccaaatagaccagattgtttggggataagaggaatagcaagggatctttatgcatgtggatatggaaatctaaagaaaattaagaaaattaaatttaacaaaaagtcaaagcacaacttaaaaataaaaatagaaaaaagtaaaaatcaagcatgttcaatatttggaagttgccttattaaaaatatatctaataaacaaagtcctagctggttaaaagaaagaattttgtcattaggtttaaggccaatatctgcagttgttgatattacaaattatgtaatgtttgatttgaatagaccacttcatgcatatgatttagataaaataaaaaaatcaatcactgtaagaaattcaaaaaaaggcgaaacacttgaggcacttgataacaaaacatatgttttaaaagagaatatgtgtgtaatttcagatgatgagggagctcttggtttgggtggaataattgggggtgttagatcaggaacagaattagacactaaaaatattttaatagagtcagcatattttgacccaggcattacaagaaaaacatcaaaagagttagaaattaatagcgatgcaaaatttagatttgaaagagggattgaccctcagtcagttaaagaaggtctagaaatggccgctaaattaataactgaaatatgtggtggagaagtttcaaattttgacattcaagaaacacaaaaatttagaaaaaaaataataaaatttaattctaatttagtatcaaaaacaattggtataaaaattaatgagaaaaatataattaagattttaactagattaggtttgaaacaaaaaagaaaaa

SEQ ID NO: 301399 - DNA, 460 bp, Unknown
  Bacterial polypeptide expressing nucleotide sequence isolated from the Sargasso Sea
ggaaaaagttatttttctaaaccaagttctaatcttatcgatttatcaattacaccaaatagaccagactgtcttggtgttcgggggatagcgagagatttatcagctgcaggttttggaaatttaaaaccagaaaaagacaaaaaaattaaatctaataaaaaacagaccttaaaagtaaaaataacaaaagaaaaaaatcaaggctgtttgtcttttggcagctgcttgataactaacgtcaaaaatacagaaagtcctaaatggttgaaagataaattaatttctataggccaaaaaccaatatctgcaattgtagatattacaaattatgtcatgattgatattaatcgtcctttgcatgcatacgatgctgacaaaattgacaagggaataattgttagaaattcaaagtcaggagaaaaatttactgccctagataataaaaattataaactag

SEQ ID NO: 301400 - DNA, 963 bp, Unknown
  Bacterial polypeptide expressing nucleotide sequence isolated from the Sargasso Sea
ccccggaaattcatcacagataaattaataaaatctgatataactccggtgaatattatcgtagacatatcaaattatgtaatgatggaggttggtcaaccgacacatgcttttgatattgataaaattaatggcaagcttagtatcattaaaagtaagaaagatctggctttcataggtatgaataataaacaatacaatatcaataaaggcacacctgttattgtagatgacgatgatgtcatacacgcgttacctggcgtaattggtagcaaagaatcaatggtagacaatgatacaaaaaatattctttttgaaagtgcattttttcttcccaataccgttagatctttatcaacaaaatatagaattcaaactgactcttcatatagattcgaacgaggcgtagattataaacttcaagaattcgctctctctagaattcatcttatattgagttcatatatttcaattggtaagtgcaatctaaataaaataagttataaaagtccattgactaaaactaactcatttaaatttgactataaattatttaagagaatcttaggtatagaattacaaagcaataaagttaaagcaattttgtctaatttaggatttatttttaaatctgataaagtcattgttcccagttttagattcgatgtcacatcgaattatgatttagttgaggaggtatctagaattattggttacgataatattcctgaatcacctctaagcactaagataagtttgactaacaaacgttatacttttcaggacagacttataactctgggctataaggaagcaataaactttactttcatcgcaaaaaattattcacataataatgctcaattggagttaaaaaaccccatttcaaaagataagtcagttatgcgtgattcgttaataccagggctactgaaaaatatacaatataatcacaacagaaaa

SEQ ID NO: 301401 - DNA, 508 bp, Unknown
  Bacterial polypeptide expressing nucleotide sequence isolated from the Sargasso Sea
atgcaagagctagatgatttaaaaaaattttctgatgatttagctgagcaaataaaatcagctcaagatttgccagaattagaaaatttgcgtgttactgttttaggtaaaaaaggtaaattaactgagcaattaaaagaattaggtaaactacctaaagagcttcgccctcaggctggtcaagaaatcaataaaattaaagccaagctgcatacgcttattgctcaacagcaaggtgttattaaagataaattattatctgagaaattatcatctgagaaaatagatgttagcttagcaggccgtaatgataatatcggagctagacatcctttaaaattagtcatgcaaggttttatagatttttttagattgcgtggttttgatttggcttctgggcctgatattgaaacagattattataatttccaggcactaaatgtccctgagcatcatccagccagagcatctcaagatacgttttattttcatgcaaaaactatattac

SEQ ID NO: 301402 - DNA, 295 bp, Unknown
  Bacterial polypeptide expressing nucleotide sequence isolated from the Sargasso Sea
atgactaacaaggacagattagttattcatttaccttctgatcaatctattggaagttttcatccaatatcatcaacccttcgagagatttctttattgctaagtaatctaggtttttctcaagcatcaggccctgaaatagagtcagaaaagtttaattttgacatgttaaatataaaagaatcgcacccagcaagacaaatgcatgatacgttttatgttaataataaactaggagtgttaagaacccatacctcaccagttcaaattagggcgatgctgaaaataagccacc

SEQ ID NO: 301403 - DNA, 856 bp, Unknown
  Bacterial polypeptide expressing nucleotide sequence isolated from the Sargasso Sea
gatgaaaattacttttgattggttaaaaaatcatcttcaaactaaaaattcagaaaatcaacttctagataaattaactgatattggattggaggttgaaggaatagaaaataagtcctctggtttagaaaagtttatagtagcaaaaattcttaaagctgaaaaacacccaaatgcagacagattaaaagtttgtgatgttgatattggtaataaaaaagcaataaaagttgtttgtggtgctttaaatgcaaaagttggacttttaacaatttacgctcctccaggagcaattattccaaaaaataatatgaaactttctgttactgaaataagaggtgtaacttcatatggtatgctttgttctgagtctgaacttaatttatctgatgaaagtgatggaatatgtgagcttaaacaaaaacaatttaaaaataagattggaaaaaaatattttaataaaaatgcttctaagttgattgatttatcaattacacctaatagaccagactgcttgggagttagaggtatagcaagagatttggccacagcaggttttggaaaacttaaagcaaataaaataaataaaattatatctaaaggaaaacaaaaaataagtgtcaaaattttgaaagaaaaaaatcaaggttgtacaagttttggaagttatttattgaagaatgttaaaaatactgaaagtcctaaatggttaagagataaattaatctcagtaggacaaaaacccatttctgcaattgtagatgttacaaactatataatgttagatttaaataggccattacacgcttatgatgccgataaaattcaaaaaggaattattgtaagaaactccaaa

SEQ ID NO: 301404 - DNA, 589 bp, Unknown
  Bacterial polypeptide expressing nucleotide sequence isolated from the Sargasso Sea
gatgaaaattacatatgattggttgaaagatcatcttcaaacaaaaaactcagaaaatcaacttttacaaaaattaactgatataggtctagaagttgaaggagttgagagctcgacttcagatctggatgaattcattgttgctaaaatacttaaagttgagaaacatcctaacgcagataggttgaaagtttgtgaggtaaacattggcaaaaatgatttgattaaagttgtatgtggtgccccaaatgctaataaaggacttttgaccatttatgcccctccaggctctattatcccaaaaaataaaatgaagcttgaagtaactaaaataagaggagttacatcctatggtatgctttgttctgaaagtgaattaaatttatctaatgaaagtgatggtattgtagaactcaatcaaaataaataccaaaataaaattggaaaaaaatacttcacaaaaagtaaatcaaatttgattgatttgtctatcacaccaaatagaccagattgtttaggtgtaagaggtatagctagagatttagcaacagcaggctttggtaagcttaagaatattgaatttggtaaa

SEQ ID NO: 301405 - DNA, 598 bp, Unknown
  Bacterial polypeptide expressing nucleotide sequence isolated from the Sargasso Sea
aatgaagtttacattagattggttaaaagatcatctggacacatcaaaggaattaaaaactattacagacacacttactaatattggtttagagatagaaagtgtagaagataagtctgaggattttaaaaactttaccgttgctaaagtgctaaaagctgagaaacaccccgatgcagataaacttaaggtttgtcaagttaagacaataaatggagattttcaagtagtttgtggcgcatcaaatgctagagagggaatgctgggaatttttgctccagaaaatagctatattcctggaacagatttacacttaaaaaaaaccaaaattagaggtgttgagtcatgcggtatgcttgtatcagagagagaaatgggaatttcagatgagcatgatggaattatagaaataaaagatgattataaaattggcgatcaatttagtaaaatatttaaattagatgagcctataattgaaataaacataacaccaaatagatctgattgtttatcagttagaggtattgcaagagatttagccgcagcaggtttaggcaagttaaaagaactcaagtttaaaaaaataaaagactcttta

SEQ ID NO: 301406 - DNA, 292 bp, Unknown
  Bacterial polypeptide expressing nucleotide sequence isolated from the Sargasso Sea
agcgctgaaatggatgttgcatatactaaagtaaataataaaattaaaataggagagggcaataattggttggaaattttaggttgtggcatggtaaatccaattgttcttgaaaattgtaaaattgactcaaaaaaatatcaaggttttgcttttggcatgggtattgaaagactatctatgcttaaatatggtattagtgacttaagaagtttttttgatccaaattataggtggttagatcactatggttttagtattttagatagtcaaacaagatcaggtttataaa

SEQ ID NO: 301407 - DNA, 730 bp, Unknown
  Bacterial polypeptide expressing nucleotide sequence isolated from the Sargasso Sea
gttgtttggtggagctaaaaatgcaagagagggtcttcttactgtgtatgctccaccaggtgcaataattccaaaaaataaaacaaagctgattgttgctaaaataagagatgttacgtcttatggaatgctttgctctgagtctgaattaaatttatctgatgaaagcgatgggattatagaattatcatattcaaaaaatataaaaaatgttggcaaaagttttttttcaaaatctatctctaatttaattgatttatctataacaccaaatagaccagactgtcttggtgtgcgaggcattgctagagatttatcagctgccggatttggaagtttaaaattaaaaaaagaaaataaaattagatcaaacaaaaaacagactttaaaagtaaaaatcacaaaagaaaaaaatcaaggctgcttatcattcggtagctgtttaattactaatgtcaaaaatactgaaagtccacagtggttaaaagataaattaatttctattggtcaaaaaccaatatctgcaattgttgatataacaaattatgtcatgattgatattaatcgcccattgcatgcatacgatgctgataaaatagaaaaaggaataattgttagaaattcaaaattgggggaagaatttactgctctagataataaaaattacaaattagacgatggaatgtgtgtaataagtgatgataaaggtgttttaggtttaggaggaatt

SEQ ID NO: 301408 - DNA, 919 bp, Unknown
  Bacterial polypeptide expressing nucleotide sequence isolated from the Sargasso Sea
cttaaatcacttaagtattctaaaaaaataggtgaaaatttttttaaaaataacgctgaaaaagttgttgatatatcaattacaccaaatcgtcctgattgtcttggtgtaagaggtatagctagagatcttgcggctgctggggctgggaaattaaaaaatatatcccacaataatataaaaaaaaatggatcccaaaaaataaaagtttcaatatctaaagataaaaatcaaggttgtaccaaatttggtagttgcttaataacagatgttacaaataaagaaagtccaaagtggttaaaagataaaattgaaactttaggccaaaaaccaatctcggcaattgttgatattacaaactatgtgatgttagatctaaatagaccccttcatgcatatgatgcagataaaattgatcaagaaattatagtcagaaattcaaaaaaaggtgaaacatttgaagctctcgataacaaacagtataaattagaagatgatatgtgtgtcatctcagataaatctggtattttaggcttaggaggtatcattggaggaacacgttctagtactgaaattagtacaaaaaatattttattagaatctgcatattttacttcaagatctactcgaaaaacttcaaaacttttgaatattgacacagacgcaaaatttagatttgaaagagggattgatcctcagtcgatagaattaggtttatcaaaagctgctcaattaataatagagatttgcggtggtaaaataagtaaatttgatattcaaaaaatcgcaaaaactaaaaaaaataagattaaattcaagacttcactatttgaaaaaattacaggctttaaggtaaaagataatgagattgtaaaaattttaagtgatcttggatttgaaatttctaaaagaaattaga

SEQ ID NO: 301409 - DNA, 796 bp, Unknown
  Bacterial polypeptide expressing nucleotide sequence isolated from the Sargasso Sea
ctttaaaccttcagttattcgaggaagggcacgaaggcttggttttcaaacagatgcttctataaggtttgaaagaggcgttgatcatgaaatccaaaagctagctgttgacagagcaagtgaaattctttgcgaaacagtaggtggagaatttggaacaattcaagaaagcaaattacacaaagaattgcccaaactaaagaaggtctcaattgatataaatagagccaataagatccttggaactaatataactagttctaaagccaagaaatacctaaaaggtttaggtatgagtcctaaaggttcaacaagtaatttagaaattacttctccttcttggaggtatgatatagaaatagaagcagatctaattgaagagttagctaggcttgaaggttatgattcacttccagcaatttctcttgatcctaattttaaaataaatacaaagtccaaagaaaaggtcatttcttcttctcttgtatcccagggctttagcgaagtcattaattattcatttataagtgaagatgatgaaaggatttttggagaatcaaagactatggttgagttagaaaaccctatttctcagaacatgagatttatgagatctagtttatttccaggtttgattaatacttttatccataatttaaataacggaatggaatcacaaaaactatttgagataggttcggtgtttactcataagaagtctgacaaccccgcagaaaaaacaagagtttcaggcttaatcttcggagatgctgcacccaatcattgggttggataa

SEQ ID NO: 301410 - DNA, 824 bp, Unknown
  Bacterial polypeptide expressing nucleotide sequence isolated from the Sargasso Sea
ctcaaatgagcatgacggaataattcgacttgaggaaaaagaaactattggaacatctttttcagagatttatggccttaatgatattgtaatagaaattggcatcactccaaatcgacaagattgtcttggtgtaaaaggaatagctcgagatcttgcttcagctggcatgggggaattgttagagagaaaaatatctagagaaaaaggctcctttaaatcaccaattagaattgaaatacaagataataaaatctgctcagccttcgctggaagatattttagaaatgtaaagaatactgaaagcccggaatggcttaaaaataaacttaagtcaataggtttaaggccaatatctgcgctagtcgatataactaattttgtaatgtatgacgagaaccgaccacttcacgtttacgatgcagataaaatagatggcaaaattatagtgcgttcagcaaatgatggagaatgtttcctagcgctcgatgaaaaagattatcagctaaaaaatggtatgtgcgtaatagcggatgaaaaaaaagtattaggcttaggggggatcatggggggcgaaagtacaggttgcagcactgagacaaagaacgttttacttgaatcagccttatttgatgagattaatacagccaagacgggaagaaacttgtcaattctaagtgatgcaagatatcgttttgaaagaggcattgatccaaattcaactttaaaagggatagaccttgcaacacaattaattcttgaaatatgtggtggtgagtgcagtgaggttgagttggctggaaatataaaagaaaataaaaatg

SEQ ID NO: 301411 - DNA, 960 bp, Unknown
  Bacterial polypeptide expressing nucleotide sequence isolated from the Sargasso Sea
attgcttaggggtaagaggtatagctagagatcttgctgctgctggagctggtaaattgaaaaagatttcacttaaaaatataaaaaaaaatgcatcacaaaaaattaaagtttcaattaaaaaagataaaaatcaaggttgtactgtatttggtagttgcttaattaagggtgttactaataaagaaagtcctcaatggcttaaagaaaaaattatttctcttggtcaaaaaccaatttcagcaattgttgatattacaaattatgtaatgttagacttaaatagaccacttcatgcatatgatgcagataaaattgacaaagaaattatagtaagaaattcaaaaaaaggtgaaacttttgaagctcttgataacaaagaatataaattaggtgatgatatgtgtgttatttctgataaatctggagttttaggcttgggaggaatcattggaggaacacgttctggaactgaaattaatactaaaaatattttattagaatctgcttattttattcctagatcaattagaaaaacttcaaaattattaaatattgatactgatgcaaaattcagatttgaaagaggaattgatcctcaatcgatcgaattaggtcttttaaaagctgctgaattaatatctgagatttgtggtggcaaaattagtaattttgatattcaaaaaactgataagcatgaaaaaaacaaaattaaattcaacgtctccttatttgaaaaaataactggttttaaagtaaatgataatgaaataattaaaattttaatcgatctaggatttgaagtttctaagaagaaattagaattagatttaaaaatacccacttggagacctgatataactcaaccaatagatatagttgaagaaatcgtaagaattaaaggatatgagaacatagaaaccttaaaacctgaaaaaactaaaattaaagatacttaaa

SEQ ID NO: 301412 - DNA, 790 bp, Unknown
  Bacterial polypeptide expressing nucleotide sequence isolated from the Sargasso Sea
aataacatgaaactctcagttagtaagattagaggtgttacttcctatggaatgctgtgttcagagtctgaacttaacttatcaaatgaaagtgaaggaataacagaactaacaactggtaaatactctgataaaattggtaaaaatttttttcaaagtaatactgaaaaagttgtagatttatcaattacacctaatcgtcctgattgcttgggggtaagaggtatagctagagatcttgctgctgctggagttggtaaattaaaaaaaatttcacttaaaaatattaaaaaaaatggatcgcaaaaaattaaagtttcaattacaaaagataaaaatcaaggttgtactgtatttggtagttgtttaattgagggtgttactaataaagaaagtcctcaatggcttaaagaaaaaattatttcacttggtcaaaaaccaatttcagcagttgttgatattacaaattatgtgatgttagatttaaatagaccacttcatgcatatgatgcagataaaattgataaggaaattatagtaagaaattcaaaaaagggcgaaacttttgaagctcttgataacaaagagtataaattagatgatgatatgtgtgttatctctgataaatctggagttttaggcttaggaggagtcattggaggaacacgttctggaactgaaattaatactaaaaatattttattagaatccgcctattttatccctagatcaattagaaaaacttcaaaattattaaatattgatactgatgcaaaattcagattgaaag

SEQ ID NO: 301413 - DNA, 612 bp, Unknown
  Bacterial polypeptide expressing nucleotide sequence isolated from the Sargasso Sea
gaaaatttgggaaatgggtaaattcgggtaaggataatgatcttaattattaccaggctaggggtaagttaaaggaagctttatcatgtttgaatataaaaataaatgataaacctactgattcaattgattttcttcatcctggaagaacagcgaaattaatatttgaagggaaggattctggatattttggtgaaattcaccctaaactaatattagagaagatgtcattaaaaaaagtttatttatttagcataaatgtatctaacctcttgggagctagtacaagaaaaaataaatggattccaatatttaagcaatatccaattgttccgaaaatggaaagggatataaattttgtatttagtaagaaatttttaattagcgatataacatcacaaataagaaaaacaggaaaaaatctactggaggatgtatatttaattgatgtttttgaagatattaaacttggcgaagattatataagttatacatttagattatcttatagagataaagataaaacattattggattcagaaattaaaacaatacactcaagtatcatttctaaagtagaaaaaagctttaatactaaattgaggaattagc

SEQ ID NO: 301414 - DNA, 934 bp, Unknown
  Bacterial polypeptide expressing nucleotide sequence isolated from the Sargasso Sea
aatcacaggtacaaacgaattcgggatgtttaaccgtggtcatgagttgaccgtcgatacttattctgaccgcccgatgaccaaccagttccagggaaatatggcagacatttgtcctgtcggtgccatcaccgagaaggaattccgcttcaaacgccgggtctggaaattaaagaagaccccttctatctgtgtgggatgttcgacaggttgcaacgtcactatcgaatacgacaagaatgaagtgttccgcctcaaaccaagggacaatcctgatgtgaacaaatggtggatgtgcgatcaagggcgtttgacctataaggatttaaatattcgagaaaacagaattgctcatcccttgggaaaaactgcggaaggatttcaggaaatcagttgggaaaatgcattttccgcaattcaagaaaaaatttcggaactccagccaacttccaatgaggtgataggactggtggatacccatgcatccaacgaagaactatatctctttaaaaaactcctcaaagagggatttgattcggatcaactattcttccctgatgtggaatgggaacagccggtatctgattttttcatcaactcactgattaccagtgacaaaaacccaaatcgtgccggggcacggatgctgggattgaagggagcgaagtcatcaaaagaagtgacctccaaaattcctactgggaccaaggtcttgctggttttcgggaaaccttttgaagatgaaaacctgctttcccaagccggcaacatttctttggttatcaatattgctgcctggcaaagtggttggagcgaaacagcggatgtgactttgccgggtaggctgcattccgaaaaagacgcgacttacacgaataaggcaggacgtgtgcagagggtcagcacagccataagagctttcacaagacccgtc

SEQ ID NO: 301415 - DNA, 919 bp, Unknown
  Bacterial polypeptide expressing nucleotide sequence isolated from the Sargasso Sea
gcagacagacttaaagtttgtgatgttgatgtttgtgataaagaaatcaaaaaagttgtttgtggggctgcaaatgcaagagagggacttcttactatatatgctccaccaggcgcaataatcccaaaaaccaaaactaagcttgttgttgctaaaataagagatgttacatcttatggaatgctctgttctgaatctgaattaaatttatcggatgaaagtgacgggatcactgagctgtcgtcatccaaatattccaaaaatattggaaaaagttatttttttaaaccaagttcaaatattatcgatttatcaattacaccaaatagaccagactgtcttggtgttcgggggatagcgagagatttatcagctgcgggatttggaaatttaaaaccagaaaaagataaaaaaattaaatctaataaaaaacagaccttaaaagtaaaaataacaaaagaaaaaaatcaagggtgtttatcttttggtagttgcttgataactaacgtcaaaaatacagaaagtccaaaatggttgaaagataaattaatttctataggtcaaaaaccaatatctgcaatcgtagatattactaattatgtcatgattgatattaatcgtcctttgcatgcatacgatgctgacaaaattgataagggaataattgttagaagttcaaaatcaggagaagaatttactgccctagataataaaaattataaactagatgataaaatgtgtgtaataagtgataacaaaggtgtcttaggcctaggaggaattattggaggaacaagatctggtacagagttagagacaaaaaatgttttattagagtcggcttattttgatccaagatcaattagaaaaactgctaaaaaattgaatatcgatacagatgctaagtttagattgaaag

SEQ ID NO: 301416 - DNA, 795 bp, Unknown
  Bacterial polypeptide expressing nucleotide sequence isolated from the Sargasso Sea
aatcaaaaatgaaattaaaaatagctaaaataagaggagtagagtcaaaaggaatgctttgttctgagagcgaactaaatttatcaaaggaaagtgatgggattatagagctcaaaaatatgtctaacaaaattggcaaaagtttttttaaaaattctagtgaaaaagtaattgatttatccataacacctaatcgtcctgattgtttagggatcagaggaatagctcgagatttatcagccgctggactgggcaaattattagaccttaaaaaaaataagattaatcagaaaaaaaatcaaagcatcaaaatttcaataactaaagagaaaaatcatggctgtcttacatttggtagttgtttaataacaggaataaaaaatcaagaaagtcctaaatggttaagagataaaattaattctttaggtcttaaaccgatttcagcagtagtagatatcaccaattacgtaatgtttgatttaaacaggcctttacatgcttacgatgccgataaaattgataaagaaataattgtcagaaactcaaaaaagggtgaaagttttactgctcttgatgataaaaaatatactcttcaaaaagatatgtgtgttataactgacaaaagtggagttctaggtttaggaggcgttattggcggaactaggtctggcacagaaatagaaacgaaaaatattttacttgagtcagcttattttcatccatcttcaataagaaaaacttcaaaactgcttggtctggaaaccgacgctaaatacaggttgaaagaggaataga

SEQ ID NO: 301417 - DNA, 709 bp, Unknown
  Bacterial polypeptide expressing nucleotide sequence isolated from the Sargasso Sea
gtttacggtttatgcaccaccaggagccgttattccaaaaacaaaaatgaaattaaaagtagcaaaaatcagaggcatcgagtcctttggtatgctttgttctggaagcgagctaaatcaatcttcagataaagatggtatcgttgagttaaatgaaaaagaaaaaaatattggtaaaaaatattttaaaaattctgcggaagaggtaatagatattgccataacaccaaatagaccagattgtttaggcgttagaggtattgcgagagatttggctgcatcaggtttgggtcaattaagaaaacagccaccaataaaaataaatcaaaaatttaaacaaccaattaaaatttcaattagcaaagaaaagaaccaaggatgtgctgtctttggaagcgtttatataaaaaatgttgaaaataaagaaagtcctgaatggttaaaaaataaaattatatctttgggactaaaacctatttctgcaatcgtagatattacaaattatataatgtttgacttaaatagacctttgcatgcatatgatgctgataaaattaataaagaaattatagtaagaaattctaaaaaaggtgaaacctttcaagcgctcgataacaaaaaatatacacttggtaataatatgtgcgctattactgacaaatctggtgttcttggacttgggggtattattggagggaaccagatctgg

SEQ ID NO: 301418 - DNA, 279 bp, Unknown
  Bacterial polypeptide expressing nucleotide sequence isolated from the Sargasso Sea
gatgacagtgatggccgatgaaaaacgtcccgaagctttggccggggttatgggtggagaactatctggttgtacgggtgataccaagaacgtatttttggaggctgcatactttgatcctataagaacagcgattacgggtaggaaattaaatttacagtctgaagcgagatttagatttgaaagaggtatagaccccttatttcagagacccggggcggagctggccagtcagaagatacttgatctctgcggaggtcaggccagcgatctaatagt

SEQ ID NO: 301419 - DNA, 869 bp, Unknown
  Bacterial polypeptide expressing nucleotide sequence isolated from the Sargasso Sea
ttactacgttacgaaaggtagtgttttacgttgtcacacttccgcacatcagctggagctgctaaaacacggacacaaaaggtttttagtaacaggggatgtgtacagacgtgatacaattgacgcaacacatttcccagtctttcatcaagtagaaggcgtgagagtcttcgaaccacatgaatgggaatcacaaaatttgtcaagtctagaacttgctagtacagagttgaagacgacgcttgaaggtcttgttcgacatctttttggagagtgtgaaatgcgttgggtagatgcctattttcctttcactgaaccatcatatgaattggagatatttttcaagggagagtggttggaggttctaggttgcggagtgatgcaatctagtattcttgatgcagcagagctggatggacatcgtgcttgggcttttggtcttggtctagagcgtcttgcgatgatcttatttgacattcctgacattcgcttgttttggactcccgatcctcgtttctctcagcaattcaaatctggaatgtttcgagccggcggtgtgggcatgaaaaagttttcaagttattcgaagtatccaccgtgttacaaagatgtatctttctggttaccacaggacaaaaacttcacagaaaattctctttgtgaactcgttcgaagtatagctgggactctggtagaagaagtgaagttgattgatgagtttgaaaataaaaaactcaaacggacttctcactgctaccgctttacttataggtccatggagcgttcactcactgatgacgaagtcaatgaaatacaaaatgaagtgaggcagcgtcttgaaacagacttgcatgtggttcttcgctaaa

SEQ ID NO: 301420 - DNA, 433 bp, Unknown
  Bacterial polypeptide expressing nucleotide sequence isolated from the Sargasso Sea
gatgaaagattttaataaattagaagcagaaattgcagaagcgcgagataaattaataaatattgaaagtataaatgaatttagaataaaatatattggcaagaaaggtatcatttctcttgaaatgaaagaacttgcgagtctttcaggcaatgaaagaaaaaaacaagccgaaaaattgaataaaataaaagacattattttaaagattatagatacaaaaactgaagattttaataatatagaattagataaaaagcttaattctgaaacactagatattactctatcaacatcaaactcatcaggtacgattcatccgatcagccaggtcattgaagaagtcataactatatttggtgaacttgatttctttgttgcggaaggtccagaagttgaaacagattacaataattttactgccctaaacact

SEQ ID NO: 301421 - DNA, 810 bp, Unknown
  Bacterial polypeptide expressing nucleotide sequence isolated from the Sargasso Sea
tgattgtttaggaattagaggtatcgccagagatttggcatcttctgggttaggacaattaaaaaaacaacctcctataaaaatagatcaaaaatttaaaaatccaattaaaatttcaataaaaaaagaaaaaaatcaagggtgtggtatttttggaagtgtatacataaaaaatgttcaaaacaaagagagtccagagtggcttaaaaaaagaattatatctttgggattaaaccccatatcagccattgtagatattaccaattatgtaatgttcgatttaaatcgacctttgcatgcttacgatgctgacaaaataaacaaagaaattattgttagaagttcaaaaaaaggagaatcttttgaagctttagacaacaaaaaatacacgcttcaaaataacatgtgcgcaataactgataagtctggcattttaggcttaggaggaattattggtggaactagatctggtacagaattgtctacaaaaaatattttattagaatctgcatattttttcccatcagtgattagaaaaacttctaaaatattaaacattgatactgatgcaaaatataggtttgaaagaggcatagatcctaattctataaaattaggcttggagcttggaatgtgtatgatactcgatatctgcgggggtaaagctagcaaactttcaattgtaggaaaaataaaggatgaaagaaaactaattgatttagaatcagaaaaatttgaaaaagttataggattttcaattacagaatcagaaattaaaaaaatcttaacttcgttaggatgctccttaaa

SEQ ID NO: 301422 - DNA, 493 bp, Unknown
  Bacterial polypeptide expressing nucleotide sequence isolated from the Sargasso Sea
atgaagatagcctatccacatttactaaattttttaaaggagaaaccttctttagatgagttgtctgataaattgctccaacttggccatgaacatgaaatagaaggcgatattatagatcttgagattacaccaaatagaggtgattgtttgtcactaaaaggaattgccagagatctaaactatttttataaagctgaattagatagagatacatatgatgaaaatattcctaaatcagatttttctttccaaaacaaagctaaagacttgtgtccaaatatatcttttgtagaaatagaaatagatggatcaatttcaggctataagccataccttgaaaattattttaaagatctaaaaattaataaaaataatttttttacggatgtttctaactatttagcctacgaaacaggacaacccactcattgttatgatgcttcaaaaattaatgacacattagttctgaaaagagaaataaaaagaaaaa

SEQ ID NO: 301423 - DNA, 927 bp, Unknown
  Bacterial polypeptide expressing nucleotide sequence isolated from the Sargasso Sea
aaaaaaacaaaaattagaggtgttgagtcatgtggtatgcttgtatcagaaagagagatgggtatttcagatgagcacgatggaataatagaagttaaaggtaattttaaagttggtgatcaatttagtaagattttcaaattagatgaaccaattatagaaataaatttaacaccaaacagatcagattgcttatcagttagaggtattgcaagagatctatcagcagcaggacttggaaaattaaaagaacttaaatttaaaaaaatcaaagaaagttttaaaagtccaatgaaatggaataaagagtttaaagataataaattatgcccaggagtggctggcagatatttcaaaaatgttaaaaatgttgaaagtccaacatggcttcaaaagagacttaaagctataggattaagaccaatttcagcacttgttgatataaccaattatgtaacatttgatcttggtcgtcctcttcatgtttatgatgctgacaaagtatcagggaatttaaaaatgagactagctaataataaagaagagtgcatagcattaaacgaagtaaactatcaatgtgatgaagagatgattattatctcagataatgacgaaaaaattcatggtattggtggtgtaatgggaggattaaaaagtggatgcaatatggatacgaagaacgtctttttagaagttgctttatttgatccaatttctgttacaaaaacaggtagaaaactaaatttacaaagtgatgcaaggtatagatttgaaagaggtatagatacagagtctatttattggggtgtagaagcagcaagtcaaatgataaatgaattatgtggtggagaggcaagcgaatatgtatcttcagagctacatatagaaaaaagagcaaaaatctttttcaatacaaacatggtaaaa

SEQ ID NO: 301424 - DNA, 747 bp, Unknown
  Bacterial polypeptide expressing nucleotide sequence isolated from the Sargasso Sea
ttagtgcaaaaaaaaatattcatagaaattttgaagatttaatgttgtttgaaataggaccagtctttaaaggtagcaaacctggagaacaatcaacaatgattggtgcaattaaaactggaaaacattctagaaaaaattggatagaaaaagagcgaaactttgatgtttatgatattaaaaatgatgttctaagaactctaaatgaagttgggataaacaatgacaatataactacaagcaataaaacaaaaaaatggtatcatccaggtaggtccggtttgttgtcattaggctcatctagtggtccagagctagcatattttggagaaattcatccatttattattaaaaagttagatcttagaactgataatgttttaggttttgaaatcattttagataatgtacccgagtcaagaaaaaaaattagagaaacaaaacctagatttatagtttatgattatcaaaaggtagttagagattttgcttttgttattgatgaaaaatatagttctggagaaattattaatttagttaagagaattgataaagagttaattaagaatgtaaaaatttttgacgtttataaaggagataatattgcttcaggaaagaagtctattgcttttaatgtaacattagaacctaaagacaaaactttaagtgacaatgatatagaaaaaataagcaaaaaaattatatcaacagtccaagatactacaggcgcaactctaagatcgtaat

SEQ ID NO: 301425 - DNA, 692 bp, Unknown
  Bacterial polypeptide expressing nucleotide sequence isolated from the Sargasso Sea
aatgaggatttctatagattggctgaaaaactttgttgaaacaaatgaatctgccgccaatattgctgatacacttactatgctaggattagaagctgaaaatagtgtagaacttcatggtttaaacgacattattgtaggtgaggttattgatcgaattaaacatccaaatgctgatagattaaatttatgtaaagtatttgacggtcaaaacacattgcccattgtttgcggtgctccaaatgttgataagggtcaaaaaattgcatttgctccagttggggcgattcttcctggtgaattcaaaatcaataaggctaagattaggggcgagctaagtgaaggaatgatttgctctgagaaagaattgaatatttccaatgaacatgagggaataatggtcctttctaaagaggcaattcctgggcaatcatttttagaatatctggcaaatgatactcaggtattagaattagatattacaccaaatagggcagattgcttttctcattatggtgtagcaagagattatgccgcaaaaaaaaatattaaactcaatcctttaaaatataaacctctcagctttaaagaaaatcatgcttctagtgaaatatctatttctatagataatgctcaagaatgtcgtaggtatattgctggtattgtaaaaaatgttaaagttaaagattctc

SEQ ID NO: 301426 - DNA, 181 bp, Unknown
  Bacterial polypeptide expressing nucleotide sequence isolated from the Sargasso Sea
aatgttaattccggataaataccaaggttatgcttttggtattggtatcgatagacttggaatgcttaaatatggaataaacgatttaagagctttttttgagacagactatagatggcttaaccatttcgggtttgatccattggatgtgccatcaaactatagaggccttagcagatga

SEQ ID NO: 301427 - DNA, 334 bp, Unknown
  Bacterial polypeptide expressing nucleotide sequence isolated from the Sargasso Sea
cctgctccgccagctgccacccctgcccatgaagccactcctccggggttggtggtgccgtagcgatctcggccagcgtcagttcacgggtcaggtagcggcggccggcgggtgtcagttcatagtggtgattgcccagcgccagcagcagctggttgtccttgagcagacccagcaggggttgccactgacgggcgcggaccaccgaagtggggttgtccagcagctggcgggccagctcccgccactgcgggtgactaaagtcaatcaagcgtcatccttccctgtctgccgaacatactgcaacgagctgaataatctagcgattcgctga

SEQ ID NO: 301428 - DNA, 823 bp, Unknown
  Bacterial polypeptide expressing nucleotide sequence isolated from the Sargasso Sea
cgggtctgctactgctcatcagatgccgttccaccctcgtcgccgccgtcgacgccgcctgcagcgccgcccgcagcgccacctttggtgccaggtgctggctggcaggtcgcctcgcagatgggcatggattgcaacgccgtttgcgcgctggccggccgcatgtgctatgacgaggagaaccgcgcgcacaagggcgagctcgactcggaagcagagatgagatccttgcttacgggtctgcttggcagcgacccctgcactgggttcgcatttggtgccgattggatgggcgacgtgcccaactaccgtggcacttgtcctgatcacgactcgcatccggatttctcgtggtgcatcactggagagtgctactcgtttccaactgggcagacgagcttctcctgcagcacctcttcggattacgccactcgggtctgctactgctcatcagatgccgttccaccttcgtcgccgccgtcgacgccgcctgcagcgccgcccgcagcgccacctttggtgccaggtgctggctggcaggtcgcctcgcagatgggcatggattgcaacgccgtttgcgcgctggccggccgcatgtgctatgacgaggagaaccgcgcgcacaagggcgagctcgactcggaagcagagatgagatccttgcttacgggtctgcttggcagcgacccctgcactgggttcgcatttggtgccgattggatgggcgacgtgcccaactaccgtggcacttgtcctgatcacgactcgcatccccatttctcgtggtgcatcactggagagtgctcttcatttccaactgggc

SEQ ID NO: 301429 - DNA, 643 bp, Unknown
  Bacterial polypeptide expressing nucleotide sequence isolated from the Sargasso Sea
agggtcttttcatctagcattgatatagatctatctaaagataattctgagtttgatctaaaaatgaaaagaggtcaattcaaaataagcaatacatctttttcatccactccaggcaagcaatatgaagaccagtctagtgtgtcattaccagagctgctacttgaggcaaatgatctagtactaaatggcaccataacagatacacctgtaatacatcgaggaaaaggaaaattcaggatacggaattttgagataaagattccgaaaggtatcaaagaagaacctgaaattgaatcaatgcttaaaacactaggcatatggaataactctctgatgatcagacttatagagtttgatattaatttgataaatgaattcacaggcgatcttctattccgctttcaaacacctttcatgaagatatcagtcgatggagactttagtcttcgtcagggtaattcaattccaggtgttgtattacataatgctgaagtaagaatacatcccatatctttaggtataagaaaatggctgagagaatgggaacaaaagaatggtagaatgtttacccgccaaggtgcgaccatcgtgcttaagatcaatggacctatcgatgatcctgtgatccaggggtactaac

SEQ ID NO: 301430 - DNA, 670 bp, Unknown
  Bacterial polypeptide expressing nucleotide sequence isolated from the Sargasso Sea
tatttttttgagatccaggatatttctcaggtcttttcatctagcattgatatacatttatctaaagataattctgagtttgatctaaaaatgaaaagaggtcaattcaaaataagcaatacatctttttcatccactccaggcaagcaatatgaagaccagtctagtgtgtcattaccagagctgctacttgaggcaaatgatctagtactaaatgggaccataacagatacacctgtaatacatcgaggaaaaggaaaattcaggatacggaattttgagataaagattccgaaaggtatcaaagaagaacctgaaattgaatcaatgcttaaaacactaggcatatggaataactctctgatgatcagacttatagagtttgatattaatttgataaatgaattcacaggtgatcttctattccgctttcaaacacctttcatgaagatatcagtcgatggagactttagtcttcgtcagggtaattcaattccaggtgttgtattacacaatgctgaagtaagaatacatcccatatctttaggtataagaaaatggctgagagaatgggaacaaaagaatggtagaatgtttacccgccaaggtgcgaccatcgtgctaaagatcaatggacctatcgatgatcctgtgatccaggggtactaac

SEQ ID NO: 301431 - DNA, 1099 bp, Unknown
  Bacterial polypeptide expressing nucleotide sequence isolated from the Sargasso Sea
atgaaaataacatttgattggctaaaagatcatttaaagacaaatttgaaagaaaaaaatcttttagagcaacttaccaatattggtctagaagtagaaagtatagaaagtctttctgctgataacgaattatttaaagtagctgaaattataaaaactgaaaaacacccaaatgcagatcgactaaaagtgtgtgatgtaaatattggaaaaaatgaaattaaaaaagttgtatgtggtgctgcaaatgcaaaagaggggttacttactatatacgcccttccaggtgcaattatccccaaaaccaagacaaaactagtagtcgctaaaataaggggtgttacttcttacggaatgctttgttcagagtctgaattaaatttgtctaatgaaagtgatgggattactgaattaaccaaggactttaaaaaaaatattggtaaaagttatttttcaaaatcaaaatcaaatcttattgatttatctataacacctaatagaccagattgtcttggaattagaggaatagctagagaccttgctgcatcaggttttggaaaattgatagacttaaaagaaaaaaaaattcattcaaaaaataaacataccttaaaagtaaaaattaataaggaaaaaggacaaggatgtactgtgtttggaagctgtttaataaaagatgtgaaaaattctgagagtcccaaatggcttaaagataagttaatttcaattggtcaaaaacctatctcagcaatagttgacatcacaaactatgttatgcttgatattaatcgtccattacatgcttatgacgctgataaaattgaaaaaggtataattgttcgaaactctcagtctggagaagagtttacagcacttgataataaaaattataaattggaaagtggcatgtgtgttattactgacaataaaggtgttttaggacttggaggaattattggtggcacaagatctggtacagaatttaatacaaaaaatatattactagagtcagcatattttgaacctggatcgataagaaatactgcaaaaaaattgaatcttgatacagatgcaaagtttagattgaaagaggtataga

SEQ ID NO: 301432 - DNA, 1272 bp, Unknown
  Bacterial polypeptide expressing nucleotide sequence isolated from the Sargasso Sea
tgcatttgatttgtcaaaaatatatggaaataagatatatgtaagaaaatcaaaaagtaaagaaaaaattacaacacttgatggagaaaatagggagctacctgaaaatagtattgtaattgcagatgaaaaaaactcaataggattagccggaataatggggggatcaaattctgagatagatgataaaactactagtatttttttagagtcagcaaattttaatccaagtttaattagaaatacttcaaaaagactaaatctttctactgaagcttctatcagatttgaaagaaacttaaatccagaacttactgaatatgcattatctagagctattgaccttatactcaaaatagcaggtggaaaaattagaaatcatattgaagatatatataaatatccaaaaaataacgaatatattattttgagtaaagaaaaaataaaaaatcatttagggctagaaatagatgatgaaaaaattagccaaacactagaaaacttagattttcaatttgagataaattctgataaatctaaatggtatgtaaataagccattttggagatcagatattaatatttcagaggatcttcatgaagaaattgcaagaattatcggttatgatgaaatccctttgtcatttttatctggacaaattcctaaatgggagcccaatttagaatatgatacaaaaatttttttgcaagatattctagttggaatagggttaagtgaaacaatttcatactcagctacatcagaaaaattaattaaattaacaccagatattcataataatggagattttattaaattagataatcctatttctaatgagcattcatacttaagacaaagcttaattccctcattattacttaatgcttcaaggaacacacataattggaaaaaacctataaaattatttgaaattggtaatgtattcttcaaaaataaatctgaagtacatgaaaaaacaatggtctctggaattttaactggatataggaatgaattaaattggaataaaaaagaagaatatgttgattactatgatgtaaaaggaatagttgagtttatatctaagaaatttaatatagatatacagactaaagattatgatagtcaaatatttctaaataataggtcagcaaaactttataataaaaaaattggaaaagatataggatttattggtgaaatatcatctgaattattagaagatttggactttaattttaagaatgcttctatattgaaattgattta

SEQ ID NO: 301433 - DNA, 886 bp, Unknown
  Bacterial polypeptide expressing nucleotide sequence isolated from the Sargasso Sea
atgaccccaggtaagaagtttagagatgccataaaaaatagcagtcctctaattattccaggagcaataaatgcttattcagcaaaattagcaaaaaaagcaaatcataaagcgatttatctttctggaagtggagttgctgctgcctcatatggtcttcctgatctgggtgtaacttcattagacgatgtcataattgatgctaagagaataactgatgcgactgatcttcctctcttggttgatatagatactggctggggtggttctgaagaaatatcaaatacgattgaagaaatggaaaaagctggagttgctgcagttcatatcgaagatcaggtctatgacaaaagatgcggacatcggccaaataaacagatagtgagtgtcgcagaaatgcaagatagattaaaagctgcagttgatgcgaaaaaagatgaatccttttttattatggcaagaacagacgcacttgcatctgagggaattgaaaaagcaattgaaagatgtggtgaatacttaaaagttggtgctgacggaattttctttgaagcagctttatctttagatgaatacaaagaatttaaaaaaaatttttcatttccattactagcaaatattacagaatttggaaaaactccattatttactcaaaaagaacttagcgatgttggggtcgatattgttttatatcctcttacagcatttagagccatgagtttatcggcagaaaaaatttataattcaattatcaaagacgggacacaagagcctctgttagatataatgcagacccgggaagagttgtatgaagttcttgattactacaattttgaaaaacaacttgatgaacagtttgaaaatactaaaaaggaaggctcatgac

SEQ ID NO: 301434 - DNA, 1101 bp, Unknown
  Bacterial polypeptide expressing nucleotide sequence isolated from the Sargasso Sea
ttgatattaaagatatagaggttagtagaacattgaagagtttaggcatgaagattaaaccaactaaatctagtgaaaagattttagttttcattccttcttggagatttgatatttcaatagaggaagatttagtggaagaaatagccaggttgataggttatgacaaactgcctagttcttctttaagttcatctagtagaaaaaaagtagattttttaaatgagaacattgtttccaacttagtatcattaggatacaacgaggtaattacttattcttttgtggatgaaaaggaggctttgctatttgataaaaaaaataaaatgatttttgtaaaaaatcctatttcacaaaatatgtccgttatgagaacgactttacttactggtttattaagttctttccgctataactataaccgtggacaagagagcataaaaatatttgaaataggttctattttttcaaaagggaagaaaataatacaaaaggaaaagttagcaggattagtttcaggcaagatttcagatatacactggtcagatgaaaatagaagttttaatttttttgatataaaaggagatttagaagttctattaaataatgatttttctttcaagactggtcaactatcttttttacatccaggaaaaactgcaataatttctctaaaaaataaggaagttggttttattggagctctaaatccaaaaatttcagattctttaggcattaaacaagaagcttattattttgagatagatttgaattccttacctaaaaataaaacaaagaaattttcaaattattctaaatttcctgttgctcaaagagatctggcttttttagtagataaacaagtgcctgtatctttaattttagaattggctgaagagaaatctggaagaaacctaaaagaagtaaaattatttgatatttatcagggtaagggaattcctgaagataaaaaaagcatagctttttctttattttggcaatccatgaagggtacgttaaccgatgaagaagtagactcaataattgaagatatctctgaacatctttctaggcaaattcaagcagaattaagatcttaat

SEQ ID NO: 301435 - DNA, 1555 bp, Unknown
  Bacterial polypeptide expressing nucleotide sequence isolated from the Sargasso Sea
aaaggtgaaacttttgaggctctagataacaaggaatataaattagatgatggaatgtgtgttatatctgaccaatctggtgtgttaggcttaggaggggtaattggaggaatacgttctggtactgagttagaaactaaaaatattttattggagtctgcatactttataccaagatcaattagaaaaacctcaaaattacttaacattgataccgatgctaaatttagatttgaaagaggaattgaccatcaatcagtagaacttggcttacaaaaagcctctcaactaatatctgaaatttgtggaggaaagattagtaaatttgatattcaaaaaattaaacaatataaaaaaatagaaataaaatttaatacatcgttattcgaaaagattacaggttttaaagtaaaagaaaatgaaatcataaaaattttgaaagatctaggtttcgaggtttcaaaaaagaaatcagaattaaacctaaaggttccttcttggaggcctgacataagtcaaccgatagatatagttgaagaagttgttagaattaaaggatatgaaaatattgaaactatagagccaaagaaaaatagattaaaagacacattaaataaacagcaaaaactttttcattttttacaacgttctgtagcatcaaaaggttatttagagactattacttggtcattcacagattcaagaataaataatttttttaaagaaaatttaaaagaaataaaaatagtaaaccccataagctcagatttagatgttttaagaaattcaattttttcaaatttagctttttatttaaagaaaaatttagatagaggatttaaagacatttcgctttttgaaattggaccaattttcaaaaataaacagcctggagaacagttgacagtaataggtgcaataaaatcgggaaaaatttcaagattaaattggaatgaaaaagatagattggttgatatttttgatgtgaaaaaagatttaattcaaacattaatggaagctggatatgataaacaaagtttttttattagagataaatctccttcttactatcacccaggaaaatctggttcagtttatctagataaggatgatattgatcctgttgcatattttggagaacttcatccaaatattgttaagaaactagatataaaaactgaaggagtagttggttttgaaatctatctcgattatttaaaagataataaaataaaattaaaggatcaaaagtctaattttgaatattcagactatcaaaaatcagagagagattttgcttttgttgtagataaaaattacaaagcacaggatttaatagaaatcatatcatcaattgataaaaatctaataagatcaattaaaatttttgatatttatgaaggtgaaaatattccagatggaaaaaaatcgatagctctcaatgttacaattcaatcaactaaaaaaacactagaagaaaatgatcttgaaaaaattaataaattaattatttcatctgttgagtctaagtcaggcgcaaaaataagatcctaaa

SEQ ID NO: 301436 - DNA, 1240 bp, Unknown
  Bacterial polypeptide expressing nucleotide sequence isolated from the Sargasso Sea
aaacataatttaaagataaagattgaaaaaaataaaaatcaggcatgttcaatttttggaagctgtatcattaaaaatattaaaaatactgaaagtccaggatggttaaaaaatagaattttagctcttggcttaaggcctatttctgccgttgttgacataacaaattatgtaatgtttgatttaaaccgacccctccatgcatacgatttagataagataaagaataaaattaccgttagaaattcaaaaaaaggagagagttttaaagctctagataataaaaattatacacttgataaagatatgtgtgtgatagcggatgatgagggtgttcttggtttaggtggaataatcggaggcgaaaggtcgggcacagaaacaaatacaaaaaatatactattagagtcagcatattttgatcccacattaattagaaaaactgctaaaaaattagatttaaatagtgatgcaaagtttcgttttgaaagaggggtagatcctcaatctgtaactgctgggctggactcagctgtcgaactaattttagaaatttgtggaggggaagtttctaaattagatttacagcagaccaaaaaatttaaagatcttgagataaaatttgaccccaaaatggtaacaaagacagttggaaccaatataaatactaatgagttaaaaaagatcttatcaaacttaggcttcactataaaaactaagggtaaattcctcaatgttaaggttccaagttggagaccagatatctttggcgagattgatctagttgaggaagttattagaattattggatttgaaaaaattaagtccattgaacctgagaaaaagcgaactaaaccaacacttaatttctttcagaaacattttcatttagctcaaagatcagtagcctcaaaaggatatcttgaaacaataacatggtcgtttactgacgaaaaaattaataacaaatttaaagaaaaattagaaagtgtaaagattgtaaatccaataagttcagatttaaatgtattaagaaattctttgtatccaaatctcattttctatttggaaaaaaacttaaacagaggatttggtgatcaagcccttttcgaaattggtccaacttttacaggaaaaaaacctggtcaacaaatcaccgttgtttgtgggattaaaaaacaatttatagatgaagataataatttaaagaaaaatgatttagtagatgtttttcatatta

SEQ ID NO: 301437 - DNA, 1490 bp, Unknown
  Bacterial polypeptide expressing nucleotide sequence isolated from the Sargasso Sea
cggcgcttcgacactgaataaagaacttgccactatttatgatctaaatattgccgatttctttttagtcgtcagagaggtggtagaacaggcgtgttgttggggaattcggtgtagcggtcgtgggtcagcagcgaacagtatagtggcatatctattgggtataacacaggtagatccaattgaacatgggttactctttgaacgttttctgcatagagggcgaaagggaacccctgatatagatatagattttgatagcgagcgccgtgatgaaataatagggtggatagagtctaggtttggtatagaacatacggcaatgacggctacgatcgtgaaatttcgacttcgtctagcgctaagagaagtattaaaagtttacggatttacgaacaatgaaatttcaaacataacaaaactcgtacctcacagtgaacctaattcgattcgtgagtttaccgatatcttagagaagaaaatagatagtatgaagctcgagttggttttgggtgccgtagagttacttcaagactgtcctcggcatctaggcctacactcaggtggtatggttttatctgaactgccactttcccattttactccgatacagatatcaaaaaatggtgtcaaagtaatacagttcgacaaggatgatctagattgcttgggtttgattaaattggatgttttaggcctgcgtatgctcgcttcaataactgaggcagaagagatgattaatactcattaccgtgaaaacatttcgctgaatacgataccttacgacgacaaaaaggtttatagctaccttcaatcaggacagagccttggcacgttccagatcgaatctcaaggtcaaatgcatcttttagctttgcaccaaccgaagtgttttaaggacataatttcacagattgcattatttcgcccagggcctctgcagggtggtatggtacatccatacattcgtagaagaaatggtttggagtcggtttcttatgatcaccccgacttggaacccattctcaaagacacctacgggattattttattccaagaacaaatacttgaaatagccaatcgatttgcaggtatgtcccttgccgaagcggacgattttcgttctgaaatgtcaaaaaggcgaagccaagaaaaactatcggagatgcgaaataatttcatcacaggtgctgctcataaaggaatagaagaatctatcgcttttaacgtttttgaaaaaattgcaaattttgtagggtacggattttgtcgaagccacgcagcggcttttgcaaagattgtgtatcagtccgtttggttgaaactttattttccagctgcatacatggccgcgataatgcaacaccacccaggcatgtatccgttacaaacactagaggaagaggcaaagcgtctaggtgtcagaatacttactcctgatataaataaatcgcatgtacgatatactttggaaatatttgatcataaaa

SEQ ID NO: 301438 - DNA, 1474 bp, Unknown
  Bacterial polypeptide expressing nucleotide sequence isolated from the Sargasso Sea
attgatagatgaatggtcaacagaaatacttacagctcaagacttttctaaaaaggctgaagctgcagatttgtgtccttatgagctcaataaattattgctaaaggaagctcaggtcgtcatagttccttatgtttatttttttgaagaatttgttagaaaatatgttctaggttggatgggaacttcaattgataaaattataactataatagatgaagcacataatttgccagactgggcaagaagtgcagcttcagagtcattatccttagaatctataaatcgagcagttagcgaagtgagagattatggttatcttttgccaaacaatcaagatccagtacaatttctcaattttgttgaagcatctattgaaaaattagctgaagaacacatattagatgaggaagctgaaggtcatctaccttcacatatagtttcaccagattcagaagttgctacttttgagacggaaatgatgtcgcttggaaaaatgactctctttaaacttaaacaaagctccactgaaattgctaaaatgggacaattgacacgacaatatttacttgatcatgggaaaagaccaagatcttacttgggttcagttggtgatttcctctgtcgttggttagattctatagaaagccataccatacggttggttggaaaagagcccctaagattagaaaaggtatgtcttgatcccagagtaatgactggttttcttgaagatactgcaggtgtagtgtctatgtcaggaactataagtcctttagacatgtttagagatttagttggtttgaggccagattcagttctagaaagaaaagagtctatttttcctaaaaacaataaaaaaattgtttatctaacagatgtgactacctcatacaatgaattaaaccgtaaatcaagtacttgggataaaatagtatcgaagttagaattaataatctctaatttcaaaggtaatatagctctattctttccctcatataagcttcttgaatctgccctacaaggaattaaaattaaaaaaccaatttacagagagtatttaggcatggaacaggaagagttaatgcaaacagtcgacagtttcaaatcagatagtagtgcagtgttagccggtgtgatggggggtcgtttagctgaaggaattgattatccaagcaccacattagaaatggcaataatagtagggatcccatatcctgcaccaggtgtaagacaaaatgcattacaacattattatgatatttcttttagtggtcaagggtggaaatttgctgtagaagctccagcagtaagaaaattattgcaagcagcaggtagagtagtaaggtcagagactgacagaggcttcatagttatagcagatagtagaactggtcgtttcttagaatacattccagaattagaacaatcagatgatattgtgtctgaaataggtgaattcttcgaagcctaa

SEQ ID NO: 301439 - DNA, 1933 bp, Unknown
  Bacterial polypeptide expressing nucleotide sequence isolated from the Sargasso Sea
agttatcgatttatccataacccctaaccgccctgattgtttgggagtaagaggaatagcaagagatttagctgctgctggtgtaggaaaattattaaatttaaaaaaaagcaagattaatcaaaaaaaaagtcagagtatcaaaatttcaatagcaaaagagaaaaaccaaggttgcttagcatttggtagttgtttaattaaaggaattaaaaaccaagaaagccctaaatggttgaaagataaaattaattccttaggacttaaacctatctcagcagtggtagatattacgaactacgttatgtttgatctaaacaggcctttacacgcttatgatgctgataagattgagaaacaaatcactgtcagaaattcaaaaaagggtgagagttttacagctcttgatgataaaaaatatactcttcaaaaagatatgtgtgttattactgacaaaagaggtgttttaggcctaggaggtgttattggtggaacaagatctggtacagaaatagatactaaaaatattttattagagtctgcatattttctgccgtcttcaattagaaaaacgtcaaaactattaggtcttgagactgatgctaaatataggtttgaaagaggaatagaccctaattcaatgatcgatggcttaaaaattgctacagatttaattttaaaaatttgcggcggggaagcaagtaagtttaatattacaggaaaaaaagaatataaaaataaatcaattgatctagaggttggaaaatttgaaaaaataataggttttgcgattacagcaagtgaaataaaaaaaattctaaattctcttgggttttcaactaaatctggaaaaaaaactctcaaagttattataccaacatggagaccagacataaatcaggaaatagatttaatagaagaattaataagaataaaaggatttgataggataaatcttatagagcctgaaaaatctaggaataaagaaacacttaacttccaacaaaaattatttcatctgggtcaacgatctgtctccaataagggctattatgaagctgttacctggtcatttacagatcaaaaaattgacgatttaactaatagtagtactaatccaatttttataattaatccaatttctaaagaattaaatgtattaagaagatcaatattttcaaatttacttttttatttgaagaaaaatcatgacagaggatttcacgatatttctttatttgaaataggtccagttttttatggaaaaaaacccggggaacaacaaactgtaataggagcagtcaaatctggacaaataaataaaaaaagttggtctgaaaaaactagaaatgtagatatttttgatatgaagacagatgtaattaaaactttaattgaaatgggaattagcgaagaccatttaatagttagtgacaaatcagaaacctgctaccatccaggcagatcaggttcagtaaatttaaaaacaaataatggaatattactagctcaatttggagaaattcatccatcaattatctctaatttagattataaagaaaaaaatatttatggatttgaaatttttatagataatattccaaaaccaaataaaaagcttagagttttaaaggaaaactttaaattttctgacttccaaatttctgaaagagattttgcttttgtaatagataaaaattatcaagtaggaagattaaataagattatcaaagaactcgatagaaatatcagatcagttaacatatttgatgtctttgaaggcggaaatttgccacctgaaaaaaaatctatagcaatcaatgtttcattacaagctgaggataaaactctttccgataatgatttaaatcaaattagtgaaaaaatcataaaagaagtagaaaataaaactggcgggaatatcagatcataa

SEQ ID NO: 301440 - DNA, 1267 bp, Unknown
  Bacterial polypeptide expressing nucleotide sequence isolated from the Sargasso Sea
aattcatcagagggattagatttatttaaggtagcaaaaattgtaaaaactgaaaaacatcctaatgcagatagacttaaagtttgtgatgttgatattggtaacaaacaaataaaaaaagttgtttgtggggctgcaaatgcaagagagggccttcttactgtatatgcaccaccaggcgcaataatcccaaaaaataaaaccaaactcgttgttgctaaaatcagagacgttacatcttacggaatgctctgttccaaatctgaattgaatttatcagatgaaagtgatgggattgctgagctttcgtcatccaagtatgcaaaaaatattggaaaaagttatttttctaaaccaagttctaatattatcgatttatcaatcacaccaaatagaccagactgccttggtgttcgggggatagcgagagatttatcagccgcaggttttggaaacttaaaaccagaaaaagataaaaaaattaaatctaacaaaaaacagaccttaaaagtaaaaataacaaaagaaaaaaatcaagggtgcttatcttttggtagctgcttgataactaacgtcacaaatacagagagtcctcaatggttgaaagataaattaatttctataggccaaaaaccgatatctgcaattgtagatattacaaattatgtcatgattgatattaatcgtcctttgcacgcatacgatgctgacaaaattgataaaggaataattgttagaaattcaaaatcaggagaagaatttactgctctagacaataaaaattataaactagatgatggaatgtgtgtaataagtgataacaaaggtgtcttaggcctagggggaattattggaggaacaagatctggtacagagttagatacaaaaaatgttttgatagagtcagcttattttgatccaagatcaattagaaaaactgctaaaaaattaaatatcgatacagatgctaaatttagatttgaaagaggtattgatcagttgtctattgaagatggattaaataaagcaggttttttaattaaagaaatttgtggtggtgaaattagtaaaatagatattcaaaaaattgagtcttataaaaacaaagtaataaaatttgaaccaaaaacatttgaaaaaattactggttttaaaatttcaacaaaagaaatgacaatcattttagaaaaacttggttttaaattaaaaaaagaaaaaaaattcattaaattgtcagttccatcttggagaccggatattgttcaag

SEQ ID NO: 301441 - DNA, 1054 bp, Unknown
  Bacterial polypeptide expressing nucleotide sequence isolated from the Sargasso Sea
aatgtctttagttctaataacagggtcatgtggcttggttggttcagaatctgcggagtttttttccaaaaaaggtttcgaaattcttggaattgataataactcaagaaaacttttttttggaaaagacggagatattaactggataaagaatagattaaataaaaatctaaataattataagcattttaacgttgatattacaaattataatagattagaaaaaatttttaagaaatataagaaaaatataaaaatggtaattcatgctgccgctcaaccttcgcatgattgggcaaaaaacaatgtgattaaagactttgatattaacgctaagggaaccataaaccttttagaactaacaaaaaaatactgttatgactctccctttatttttatgtctacaaataaagtttacggggataacccaaacaaattaccgcttatcgaaaaaaagaccagatgggagattaacggcaatcatttgtatgcaaatggaattaccgaaaaaatgtcgatcgatgattgtgtacatagtttttttggagcatcaaaaagttatgctgatttagttgttcaggagtatggaagaaatgtaggactaaaaactgtagcttttagagcaggatgtattaccggacccaatcactcaggtgcaaagttgcatggttttttatcctacctggtgaaagtcgcaatggacaaaaaaagatattatatttttggatataaaggcaaacaagttagagataatattcatagttttgatgtggtgtcttgtttttgggaattcttcaaaaaaccaagatcaggtgagatttataatatgggtggtgggagaaaatctaattgctcaattttagaagcatttaacattatccaaaaattgacaaatatcagagggaaaaagatgattaagagagaaaacagagttggtgatcatatatggtacatttcaaatatgaaaaaattcaaaaaacattatccaaaatggaaacaaacttacaacacggaagatattattgatcaattattatcaaacagtaagttttaa

SEQ ID NO: 301442 - DNA, 1885 bp, Unknown
  Bacterial polypeptide expressing nucleotide sequence isolated from the Sargasso Sea
ctatcagtaagaggtattgcgagagatttagcagccgctggtataggaaatttaaaagaacttaaatttaaaaaaatcaaagatacttttaaaagtccaataaaatggaaaaaagaatttaaagataataaattatgtcctggggtagctggtaggtattttaaaaatgttactaatgttgaaagccctaaatggcttcaacaaagattaactgctataggcttaagaccaatatcagccttagttgacataacaaattatgttacttttgacttaggccgcccacttcatgtttatgatgccgataaagtgtcaggtaatttaacaatgcgactggcttacaataaagaagaatgcatggcattaaatgaagtaagttataaatgcgatgaagatatgattgtcatctcagatgatgataaaaaacttcatggtattggtggtgttatgggtggtttaaatagtgggtgtagtatggagacaaaaaatgtctttttagaagttgctttatttgatccaatttctgttacaaaaacaggtagaaaacttaatctacaaagtgatgcaaggtaccgatttgaaagaggcatagatacagagtccatttactggggtgtagaagcagcaagtcaaatgataaacgatatttgtggtggggaggcaagcgaatatatatcttcagaggtagatatagaaaaaaaagaaataatttctttcaatactgacatgataaaaacttttggaggtattgaaattgaaattaaagatcaagtaaatattcttaaatccctaggttttaatgttaaagaactaaagtctaatcttgagattgaagttcccacttttcgccctgatattgttggagaggctgatatagttgaagaaattattagaatttatggctttgataaaatacctttaaaaaatataaattatgaagaagttaaaaaagaaatactaaataattctgttaaaacttttcacaagataaaaaaaattatagcatctaaggggtattctgaagttgttacctggtcatttatggatgaaaataaagctaagattatttctaatgaaataataggtttaaaaaatccaattagcagtgatttgaatactatgagaccatctactattccaaatttattagatgcaattaatcaaaataaagctcgtatgtactcgagtgcaaaaatatttgaagtcggtccaaatttttctaaatcttattcggacttacaagaaaatgttgctacatcaatctcctatggtttagctgatgagttaaattggttatcaaataaaaaaaatattgatgtttactttactaaagcagatcttttttctgttttaactagtattaatgtaccaactgataatttactatatgaaaaaattaatgggcaaatttaccaccctggtaaatcttcgactttaagattgggaaaaaacaaaattgctaactttggagaaattcatccaatcctattaaaaaatatggatattaattttaaagtatttggttttgagatttacttggaaaatatatctcaatttcaagaaaataaatcttcatcaagaggcgcttttataaataatccatatcaaatggttgaaagagactttgcctttctgtttcctaaagaaattcaagcaaatgaaataataaaaaaagtacagagagttgataaaaatttaatacaaaaagttacaatatttgatgtttatgaaggaaataaattacctaatgataaaaaaagtattgcatttagggttctaatgcagcctcaagacaaaacatttagtgatcaagaaattgaaaacttatctaaacaaattattgatgtagtaacaaaatcatttgaagcttccataagaaactaat

SEQ ID NO: 301443 - DNA, 1153 bp, Unknown
  Bacterial polypeptide expressing nucleotide sequence isolated from the Sargasso Sea
gatgaagattacatatgattggttaaaagatcatttaaaagtaagtgctaaagaagataaacttcttgagaaactaacagacataggtcttgaggttgagagtgtagaaaacttatctgaggggttagatttatttaaggtagcaaaaattgtaaaaacagaaaaacatcctaatgcagacagacttaaagtttgtgatgttgatgttggtgataaagaaatcaaaaaagttgtttgtggtgctgcaaatgcaagagagggtcttctttctgtatatgccccaccaggcgcaataatcccaaaaaacaaaaccaaacttgttgttgctaaaattagagacgtcacatcatatggaatgctctgttctgaatctgaattgaatctatcagatgaaagtgatggaattacagagctgtcaccatctaaatatgcaaaaagtattggaaaaagttatttttctaaatcaagctctaatcttatcgatttatcaattacaccaaatagaccagactgtcttggagttcgggggatagcaagagatttatcagccgcaggttttggaaacttaaaaacagaaaaagataaaaaaattaaatctaataaaaaacagaccttaaaagtaaagataacaaaagaaaaaaatcaaggctgtttatcttttggtagttgcttgataactaaagtcaaaaatacagaaagccctcaatggttgaaagataaattaatttctataggccaaaaaccaatatctgcaattgtagatattacaaattatgtcatgattgatattaatcgtccgttacatgcatacgatgctgacaaaattgataagggaataattgttagaaattcaaaatcaggagaaaaatttaccgctctagataataaaaattataaactagatgatggaatgtgtgtgataagtgataataaaggtgtcttaggcttaggtggaattattggaggaacaagatctggtacagagttagatacaaaaaatgttttattagagtcggcttattttgatccaagatcaattagaaaaactgctaaaaaattgaatatcgatacagatgctaaatttagatttgaaagaggtattgatcagttatctattgaagatggattaaataaaagcagcttttttaattaa

SEQ ID NO: 301444 - DNA, 1462 bp, Unknown
  Bacterial polypeptide expressing nucleotide sequence isolated from the Sargasso Sea
attgacaagaataaaaaaggatcatgactttaaaacaattactaacaagcagattaatattaaagaatcagatcttgtttttactttaaaagaaacgcccataaatttagcaggagttatgggaggattttcaactggctgtacacaaaattctaaaactgtactagtggaatgtgcgtatttcgaaccagaatcaataattggaaaatctataaaatatgatctaaattccgaagcagcattcaagtttgaaaggggtactgatccagatattattgagatggcactcagaagatttataaaaattgtagaagatcatacaactctgaaagatttaaagatttacaaggaagacaacttcaaaaaagatccaagattcatagagtacgaccttaaaaaaattaattcaattttaggagttgaggttattgaggaagattttaatagatatattaataatctaggctttcaaataaaaaatggtttgattttcattccatcgcacaggcatgatattcaaaattataatgatatagccgaagaaattgctagactcataggctatgacaatcttaaaaaaagcgatatcaagcttccactcaacaataattcatctgatttaagtttagaggataaggtaagatcttttcttgtagaagaaggattttctgaagtaattaatttccctttttcagaaaatgataataccggatcagttgaaattgacaatcctttagattccaataaaagattctttagaaagaatattacagaatccattgttcaaaatgttatatataacgaaagacgtcaaaaagactcaattaagctttttgagatatcggatatttatagatttgataaaaaaaataaagtatttaagagcacaaagaaacttgccttaatcttatccggaagaaaagactataattttagagatttcaatataatgatggataaaaaattattggatacaatcttatctaatctgacaaatgaaacaaacatagaagttaatcaaatttctcgtgagaaccttgattctaagattaaacatccgatttattcagctgaaattgaacttaaattaattgatgaagctttaatttcagataagtcaacacagctaccaagatttaaagaagtaaaatattcacaaatttctgagttcccacttattaaacgtgatttgtcattccaagtagatgatataaatgaaataaatgaattatgtcgtttgatagattctttccgccatgaattattaagggattcctttatttttgatttttatcaagatgaaaaaagaaatagatgcaaggtaggttttaggttttcattccaatcaatgaaaaaaacccttatagatgcagaggtcgacgaaataattgatgatatagtaaaatctttatcaagtttaaaaaatactgaaatacccggatatgattatcaagattcataa

SEQ ID NO: 301445 - DNA, 1210 bp, Unknown
  Bacterial polypeptide expressing nucleotide sequence isolated from the Sargasso Sea
atgaaatttacattaggttggcttaaggaacatttagatacaaaatacaaagataataaaataattgagaaattgacagatattggacttgaagtcgaaagttttgaaaatgttggttctgaacttgataattttaaagttgcaaagattataaatgccgagcaacatccaaatgcagataggctaaaagtatgtgatgtagatataggtgaaaaaaatacaattaaagttgtgtgtggcgctccaaatgcaaaaaaaaatctattaacagtttacgcaggtccaggatcaataataccaaaaaataaaatgaagctttcaattagcaaaattagaggagttacctcacatggaatgttatgttctgaatctgaattaaatttatcaaatgaaagcgaaggcataacagagcttaaacaagaaaaatactcaaaacaaataggaaaaaatttttttcaaaataatgttgaaaaagttgttgacttatcgataacgccaaatcgtcctgattgtttaggcgttagaggagtagccagagatcttgcggctgctggagtaggtaaattaaaaaatattcaaaataaaaatattaaaaaagaaggctctcaaaatattaaagtttcaattactaaagataaaaatcaaggatgtactatatttggtagctgtttaattaaaggtgttaaaaacaaagaaagtccaaagtggttaaaagataagatcgtatctcttggtcagaaaccaatatctgcaatagtcgatataactaattatgtaatgtttgatttaaataggccacttcacgcttatgatgcagacaaaattgacaaagaaatcattgtgagaaattctaaaaaaggtgaaatttttgaagcactcgataaaaagcaatataaacttgatgacagtatgtgtgttatatctgataagtcaggtgtattaggcctaggtggcataatcggaggtacacgatctggaactgaatttaatactaaaaatatccttttagaagctgcatattttataccaagatcaataagaaaaacctcaaaacttttaaatatagatacagatgcaaagtttagatttgaaagaggaatagatccaaaatctattgaggaaggcttaaccagagcagcacagttaattacaaaaatttgtggaggtaaaattagcagatttgatgttcaaaaaactgaaaaagataaaa

SEQ ID NO: 301446 - DNA, 476 bp, Unknown
  Bacterial polypeptide expressing nucleotide sequence isolated from the Sargasso Sea
gatgataggtaaactagatgaacatatttcatatatcaaaaatttcaaatcaaaagatattgatgagatagagtctttaaagatcaaatttcttggtagaaaaggaataattaatgatctatttagtgaatttaaaaatgttccttctgatcaaaaaaaggaatacggtcaaaaaataaatgagttaaaaaatttagctcaaattaagtatgatgaattaaaatcatttaactcaaagtctaataaaagtatttcagaagatttaaccaaaccaggattcccaatttctaatggaactttgcatccaattactttaattaagaatcagataattgaaattttttcaaaagtcggatttgaattatcagagggacctgagattgaagatgattggcattattttactgcacttaattttacaaagcatcatcctgcaggagatatgcaagacactttctttattcaacaagaccctg

SEQ ID NO: 301447 - DNA, 871 bp, Unknown
  Bacterial polypeptide expressing nucleotide sequence isolated from the Sargasso Sea
gatgaagataacttatgattggttaaaagatcatttaaaagtaagtgctaaagaagataaacttcttgagaaactaacagacataggtcttgaggttgagagtatagaaaacttatctgaagggttagacttatttaaggtagcaaaaattataaaaacagaaagacatcctaatgcagacagacttaaagtttgtgatgttgatgttggtaataaagaaatcaaaaaagttgtttgtggtgctgcaaatgcaagagagggccttcttactgtatatgccccaccaggagcaataatcccaaaaaacaaaactaagcttgttattgttaaaattagagatgtcacatcctatggaatgctctgttccgaatctgaattaaatttatcagatgaaagtgatgggattacagagctgtcgccatctaaatatgcaaaaagtattggaaaaagttatttttctaaatcaagctctaatcttatagatttatcaattacaccaaatagaccagactgccttggtgttcgggggatagcaagagatttatcagctgcaggttttggaaatttaaaatcagaaaaagataaaaaaattaaatcaaataaaaaacagacattaaaggtaaaaataacaaaagaaaaaaatcaaggctgtttatcttttggtagctgcttaataactaatgtcaaaaatacagaaagtcctcaatggttgaaagataaattaatctctattggccaaaaaccaatatctgcaattgtagatataactaattatgtaatgatcgatattaatcgtcctttgcacgcatacgatgctgataaaattgataaaggaataattgttagaaattcaaaatcaggagaagaattt

SEQ ID NO: 301448 - DNA, 2353 bp, Unknown
  Bacterial polypeptide expressing nucleotide sequence isolated from the Sargasso Sea
tttgcaaactaattcctcaatagatgaaatcactaagaatcttaccgaaatcggtttggaagtagaagaaataataaatccaaaaaaggatttagaaaattttgtagttggaaaaatattaacctcagaaaaacaccctaatgcagatcggctaagtgtttgtaaagttgatataggaaatgaaacgatggaagtggtttgtggcgcttcaaatgcaaaagagggtttattaacaatatatgcccctataggaagtataataccaaaatctaagatggttattcaaaaaactaagattagagacattgtatcctatggaatgctttgctcaggagatgagctaaatatcaataatgaaaatgaaggtataattgagatcaaaaaagctaaagcaggagacaaagcttctaatgtattagatgatcttgatcccataatagaaattgcaattacaccaaatagacctgactgtcttggtgtttttggtatcgctagagatttagccgctaagggacttggcgaacttaaggtaacaaaaataaatacctttaaaagtcattcggagagtattcctgtttatacaaaatctactaaaaataataatttttgtaatatttttgcgggcagattaattgaagggattgaaaataaagaaagcccagactggctaaaaaaccgtttagaaaaaatagggcttaggagtattaatgcggttgtagatataacaaattttctaacatatgatcgaggaaggcctcttcacgcatataattcagatcttatatcaaaaaatataggggcaaggcttgcaaaggcaggtgaaaaaattaaagcgctagatggtaaagaatatatcttaaatgaagaaacatgtgtaattgctgatgatgaaaaaacgcttggtattggtggaattattggtggagaagaatttggttctgatctagaaacaaaaaatatattcttggagtctgcttactttgatcctattcacattgcgcgaacaggaagaaaattgaatattaattctgatgcaagatacagatttgagagaggcactgacccaaattttgttttagaaggactggatatagctacaaaaatgattttggatatttgcggtggaaaagccagtaagactagtgttgctacatatgaagattttaaaaataaaaaaataaatttcgatataaaattaattgaaaaagtttctggaataaaaatttcttcaaaagatataaagaaaattctgctatcacttggttttgagattgataaaaattttaagatcacagttccatcttggaggcctgatgtaagtttaccaatagatattgtagaagaagtaataagaatttacggactaaataatgttgagtctgtgccacttaagaattctgatcaaccttcaaaacctatacttactcacgcgcagaaaaatataaatttagtaagaagaaaccttgcctcaagaggattaatagaaaatatttcatattcatttgttagttctgaattttctgatttatcgcctaaaggaagaaaaccaataaaacttttaaatccaatctctgaagacttatcggatatgagatcttcaccattaatttcattattaaataattttagagaaaataaaaatagaggatttaatgatataggaatttatgaaattgggcctggttttatcgggccaaaaccaggtgaacaaatttctatcgctgccggtttaagaacagggatctataaatcaacgggcactgaaagacattggcagggtaatgaaaaaatagatatttttgatgtgaaaagcgatatcttctcttattttgacatgattaatatttcagacgatttaataacccactctattccagggacagattggtatcatccaggacggtcagcaaatattattttcaaaaaagataaaattttggctacattcggtgaaattcatccaaaaattttatcaaaacttaatatcccatcttgtgtaggtttcgaaatatacctagatgaaatcttaaatgtgatgaatattactaatgctaacgaagagtttaaattctataatttacaagctgtaaagagagatttttcttttgatataccaattgatataaattcatcaatattaattgatgctataaactcttgtaaaattgacctcattgatgacattaaactttttgatcagtttattctagaaaactcaaaaaaatccctagctttagaaataactattcaaccaaaaaaagaaactttaaaagatagtgaaatagaatctatttgtgagaaagtaattcaagctgttgaaaaagctacaagcggaaaattaagaagcatatag

SEQ ID NO: 301449 - DNA, 2144 bp, Unknown
  Bacterial polypeptide expressing nucleotide sequence isolated from the Sargasso Sea
gatgaaatttacaataggttggctaaaagatcatcttgatacaaaaaaaaaagataatgagttaattgaaaaattaacaaatgttggtcttgaggttgagagttttgaaaacttaagttcagatttagacaattttaaagtagcaaaaattattaatgctgaacagcatccaaatgcagacagactcagagtatgtgacgtagatattggtggtcaaaatactgttaaagtcgtatgtggtgcaccaaatgcaaaaaaagatcttttgactgtttatgctggtcctggatcaataattccaaaaaataatatgaaacttacaattagtaaaattagaggagtaacttcttacggaatgctctgctctgagtctgagttgaatttatcagatgaaagcgagggaataacagagctaaaatcaagtaattattcagataaaataggtaaaaatttttttaaaagtaacaccgaaaaagttgttgatttatccataacacctaatagccctgattgtctgggggtaagaggtgtagctagagatctagcagctgctggagcaggtaaattaaaaaaaatttcacttaaaaatattaaaaaaaatggatctcaaaaaattaaagtttcaatttcaaaagataaaaatcaaggttgtactgtatttggcagttgtttaattgaaggtgttaccaatcaagaaagtccacaatggttgaaagaaaaaattgtatcacttggtcaaaaaccaatttcagcaatagttgatattacaaattatgtgatgttagatttgaataggcctcttcatgcatacgatgcagacaaaattgataaggaaattatagtaagaaattcaaaaaaaggtgaaacttttgaagcccttgataataaagaatataaattagaaaatgatatgtgtgttatttctgacaaatctggagttttgggcttaggaggaatcattggaggtacacgttctggtactgaaattaatactaaaaatattttattagaatctgcttattttctgcctagatctattagaaaaacttcaaaattgttaaatattgatacggatgcaaaatttagatttgaaagggggatcgatcctcaatctatcgaaataggcctaacaaaagccgctcaacttatttcagagatttgcgggggcaaaataagtaaatttgatattcaaaaaataagtaagcatgaaaaaaataaaattaaattcaaaatctctttatttgaaaaaataactgggtttcaaataaaagataatgaaataattgaaattttaactgatctaggatttgaagtttctaagaagaaatttgaattggatttaaaaatcccttcttggagacctgatataactcaaccaatagatatagttgaggaaatagtacgtattaaaggatatgagaatatagaaactttagagcctgaaaaaactaaaataaaagatacattaaataaacaacaaaaactctttcatttcctacaacgatctgtagcatcaaaaggctattttgaaactgttacctggtcatttacagactcgaaaataaataatcttttcaaagaaaatttaaaagaaattaaaatagtaaatccaataagctctgacttagatgttttaagaaattcgattttcacaaatttgactttttatttaaagaaaaatttagacaggggatttaaagacatttcgctattcgaaattggaccaatttttaagaataataagccaggtgagcaactgacagttataggggcaattaaatcaggaaaagtatcaaggttaaattggaacgaaaaagacaggatagttgatgtttttgatgttaagaaggacgtaattcaaacactagttgaagctggatacgataggcaaagtttttttgtaagagataaatctccttcatattatcatccaggtaaatctggttccgtctatcttgataaggatgaaatagaccctgtcgcttattttggtgaaatccatccaaatattttaaaaaaacttgatattaaaactgaaggtttggttggttttgaaatttatatggattatctaagggagaacaaaataaagcttaaagacttaaaaacaaattttgagtactcagattatcaaaaatcagaaa

SEQ ID NO: 301450 - DNA, 1414 bp, Unknown
  Bacterial polypeptide expressing nucleotide sequence isolated from the Sargasso Sea
tttgggacgttgtactgtgtcacaagtttttcatgatatagaaaaaaaaattttagagacattacaaaaaactcctaatcaaagtcctgaacaattatcaaaaaatactgaactttcaattgatcaaatccgtagaggaattgaatggttgcgtctaaaggatctagccttggtaaatgaatctgaaaaaataactttttcattaggtcctaacggtcttgattctttcaaaaatggattacctgaaagaaaactcatcaatatgctaaaagaagaaccaaaaacctttgaacaaatacgttctgtattatctggcgccggattcaatgttgcaatagcaaatgctaaaaaaaatggctggataaaaattgaaaaaaataattctgattcattagtatcaataaaagaaaaaccaatagaaacacctgaagaaaaacttctttcattcataggtgaaaaaactatctcacaagaggaaattacaaatcctctggcaatgaaaatcctactctctagaccaaattacattgtacaaacttcagagaaatcaaaaatcatatccttaactgatgctgcactttctcttgacacaagtatttcttctagcggtgcaattgatgttgaagcagacgtaccttccatatttgcagctagaactcatccattacaagacactattgatgaaatacgtgaaatatttgtcaatcttggcttttctgaaattctaggaaacatgactcaatccagtttttggaattttgatgctcttttcactcctcaagatcatcctgcaagagaacttcaagatacattctatttagaaaatttagaatcaaaaaatccagcatcttcttctcaaataaaaaacgtatcttcatcccataaaaaaaattggaaatatgattggaaattatctgaatcacaaaaaatggttttacgaacacatactacatgtgtaaccataaaatatcttgcagagcaaaaacctgaaaatgcaagaattttttcagtaggcagagtatttagaaatgaaaaagttagttacaaacatctagttgaatttaatcaaattgaaggaattgtaattggaaataatacaactttacgtgatttaatgggaatccaaaaagaattttacaaaaaattaggattaacaaaaattaaattttggccaacatttttcccatacactgaaccatctttacaaacaatggtgtacaatgaaaaattaggaaaatggattgaactatttggtatgggaatttttagacctgaggtaacaaaacctctaggaatcgacaaacctgttttagcttggggaggaggaattgagagaattgcaatgttaaagtatgaactagatgatgttagagaattttataataacaatctaagttggttgaggagtgcataa

SEQ ID NO: 301451 - DNA, 142 bp, Unknown
  Bacterial polypeptide expressing nucleotide sequence isolated from the Sargasso Sea
tctaatgttggatatgacaatgaaaaatatcaaggatttgcttttggtatgggaatagaaagaattgccatgattaaatatggtataaaagatatcagattattttatcagaatgataaacgtttcttggagcagttttaat

SEQ ID NO: 301452 - DNA, 521 bp, Unknown
  Bacterial polypeptide expressing nucleotide sequence isolated from the Sargasso Sea
tatgaagttcacactatcttggttgaaaaagcatttagagacatctgctaatttagatgaaatactctctgctttaacggacttggggcttgaggttgaaaatgttgaaaacccagttgagtcgctaaaagagttcacaattggtaaagtggtaagtgctgagcagcatccaaatgcagataagctgagagtatgccaagtacaaacggatgaaggcgagcttcaaataatctgtggtgccccaaatgctcgaaagggaatactagttgtcgttgcaaaacctggtgtatttgttccgggtatagaaacaacaataggcgttggaaaaatccgcggaattgaaagcttcggtatgatgtgttcggagcgagaaatgcaattaagtgacgaacatgacggcattattgaactgtcttctgggcagattggagaaaggttcgttgactggttagcaagcaataaaccatcaaaagttgaaaccaccatagagattgcaattaccccaaatagacccgacgcac

SEQ ID NO: 301453 - DNA, 1341 bp, Unknown
  Bacterial polypeptide expressing nucleotide sequence isolated from the Sargasso Sea
gtgaacgtttcgggaaacggttgaatgcggacggaaccatgacggcggcgttaagagctgcagaattgtgtgtgtcgattgcaggagggactttggaactacaggcagcagatctttatccaggaaagctcgcagatgaatcggtgaaactcgatttggaatatcttgaaagggtcctgggaattaaggtggaaaagaacgaagtaaaccggatcctagaggcgctgggatttacagtccagaacaaaacagaccaattgcttgaagtgacggttcctcatcatcgtcttgatatcgcgattcccgccgatttagtcgaagaaattgccagggtctatggttacaacaggatgccctcaactttgattcgggatgcgcttcctccccaaagagagaactttcaactccagggagtggaggcaattcgagatatcctggtcgcctcaggtatggatgaagtcattacttacaccatgaccaaccctcttgatgaatcgaatttattgctgcaggagggatttgaccagaagaattatgttccggtaaaaaatccactttccaatgaacgcagccatctgcggcgtaaactccttccgggagcattgcatacggccaggcagaatttgagatttgatgatcaggtccaaatcttcgaagccggcggagtgtttatccctcaagaaaatcaggtccttcctgatgaacccatggaactgtgcttattgatgacgggcaaacgagagatcaacagttggcatcaagcagagcaaggagatatggatttttttgacctcaaaggagtcattgaaaatctcttttcctctctccacatccaggaagtggaatggaaaaaagcacgtgaactcccctaccaccccgggcgttcctcagaaattatggtcaatggtgtttccatcgggttcataggtgaactgcatccggatgtccggcgtctgtatgaacttccggacaggcccgtagtatgcgccgaactccaactttcggaattgctgaatgcttccagttcctattatttaatggaagagatttccacctattcacccatcttcgaagatcttgcgtttatcgtcgaccgttcagtagaagtggagactttgatcccgttcattctgaaaaccgggaaaccgcttttaaaacgagtccaactttttgatgtctaccagggaaaaggaatggaagtcgggaaaaaaagtcttggattttccctgacctatcaggcttctgaccggaccctgaatgacaaagatgtggaacaggtccgtaatcgcatcatcaaaaaggtgaatcagaactttcaggcgacactcagggaatcgtgaa

SEQ ID NO: 301454 - DNA, 397 bp, Unknown
  Bacterial polypeptide expressing nucleotide sequence isolated from the Sargasso Sea
aatgcgtatatctattgactggtttaaagagtttgtgaaaaccaacgattccacagaagatattgcaaatacactaactatgcttggcttagaggcagagaatcctgttgatattgctcaattagaagatattataattggagaagtggtagaatgcaaaaaacatcctaacgctgatcgattaaagcaatgcaaagtgtcagatggaaaattggaacttccaatcatttgtggtgcacctaatgttgacaaaggtcaaaaaatagcattagctccagtaggggcgagccttcctggcggaataaatattaaaaaggcaaaaattagaggcgaagaaagtcgaggaatgatatgttcagaaaaagaactggggatttctgatgagcatgaaggcata

SEQ ID NO: 301455 - DNA, 985 bp, Unknown
  Bacterial polypeptide expressing nucleotide sequence isolated from the Sargasso Sea
atgaattttacaatagctttgcttaaggagcatttagatacaaaatataaagataataaaattgttgaaaaattgactgatgttggacttgaagtcgaaagcttcgaaaatgttagctctgaacttgatagtttcaaagttgcaaaaattataaacgctgagcagcacccaaatgctgataggctgagagtgtgtgatgttgatattggtgaaaaaaatacaattaaagtggtgtgtggtgcaccaaatgcaaaaaaaaatcttttaacagtctacgctggtccaggatctataataccaaaaaataaaatgaaactttcagtaagtaaaattaggggagtcacatcttacggaatgttatgctctgagtcagaattaaatttgtctaatgatagcgaaggcataacagaacttaaacaagcaaaatactctgatcaaattggaaaaaatttttttaaaaataatagtgaaaaagtaattgacttatcgataactccaaatcgtccagattgtttaggcgttagaggtgtggctagagatcttgcagctgctggagttggtaaattaaaaaatatctcaaataaaaatatcaaaaaagaaggttctcaaaatattaaagtttcaattacaaaagataaaaatcagggctgcactatatttggaagttgtttaattaaaggtgttacaaataaagaaagtccaaagtggttaaaagataaaattgagtctcttggacagaaaccaatctctgcaatagttgatataacaaattatgtaatgtttgatttaaatagaccactacacgcttatgatgcagataaaattgataaagaaatcattgtgagaaattctaaaaaaggtgaaacttttaaagctcttgataataaggaatataaactctatgataatatgtgcgttatatctgataagtcgggtgtactaggcttaggtggtataattgggaggtatacgatcaggaactgaa

SEQ ID NO: 301456 - DNA, 452 bp, Unknown
  Bacterial polypeptide expressing nucleotide sequence isolated from the Sargasso Sea
gtgtgactctgactcaacacattctccaatgtttcatttagttgagggtttgtttattaatgagaatgcaaatatgggagatttgaagggcactctaattgaattctgtaaacaattttttaatgtacagaatttaaaagtaagatttcgacctagttactttccttttactgaaccttctgctgaaatggatattgcttatgagattgtgaataacaaaattcaattaggccaaggcgatcgttggcttgagattcttggatgtggaatggtaaacccaatagttcttgagaactgcaatgtggatgcgaatatctatcaaggttttgcatttggagtgggcttagacagaatcacaatgttaaagtatgggcttacagatattagatcattttttagtggaaacttaaattggatagctagcaatggctttaccataggagatttttagt

SEQ ID NO: 301457 - DNA, 1702 bp, Unknown
  Bacterial polypeptide expressing nucleotide sequence isolated from the Sargasso Sea
gctgaaagataaattaatttctataggtcaaaaaccaatatctgcaattgtagatattacaaattatgtcatgattgatattaatcgtcctttgcacgcatatgatgctgataaaattgataagggaataattgttagaaattcaaaatcaggagaggaatttactgctctagataataaaaattataaactagatgatggaatgtgtgtaataagtgataacaaaggtgttttaggcctaggaggaattattggagggacaagatctggtacagagctatatacaaaaaacgttctattagaatctgcttattttgatccaagatcaattagaaaaactgccaaaaaattgaatatcgatacagatgctaagtttagatttgaaagaggtattgatcagttatctactgaagttggattaaataaagcagcttttttaattaaggaaatttgcggtggtgaaattagcaaaatagatattcaaaaaattaaatcttataaaaacaaagtcataaaatttgaacctaaaacgtttgaaaaaattactggttttaaaatttcaaccaaggaaataattaacatcttagaaaaacttggttttaaattaaaaaaagaaaataaattctttaaattatcagttccatcatggagaccagatattgttcaagaaattgatatagttgaggaacttgtaagaattagcggttatgaaaaaataaaaacagaaaatcctattaaagatagatcaaaaaatactttaaatccaactcaaaagttatttcattttcttcaaagagcagtagcatccaaagggtatttggaagcaattacctggtcttttacagattctaaatataatgatcactttaaagaaggtggtaaagatataaaaattataaatccaattagctctgaattaggagtattaagaagttctattttttcaaatttagcaatgaatatgagcaaaaacttagatagaggaattaaagatttatcaatatttgaaatagggccaatattttatggtccacaacctggagaacagaacacagttgtttgcggattgtcagctggaaaaaaatctagactttcttggattgaaaaagagagaaatatagatgtttttgatattaaaagagatgttatacaaactttagtagaagttggctatgatactgaaaaattctacatagatgatgaaagtcccaattattatcatccaggaaaatcaggtagaatatttttaaataagggaaaagataaggtggctgctcattttggcgaaattcatccaaacattattaaaacgctagatattaaaacagagtctttagtaggtttcgaaatatttttagataatttaaaactgcctaaaaaatctttaaaagatcaaaaaacaaaatattcagtatccgactttcaaaaatctgaaagagattttgcatttattgttgataaaaaaataagtgcgcaagatatagcaagtgtaatatcaaatattgataaaaatttaatttcaaacgttaaagtatttgacgtttatcaaggtgagaatattcctgaaaatcaaaaatcagtcgctataagcgttactattcagtcattggaaaaaacattaactgataatgatttagaaaaaactaataatttgataatagaaacagttgaaaataaaactggtgctaaaattcgttcctaa

SEQ ID NO: 301458 - DNA, 535 bp, Unknown
  Bacterial polypeptide expressing nucleotide sequence isolated from the Sargasso Sea
tatgtccgatataaaaaaaataaaagatgaatatttcaacaaactaagtaccgatctagatctagaaagtataaatagaattaaaactgaattattcggaaaaaatggtagaatttctaattcattcaaaaaaattagttcttcagcatccgaagaaaaaaaaaaattagcatcagaattaaattttataaaggatgagctacaaaaaaaaattaataataaacttcaagaaattgaaaataaagaaattaattccaaacttcaaaatgaaaaagtagatataactttaccagaaagagatattaatcaaggaaaaatccatccggtttcacaagtgattgacgaaatatcatcaatattttcagaaattggttttagtgttgaagaaggccccgatgtagaggatgaacattataattttacggcactaaatactcctgataatcatcccgcaagagatatgcatgatactttttacctaaataaaaataaaaaattacttttaagaacccaatacttctcccagttcaagtaa

SEQ ID NO: 301459 - DNA, 1124 bp, Unknown
  Bacterial polypeptide expressing nucleotide sequence isolated from the Sargasso Sea
attggctaccttaaataatgttttaaaagatagagtttcttttgaaaaaaccaaatctgaaattgtttttccagatttacttgatgttcaaattgaggcatttcaatcttttatccaaaataacatccctgaagatgagcgcctaaatgttggtttggaagaagtttttaataatgtttttcctctagaagattcacataaaaattatgtatttgagtataaaagttattttttgggtttagcaaaatatactcctgaggaatgtatggataggggtttgacgtattctgttcctttgaaggttcgtcttattttacatattacaaatgaagatgatcgtagtaagtacgatcagtctattgaacaagaagtgtattttggtaatattcctaatatgactaaaaaaggaacttttgttataaatggtgctgagcgtgtaatagtttcgcagcttcaacgttcacctggagtattctttgatcaatctatccatccaaatggcaccaagttgttccagggtagaataattcctttccgcggttcatgggtagattttacaacagatattaatgattctattttttgtattatagatcgtcgtcggaaattcccagttacaatgctattaagagcattaggcttttcaactaatgcagatatttttaaggcatttaattgtattgaaaaaattaaaataaaatcaaaaagtattgattcttttatagggtcaacagtggttgaagatgtaattgatgaagcaactggtgagatttttatagaaggtggatcagagttattaaatgagaatatcgaagatttaaaaaaggcgaagattgaatcaattgaaattgttaatcagaataaagattttcactcaatgatgctattgaatacaatgcaaaaagatccaagtaaaaacactgaagaagcattgagcattgtttatcaattattgcgatctggagaacctccaaatttggaaacagctcaaaaatttattgataggatattttttaatcctaaaaaatatgatttaggtgaagttggaaggtataggttgaatcagcaatttaatcttgaagtcccagtggaagatactgtccttactatggatgatattatac

SEQ ID NO: 301460 - DNA, 898 bp, Unknown
  Bacterial polypeptide expressing nucleotide sequence isolated from the Sargasso Sea
gatgaaaatcacatttgattggttaaaagatcacttaaaaactaatctgaaagaaaaagatcttttagaacaacttactaatataggtctagaggtagaaagtgtggaaactctttcatctgataatcaactatttaaagttgcaaaaattatcaagacagaaaaacatccaaacgcagatcgacttaaagtttgtgacgtaaatgtcggtgagaaagagcttaaaaaagttgtgtgtggtgcgaccaatgcgagtgaaggacttattactatatatgctcctccaggtgcaattatcccgaagactaacacaaaattagaaatagcaaaaattagaggtgtaacttcttacggaatgctttgctctgagtctgagttaaatttatctgatgagagtgatggtattaccgaattatctaaaaaatatgaaaaaaatattggtaaaagttatttttcaaaatcaaaatctaatcttattgatttatctattacacctaatcgaccagattgtcttggtgtgaagggaatagctagagatctcgcagcttcaggttttggaaggttaacaacatctaaagaaaaaaaaattaaattaaaaacaaaacaaactttaaaagttaagataaataaggagaaaggacaagggtgtagtgcttttggaagttgtttaattaaaaatgtaaaaaataccgagagtcctcaatggctcaaagataaattaatttcagttggtcaaaaacctatttcagctattgttgatattacaaattatgtaatgctagatattaatcgaccattacacgcatatgatgctgataaaattgaaaaagggataatcgtaagaaactcaaaatctggagaagaatttacagcactggataataaaatttataagtta

SEQ ID NO: 301461 - DNA, 940 bp, Unknown
  Bacterial polypeptide expressing nucleotide sequence isolated from the Sargasso Sea
ttgcttcaacttggccatgaacatgaaatagaaggaaatattattgatcttgaaattacaccaaatagaggtgattgtttatcactaaaaggaattgccagagatctaaactatttttataaggctgaattggatagagattcatatgagggagatattcctaaattagatttttctttccaaaataaagctaaagacttatgtccaaatatatctttcatagaaatagaaataaatggacaagtttcaggctataagccataccttgaagactattttaaagatctaaagattaataaaaataatttttttacggatgtttccaactatttagcttatgaaacaggacagcctactcattgttatgatgcttcaaaaattaatgacacattagttcttgaaaagagaaacaaaaaagaaaaatttaaaactcttttaggttctgaaatagagttagaaggtgagaatcttgtttttacaataggcggagtagccgttgatttagcaggaactatgggcgatgaaagcacagcttgcaataataaaactactaaagttttagtggaatgtgcttatttcaagcccgaagaaattttaggcaaagcaagagaatataatctcaactctgaggctgcgtataagtttgaaagaggagtggattatcttgctcaagaatcagttttaagaagatttttagctattgttagtgatcatacgaaaataaaatcgttatctatgtactctgaacggaacaaaacagatcttcagcaaataaactttgatagcaataagttaaattctattttgggcaccaatattgaagaaaaagatcaattgaaatatcttgaatctttaggttttaaaagtggcaagtctatgatggtgccttctcatagatctgatcttgaacatactaatgaccttgcagaagaagtgccag

SEQ ID NO: 301462 - DNA, 466 bp, Unknown
  Bacterial polypeptide expressing nucleotide sequence isolated from the Sargasso Sea
gatgtctgatcttaaaaaaataaaagataaatttctttcaaagcttagtgtaaaattagatatttcagaaataaaccaaattaaatctgatctatttggaaaaagtggattaatttcaactcaatttaaaaagattggaacaattgcagagtcagagagaaaaaaatttgcctctgacttaaatataattaaagatgaactacaggatttaataaattcaaaaacaaatgaacttaaaagtgctaaaattaacgagaaattagaaaaagaaaaaattgatattacattacctgaaagatcatttgttcgaggaaaaattcatccagtatcacaaacgatcgatgaaatatcatctattttttctgaaataggttttagcgttgaagaaggaccagatgtcgagaatgaatataataatttcacagctttaaatactcctgaaaatcatcctgctagggatatgcat

SEQ ID NO: 301463 - DNA, 1605 bp, Unknown
  Bacterial polypeptide expressing nucleotide sequence isolated from the Sargasso Sea
tggtttaaaaccaatatccgcagttgttgatattacaaattatgtaatgttggatctaaatagacctctgcatgcttatgatgcaaataaaatagataaggaaattatagtacgaaattcaagacctgaagaaagcttcgaagcattagatggtaaaaagtataagcttaaaaataacatgtgtgttatttctgataaatcaggcgcgttaggactggggggaattattggaggtactcgttcaggaactgaatttgaaacaacaaatatactattagagtcggcgtatttttatccatcttctgtaagaaggaccgccaactctttagacattgatactgatgcaaaatatagatttgaaaggggaattgatccaaattctatcaaagaaggtctcgaattagctacaggtctaattattaaaatttgtggaggagaagcaagcaaattttctttagttggtaaaacaaatataaagaagcgaataattgaaatcgatagtaataaatttaaaaaagttataggaattccaatctcgccgagcgaaactaaaaaaatacttaattcattaggttttaaaacaaaagtttcaaaaaagaattttaaaatcgaaattccttcttggaggccagatgtaaagcaagacatagatattatagaagaacttataagaataaaaggttttgataagatttcattaattcatccagagagaaaaagatcaagagaaactctaaattttaaacagaaattatttcacctttctcaaagagctgtagctagcaaaggttatttagaagcagtgacctggtcctttacagactcacgtatagacaagcagttctctcaaggaaaaaaagaaatagaaatattaaatccaatttcaagtgacctaaatgtattaagaagatcaatattttcaaatttaattatttacttaaaaaaaaaccaggacagaggttatccagatctttcattatttgaaattggaccaactttttctggcaacaaacctggagaacaacagatcgttttaggtggcttaaaatctggtgtcgcaaatcggaaaagctgggattcaaaagctcgagatatagatgtatttgatgttaaagcagatgcgataaaaactttagttgagctcggaataaatgaagatgatttgtttataagtaacaatacacaagactattataatccaggaagatctggctcagttaatctaaaatcattaaacggaccacaattagcttttttcggagaaatacatccaggtatagtttcaaatctagatttaaaagagggaaatatttgtggatttgagatttttttgaagaatataccagaacctaaaaaaaaatatagactaaacaaaagaaactattcagtttctgaatttcaaaaatctgaaagagactttgcttttgttattgataaaaattataaagcaggagatgtagaaaaaatcataagcgaggccgacaagaatttaattaaaaaagttttaatatttgatgtcttcgagggcggtaatatgcccgagggaaaaaaatcaatagctgtgaacgtaacaattcaatccatggaaaaaactctttcagaaaa

SEQ ID NO: 301464 - DNA, 1456 bp, Unknown
  Bacterial polypeptide expressing nucleotide sequence isolated from the Sargasso Sea
gatgctatccgactctgcaagggagtggactttaggacaacttctctcagaaactggctgggaagaccaggtccacgttgccggagctgggaagaaactcgaagaggaggggttgcttgaattgagtgagtcatcctctaggatggtttctctgggcgatgaaggccaaagagcctctgagaatggcctcttggaatcaagactatggggctggatgtcggagttagatggagaaaaaagaaccatgaagtctctgatgtcatcggatttcgaaagagcggaaactggaccgggaatagggattctgaagggccttggtatcgagatagaatcaggcattttcatcatttcagacgactcgaagatctcacaagagatcgatagaaggtccgaattcatacggtctctttcagagggtgcagttgaatcctctaacctggattcagagatgctatctcacttctcatctagaagcgggttgctcgatttcgaggacgtaaccatcagaacttggaaactcactaaatccggctcttcgttagactcctcctcactggaggagaccgaactgataggagaggtgactccagagatgctccagaccgagtcatggataggggcggaattcaagccgttcgacgtagaggcgcctgctccaatgccaacagggggcaggaggcacccaatgcagtcgctcatcgagcggatccgttcggtcttcctagagatgggcttctcagagatagaaggtgactacgttcaatcagccggctggaacatggattcgttattcatcccccagtctcaccccgcaagaacaatgcaagacacattctatctaaatcagcctagaaaggtggaagtcgacgaggaatacctcgatctatgggccagggtgcatgagcacggccatgacacgggtagcaagggatgggggggttccttcgacaaagaagagtctcagagggccttgctaaggactcacaccacggttaacaccgtcaggcatatcgcagacaatcccaatactccatcccgagtcttcggaatcgggagggtgttcaggcaggagaccatagacagaactcatatgccggagttccaccaaatagagggaataatccacgagcccgatgccagcctaccaatgctaatttcgaccttgaagaccttctactcaaagatgggatatccagatgtcagagtcagacctgcgtacttcccttacacagaaccaagcgcagaggtcgacatactctggaagggagagtggctcgagctcggagggtccggaatcttcaggccagaagttacagaaccattgggtaccgagtggccggtatgcgcttggggaatgggcctcgagagactagcgatgctggtcctaggtctggacgacattaggcaactgtatcagccagacctagagaggctgaggaagatgcccctgctttga

SEQ ID NO: 301465 - DNA, 1404 bp, Unknown
  Bacterial polypeptide expressing nucleotide sequence isolated from the Sargasso Sea
tgaggctcttgataataaagaatataaacttgatgatgatatgtgtgtaatatctgatagatcaggtgtattaggtttaggaggtataatcggaggtacacgatctggaactgaatttaataccaaaaatatttttttggagtcagcatattttattccaagatcaataagaaagacttcaaagttattaaacttagatactgatgcaaagtttagatttgaaagaggtatagacccaaaatctattgagataggtttgacgaaagcagcacagctaattactgaaatttgtggaggtaaaattagtaaatttgatgttcaaaaaaatcaaaaagatataaaaaataaaattaaatttaaactttctttatttgaaaaaattgcaggttttaaaataaaagacaaagatgttgtaaaaattttaactgatttgggttttgaaatatctaaaaaaaaaaaagaattagaactgaaaataccctcttggagaccagatataacacaaccaattgatattgtggaagaaatagtaagaattaaaggatataataatataaagactttagaaccagagaaaacaagaattaaagacacattaaacaagcaacaaaaacttttccatttccttcagcgttcagttgcatcaaaaggctattatgagactattacttggtcttttactgactcaaaaattaatcaattatttaaagagagtaaaaatgaagttaaaattgtaaacccaattagttcagatttagatgttctaagaaattctattctgccaaatttaattttttatctaaaaaagaatttagatagaggatttaaagatatttctatttttgaaatcggtccaatctttaaaggcagccaacctggacaacaattaactgttataggagcaataaaatctggaaagatatccagacttaattggaacgaaaaagaaagattagttgatgtttttgatgcaaaaaaagacgctattcagacattaaatgaagctggatatgataaaaataatttttttattagagacaaatctccatcttattaccacccaggaaagtctggctcaatttatttagacaaagatgatatagaacctgttgcttattttggtgaaattcatccaaatattataaaaaaactagagattaatacagaggctttagtaaattttgaaatatatttagatcacttaaaagataataaattaaaattaaaagatagaaagtcaaactttgaatattcagactatcaaaaatcagaaagagatttcgcttttgttgttgataaaaatataaaagcacaagatttaatagaaataattactgctattgataaaaatttaattaaatcagtaaaagtattcgatgtttatgaaggtgagaatattccttc

SEQ ID NO: 301466 - DNA, 1072 bp, Unknown
  Bacterial polypeptide expressing nucleotide sequence isolated from the Sargasso Sea
tatgtcaattgagcaatcaattccttttgcgaaagtcgaaatatatgacacgactctccgcgacggagctcaactggaaggcatctccttaactgtcgatgacaagctgcgaatagctaatcaactagaccgtttaggagttcattacattgaagggggatggcctggagctaatccgaaagacgaagagtttttcgcaagagcttcgaaagaactagatttaaaaacctctcaactagtggcatttggttcgacaagaagagttaacggtgacgtagaagatgatcagactcttagaaatttgctagatgcgaacacagaagtcgtttgcattgtgggaaaagcttctgcatatcacgttacagaagcactgcgaacaagtcttgaagaaggcattgcaatggttgaggagtcagtcagatttctaaaaggtaaagatttaaaagtttttttcgatgcagagcatttttttgatggttataaagagaatccagatttttccttggacgtattagaaggtgcagctcgaggtggagctgattgcgttgtcctttgtgatacaaatggaggctcactaccacacgaagtagaaaaaattgtaaaagaagttagtggcaaaattgattgcgaaatcggtgtccatttgcataatgacacagggtgtggagtcgcaaacgctatagctggtgttatgggtggagcaacacaagttcagggaacaattaatggttacggtgaaagggtaggcaactgtgacttagtcccagttatagctaacctcagtctcaaactcggattcgaaactatttcgaaggagcatttagaaaatctaacttcagtttcacggcatattgctgaactggctaatttcgcttctgatccccagcaaccttacgtcggaacaaaggcattcgcccataaggcaggactgcataccagtgccatagccagaagaaaagatgcttatgaacacatagatccagaatcggttggcaatggaacaagatttttagtctctgaaatgtcaggtagatcgactatagaaatgaaagtaaaagaaattggaatttga

SEQ ID NO: 301467 - DNA, 448 bp, Unknown
  Bacterial polypeptide expressing nucleotide sequence isolated from the Sargasso Sea
gatgactaagtacaaaaatatagagtctttaatagaaaaggaaaaatcagaagtgtcagaccttgatactttagagaagtttcgtttaaactttttaggaaaaaaaggagaaaactctttattaatgaaagaactttcaaagcttggtgctgatgaaagaaaacaaaaagccgaagaactgaatattatcaaggattcagttttaaaatttgtaaaagataaaacagtcgaattgcaaaacgtggctatgcaaggtcagttaacatctgaatcattagatctttcactccctgtatcttcacaaaatggaactattcatcctgttacacaagtaatagaagaagttatagcaatttttggtgatttagatttctttgttgctgaaggtccagaggttgaaacagattacaataactttacagcacttaatacctcagagcatcatcct

SEQ ID NO: 301468 - DNA, 415 bp, Unknown
  Bacterial polypeptide expressing nucleotide sequence isolated from the Sargasso Sea
aatgaaacttgaacaattaaaagagcaaatcagcgaacaagaaatttcaaatactcaagaattagagtcatttagagttatgtttttaggttcaaaaggccttataaaacaacagtatgccctgcttaaagaagttccaaatgatcaaaaaaaatcttttggaaaacaaatcaatgatttgcgtcaattagccgaaaaaagattgaatgaagaaaaagcaaaactaagttctgctgaaaatcaaatcgaagatgcgattgatttatcaaggccacccgagcccattcaaattggttctcaccacccactctctatagttagaaaagaaataataaaaatattttcaaatattggctttgatgtttcaaatgggccagaaatagaggatgattggcataattttacagcattaaac

SEQ ID NO: 301469 - DNA, 1264 bp, Unknown
  Bacterial polypeptide expressing nucleotide sequence isolated from the Sargasso Sea
tatgtgcgttatctctgataagtctggcgtattaggtttaggtggaataataggaggcacacgttcaggcactgaacttaatacaaaaaatattttgttagaatctgcattttttttgcctagatctattagaaaaacttcaaaactattgaacatagatacggatgctaaatttagatttgaaaggggcattgatcctcaatcgattgaactgggtctaaaaaaggcatccaaattaataactgaaatttgtggaggtaaagttagcaagtttgatgttcaaaaaattaaaaaagataaaaaaaataaaattaaatttaagatttctttatttgagagaattgcaggctttaaggtaaaagataaagaaattattaaaatcttaatagatttaggctttgaagtttcaaagaaaaaattggaattagaattaaaaattccttcttggagaccagatataactcaacctatagatatagttgaagagatagtaagaataaaaggtttcaataatataagaactttggaaccagataaaacaaggtttaaagctacactcaataaacaacaaaaactttttcattttttgcagcgctctgtggcatctaaaggatactttgaaactgtaacttggtccttcacagattcaaaattaaatagtctttttaaagaaaattataaagaaattaaaatagtaaatccaataagctcagacttagatgttttaagaaattcaatattttctaatttgacatcctatcttaaaaaaaatttagatagaggttttaaagacgtttccctttttgaaataggaccgatttttaaggataacaaacctggcgagcaattaacggtgataggagctataaaatcagggaagatatcaaggttaaactggaatgaggaaaatagatcggttgacttatttgatgcgaaaaaagatgtaatccagactttagtagaagctggatatgataggcaaaatttatttgttagagaaaaatcaccttcttattatcatccaggaaaatctgggtctgtatatcttaataaagatgatattgatccagtggcttattttggagaaattcatccaaatataataaaaaaaattgatataaaaactgaagcacttgttggttttgagatttatctggattacctaaaagataaaaaaattaaacttaaagacttaaaatctcaatttaagttctcagactatcaaaaatcagacagagactttgcatttgtagttgataaacat

SEQ ID NO: 301470 - DNA, 490 bp, Unknown
  Bacterial polypeptide expressing nucleotide sequence isolated from the Sargasso Sea
aatgtcggatattataaaaattaaagaagaatatctaaataagctaaaagataatttagatcttaataatgttaatcaattaaaatccgagttgtttggaaaaaatggaataatttcaaatgaatttaaaaaaatgggttctgtttctgcagaagatagaaaaaaatttgcttcagatttaaactcaataaaaaatgaactacaaagtttaatcgaaaaaagaattcaagatattgaaattaatgagataaatctaaaacttcaaaatgaacaagtggatgttactttgccagaaagaagttttaatcgaggtaaaattcatcctgtatcgcaagtcatagacgaaatatcctcaatattttcggaaataggatttagtgttcaagaaggccctgatgttgaaaatgaatacaataattttactgctctaaacacacctgataatcacccagcaagagatatgcatgatacattctatttggataataaa

SEQ ID NO: 301471 - DNA, 988 bp, Unknown
  Bacterial polypeptide expressing nucleotide sequence isolated from the Sargasso Sea
ccctcaactttgattcgggatgcgcttcctcctcaaagagagaactttcaactccagggagtggaggcaattcgagatatccttgtcgcctcaggtatggatgaagtcattacttacaccatgaccaacccacttgatgaatcgaatttattgttgcaggagggatttgaccagaagaattatgttccggtaaaaaatccactttccaatgaacgcagccatctgcggcgtaaactccttccgggagcattgcatacggccaggcagaatttgagatttgatgatcaggtccaaatcttcgaagccggcggagtgtttatccctcaagaaaatcaggtccttcctgatgagcccatggaactgtgcttattgatgacgggcaaacgagagatgaatagttggcatcaagcaaagcaaggagatatggatttttttgacctcaaaggagtcattgaaaatttctttacctcactccatatccaggaagtggaatggaaaaaagcacgtgaactcccctaccaccccgggcgttcctcggaaatcatggtcaatggtgtctccatcggaatcatgggtgaactgcatccagatgtccggcgtttctatgaacttccggacaggcctgtggtttgtgccgaactccaactttcggaattgctgaatgcttccagttcctattatttaatggaagagatttccacctattcacccatcttcgaagatcttgcgtttatcgtcgaccgttcagtagaagtggagactttaatcccgttcattctgaaaaccgggaaaccgcatttaaaacgagtccaactttttgatgtctatcagggaaaaggaatggaagtcgggaaaaaaagtcttggattttccctgacctatcagtcctctgaccggaccctgaatgacaaagatgtgaaacagatccgtaatcgcatcatcaaaaaggtgaatcagaattttcaggcgactctcagggaatcgtgaa

SEQ ID NO: 301472 - DNA, 670 bp, Unknown
  Bacterial polypeptide expressing nucleotide sequence isolated from the Sargasso Sea
atgaagtttactttatcttggcttaaagaacatttggaaactaattcctcattagatgaaataactaataatctaactgaaattggcttggaagtggaagacatcatcaatccagaaaaagatttagaagattttatagttggaaaaatattaacttcagaaaaacaccctaacgcagatcgccttagtgtttgtaaggttgatataggaaatgaaataaaagaagtagtttgtggcgctccaaatgcaaaagagggcttattaacaatatatgctcctcttggaagtataataccaaaatctaagatggttattcaaaaaactaagattagagacgtcgtatcttacggaatgctttgctcgggagatgaattaaatattgataatgaaaacgaaggtataattgagatcaaaaaagctaaggcaggagataaagcctgtacagcattaggtgatcttgatcctataatcgaaattgcaatcacaccaaatagacctgattgtcttggggtttatggtatcgctagagatctagccgctaagggacttggaagacttaaggtaacgaaaatgaacacacttaaaagtcatgaagaaagtattcctgtttacacaaaatctactaaaaataataacttttgtaatatctttgcaggtagattgatgaagg

SEQ ID NO: 301473 - DNA, 715 bp, Unknown
  Bacterial polypeptide expressing nucleotide sequence isolated from the Sargasso Sea
gtaacttcattagatgatgtcgtaattgacgccaagagaataactgatgcaactaatcttcctctactggttgatatagatactggctggggcggttcaaaagaaatatcaaataccattgaagaaatggaaaatgctggagttgctgcagttcatattgaagatcaggtctatgataaaagatgtggacatcggccaaataaacagatagtgagtgttacagaaatgcaagatagaataaaagctgcagttgatgcgaaaaaagatgaatctttttttattatggcaagaacagacgcacttgcatctgagggaattgaacaagctattgaaagatgtggtgaatacttaaaagttggtgccgacggaattttctttgaagcagctatatctttagatcaatacaaagagtttaataaaaatttttcagttccattactagcaaatattacagaatttggaaaaactccattattcactcagaaagaacttagcgatgttggagttgatattgttttatatcctcttacagcatttagagccatgagtttatcggcagaaaaaatttataattcaattatcaaagacgggacacaagagcctctgttagatataatgcaaacccgggaagagttgtatgaagttcttgattactacaattttgaaaaacaacttgatgaacagtttgaaaatactaaaaaggaaggctcatgac

SEQ ID NO: 301474 - DNA, 1505 bp, Unknown
  Bacterial polypeptide expressing nucleotide sequence isolated from the Sargasso Sea
aattttagcacttggcttaaggcctatttctgctgttgttgacataacaaattatgtaatgtttgatttgaaccgacccctccatgcatacgatttagacaagataaagaataaaattaccgttagaaattcaaaaaaaggagagagttttaaagccctagataataaaaattatacgcttgataaagatatgtgtgtgatatcagatgatgaaggtgtacttggtttaggtggaataatcggaggtgaaaggtcaggcacagaaatacacacaaaaaatatactattagagtcagcatattttgatccttcaactacaagaaaaactgctaaaaaattagatttgaatagtgatgcaaagttccgttttgaaagaggagtagatcctcaatctgtaactgttgggttggactcagccgttgaactaattttagaaatttgtggaggggaagtttctaaatttgatgtaaagcagacaaaaaaattcaaaaatcttgagataaaatttgaccccaaaatggtatcaaagacagttggaaccagcataaacactaatgagataaaaaagatcttatcaaacttaggcttcactgttaaaaccaaaggtaaatttctcaatgttaaggttccaagttggagaccggatatttttggagagattgatctagtagaggaagtaattagaattattggatttgaaaaaataaagtccattgaacctgataaaaaacgaactaaaccaacacttaattactttcagaaacattttcatttagctcaaagatctgtagcctcaaaaggatatcttgaaacaataacatggtcttttactgacgaaaaaattaataacaaattcaaagaaaagttagaaagtgtaaagattgtaaatccaataagttcagatttaaatgtattaagaaattctttgtatccaaatctcattttttatttagaaaaaaacctaaacagaggatttggtgatcaagccctttttgaaattggtccaacttttacaggaaaaaaacctggtcaacaaatcactgttgtttgtgggattaaaaaacaatctatagatgaagatagcaatttaaagaaaaatgatttagtagatgtttttcatattaaaaaagatttagttcaatcattaacagaacttgagataagaaaagaagattttaaggttgaggaaaatacgccttcttattatcacccaggtatttcaggatctatagtctcaaaagatggaaatcttgttcttggatattttggtgccttgcacccaaagataatttcaaatacttttggatttgaaatctttttagaaaacttagttgagtataaagcaaaaaataaaaaaactaaagaaagtctagctttttcggattatcagaagtcagatagggattttgcttttttagtcaataaagatacaaaagctcaagatttaacagaagttatccagaatatagataaaaaatttaatcaaagaaataaaaatttttgat

SEQ ID NO: 301475 - DNA, 1576 bp, Unknown
  Bacterial polypeptide expressing nucleotide sequence isolated from the Sargasso Sea
tttgcaccagaaaatagttatattcctggtacagacttacatcttaaaaaaaaccaaaataagaggagttgagtcttgtggaatgcttgtatcagaaagagaaatgggtatttctgacgaacacgatggaattatcgaaataaaagataattataaaattggtgatttgtttggtaaaatttttaaaatagatgaacctgttattgaaattaatttaacaccaaatagatctgactgtttatcggtcagaggtatcgcaagagatttagcggcagcaggaattggtaaattaaaagacataaattttaaaaaagttaaagaatcatttaaaagcccaattacttggaaaaaagaatttcaaaataataatctatgtcctggagtagcaggtcgatacttcaaaaatgtcaaaaatgtagaaagccctaaatggcttcaagatagattaactgcaatcggattaagacccatttcagctcttgttgacattacaaattatattacctttgatttaggaagaccacttcatgtttacgatgctgataaagtgtctggcaatttaacaatgcgattagctaagaaaaatgaaaaatgtttagcattaaatgaaattaattatcaaagtgacagtgatatgattgtaatttctgatgatgaaaataaacttcatggaattggtggggtcatgggcggtcttgatagtggttgtagtatggaaactaaaaatgtttttctagaagttgcgttatttgatccggtttctgttactaaaactggaagaaaactaaatcttcaaagtgatgcacgttaccgttttgaaagggggatagatactgactccatctattggggtgtagatgccgcaactcaaatgattttagaattatgtggaggcgaagtaagcgagttagtttcttcagaaattaatttagaaaaaactaaaccatttatgtttgacacaaataaagtgaagacttttggtggaatagaaatcaataataaagaacaagaaaaaattttagtatcacttggtttctctgttaatgaaaaaaaatcaaaatttgaaattcaaagtccttcttttagaccagatattgttggtgaggcagatatagtagaggaaataattagaatttatggttacaataaaattcctcttaaaaaaataactaataaagaagaaaaaaaacagattttaaataccaaaataaaaactttttataaaagtaaaaaaactatagctttgaatggatattctgaagttgtcacctggtcatttatggatgaaaataatgcaaaaattatatcagatgaaattattagtttaaaaaatcctataagtaacgatttaaatacaatgagaccatctacgtttccaaatttattagaagcaattaatcaaaataaagctagaatgtatttaaaaggaaaaatatttgaagtaggtccaaatttttctaaatcattacctaaccaacaagaaaatgttgccactgctatagcttacggctcatctgatgaacaaaattggttatcaattaaaaaaaatgttgatgtctttagtataaaggctgat

SEQ ID NO: 301476 - DNA, 343 bp, Unknown
  Bacterial polypeptide expressing nucleotide sequence isolated from the Sargasso Sea
atgaaatttacattagactggctaaaagatcatttagatacttctgaaaatttaaataccataacagatactttaaccaatattggtttagagattgaaagtgtagaagataaatcagaaatatttaagaattttacagtagctaaagttttaaaagcagaaaaacatcctgatgcagataagcttaaagtatgtcaggttgaaacaataaatggaaattatcaagttgtgtgtggtgctccaaatgcaagacaggggatgctagggatttttgcaccagaaaatagttatattcctggtacagacttacatcttaaaaaaaaccaaaataagaggagttgag

SEQ ID NO: 301477 - DNA, 121 bp, Unknown
  Bacterial polypeptide expressing nucleotide sequence isolated from the Sargasso Sea
aaaatattcaggattagcttttggtctaggaatagagcgtatagcgatgctcaaatatggcgtaaatgatattagagatttttataaatcaaatctagatttcttgaggcagtttaaatga

SEQ ID NO: 301478 - DNA, 871 bp, Unknown
  Bacterial polypeptide expressing nucleotide sequence isolated from the Sargasso Sea
atgcaggcaggtcaaaaatttagagacgctatcaacaaaaacaaacctttaatcatacctggaactataaatgcatactctgcaaaacttgctgaaaaatctggacatagtgccatttatttatcaggaagcggagttgcagctgcttcatacggtttaccagacttaggcgttacttcaatgaatgatgttttaattgatgttaaaagaattacttctgcgacttcattgcctttgcttgtagatattgatactggttggggtgagtctgatcagattgcagaaactattactgaaatgggtaacgctggttgcgcagcggtgcatattgaagatcaagtttttgacaaaagatgtggacataggccaaataaacaattagtttcaattgacgagatgagaagtagattaaatactgcaataaattcaaaagtagacgattctttttttattatggcaagaaccgatgcaattgcatctgaaggtattgatggagcaatcaaaagatgtgaatcttatatagaagagggtgcggatggcatatttttagaagctgtaacatcaatagagcagtataaagaactcaaaaatcattgttcagttccagttttagcaaatattacagagtttggaaaaacgcctttatttactcaagaacaattaaaagaagttggtgttgatatggttctttatccacttacagcttttagagctatgagccaatctgcagaaaaaatatataattcaataattaaagacgggacacaagagcctctcttagatataatgcagacccgtgaggagttgtatgaagttttagattactacaactttgagaaacagcttgacgataaattgtcaaataattaag

SEQ ID NO: 301479 - DNA, 1334 bp, Unknown
  Bacterial polypeptide expressing nucleotide sequence isolated from the Sargasso Sea
gaaaaagatatccgggaaaaactattttaagagtaaaggtgaaaaatcgatagatatatctgtgacacctaatagaccagattgtttaggcgttaggggaatagcaagagatttagcttctgccggtttaggtaagttctcaaatttaaaaaaaataaagataaagcaaaactttaaacaaccaataaaaatttcaataacaaaagaaaaaaatcagggctgtttaaattttggcgcttgctatataaaaaatattcaaaataaagaaagtccagaatggctcaaagagaaaataatttctctcggtttaaaaccaatttctgctgtagttgatattactaactatgtaatgtttgaccttaacagacctttgcacgcttatgacgctgataaaatagataaagagataattgtaagaaactcaaagtctggtgaaagctttactgcacttgatggaaaaaactataaacttgaaaataatatgtgtgttatttcagatagaaccggacctttaggtcttggcggtataataggtggttcaagatcaggcactgaatttgatacaaaaaacattttattagaggcagcatattttcatccttcatctataagaaaaactgcaagtaatttaggcgttgatacagatgctaaatatagattcgagaggggcattgatccaaattcaattatcgagggactcgaaattgcaacaaatttaattcttaaaatctgtgggggagaagctagtaaattttcagtggagggaaaatctaaagttaagaataaaattttagaaattgatcaaacaaaatttaaaaaggtaatagggataccaatgcctgctggtgaagccaaaaagattttaaacacacttggatttgatactaaaacaaaaaaaaataaatttttagtaaagataccaacctggcgacctgatatctatcaagatgtagatatagtcgaggagctaataagaattaaaggttttgataaaatttcactaatacaccctgagagatcaagaaataaagacacgttaagttttgagcaaaagttatttcacctttctcaaagagctgttgcttcaaaaggttatatggaggcagttacctggtcatttactgactcgcggattgataaacatttttcacaaggaaagaaagaaattgaaatcacaaatccaatttcaagtgatttaaatgttttaaggacatcaattttttctaatttgattttgtatttgaaaaaaaatcaggatagaggctatttagatttatcgttatttgaaattggccctactttttatggcaaaaaccaggagaacaacaagtagt

SEQ ID NO: 301480 - DNA, 1999 bp, Unknown
  Bacterial polypeptide expressing nucleotide sequence isolated from the Sargasso Sea
actaaaaacaaacaagtactctgataaaataggcaaaaatttttttaaaaataaaagtgaaaaagttgtagatttatcaatcactcctaatcgccctgattgcttaggagtaagaggtatagcgagagatcttgcagctgctggagctgggaaattaaaaaatatttctaacaaaattattaaaaaaaatggatctcaaacaatcaaagtttcaattacaaaagagaaaaatcaaggttgtactgtatttggtagttgcctaatcacaggtgttacaaataaagaaagtccaaaatggctgaaagaaaaaattatttcacttggccaaaaaccaatttcagcagttgttgatattacaaattatgtaatgttagacttaaatagaccacttcatgcatatgatgcagataaaattgacaaagaaattatagtaagaaattcaaaaaagggtgaaacctttgaagcccttgataacaaagagtataaattaggtgataatatgtgtgttatttctgacaaatccggagttttaggcttgggagggatcatcggaggaacgcgttctggaactgaaattaatactaaaaatattttattagaatctgcgtattttattcctagatcaattagaaaaacttcaaaaatattgaatgttgatactgatgcaaaattcagatttgaaaggggaattgatcctcaatcaatcgaattaggtttgtcaaaagctgcagaattaatatccgaaatttgtggtggcaaaataagtaattttgatattcaaaaaactgataagcatgaaaaaaacaaaattaaattcaatgtctctttatttgaaaaaataactggttttaaagtaaatgataatgagattgtaaaaattttaactgatctaggatttgaggtttctaagaagaaattagaattagatttaaaaatacctacctggagacccgatataattcaaccaattgatatagttgaagaaatagtaagaataaaaggatataataatatagaaactttagagcctgaaaagactaaaataaaagatacattaaataaacaacagaaactctttcactttctacaacgatctgtagcatcaaaaggctattttgaaactgtaacttggtcatttacagactcgaaaataaataatctttttaaagaaaatctaaaagaaataaaaatagtaaatccaataagctcagacttagatgttttacgaaattcgattttcactaatttaactttttatttaaagaaaaatttagatagaggatttaaagatatttcgctattcgaaattggtccaatttttaagaatagcaagccaggtgagcaactgacagttataggtgcaattaaatcaggaaaagtatcaaggttaaattggaacgaaaaagaacgaccggttgatatctttgatgtaaaaaaggatgttattcagacattagttgaagctggatatgaaaggaaaagtttctttataagagataaatctccctcatactatcacccaggcaaagctggctcggtctatcttgataaggatgatattgaacctgttgcttattttggagatatacatccaaatattgttaaaaaacttgatataaaaactgaaggtctagtaggttttgagatttatctagatcatctaaaagaaaataaaattaaacttaaagatcaaaaacctaattttgagtactctgactatcaaaaatcagaaagagactttgcctttatagttgataaaaattttaaagcacaagacttaattgaaattatatcatcaattgatcaaaatttaataaggtcaattaaaatctttgatatttatgaaggtgaaaatattccggacaataaaaagtcaatagctataaacgttataattcaatcttttgaaaaaacactagaagagagtgatcttgaaaaaattaataaattaattatttcaactgtcgaaactaagtctggggcaaaaattagatcctaa

SEQ ID NO: 301481 - DNA, 568 bp, Unknown
  Bacterial polypeptide expressing nucleotide sequence isolated from the Sargasso Sea
gatgaagtttacagttgactggttaaaaaaccatcttgatacaaaatttaacaataatcaaataatagataaattaactaatattggtctagaagtagaaagttttgagagttctacatctgaattagatacatttattgttgcaaaaattatcaatgccaaaactcatccaaatgctgacagattgaagttatgtgatgttgatataggtagcgacaaaacaattgaagtagtatgtggagccccaaatgcaaaaaatggtcttttgactgtttatgcacctccaggatcgattattcctaaaaatcagatgaaattatctgtaagtaaaataagaggtgtaacatcatatggaatgctctgttctgagtcagaattacaattatctaatgaaagtgatggaattatagaattaaaaaacaataaatatgaaaataaaattggagaaaaatattttaaaaacacttctgaaaaagtaatagatttatcaattacgcccaatagaccagattgtttaggagtaagaggaattgctagagatttatctgctgctggtgctggtaaataa

SEQ ID NO: 301482 - DNA, 385 bp, Unknown
  Bacterial polypeptide expressing nucleotide sequence isolated from the Sargasso Sea
cgaaagatgtggtgaatacttacaagttggtgccgacggaattttctttgaagcagctatatctttagatcaatacaaagagtttaataataatttttcagttccattgctagcaaatattacagaatttggaaaaactccattattcactcagaaagaacttagtgatgttggagtcgatattgttttatatcctcttacagcatttagagccatgagtttatcggcagaaaaaatttataattcaattatcaaagacgggacacaagagcctctgttagatataatgcaaacccgggaagagttgtatgaagttcttgattactacaattttgaaaaacaacttgatgaacagtttgaaaatactaaaaaggaaggctcatga

SEQ ID NO: 301483 - DNA, 649 bp, Unknown
  Bacterial polypeptide expressing nucleotide sequence isolated from the Sargasso Sea
gatgaaatttaccataagttggttaaaggagcaccttgacacccaaaaaaaagataatgagttaattgaaaaattaacagctattggtttagaagttgaaagttttgaaaatctaagctctggtttagacagtttcaaagtagcaaaaattattaatgctgaacagcatccgaatgcagatagacttagaatatgcgatgttgatattggtttggataatactgttaaggtagtatgtggagcaccaaatgcaaaaaaggatcttttgactatttatgcaggccctggatcaataattccaaaaaataaaatgaagctttcagtcagtaagattagaggcgttacttcctatggaatgttgtgttcagaatctgaacttaatttatcaaatgaaagtgaaggaataacagaactaacaactagtaaatactctgataaaattggtaaaaatttttttaaaagtaatactgaaaaagttgtagatttatcaattacacctaatcgtcctgattgcttgggggtaagaggtatagctagagaccttgctgctgctggaattggtaaattaaaaaaaatttcacttaaaaataaaaaaaaaaatgcatcacaaagaattaaagtttcaattacaaaagataaaaatcaaggt

SEQ ID NO: 301484 - DNA, 886 bp, Unknown
  Bacterial polypeptide expressing nucleotide sequence isolated from the Sargasso Sea
tatgacgccgggtaagaagtttagagacgccataaaaaataatagtcctctaattattccaggagcaattaatgcttattcagcaaaattagctgaaagagcaaatcataaagcgatttatctttctggaagtggggttgctgctgcctcttatggccttcctgatctaggtgtaacttcattagatgatgtcgtaattgacgccaagagaataactgatgcaactaatcttcctctactggttgatatagatactggctggggcggttcaaaagaaatatcaaataccattgaagaaatggaaaatgctggagttgctgcagttcatattgaagatcaggtctatgataaaagatgcggacatcggccaaataaacagatagtgagtgttacagaaatgcaagatagaataaaagctgcagttgatgcgaaaaaagatgaatctttttttattatggcaagaacagacgcacttgcatctgagggaattgaacaagctatcgaaagatgtggtgaatacttaaaagttggtgccgacggaattttctttgaagcagctatatctttagatcaatacaaagagtttaataaaaatttttcagttccattactagcaaatattacagaatttggaaaaactccattattcactcagaaagaacttagtgatgttggagtcgatatcgttttatatcctcttacagcatttagagccatgagtttatcggcagaaaaaatttataattcaattatcaaagacgggacacaagagcctctgttagatataatgcaaacccgagaagagttgtatgaagttcttgattactataattttgaaaaacaacttgatgaacagtttgaaaatactaaaaaggaaggctcatga

SEQ ID NO: 301485 - DNA, 802 bp, Unknown
  Bacterial polypeptide expressing nucleotide sequence isolated from the Sargasso Sea
atgaagattacatatgattggttaaaagatcatttaaacacaagcgccaaagaagataaacttcttgcaaaactaacagacataggtcttgaggttgagagtataaaaaacttatctgagggattagatttatttaaggtagcaaaaattgtaaaaacagaaaaacatcctaatgcagacagacttaaagtttgtgatgttgatgttggtaataaagaaatcaaaaaagttgtttgtggggctgcaaatgcaagagaaggccttcttactgtgtatgcaccaccaggcgcaataattccaaaaaataaaactaaacttgttgttgctaaaataagagatgttacatcttatggaatgctttgttctgaatctgaattgaatttatcagatgaaagtgatggtattactgagctatcgtcatacaaatatgcaaaaaatattggaaaaagttatttttctaaaccaagctctaatcttatcgatttatcaattacaccaaatagaccagattgtcttggtgttagggggatagctagagatttatcagccgcaggttttggaaacttaaaaccagaaaaagataaaaaaattaaatctaataaaaaacagatcttaaaagtaaagataacaaaagaaaaaaatcaaggctgtttatcttttggtagctgcttgataactaacgtcaaaaatacagaaagtcctcaatggttgaaagacaaattaatttctataggccaaaaaccaatatctgcaattgtagatattacaaattatgtcatgattgatattaatcgtcctttgc

SEQ ID NO: 301486 - DNA, 607 bp, Unknown
  Bacterial polypeptide expressing nucleotide sequence isolated from the Sargasso Sea
tatgatcgtatccctagactggttaaaagaattcgttgatattcaagaatccccagatgaattagcagaactgctatcaggaatagggttagaagctgaagtaacatccgtcccgacagaaatacctggtgttgtcattggcaaagttgaatcagcagaaaaacaccctgatgcggataaattaaaattatgtaccgttaatgatggcaaacaggttcatcaagttgtatgtggtgcgccgaatgttgatgcagggcagacgatcgccttcgcaactgttggatcagtgctcccaggaaatttaaagattaaaaaagccaaaataagaggtgtagaatcttcaggaatgatttgctcagaacgtgaattgaatctgtcagatgaacatgaagggatcatggtgttaccagatgatattgaggctggtactgattttgtatcctcttatggatataagtacatatcagtagagcttgatatcacacctaatcgtccggatgctttttcacatcaaggagttgcacgagatattgcatgtaagaccgatagagaattcactcaactatcagttactgaggtggtatcaaaaggaaatgatacgatagat

SEQ ID NO: 301487 - DNA, 1444 bp, Unknown
  Bacterial polypeptide expressing nucleotide sequence isolated from the Sargasso Sea
aactggattggtaagagatttaagtccattttatggcataattaaccttgatatatataatgataatattggaaattgggattttaattttgaaaataaattaaaaaaatcttgtccaaatatttcttttcttaaaatagatattgatgaagaggtaaaagagtttagtggtcaaatttctgaatattttaaagaattaaatattaaaagaaataatttttttacagatgtatcaaactatttgtcttatgaaataggtataccaacacattgttacgattcaagacttttcaaaaatagtactcttgttcttgaagagattcacgataatattgagtttgaaaccttgatagataaaaaaattatcttaaaagacaaaaatgctgttttcactttaaatagcaatgttattaatttagctggtgttatgggtggaaaaagttcggcttgtgcagaagatacaagatcggtaattgtagagtgtgcttactttaaacctgaaaatataattggcaagaccattaagtatgatcttcaatctgatgctgcatataaatttgagagaggagttgatccaatgggtcaggaaaaagctcttagaaggtttattatgattgttgaaaaatacgcaacgattaaaaacattcaaatatatcaacagattcatgctaattttagaagatcttttcaatatgatccaaaaaaaattaattcaataacaggattaaacttatctaaaaaagagcaaaccgaataccttgaaaagcttggttttagttttcaagaagatcaaatctcaattccttcatatagacatgatattttcacaaataatgatcttgctgaggaaatagcgagaattattggatacgataatattcctagacaagaaataaaaatttgtaatgcaaaaagtaaaggtagaaaagaacttgaagatactgtcaagttacttcttgtagataatggttttaatgaggttattaatgatccatttacaaaagaaaatacaatctcatctatagagttagacaatcctcttgattcaaacaaatcctatttaagacaatctctaaagagctctcttgtttcaaatcttgtatataatgagaggagacaaaaagatagtattaaactttttgaaatctctgatatttacaaaaattataattctaaagtaagtagtaaaaaaatacttggagtaattgcctctggcaggcttggaaataattatagggatttctcaaaaaatattgatttagactatctaactaacactttcaaaaaaattacggacatagatctaaattttgaaatacttgacagaaaatatattgattcaaaatctaaattcccaataatttatctagaaattgaacttgataagctttttgataatctaaaaaaatataaatctttaaataaactatcttatcaaaatgaa

SEQ ID NO: 301488 - DNA, 1168 bp, Unknown
  Bacterial polypeptide expressing nucleotide sequence isolated from the Sargasso Sea
atgctctgttctgagtcagaattgcttttatccaatgaaagtgatggaattatagaattaaaaaacaataaatatgcaaataaaattggagaaaaatattttaaaaacacttctgaaaaagtaatagatttatcaattacgcccaatagaccagattgtttaggagtaagaggaattgctagagatttatctgctgctggtgctggtaaattaaaaattaataaaaaatccaatttaaaatatagaggtaatcaaaatataaacgtaacaataaaaaaagaaaaagctcaaggatgcacaatatttggaagttgtttaataaaaggtgtaacaaataaagagagtccaaaatggctaaaagataaaattctgtctttaggccaaaaaccaatatctgcgatagtcgatattactaattatgtaatgtttgatttaaatagaccattacacgcttatgatgcagataaaatagataatgaaattattgttagaagttcttctaaaggagaaagcttcgaagccttagataataaaaaatatattttagaaaatgatatgtgcgttatttctgacagatctggagtccttggtcttggtggcataattggtgggacaagatctggaacagaatattcgactaaaaatatattattagaatctgcttattttttaccacgttcaataagaaaaacctctaaacaattaaatatagatacagatgcaaaattcagattcgaaagaggcatagatcccctttcaattgaagaaggattaataaaagcttctgaactaataaaacaaatttgtggaggtgaaataagcaatttagatgtaaaaaaaattgaaaattataaaaaaacaataataaattttgatccatttctttttgaaaaaacgactggatttaatgttgaaaataaagaattaatcaaaatactaaaaaagctaggttttaatgtatctaagaataaaaaaattttaaaactagcaataccttcatggagacctgatataactcaaccaattgatattgttgaagaaatagtgagaataaagggttatgaacatattaatacttcagaacctattaagacaagattaaagccaacacttaattattatcagaaattatttcattttttacaaagatctgtcgcatctaaaggtt

SEQ ID NO: 301489 - DNA, 2383 bp, Unknown
  Bacterial polypeptide expressing nucleotide sequence isolated from the Sargasso Sea
aatgaaggtttccttacattggttaaaaagatttgtcgattttgatttaactgctactgaattagctgatatgttgacaatgcgtggttttgaatctgaagtagttaccgattttgataatattgataatttagttgttggagatgtattaactgctaaaaaacatccaaatgctgataaattaaaattatgtagcgtttcggacggatctgaaacatttagcgttgtatgtggagctccaaacgttgatagtggtcaaaaaattgttttcgctaaagtaggagctattcttcctggagatttcaagataggtaaagcaaagattagaggtgttgaaagctttggaatgatttgttcagaaaaagaacttggaatttctgaagaacatgatggaattatggttttagacagctctttaaaagccggaacaccaataaaaaaagttcttggtccaatatttaatgcaattgatattgaggttacaccggacaaagcttttggtcttagtcatagagggattgctagggaggtagcaactatggttaatgctaagcttaaaactcctatttcagctgtaaaattgaattctaagtctaaagacgttatatctgtcgaattggataaaaaaaatggatgtacacgctatattgcaggtgtaatgaaaggtgtaaaggtaggaccttctcctcaatggctagctgattacttaaaatctgtgggtcaaaaaagtattaataatttagttgatatatcaaattttatgcttttagagattggtcacccaacacatatatttgatttaaataaattagcaaaacctgctattaaggtttcttgggcaaaaaagggtgaaaagtttgatgctttagatgaagaaacatatgaattgagtaatgatcatatggttatcactgatacaaaaaatacaatagcattagcaggtattattggtggaatggatagttccgttacagatacaaccacagaagtattaatagaaagtgcctattttgatcctgttgtaataagaaaagggtcaaaaaaattaaatttattatcagaagcatctagaagatttgaaagaggaacggatccaaatgcagcttcagaagcatttaatatgattgttcagttaatgcaagaagttgctggaggtactttagagtctataatcactgatgaatgttcaatgaatttaagtaattctaaggttgaattatcctcagaaaaactactaaagtatgcaggtcaggaaattccgtctaaaaatgtagaatcaatcttaaaagggcttcatattgatattaaaaaatctaaaaaagggtggagttgttcaattcctacttttagaactgatttatcatccgagaccgacttaattgaagaggtttttagatgttatggttatgataatattaaatcttcatttaattattcatcaattatgcagtttgcaaatgatgaagaatcaactattttttctttaaaacatcatctttcatctcttggatttcatcaatcttacaataattccttagaagacctcgaagaagtaaagctgtttggaaaagatcccataagtgttatgaatccatcttcagaaagaatgaataccttaagaacaacgcttcatttaggattattaaaaaatcttgattttaactatagaaatggatcgtcaaatacaatgatatatgaatatggaacaatatttgaaggcaagagtgagaaattagaaagtataacacaaaatagtagtctttcttgtttggtgcatggtgatttgttttctaagaatgtacactttgattctatttctgcatcatttgcttttttaaaggggatagccttaaatatttttgaagataaaaaactaaatataaatattaagcttcttgaggaaaaacatcattattgcgagacatattttgcaattttagatggtagaaaacaaaaaattggtggaattggagtgattagtaaaactttattaaataagctagatattgctcataaacatgatgtagtagttttagatatagatcctacaattttcatagattataggaattttaaaataaaagttaatgacgttgtgccatatccggcagttgcaagagatttaaatttcaaaatggatagttcaataagtgtaggtgatgttacaactgcaatcaaatcagtaaatcaatcaatcttacaaactgtattacctgtagatatttatatatcaaaaaaagataaatcatctaaagatgttttgttttcattaacgtttcaatcacctaaaaaaacacttgaagataatgatgtaaatacagttattactgaaattataaatgttgtatctaaaaaatttaatgctaaattaagagataattag

SEQ ID NO: 301490 - DNA, 445 bp, Unknown
  Bacterial polypeptide expressing nucleotide sequence isolated from the Sargasso Sea
atgaaagattttagagagttagaaactgaaattaaaaaagcttcagataaatttacaaatatcgaaagcataaatgaatttaggataaaatttcttggtaagaaaggtattatttctctcgaaatgaaagagctagccagtctttctggagatgaaagaaagcagcatgctgaaaaattaaataaaattaaagacactgttcttgaaataatagcttcaaagactgaagagttaaatagcgaggaattagaaaaaaaacttaactctgaaactttagatatcactctatctacttcaaagtcatacggaactattcacccaatcagtcaggttatagaggaagttataactatatttggcgatttagatttttttgttgctgaaggacctgaagttgaaactgattacaacaattttactgctttaaatacgtctgaacaccacc

SEQ ID NO: 301491 - DNA, 715 bp, Unknown
  Bacterial polypeptide expressing nucleotide sequence isolated from the Sargasso Sea
tttgccgctcgtgacaaatctcaatctcgatgcttttgtcgccgaccttgaggaattgcgctctgaggcagaaagagccctcgtagatgcagttgatatgcaaggccttgaagctgcgcgtgtcgtttttctaggggctaaaaatggacgactgaaggcagttcagaaagggcttggcaaactcgaccgtgaagacaagccagtaggtggtcagcagtttaatgctgtgaaaaagtcggtcgaagcattattccttcaggcctctcagcgagttgagtcactatcaaagaatacgaagggtgttgagccggtcgatgtgaccttgccaggaaaccctgttcgctttggtcgtgtgcacccaattactcagacgatccgccgggtctcctcaatcatggccaacctcggatttgaggctgtggatggtcctgaggttgaggaccaatggcacaactttgaggcactggcaattccggatgagcatcccgctcgcgacccgcttgataatttctacattgccgtagcaaatgctgatcggccgcttcttttgcgttcccagacgagtactgtacagatacgcgtcatggagcaacggaagccaccgcttcgaatagtttcgctgggtcgtgtctatcgaccggatacagctgacgcaacacattaccctatgttccatcaagttgaaggtcttcttgttgagcctggtacgacgatg

SEQ ID NO: 301492 - DNA, 1072 bp, Unknown
  Bacterial polypeptide expressing nucleotide sequence isolated from the Sargasso Sea
tagtttaaagagtaaggaatatggctgggatgtagcagtaattcctaatagatcacaagatttgataagagaaatagatttaattgaagaaattgcgagattaatagggtatgacagattcgacttaaaccttcctaatccaattaagcctggaaaattatcatcagagcaattggcattgagaaaaataaaaaatggttttatagaaaatggttttaacgaagtacttagttattcattggttccagaagataaagatacacttataaagatttctaatcctttgttattagaaactagctgccttagagataatatttggaaagaacatttggatattgtaaaccgtaatataaaagctggacaaaatagttgttatgtatttgaaattggaaatgttttttataagaattctgatctcattcaagaagaaattctgaatggtgtaatttttggtattaagaaatttggaaaatgggtagattcaggtaaggataatgatcttaattattaccaggctagaggtaagttaaaagaagctttgtcatgtttaaatataaaaattgacgataaaccttctgattcaattgattttcttcatccaggaagaacagcgaaattatttattgaaggaaaagaagcaggatattttggtgaaataaatccgaaactaatattagagaagaagtctttaaaaaaagtttatttgtttaggataaatataattaatctcttgggagctagtacgagaaaaaacaaatggattccactatttaagcaatacccaattgttccaaaaatggaaagggatattaattttgttttcagtaaaaaatatttaattagcgaaataacatcacaaataagaaaaacaggaaaaaaccttctagaggatgtctatttaaaagatgtttttgaagatattaaacttggggaagatttcataagttatacatttagattatcttatagagataaagaaaaaaccttacttgattcagatatacaatcaatacactcaaatatcatttctaatattgagaaaagttttaatactaaattaagaaattaa

SEQ ID NO: 301493 - DNA, 244 bp, Unknown
  Bacterial polypeptide expressing nucleotide sequence isolated from the Sargasso Sea
atgcagtttagtaagaattggttgaaagacttcattgatatagatctatcaacggagattatttgctctcagttaactatggccggactagaggttgatggttatgaagatgtaagttccaaaattactggcaaagattcaatcatcaagttagacatcactccaaatcgaggggattgctttagtgttcttggtgtcgctagagagttatctgttataaataatttggaattaagcttgccaa

SEQ ID NO: 301494 - DNA, 313 bp, Unknown
  Bacterial polypeptide expressing nucleotide sequence isolated from the Sargasso Sea
atgtccaaggaagagcattctttgatcgagccaaagtccgatttaggaggtttccatccaattagctcaatgctttatgaaatctcaaatttacttcaggggttaggatttagggaaattgatggtccggaagttgaaactgaaaagttcaactttgatatgctaaatattaaggaatctcatcctgccagacagatgcatgatactttttatacaaataacaaatctcatgttttacgaactcatacttcacctgtacaaataagagcccttcttgaaaatgaaccaccacttgcctttttttcagcaggta

SEQ ID NO: 301495 - DNA, 2128 bp, Unknown
  Bacterial polypeptide expressing nucleotide sequence isolated from the Sargasso Sea
cttggatttttgctccgaaaatagttacattcctggaacagacttacatttaaaaaaaactaaaataagaggagtcgagtcttgtggaatgcttgtatcagagagagaaatgggtatttcagatgaacacgatggtattatcgaaataaaagataattataaaattggtcatttatttagtaaaatttttgcaatagatgaacctgttatagaaattaatttgacaccgaatagatctgactgtttatcagttagaggtatcgcaagggatttagcagcagctggtattggtaaattaaaagacttaaattataaaaaagtaaaagaatcatttaaaagtccaattacttggaaaaaagaatttcaaaataaaaatctctgtcctggagtagcaggtcgatatttcaaaaatgttaaaaatatagaaagtcctaaatggcttcaagatagattaactgcaattggattaaggcccatttcagctcttgttgacattacaaattatattacttttgacttaggaagaccactacatgtttatgatgctgacaaagtatcaggcaatttaacaatgcgattagccaataaaaatgaggagtgtttagcactaaatgaagttaattataaatgtgacaatgatatgattgtaatttctgatgatgaaaataatcttcatggaattggaggtgttatgggaggccttaatagtggttgtagtttggagactaaaaatgtctttctagaagttgcgttatttgatccagtttctgtcactaaaactggaagaaaattaaatctacaaagtgatgcacgttatcgttttgaaagagggatagatactgattccatttattggggtgtcgatgcagcaactcaaatgattttagaattatgtggaggtgtagtaagtgagttcgtttcttcagaaattaatatagaaaaaagtaaaccatttatgtttgatacaaataaagtgaagacttttggtggaatagaaatcattaatgaggaacaagaaaaaattctagtttcacttggttttgctgttaataaaaaaaaatcaaaatttgaaattcaaagccctacttttagaccagatattgttggtgaggcagatatagttgaggaaataattagaatttatggttataataaaattcctcttaaaaaagtaaataatcaagaagaaaaaaagcagattttaaataccaaaacaaaaactttttataaaagtaaaaaaactatggctctgaatggatattctgaagttgtaacttggtcgtttatggatgaaaataatgcaaaaattatatcagatgaaataattagtttaaaaaatcctataagtaccgatttaaatacgatgagaccatctacacttccaaatttattagaagcaatcaatcaaaataaatctagaatgtacctaagagcaaaattatttgaagtaggtccaaatttttctaaatcactacctgatcaacaagaaaatgttgccactgctatagcttatggctcatctgatgaacaaaattggttatcaaataaaaaaaatattgatgtctttagtataaaggccgatttattttctattttagctgatttaaatgtaccaacagataatttgctatatgaaaaattagaaggtaaaatttatcatcctggcaaatcatcttctttgaggcttggtaaaaacaaaatagctaattttggagaattacatccaattctgttaaaaacaatgaatgttaatcttaaggtatttggttttgaaatatatttagagaatatttcacaatttcaagaaaataaatcttcttctaaaggtgggtttgctaacaacccttatcaaatggttgaaagagatttcgcctttctttttccaaaagaagttgaggctggtgagataattaaaaaagtaaaaaaaatagataaaaatataattcaaaatgtaacaatatttgatgtttatgatggtgataaacttccagaaaataataaaagtattgcttttagggttttactacaacctcaggataaaaccttcaacgatcaagaaattgacgaattatctcaaaaaataatagacgaaatatcccaatcgtttgatgcatctataagaaactaa

SEQ ID NO: 301496 - DNA, 701 bp, Unknown
  Bacterial polypeptide expressing nucleotide sequence isolated from the Sargasso Sea
gatgaagttcacagttgactggttaaaaaaccatcttgatacaaaatttaataataatcaaataatagataaattaaccaatattggtctagaagtagaaagttttgagaactctacatctgaatcagactcttttattgttgcaaaaattataaatgccaaaactcatccaaatgctgacagattgaagttatgtgatgttgatataggtagcgacaaaacaattgaagtagtatgtggagccccaaatgcaaaaaatggtcttttgacagtttatgctcctccaggatcaattattcccaaaaatcagatgaaattatctgtaagtaaaataagaggtgtaacatcttatggaatgctctgttctgaatcagaattactattatctaatgaaagtgatggaataatagaattaaaaaacaataaatatgcaaataaaattggagaaaaatattttaaaaacacttctgaaaaagtaatagatttatcaattacgcccaatagaccagattgtttaggggtaagaggaattgctagagatttaactgctgcaggtgtaggtaaattaaaaattaataaaaaatcaaatttaaaatatagaggtaatcaaaatataaatgtaacaataaaaaaagaaaaagttcaaggatgtacaatatttggaagttgtttaataaaaggtgtaacaaataaagagagtc

SEQ ID NO: 301497 - DNA, 661 bp, Unknown
  Bacterial polypeptide expressing nucleotide sequence isolated from the Sargasso Sea
gatgaaattcacaataggatggctaaaagaacatcttgatacaaaaaaaaaagatagagaattaattgaaaaattaacaaatattgggcttgaagttgagagttttcaaaacctaaattctgatttagacaattttaaggtagcaaaaataattaacgctgaacagcacccaaatgcagatagacttcgagtttgtgatgttgatattggacaggaaaataatgttaaagtagtatgtggagcaccaaatgctaaaaaagatcttttaactgtatacgcaggtccaggaacaatcattccaaaaaacaatatgaaacttacaatcagtaagattagaggagttacttcgtatggaatgctatgttcagaatctgaattgaatttatcagatgaaagtgaaggaataacagaactaaaaacaaataagtattttgataaaataggggaaaatttttttaaaaataaaaatgagaaagtaatagatttatcaatcacacctaatcgtcctgattgcttgggggtaagaggtatagctagagatctagcagctgccggagctggtaaattaaaaaatatttccaaaaaaaatattaaagaaaaaggatctcaaacaatcaaagtttcaattacaaaagaaaaaaatcaaggttgtaccgtattt

SEQ ID NO: 301498 - DNA, 540 bp, Unknown
  Bacterial polypeptide expressing nucleotide sequence isolated from the Sargasso Sea
gctgtctgataaattgcttcaacttggtcatgaacatgaaatagaaggcgatattattgatcttgagattacaccaaatagaggtgattgtttgtcactaaaaggaatcgccagagatctaaactatttttataaagctgaattagataaaaatacatatgatgaaaatattcctaaatcagatttttctttccaaaacaaagctaaagacttgtgtccaaatatatcttttgtagaaatagaaatagatggacgaatttcagactataagccataccttgaaaactattttaaagatctaaaaattaataaaaataatttttttaccgatgtttctaactatttagcctacgaaacagggcagcctactcattgttatgatgcttcaaaaattaatgacacattagttcttgaaaagagaaataaaaaagaaaaatttaaaacccttttaggttctgaaatagagttagaaggcgagaatcttgtttttaccataaatggaatagcagttgatttagcaggcactatgggcgatgaaag

SEQ ID NO: 301499 - DNA, 467 bp, Unknown
  Bacterial polypeptide expressing nucleotide sequence isolated from the Sargasso Sea
cagattaaatactgcaattaattcaaaagtagatgattctttttttgtgatggcaagaactgatgcaattgcatctgagggtattgatggagcaattaaaagatgtgaatcatatattgaagaaggtgcagatggcatatttttagaagctgtaacatcaatagaccaatataaagaatttaaaaatcattgttcggttcctgttttagcaaatattaccgagtttggaaaaacacctttatttactcaagaacaattgaaagaagttggtgtcagtatggttctttatccacttacagcttttagagctatgagccaatctgcagaaaaaatatacaattcaataattaaagacgggacacaagaggctctcttagatataatgcagacccgtgaggagttgtatgaagttttagattactacaactttgaaaaacaacttgacgaaaaattgtcaaaaaattaag

SEQ ID NO: 301500 - DNA, 1357 bp, Unknown
  Bacterial polypeptide expressing nucleotide sequence isolated from the Sargasso Sea
gatgaaaataacatttgattggctaaaagatcatctgaagacaaatctgaaagaaaaaaatcttttagagcaacttaccaacattggtttagaggtagagagtgtagaaagtctttctggtgatgatgaattattcaaagtagctgaaattataaaaactaaaaaacatccaaatgcagatcgattaaaagtttgtgacgtaaatatcggagagaatgaaattaaaaaagttgtatgtggtgcagaaaatgcaaaagaaggattacttactatatatgctcctccaggtgcaattatcccaaaaaccaagacaaaattagtagttgctaaaataagaggtgttacttcttacggaatgctttgttcggagtctgaattaaatttgtctaatgaaagcgatgggattacagaattaagtaaggaatttagaaaaaaaattggcaaaagttatttctcaaaatcaaaatctaaatcaaatcttatagatctatctataacacctaatagaccagattgccttggagtcaggggaatagctagagatctggcagcatcaggttttggaaagttagtagatttagaagaaaaaaaaattcattcaagaaataaacatactttaaaagtaaaaattaataaggaaaaaggacaaggatgtactgcgtttggaagctgtttaataacaaatgtcaaaaattctgaaagccctaaatggcttaaagataagttaacttctattggtcaaaaacctatctcagcaatagttgacatcacaaactatgttatgcttgatgttaatcgtccattacatgcttatgacgctgacaaaattgaaaaaggtataattgttcgaaactctaagtctggagaagagtttacagcacttgataataaaaattataaattggagagtggcatgtgtgttattagcgataataaaggtattttaggacttggaggaattattggtggtacaagatctggtacagaatttgatacgaaaaatatattattagagtcagcttattttgaaccgggatcaataagaaatacagcaaagaaattgaatctagacactgatgcaaagtttagatttgaaagaggcatagatccgttatcaatcgaagatggtttaaataaagctgcaaaattaataaaagagatttgtggtggtgaaattagcaaaattgatattcaaaaaatagaaacttacaaaacaaaaaaaatctcatttgacccaaatatttttgaaaaaatatctggttttaaaatttctttaaaagaaatgattaaaattttagagaatcttggttttggggtaaaaagtgacaaaaaaagattaaaattagatgttccttca

SEQ ID NO: 301501 - DNA, 560 bp, Unknown
  Bacterial polypeptide expressing nucleotide sequence isolated from the Sargasso Sea
catgcaaatcccgcaggatttaattgaaacagccgctctcaaattaaaattcgttaaatcagaggctgaattctttcaactaagagctaaatatcttggtaaaaagtcttttgttgtcactgcattttcaaagcttaagaaacttcaatcggatgagaaagtaaatgctgcgaaagagttaaatttacttaagaataacttaattaacctatttgagacctttattgaagacgtagaagggaaaaataatcatgaaaaattagatgttacccttccagctgatccatttttggttggttctgagcatccaataactaaaatttcacaaagaattatcaactatttctctctcttaaattatcaaattttttctggaaatgagatagaaacagatttttataattttgaagcattaaattttccagaaaatcatcctgcaagacaaatgcatgacactttttatcttaattctaatagcaagttagaatatttattaagaacacatacatcaaatactcaagtgcatgcaatgcttaatgaagatttacctttatatattc

SEQ ID NO: 301502 - DNA, 886 bp, Unknown
  Bacterial polypeptide expressing nucleotide sequence isolated from the Sargasso Sea
atgaaacctggtcaaaaatttaggaatgccttaaaaaataataagcctttaattattcctggaaccataaatgcctacagtgcaaagttagcagaattagcaaatcataattcaatatatttatcaggtagtggagtggctgcagcttcttatgggcttcctgaccttggtgttacaactttagaaaatgtattaattgatgcaaaaagaataactagtgcaacatctttgcccttattagtagatatagatactggttggggtgactttgatgctatctcaaatactataattgaaatgggtaatgcaaatgttgctgcagtgcatattgaagatcagatttttgataagagatgtggccatagaccaaataaacaacttgtctctattgatgaaatgcaagacagattaaaagccgcgttagatgcaaaaattgatgactctttctttataatggctagaactgatgctctagcatctgaaggaattgagaaagctattgaaagatgtggcaagtatttagatgtaggtgccgatggaattttttttgaagcagcggtttcaattgaagaatataaagaatttaaaaataatttctctgctccattactagcgaatataactgaatttggaaaaactcccctgtttacgcaaaaagaacttagcgatgttggtgtcgatatggttttatatccattgacagcatttagggctatgagcttatcagctgaaaaaatttataattcaattattaaagacgggacacaagagccgctgttagatataatgcaaacccgagaagagttgtacgaagttcttgattattacaattttgagaaacaacttgatgaacagtttgagaataataataaggaaagttcatgac

SEQ ID NO: 301503 - DNA, 757 bp, Unknown
  Bacterial polypeptide expressing nucleotide sequence isolated from the Sargasso Sea
atgattatcactcttccatggttaaaagaacatttaaagactaaagcaagtgaaaatgaagttataaataaactgacaaacatcggtttagaagttgagaatgttaaggaaaattctggagaattaagtgagtttaaaatagccaaaattatcaaagcagaaaaacatcctaacgcagataaattaaaagtttgtgatgtaagtattggtggaaaagaactatttaaagttgtttgcggagcacccaacgcaagagatggccttattacaatttatgctccaccaggagcagtaatacctaagacaaaacttgaattaaagattgctaaaatcagaggagttgagtctcaagggatgttgtgttctgaaagtgaacttaatttatcagatgaaagtaatggaataatagaattaaatagtaggaaaaaagaaataggtaaaagttattttaaaggtaaatcagaaaaagtaatagatattgctatcacaccaaatagacctgattgcttgggtattagaggtatagcaagagacttatcttctactggaataggaaagttaatatctttaaaaaaaaaaaaattaacacaaacttcaaaacatcatataaaaacgtctataactaaagataagcatcaaggatgcctaacttttggaagctgttatataagggatatagcaaataaagaaagtccagagtggttaaagaataagcttcattcattaggtttaaaaccaatttcagctgttgttgatg

SEQ ID NO: 301504 - DNA, 1087 bp, Unknown
  Bacterial polypeptide expressing nucleotide sequence isolated from the Sargasso Sea
cccatttttcggcgctgggtcgatatcaccaatctagtgaccgtggaactgggtcggccgctgcatgtgttcgacgcagccaaggtgaagggaaacgtgtacgcgcgcatggcccgcgagggcgaggaacttctcgcgctggacggaaaaacctacgccatggatgctgagatgtgcgtcatcgcggatgaggcgaaggcggaagccctgggcggaatcatgggtggcgaggagtcgggctgcacggaaactaccacggacgtctttatcgaatgtgcttactttgatccaatccgcacggccatgaccgggcgaaagctaaacctgcagtcggacgcgcggtttcgtttcgaacgcggcgttgacccggctttcgtggagccggccatggaaattgctacccgtctggtaatggacctttgcggcggcgagccgtcgcacgtggttgttgccggcggcgagcccgattggcagaagaccatttcccttcgccgtgaacgattacgcaccttgggtggcgtcgctctggatgctatggaagtttcgcgaattctggacgtgctggggttttcgcacgcacgcaacggtgacatcttcgagacccaggtgccgtcctggcgtccggacatcgttggggaggcttgtctagtggaagaggttgtgcgtatccacggctatgacaaaatcccggctgtacctatgtccctaatggatgcattgccgcactcggcgcgcactgttgaccagacccgtcgggctgatgctcggcgtgtgctggcttcgcgaggcatgactgaggctgtgacctattcgttcctggcggaaaaagacgcggcactctttggtaaagttgtggacgccatcaagttggccaatcccatcagcgccgatttagacgtgatgcgaggttcgatcctgcccaatctgattaacgccgccgtgcgtaacggcgcgcgaggcatcgccgacacggcgcttttcgaggtagggccgcagttcacgggagaccagcccaatgaccaatccatagccgccacgggcatccgcacgggaaacaacggcatacgccactgggccagaaagccac

SEQ ID NO: 301505 - DNA, 124 bp, Unknown
  Bacterial polypeptide expressing nucleotide sequence isolated from the Sargasso Sea
tctgagaaatggacttggttttgcagcaggattaggagttgagaggttttgtatggtcagacatcagatcgacgacatcagaaaattttatacaaatgatattagattcttagaacagttctaa

SEQ ID NO: 301506 - DNA, 88 bp, Unknown
  Bacterial polypeptide expressing nucleotide sequence isolated from the Sargasso Sea
tgctcctggtcgtgtttatagatccgatcaattagatgcaactcactcaccaggtttttcatcaaatcgaaggtttggccgtagatga

SEQ ID NO: 301507 - DNA, 470 bp, Unknown
  Bacterial polypeptide expressing nucleotide sequence isolated from the Sargasso Sea
aatgagtgatttagataaaataagttctgtatttaatgcaaagattgactccgtaaaaacaaaagacgatttacaaaatattaaaacagagtttttcggaaaaaacggtcaaattacacaacagttcaaaactctaggatctttagatccagaaaaaagaaaagagtttgcttcgaatttaaataaaattaaagataatctcactaatcaattagatcaaaaaattgttgagatcgaagctaatgaaataaatgaaaaacttaaaaatgaaaaagttgatgttactttaccagttagaccagcacgacaaggaaaaattcatccagtctcacaagttatagatgaaatatcttctatcttttcagaaataggcttttcggttgctgaaggacctgacgttgagacagaatataataattttacagcattgaatactcccgaggatcatcctgcaagagatatgcacgata

SEQ ID NO: 301508 - DNA, 1256 bp, Unknown
  Bacterial polypeptide expressing nucleotide sequence isolated from the Sargasso Sea
aatgaaattagaagtatcaaaaattagaggagagacgtcttatggaatgctctgttctgagtctgaactaaaattatcaaatgagtcagaaggcataattgaattaaatcaaaagtttaatcgtagtgttggaaagccatattttaagaataaatctaataataatgttatagaattgtctattacaccaaatagacccgattgtttgggtattagaggtatcgcaagggatttatttgcaagtggttatggagatctaaaagaaattaaaaatgtaaaatttaaaaaaacattaaaacataattttaaaataagaatagaaaaaaataaaaaccaagcttgctcgatatttggcagttgtttgattaaaaatataaccaacaaagagagtccaagttggttgaaagaaaggattttagcattaggtttaagaccaatatcggcagtagtagatatcacaaactatgtaatgtttgatataaatagacctctccacgcatatgatttagataaaataaaaaattcgattcaggtaagaaattcaaaaaaaggcgaaatactgaaagctcttgataataaaacttatacacttaaagaaaatatgtgcgtaatagcagatgatgagggccctttaggcttaggaggtataattggcggaataagatcaggaacagagatggactctaaaaatatattaattgaagctgcttattttgatcctggtatcacaagaaaaacagcaagaatattagagattaatagcgatgcaaaatttagatttgaaagaggaattgatcctcaatcaattaaagaaggactaactatggcctcaaaattaattctagagatatgtggcggagaagtttcaaattttgatattcaagaaacaataaaattcaaaaaaaaaaaaattaaatttgacccaaaattagtgtcaaaaacaattggcattaacgttaaagaaaaagaagttactaatattctaaacaagcttgggtttgaaactaaaaaaaagggcaaaaatattgagacgacaataccatcttggagaccagatatatttggtggtattgacctagtagaagaagtaataagaatattaggatttgaaaatgtaaaatctattgaaccagaaagagttagagaaaaatcaactctaaatttctatcaaaaacattttcatttggctcagcgttcagttgcatccaaaggttattacgaaactataacatggtcttttactgatgaaacaatta

SEQ ID NO: 301509 - DNA, 856 bp, Unknown
  Bacterial polypeptide expressing nucleotide sequence isolated from the Sargasso Sea
aatgaaatttacaaaagattggcttaaagaccacttaaaaacaaaaaaaactgaagcacaaattattgaaaagttgaatagcacaggcttagaggttgagagtgttgagcctgtaaaaaatgaattaagtgattttgttattgcaaaagttattaaagctgaaaagcacccaaatgctgataggctaaaattatgtcatgttgatattggaaaaaaacaattagtaaaagttgtttgtggaggaccaaatgcaaaagatgatttaattacaatttatgctcctccaggatcaataattccaaaaaataaaatgaaattagaagtttcaaaaataagaggagaaacatcttatggaatgctttgttctgagtcagaactaaatttatcaaatgaaagtgagggaattattgaattaaatcaaaaatatcaatctaagataggaaaaagctattttaataataattctgaaaatgttatagaattatctataaccccaaacagaccagattgcttaggaattagaggcattgcaagagatctttctgcaagtggatatggaaaactaatagataacggaaatattcaagtaaagaaaaatggcaaacacaatctaaaagtaaagattgaaaaaaacaaaaaccaggcctgcacaatatttgggagctgtcttattagaaatataaaaaatcaagaaagtccggagtggttaaaaaaaagaattctttcattaggtttaagaccaatttctgcagtagttgatataacaaactttgtaatgtttgacctaaacagaccacttcatgcatacgacttggataaaataaaaaaaggaataattgtaagaaattctaaaaaa

SEQ ID NO: 301510 - DNA, 1047 bp, Unknown
  Bacterial polypeptide expressing nucleotide sequence isolated from the Sargasso Sea
ttgaaaaaaatgattctggctcacttgtatcactaaaagaaaagccaatcgaaacgcctgaagaaaaactccttgcattcataggagaaaaaactgtatcacaagatgaaataactaactcgttggcacttaaaattctgttatctcgaccaaattacattattcaaacttctgaaaaatcaaaaaccatctctcttaccgataccgcaatgtcacttgacacaagcatttcatctagcggtgcaatagatgttgaagccgatgttcctccagtatttgctgctagaacacatcccctacaagatacaattgatgaaatccgagaaatttttgtcaatcttggtttttcagaaattctaggcaatatgacacaatccagtttctggaactttgatgcattgtttactccacaagatcatcctgctagagaacttcaagatacattttatctagaaaaattggaatcaaaaaatcctgcaacctcatcccaaattaagaacgtatcatcatctcacactaaaaattggaagtatgattggaagttatctgaatcacaaaaaatggtattacgaactcatacaacttgtgttacaataaagtatcttgcagaacaaaaaccagacaatgcacgaattttctctctgggccgtgtatttcgtaatgaaaaagtaagctacaaacatcttgttgaattcaatcagattgaaggaattgtaataggcaataatacgacactacgtgatttaatgggaatacaaaaagaattttacaaaaaactaggactaactaaaataaaattctggccaacatttttcccatacactgaaccttcattacaaacaatggtgtataatgaaaaattaggaaagtggattgaattatttggtatgggaatatttagacctgaagtaacaaaacctcttggtattgacaaacctgtcttagcttggggtggaggaattgaacgaattgcaatgctaaagtatgaactagatgatgttagagaattttataataacaatctaagttggttgaggagtgcataat

SEQ ID NO: 301511 - DNA, 1151 bp, Unknown
  Bacterial polypeptide expressing nucleotide sequence isolated from the Sargasso Sea
cggtgcccactggtggcacctcggtctgggatgggggctgcagctggcggccctccaggcccagcgacgcggagatgcaacggcctggctggagatccgccgaagccttgaagacaaccgctatctgcgagacggagcaaccctgctggagcgccatgaccccgaaggcatggcctggagctggttgaacaacgaccccagcaacgatcagcagtggacggttcatcacgccccggagagctggctccagcggccgatgctgttgatcggtggatggtgggatccgcatctggtgggtctgctggacctctggcatcgcagccaagcggccggcgggcagccctccctgcacatcgggccggcctcccatctgcagtggtggccggaaacccagcagctgatgcttcagttcttccaacaacatctgcagaatcgacccccgcaggaaccgcagcccagtcaccagctctggaacatcacccagcatcagtggaacgcgatccccgcacccgccacgggcaggtcagcgtcatggggactgcggagccatggactggcctgcatcgacccaagtgaaggcgcccttgtggcggatggagaaggagaaggaagcgtggtcatcgttcatgacccttggcgaccggttccggccatcgggggacacctcggaacaaaccctggccccgctgagcgcacggccgtggatcaacgcagcgacgtcgcgacattcaccaccgcacccctggtcgatgagctgctgctgtcaggtcaaccgcacctcctgttggacgccgaagcggaccagcccgggtttgatctctgcatcagcctctcgcgcctgcccgcggaaaccaacagcgttgatcaactgagcacgggagtcgtccggattcgcggagaggaggcgttgcagccagccaggcgcagcgtgatcctccagccgctgcacgcgagcctggcttgtggcgatcgactgaggatctccgttgccgcagcagcgtggcccgccattggcgtcaaccctggccacgatgccgttgcctgcggagcaccaagcccagagcatcgtgtggtgacgctgacactgaaacttgctggctccaccctgcagctgaacccctttgattccggcagactgaagctcgactgac

SEQ ID NO: 301512 - DNA, 1857 bp, Unknown
  Bacterial polypeptide expressing nucleotide sequence isolated from the Sargasso Sea
aaaacaaaattagttatagcaaaaattagagatgttacatcttatggtatgctttgttctgagtctgaactcaatttgtctgaggaaagtgatggaattactgagctttcatcctcaaaatacaacaaaagtattggaaaaagtttttttactcaatctagttctaatttgattgatttatcaatcacacctaacagaccggactgtcttggtgttagaggaatagctagagatttagcagcttcaggctttggtaaattaaaacagattaaagaacaaaaaataaaatcgaaaaaatctcaaacaattaaagtaaaaattacaaacgaaaagaaccaaggatgtttttcttttggaagctgtttggtaacaaatgtaaaaaatactgaaagcccaaagtggttaaaggataaattaatttctataggtcaaaaacctatttcagcaattgttgatattacaaattatgtaatgattgatattaatcgtccattacatgcttatgatgcagataaaattgaaaaaggaataattgttagaaactcaaaatctggtgaagagtttacagcattagataacaaaaactataagcttgaagatgacatgtgcgttataagtgatgacaaaggcgtgttaggactaggtggtatcatcggaggcacaagatctggaacagaaatgggtacacaaaatgttttaatcgagtcagcttattttgatccaagatcaattagaagaacagcaaaaagattaaatatagatacagatgcaaaatttagatttgaaagaggaatagaccaattgtcaattgaagaaggattaaataaagcagcatttttaattaaagaaatttgtggtggtgaaattagtaagattgatatccaaaaaattagtacatttaaaaatcaaataattaaatttgatccaaattcatttgaaaaagttacaggttttaaaattttaacaaaagatatgttaaaaattttagacaacctaggttttacatgtaaaaaagataaaaaagtttttaaattaactatcccttcctggagaccagatattactcaggaaatagatgttgttgaggaattggtaagaatagttgggtatgataaaataaaaattgaagaaccaatcaaagagagaaaaaaatctactttgacacaaactcaaaaattgtttcatttcctccaaagatctgttgcctcaaaaggttatttggaagcaattacttggtctttcacagatgcaaaatataatgatcattttaaagggcaaaatgatgaattaaaaattgtgaatcctataagttcagaattaggagttttgagaaattcaatattttcaaatttaattatgtatatgagtaaaaatatagatagaggatttaaagatttatctatttttgaaataggaccaacattttttggaaagcaacctggtgaacaaaatatagtagtttgtggtttagcagctggaaaaaaatcttgtctttcttggttagaaaaagagagaaattttgatgtctttgatattaaaaaagatgtagttcaaactttagttgaagcaggttacgattcagaaaaattttttatagatgatgaaacacctgattattatcatccaggtaaatcaggaagattatttttgaatagaggtagagaaaatgtagctgcatactttggtgaaattcacccaaatattattaagcaaattgatatgaaaaccgaatctttagtaggttttgaaatatttcttgataatttaaaattaccaaaaaaatcattaaaagatcaaaaaaacaaatattctgtttcagattatcaaaagtcagaaagggatttcgcttttatagtt

SEQ ID NO: 301513 - DNA, 763 bp, Unknown
  Bacterial polypeptide expressing nucleotide sequence isolated from the Sargasso Sea
atgaagtttacttactcatggctaaaagagcatcttgaaacagagcatcaatataatgaagtagttgataaattaacggcaattggattggaagtagagagtgttcaagatacaggcctagcctataaagactttattgttggccaggttttggaagaagaaaaacaccctaatgcagataaactaaaattatgcaaagtagatatcggtagagaaaaagttgatgtagtatgcggagctcccaatgttacaaaagggatgaaagttgtttatgcacctgttggatccgtcattcctgtaaatcaaatgaaaataaaagcagccaagattcgtggcgttgagtcttacggaatgatgtgttcagagtatgagcttggaatttcaaatgagcacgacggtattatcagtttagagcaagataaagaggttggcagcccatttgcagactcgtctggaatgaatgatattttaattgaaataggtattacacccaaccgtcaagactgtttgggtgttttgggtgttgcacgggatttagctgcagcaggtgttgggaagttaaagaaccgagagtttaagacagaaaaagggtcgttcgagtccccaattaaaattgaaatacaagataatgatatgtgcccagcatttgcaggaagctatataaaaaatgtaaaaaatgtagcaagtcctgactggctgcagaaaaaattaaagtcaattggcttaaggcccatttctgctttagtcgatattacaaattatg

SEQ ID NO: 301514 - DNA, 1882 bp, Unknown
  Bacterial polypeptide expressing nucleotide sequence isolated from the Sargasso Sea
tgcttcagttataagggggatcatccaagaaatcagtgctttttggacaatgcgaaaattaaatatgaagatcttcttaatcctgaaatacatcacaaggaatgtatgaaagttgaggttcaatccaaggaagattgtcctgtttttatgactagagtgatcaagtcaataaataaagatgctaatacaccaaaatggctcaaaaaaagacttgagcaatctggttataaatcgatcaatgcaattgttgatattgctaattttgtgatgctagaaactggacaacctttacatacttatgacttaaagaagattaatgaaaaaattattgtaagaagagcaaatgacaaagaggccatagatatccttgatggcagtagaaaacttctagattcagattttcttgtcattgccgactcaaaaaaggcattaggtattgcaggtatcatgggaagccttgactcaggaatatctgatgacacagaaaatattgtattagagtcagcctattttaattatgaaacaatcatgggaagagcgaggtcgcttagcttgcacagtgaagcaagcatgaggtttgaaaggggagttgatccaatgatacaggagtatgcgatacagagatttacaagcctaatcaatgaaattgctggaggatcgaatggtcccattcattcatcaatcagtaaaaaagcactgcctaaaaataaattcattactcttagaaaagataagatcaagcaaatattaggcataacaatccctaatcaaactattaagagcatacttaataggcttgatatggagattaaagagaaggattttggttatattggctggagtgtaaaagcaccaagttatcgattcgatatcaacgaagagtgtgatttgattgaagaaatctcaagggtttatggatttgatcagattccagaaaatgtcgagcaacaaaacatgatgctaatgaataaatcatctcgccaattaaagcgtgaaagaatagattctatttttcaccagttgggatacaacgaggttgtcaactatagctttgttagcccctcaatgaattcattatccgactctaaagcagacatgattgacttgcaaaatccgatctcaatcgaaatgtctgtcatgagaaattcgctttggcctgggttgctcaataatctatctcataacatcaaacggcaacacaaagacattaaaatatttgaagtcggaaagcatttttcgagtaggaaaagacgtccaatagaaacaaacgtaatcgctggacttatatatggaaatcgacgattggaaagctgggcatactctaaggttgctgttgacttctatgatctaaagggtcacttagaagatctcttctcagtattcaacctagaaaacgttaaatttgaacctgtctcacacccaatgctttgccctggtgttgctgctgaaataaagttaaagaataaaaaaattggaataatcggcatgcttaatccagagctatcacgtgatatgaagattgaacaagatccttttctttttgaacttgattatgactgtctagaattaccagctttaactagttttactagttctgaatactacccctcatcaagaagagacctatcttttgttcttcctaataaagatagaataagcaatgtgaccgaagagatacgaggtctagatatcaaagaacttaaagacatcgttgtgttcgatctctttgataaagagaatggtgagaacactcaaaaaagtatctctatagggttgatttttcaagcaaaatcacgcacccttaaggatactgaaattgacggctttatgtcaaaagtcatcaaaatgcttgaaacaaattttcaaataactattagataat

SEQ ID NO: 301515 - DNA, 2240 bp, Unknown
  Bacterial polypeptide expressing nucleotide sequence isolated from the Sargasso Sea
taattcatttgctcaagatgaaaaacaacaaggacacacaaatatcaataagtttcgacagttatatgatgagtttgcaagcccgaatatctatagaactgcatcaggtgcccctggtccagcctattatcaacaaagagctgattataaaataaatgttgagcttgatgataaaaacaaaaaaatatatggtgatgaaaccattacttatacaaacaattcaccagaaacattaagttacttgtgggttcagttggaccaaaatgtaagaaaaaaggattcacctagtttagatattgattcagaaggtgtaagtatagcctatatacctgattcatttgataaggaatatcttaagaatccttttgatggaggatttaatattgaatatgttaaaggtgttgataataagcctcttgattatataattaatcaaacaatgatgaggattgacttaccaaatcctatttccactggacaaagttttgcatttaaaattaagtggtggtataatattaatgatcatgttaaacaggatggaagatctggatatgaaacgttccctaatgatacaaatagagcttatataattgctcagtttttcccaagaatgtgtgtatataatgaggttgagggttggcaaaactatcagttttggggtgatggagaatttgctttaccatttggagattatgaagttaacattacagttccgtcagatcacattctagaagcaacaggtgaattagttaatcgaaaagatgtatatacgaaagagatgatgaaaagatacaatcaagcaaaaaaatcttatgataaacctgtaattatagtatctcaggatgaagcaattgaagctgaaaaaactttttctaatgacaaaaaaacctggaagtttgcagctaaaaatgttagagattttgcatttgcaacatctagaaaatatattcttgatatgatggctgtaaaaattggaagtgaagatgtcatggctgtatcaatatatccccgtgagggtaaccctctttgggaagaatactcaaccattacagttgttgaagcactaaaatctttttcaaaatatacctttgattatccatatcataaagctgtttcagttcacgcacaccaaattggaatggaatacccaatgatatgtttcaatttcggaaggcctaatattgatggctcatactctgatgatgaaaaatttggaatgataggagttattattcatgaaattggtcataattttttccctatgatagttaatagtgatgaaagacaatgggcttggatggatgaaggtttaactacttttgttcaatatttagcagagcaagaatttggtgaaaaatacccagacgctatatatccaaataagaatttcccatcagatcgtggaccagctaatatgattactgactacatgagtgttgatcaaaactatttagcaccaataatgtccaacccagaaaatgtatatagtttgggtccaaatgcttatggaaagccagctacagctctaaatattttgagagaaacaattatgggtaaggaattgtttgattatgcttttaaaacctactcacaaagatggatgtttaagcatccgacccctgaggacttttttagaagcatggaagatgcatctgccgtagacctagattggttttggagagggtggttttacactactgattatgtagatatttctattaaagaattgaatcaatattatgtttctcctaatccaggtgaggaaatgaaagaatttatgaaggaaagaggattagttagaaacagacttagaccactaatattttttgaaaagtttgaaaatgatgttgataataacagagataagaacccattagagaattctaagcttttaaataattatttaaaagagaattattcaactgaagaaatcaatgatttggaaatccctaaatatttttatgaggttgtctttgaaaaaccaggtggattagtgatgcctataatcgtagacataaagtatgaggatggagaggttgttagaaaaaaatatcccgcacaagtttggagaaaaaatgataaagaggtaagaaaagttatagcaaccaataaaaaaatatcagagattattttagacccagatgaagagacagctgatatagatacaagaaataattcgtggcctaaaaaggaggaaagtacagattttgataaatttaaatctagaattcaaggatgac

SEQ ID NO: 301516 - DNA, 1351 bp, Unknown
  Bacterial polypeptide expressing nucleotide sequence isolated from the Sargasso Sea
gatggctttaaatagaccaaaccttttatacaacattctgaaatacaccatcctttcactagtgctacccttaagcgctcagtcagatgaatcattgaatgcaaatatttttgagacagggctatactctaaaaatctatattttgagtggaaaccattagataaagaattagatctttattctgcaaagatcgctgagatcaattttcgattttctgatattgacctccaatataaaggaaataccaatgagaggactgccaacattcaatttataggacctaatttttctttaaagcaattaggattgaaattcaatatccattctgagaattgggtaacaaaagagaagatcgaacgattggagaaaagagaggctattccaaaggcctctatagagtctattgcaaatagtgtagacctgtacatggtagatcataacactctcccccgaacggtcaatgaacttgtagtaaaacaatatctagatatggacacacctcctcttaatgattattcatggaaatatgatcttaaacttccagaacagatcattgccaagccaacccagatcaatgtgcatcccagctcgcatgcgctctattatgattggcaatccaggacattccaactaagtccagaaaaagattcactcattaatgtacctattgttgattgggaatatatttttgagatccaggatatttctcaggtcttttcatctagtattgatatagatctatctaaagataattctgagtttgatctaaaaatgaaaagaggtcaattcaaaataagcaatacatctttttcatccactccaggaaagcaatatgaagaccagtctagtgtgtcattgccagagctgctacttgaggcaaatgatctagtgctaaatgggaccatatcagatacacctgtaatacatcgaggaaaaggaaaattcaggatacggaattttgagataaagattccgaaaggtatcaaagaagaacctgaaattgaatcaatgcttaaaacactaggcatatggaataactctctgataatcagacttatagagtttgatattaatttgataaatgaattcacaggtgatcttctattccgctttcaaacacctttcatgaagatatcagtggatggagactttagtcttcgtcagggtgattcaattccaggtgttgtattacataatgctgaagtaagaatacatcccatatctttaggcataagaaaatggctgagagaatgggaacaaaagaatggtagaatgtttacccgccaaggtgcgaccatcgtgctaaagatcaatggacctatcgatgatcctgtgatccaggggtactga

SEQ ID NO: 301517 - DNA, 325 bp, Unknown
  Bacterial polypeptide expressing nucleotide sequence isolated from the Sargasso Sea
atgaagatagcctatccacatttactaaattttttaaaggagaaaccttctttagatgagttgtctgataaattgctccaacttggccatgaacatgaaatagaaggcgatattatagatcttgagattacaccaaatagaggtgattgtttgtcactaaaaggaattgccagagatctaaactatttttataaagctgaattagatagagatacatatgatgaaaatattcctaaatcagatttttctttccaaaacaaagctaaagacttgtgtccaaatatatcttttgtagaaatagaaatagatggatcaatttcaggct

SEQ ID NO: 301518 - DNA, 952 bp, Unknown
  Bacterial polypeptide expressing nucleotide sequence isolated from the Sargasso Sea
ttaaaggagcacttagacactcaaaagaaagataacgagttaattgaaaaactaacagatattggtctggaagttgaaagttttgaaaatctaagttctggattagacagttttaaagtagcaaaaattattaatgctgaacagcatccgaatgcagatagactgagaatatgcgatgttgatattgggttagatgatactgttaaggtagtatgtggagcaccaaatgcaaaaaaagatcttcttactgtttatgcaggtccaggatcaataattccaaaaaataacatgaaactctcagttagtaagattagaggtgttacttcctatggaatgctgtgttcagagtctgaacttaagttatcaaatgaaagtgaaggaataacagaactaacaactagtaaatactctgataaaattggtaaaaatttttttcaaagtaatactgaaaaggttgtagatttatcaattacacccaatcgtcctgattgcttgggggtaagaggtatagctagagatcttgctgctgctggagttggtaaattaaaaaaaatttcacttaaaaatattaaaaaaaatggatcacaaaaaattaaagtttcaattacaaaagataaaaatcaaggttgtactgtatttggtagttgtttaattgagggtgttactaataaagaaagtcctcaatggcttaaagaaaaaattatttcacttggtcaaaaaccaatttcagcagttgttgatattacaaattatgtgatgttagatttaaatagaccacttcatgcatatgatgcagataaaattgataaggaaattatagtaagaaattcaaaaaagggtgaaacttttgaagctcttgataacaaagagtataaattagatgatgatatgtgtgttatctctgataaatctggagttttaggcttgggaggagtcattggaggaacacgtt

SEQ ID NO: 301519 - DNA, 502 bp, Unknown
  Bacterial polypeptide expressing nucleotide sequence isolated from the Sargasso Sea
atggcttttgctgaaaataaaaaagatattaaaaacaagatcaagggtactagtacttttgaagatttagaaaaaataagattatattatttaggtaaaaaaggtcttatccccgaagctttaaaaggtttaggatcattatctattgaagaaaaaaaatctaaaggtcaagaattaaatacaactaaaaaatttattgaagaaactataaaggatcaaaaaacacaaattgagaatattgaaatttcaaaaaaaattactcaagaatcaattgatgttactttgccaccaaacataactgaacaaggaaagatacatcctattagtcaaacaatatttaatattattgaaatatttggtaatctaaactattcggttgaaacaggaccagatattgaaactgattttaataattttacagctttgaatattcctgaacatcatcctgcaagagaaatgcaagatacattttatatagaagatggaaaagataataatgttc

SEQ ID NO: 301520 - DNA, 919 bp, Unknown
  Bacterial polypeptide expressing nucleotide sequence isolated from the Sargasso Sea
atgatcatttccttagactggttgaaagagtttgttgacatcgatgaatctcctgatgaattgtcagatttgctttcaggtatagggttagaagcagaagctacatccgtcccaacagaaatttctggtgtcgttattggaaaggttgaaacagcggaaaagcatcctgatgcggacaaattaaaattatgcacggtcaatgatggtaaacaggtacatcaggttgtttgtggcgcgccaaatgttgatgcagggcaaacaatagcattcgctacagtcggttctgtacttccaggaaaattaaagataaaaaaggcgaatatacgtggcgttgaatcatcaggaatgatttgctcagaacgtgaactgaatttatcagatgaacatgaaggcataatggtgcttccagatgaccttgagcctggagatgactttgtttcttcatatggatacaaatacatctcagtagaactcgatataacacctaaccgcccagatgcattttcgcatcaaggtgtggcccgggatatcgcatgcaagaccaatagagattttaaacagatatcagttgaaccgatcgcggtaaaaggaaatgaatccataaatatatccatggaagaccatcaagactgccctagatatattggaggtattgtaaaaaatgtgaaggttggaccaagtccagactggttagttgaaaggcttaaagcgagtggacagcgaagtataaataatattgtagatatatctaattatgtcctaatggaaatgggtcaccctactcacatttttgatcatgattcattgaaaaataagtccatatatgttagaagagcagaaaaaggtgagactctgaccacacttgatgaccaaaaacataaactggataaaacacatttattaataactgatggaattg

SEQ ID NO: 301521 - DNA, 661 bp, Unknown
  Bacterial polypeptide expressing nucleotide sequence isolated from the Sargasso Sea
cttgacgctctctggaatcgagtctgagatcgaaaaatctaaaggtgaagaaattctcgacatttcattaacacccaatcgtgctgattgtttcagttataaagggattgtgcaagaagtgagtgctttagacaatgctaagattataagtgttaaacaggctgtgcctgagattcatcacaatctgacaatggaagttgatgttcaatcgaaggaagattctcctgttttcatgacgagagtcataaagtctataaataggaatgcaaagagtcctaaatggctcaaagaaaaacttgatcaatcgggatataagtcaatcaatgcagttgttgatatagctaattatgtaatgttagaaatgggccaaccacttcacacttatgatttaaaaaagataaaaaaaacaattttagttagacgagcaaagaaaaaagaagcaattgatattctagacggtagtagaaaaatcttagatccaaactaccttgtcattgccgatgtagaaaagccacttggaattgctggaatcatgggaagcttggaatcaggaatatctgaagatacggaagatattgtccttgaatctgcctattttaattttgaaaccattatgggtagagctagggctcttagtctccatagtgaagcgagcatgaga

SEQ ID NO: 301522 - DNA, 904 bp, Unknown
  Bacterial polypeptide expressing nucleotide sequence isolated from the Sargasso Sea
agaacatttagaaacaaaagctaatataaatcagattgcagaaacattaactaacatcggattagaagttgaaggaatacaaaataaagaacaggattataaaaatttttctatagctaaagttttaagtgctgagaagcaccctaatgctgatcggttaaaagtatgtagtgttcaaactgtaaatggagatttccaagtggtatgcggagcaccaaatgccaaggcaggtatgatgggtgtttttgctccagtagatacttatataccagggactgagttaaatcttaagaaatctgaaatccgtggagttgaatcttgtggaatgcttctttcggagagagaattaggaatctcagatgagcatgatggaattatagaagtaaaagggaagtataaagttggtgacccaatagcccctatatatggctttgatgatccagtaatagagataaacatcacccccaatcgatctgattgtttatcagtaagagggatagctagggatcttgctgctgcaggagtaggaactttaaaagatttcaaaattaataaaactaaaggaaaatttaaaagtgatgttaagtggttaagaaaatttgaagatggggaaaatcatttatgcccaggtgtttctggaagattatttacaaatatcaaaaactctgagagtcctgattggcttaaaagaagacttacacttatagggttaagacctattagtgttctagtagatattacaaactacgttacatacgatcttgggcgcccactgcatgtttatgatgcagataaattaaatgggaatcttgtgatgagaaaagccaaaaaaggtgaacaatgcaaaacattagatgaaaaagaatataaattatctgaagaaatgattgttataagtgatgat

SEQ ID NO: 301523 - DNA, 502 bp, Unknown
  Bacterial polypeptide expressing nucleotide sequence isolated from the Sargasso Sea
aatgtcatccaataaagacattttctccccagaacttattaaggataaaggctctattcatcctataaatcatatgaaagacacaatcatgggtctgctagtttcatttggttttgaaattattgatggtcctgagattgaaaccgaagagttcaattttgatatgctaaatataaaaaaaacgcatcctgctagacaaatgcatgacaccttttatgttgaaggcaaatcaaacttgttaaggactcacacttctccagttcaaataagaggaatgcttgagaaaagacctccactagctttcatttctggtggtaaagtttatagaaaagatgatgatgcaactcatttacctatgtttcatcaaattgagggaattctagtagataaaaatataagctttgcacatttaaaagatttgatttacaaaattgttcattcattatttggtaaagacattgaattaagatttaggccttcatattttccatcacagaaccat

SEQ ID NO: 301524 - DNA, 248 bp, Unknown
  Bacterial polypeptide expressing nucleotide sequence isolated from the Sargasso Sea
cgatatggggtgtgttttctgtggaggaaaagggtgccgtatttgcagccacagtggctggatagaggtactcggttgcggcatggtccatacagaggtctttcggcaagtttgcatagacaacgaaacctacactggatacgcattcgggcttgggattgagcgcctggcgatgctgcgttacggggtcgacgacctgcgcctattttttgagaacgaagtttcgttccttcggcagttcgcctagg

SEQ ID NO: 301525 - DNA, 292 bp, Unknown
  Bacterial polypeptide expressing nucleotide sequence isolated from the Sargasso Sea
agttgatattggatacgagatgaaagatggaaaaattataataggagaaggaaatcaatggttagagattttagggtgtggaatggttcatcccaatgttttaaaaaatgttaaagtagacccatcaaagttccagggctacgcatttggtattgggatagatagacttgctatgctgaaatatggaatcaatgacttaagagctttttttgattgtgattatcgatggttgaatcattttggatttgatccattggatgtacccacaaattatagaggtctcagtcgatga

SEQ ID NO: 301526 - DNA, 1086 bp, Unknown
  Bacterial polypeptide expressing nucleotide sequence isolated from the Sargasso Sea
tagccagatcattgataaattgactgatgttggacttgaagttgagagttttgaaaatattagctctgatttggacaattttaaagtggcaaaaattataaatgctgaacaacatccaaacgcagatagacttagggtatgcgatgttgatataggacaacaaaatattgttaaagttgtttgtggagcaccaaacgctaaaaaaggtcttttaactgtttatgctggtcctggatcagttattccaaaaaataatatgaaacttacagtcagtaagattagaggagtaacctcatatggaatgctatgttcggaatcagaattaaaattatcagatgaaagtgaaggaataacagaactaaaaccaagtaaatattcaaataaaataggtaaaaatttttttaaaaacaacactgagaaagttgttgatttatcaataaccccaaatcgacctgattgtttaggagtcagaggaatagccagagatcttgctgcgacaggtgctggtaaattaaaaagtatttcacataaaaacatcaagaaggatggatcccaaaatataaaagtttcaattactaaagataaaaatcaaggttgcacaatttttgggagttgtctcataaaaggggcaaccaataaagaaagcccaaaatggttgaaagagaaaattgagtctcttggtcaaaaaccaatttcagcaattgtagatataactaattatgtaatgctagatttaaatagacctttacatgcatatgatgcagataaaattgataaagaaatcatagttagagactcaaaaaaaggtgagacctttgaagctctagataataaggaatataaattagatgatggtatgtgtgttatatctgataaatctggtgtactaggcttaggaggggtaattggaggaatacgttctggtactgaattaaaaactaaaaatattttactggagtctgcatactttattccaagatcaataagaaaaacttcaaaattacttaacatagatactgatgctaaatttagatttgaaagaggaattgatcctcaatcaatagagacaggtttggtaaaagcctc

SEQ ID NO: 301527 - DNA, 847 bp, Unknown
  Bacterial polypeptide expressing nucleotide sequence isolated from the Sargasso Sea
tttgttgaccctaaagtgcaggaaactttgttcccgggtcaggccgcactggtgctgccaaatccaatctccgttgatatgtcggcgatgcggttaaacctgtggcctggtttattgcaggctgtgcaatacaaccagaaccgtcagcaaaaccgtattcgtttgttcgaatatggcctgaagtttatccctgatgcgaatgctgaaggtggtgtacgtcaggtgccggtgttaggaggggtgattgttggcagttatggcaacgaacattggaccattgcagagcgcgccgttgatttttatgatattaaaggcgatgtggaagcgctgttaagctgcacttcagctacagagtgttttactttcgctacaggtcaacacagcgccttacatccggggcaaactgctcagttaaaccgggatggcaaagctgtaggtgtgcttggcgccttgcatccggaagcggaacgcaaattgggtattaaaggcaaagcctttttatttgaaatagagttggaagcatttggtgataaacacattgttttagctcaggaaacttcaaaatatcctgcaaaccgtcgcgatttagctattgttgtgaaatctgatgtgcgtttttcagatatccttgctactattagaaaagttggcggaaatcaattagttgacctaaaattgtttgacgtctacacagggcagggtgtcgctgacggctataagtcattagcaatagctttaaccttgcaggacaaggcgcgaacgcttgaagataaagatatccaacaggttatctcttctgtggtcgaggtgctgagcaaagagttcaacgcaacgttgagggattaag

SEQ ID NO: 301528 - DNA, 910 bp, Unknown
  Bacterial polypeptide expressing nucleotide sequence isolated from the Sargasso Sea
aatgcagcttggtcatgaaaacgaagttgatggcgatattattgatctagaaataacacctaatcgaggagattgtctctcgctttttggaatttcacgagagcttaagaatttttatgatatcaactcaaatgttgagatttttgagtcccacatagagaaatttgaatttgactttgtcaatcaagcagaggataagtgcgaacgaatagcctttcttgaattagagattgagaacttgccaactaaatataaaccatatttagaaagctactttaccgatttagatgttaaaaaaaataatttttttacagatatatcaaattatatctcctatgaacttggtcaacctactcattgctatgattcagataaacttggaacaaaacttattctggaagaacttaaagataaatctagtttcacaaccctatcaaacaaagaaataactctaagcccaaaggatttagttttttcaaatgggaccgagattttaaatttggctggtattatgggaggcatctcttcatcttgtagcaccaatactaaaaaggttttaatagaatgcgcatattttcatccacctgcaataattggaaaatctattaaatatgatcttaattcggatgctgcatataaatttgaaagaggtgtagatccattaatgctagaaacgtcattaaggcgttttatttatattgttgcagatcacgttaggattaaaaatcttaaaattagtaataacatttataaagagcatgataaaaaatttgtaactaacaataaatctaaaattgaaaagattattggcatagatttggatgatcttagtttcaaaaatatactttcaaacttaggttttcaaatctcagaaaaaatcttggtaccatcttttagacatgacatagaa

SEQ ID NO: 301529 - DNA, 538 bp, Unknown
  Bacterial polypeptide expressing nucleotide sequence isolated from the Sargasso Sea
catgggtctagaggttgataccgtaactaaattaaaaagagatatagttattaatatagatatgacacccaatagagcagattgcctatcagttttcggtattgctcgtgatcttagtgcagtttataaaaaaaagataatgcagcctaaaagagttagactttctaagaaagataattcttttataaaatcagtcaatagaaaaatatctacatcatatggtcttttattaattgaaaactttgataataccatcaagacaccaaagtatatatctgataggttagatctatcaggaattagcaggattaattttattgttgatgtcctaaattacgtgatgatagatataggacaacccatgcatgtatttgataaggacaaaatcaagggaaaacttagcgttaggtttgcaaagaaaggtgaaaaagtaaaagctttagataataatgaatatattttgtcatctgatgttccagttatagctgatgataatggaccacaagcaattgctggagtaattggttctaacaattca

SEQ ID NO: 301530 - DNA, 1122 bp, Unknown
  Bacterial polypeptide expressing nucleotide sequence isolated from the Sargasso Sea
gccggtgaatgcagccagtttcgcttgcgacaggcccgcgagggtgaagctttcatcggcctggatgacagggagttgagcctcgattcccgtgcccaggtggtgacctgtcacgacctgccgatcgctctggccggtgtcatggggagcaaggccagtggtgtgacagccgcaacggggcggatttggctggagtccgccatgttcagccctgctgctgtccgcacgacggcccgctccgttggactgcgcacggatgccagtgctcgatttgagaagggtttgccgaaggagatgaccctggcctgttcaatccgtgctctggagctgctgaaagagctgtttccctgtgaagccaagggcctctgggtctgtggtgacagcgctgctgacgccagttccgtgttgttgcgccgtgacgccctgcatcagttgctgggacccatcgaggatgaggagggcagttccgacctggctgatgctgtagtcgagcaatgtctgacggccctcggttgtgaactcagccctagcgatgagggatggaatgtcattgctcccccttcgcgacggctcgacctggcccgcgagatcgatctgattgaggaggtcgcacgcctcgcgggatttgatcgcttcggcgcccatctgccggatcccttggccccaggagcgctgacgccggcacagcaggcggaacgccgtctccgaacgctcttctgcggtgccggtctgcaggagatcacaacactgtcgttggtgagtgccagcgatagcgatccacgcatcgctatcagcaatcctctgctggccgaaaccagtcatctgcggacaaacctctgggaagagcaccttgcggtttgtgtccgcaacctgaaggcctcccagcccggatgctggatttttgaactgggcaccacctacgccggaagcgctgatgcggtggaggagtcgaggcttctttccggagtgatctgcggtgagcaacgcctggagcgttggaccaccagcggcaaaccggcacctcccgattactacgccgctcgtggacgactgacggaggtgatgcaggccttgaagctcgatgtgtccgaccgacgtctcactgacgactcccgtctccat

SEQ ID NO: 301531 - DNA, 151 bp, Unknown
  Bacterial polypeptide expressing nucleotide sequence isolated from the Sargasso Sea
tgcatttgggattggtatagataggttggcaatgcttaagtatggaataaacgatctaagagctttttttgagactgactataggtggctaaatcattttggttttgatccattagatgtaccttcaaattatagaggtcttagtagatga

SEQ ID NO: 301532 - DNA, 838 bp, Unknown
  Bacterial polypeptide expressing nucleotide sequence isolated from the Sargasso Sea
aatgaaatttacacaagaatggcttaaagatcatctaaaaacaaataagaccgagtcacaaattattgaaaaattgaataatacaggtctggaagttgaaaaagtagaacctataaaaaatgaattaagtgattttgttgttgcaaaaattgttaaaacagaaaaacacccaaatgctgatagactaaagttatgtcatgttgatataggtaaaaaagagttagtaaaagttgtgtgcggtggacctaatgcaaaagataacctgctaactatttatgcaccaccaggatcagttattccaaaaaataatatgaagttagaagtttcaaaaataagaggagaaacatcttatggaatgctttgctcagaatcagaactaaatttatcagatgaaagtgaaggaataattgagttgaaacacatttataaatcgaagataggaaaaagctattttaataataattcaaaaaatgttttggaactatctataactccaaatagaccagactgtttaggaattagggggatagcgagagacctttctgcaagtggattcggcaaattaaaaccagttaaaataagtagaataaaaaaattaggcaagcaatatttaaaagtaaaaattgaaaaaaacaaaaatcaggcttgcacaatatttggcagctgtcttatcacaaatattaaaaatcaggagagtcctgcatggttaaaaaaaagaattatttctttaggcctaagaccaatatcagcagtggttgatataacaaattacgttatgtttgatttaaatagacctcttcatgcatacgatttagataaaataaataaacgaattatt

SEQ ID NO: 301533 - DNA, 152 bp, Unknown
  Bacterial polypeptide expressing nucleotide sequence isolated from the Sargasso Sea
tgcttttggtattggtatagatcgtttagcaatgttaaaatatggaattaatgacttaagatcattttttgaaagtgattataggtggcttaattattatggttttgatccactagatgttccaacaaattaccgaggcctaagcaaatgaa

SEQ ID NO: 301534 - DNA, 928 bp, Unknown
  Bacterial polypeptide expressing nucleotide sequence isolated from the Sargasso Sea
tcacaaagatattcagatcattgataaattgactgatattggacttgaagttgagagttttgaaaatattagctctgatttcgacaattttaaagtggcaaaaattataaatgctgaacaacatccaaacgcagatagacttagggtatgtgatgttgatatagggcaacaaaatattgttaaagttgtttgtggagcaccaaacgctaaaaaaggtcttttaactgtttacgctggtcctggatcagttattccaaaaaataatatgaaacttacagttagcaagattagaggagtaacctcatatggaatgctatgttcggagtcagaattaaaattatcagatgaaagtgaaggaataacagagctaaaactaagtaaatattcagacaaaataggtaaaaatttttttaataacaaaactgaaaaagttgttgatttatcaataaccccaaatcgaccagattgtttaggagtcaggggcatagccagagatcttgctgcggcaggagctggtaaattaaaaagtatttcacataaaaacatcaagaagaatggatctcaaaatgtaaaagtttcaattactaaagataaagaccaaggttgtacaatttttgggagttgtctcataaaaggggtaaccaataaagaaagtccaaaatggttgaaagagaaaattgagtctcttggtcaaaaaccaatttcagcaattgtagatataactaattatgtcatgcttgatttaaatagacctctacatgcatatgatgcagataaaattgataatgaaatcatagtaagaaactcaaaaaaaggagaaacctttgaagccctagacaataaagaatataaattagacgatggaatgtgtgttatatccgatcaatctggtgtgttaggcttaggagggataattggaggaacacgt

SEQ ID NO: 301535 - DNA, 479 bp, Unknown
  Bacterial polypeptide expressing nucleotide sequence isolated from the Sargasso Sea
cttgacgctctctggaatcgagtctgagatcgaaaaatctaaaggtgaagaaattctcgatatttcattaacacccaatcgtgctgattgtttcagttataaagggattgtgcaagaagtgagtgcattagacaatgctaagattataagtgttaaacaggctctgcctaagattcatcacaatctgacaatggaagttgatgttcaatcgaaggaagattctcctgttttcatgacgagagtcataaagtctataaataggaatgcaaagagtcctaaatggctcaaagaaaaactcgatcaatcaggatataagtcaatcaatgcagttgttgatatagctaattatgtaatgttagaaacgggccaaccacttcacacttacgatttaaagaaaataaaaaaaacaattttagttagacgagcaaagaaaaaagaagcaattgatattctagatggcagtagaaaaattttagatc

SEQ ID NO: 301536 - DNA, 142 bp, Unknown
  Bacterial polypeptide expressing nucleotide sequence isolated from the Sargasso Sea
tatgggaatagatagactagcaatgttaaagtacgggataaatgatctcagatcattttttgaaagtgattatagatggctaaactattttggcttcgatcctttagacgtaccaacaaattacagaggtttaagcagatga

SEQ ID NO: 301537 - DNA, 907 bp, Unknown
  Bacterial polypeptide expressing nucleotide sequence isolated from the Sargasso Sea
aatgcttgttaaaggattgcaaaaaataaaaaatcttgatgctaaaaagcgaaactttattgattctgccggaatacctttaatccaccccctagtagatttgggaaattatgtgatgttagagattggtgctccaatgcatgtatttgatcttaataagttagatttaccaattaatgttcgatttcctaaatcaaataataattcactagaagttataggaggcgatttaaaagatatccaatcatctacattaactattcaagatcaatctggcattcaagctattgctgggattattggaagtgaaagatctgcagtttcatctaatactgctaatatcgctgtagaagcagctttctttaaacccgaaacaattgttaatcaagccagaaaatatggtctttcaactgatgcctcgcatcgctttgaaagaggagtagatccagaaattcagcagctagctttagcaagatatctatttctattaaatgaaatagcagtatacgaatcagttaagctttattattcaaagtctaaaaaaacaaaaaagaaaaatgtgcatcttgatataaaaagatttaatgatttttctggcctcagcatgaagacaagccaagcaagttcaatattaagaaatttaggttttgatattgtgactaaaaattcaaaaagtcttttatttaatattcctagtcacagatttgatattgctcttgaagaagatttatacgaggaattattaaggtgttatggatatgacaacatcccagtatcaatacccaaggctggaccaattatcaaaaataaaagagacgatgtctcagacaaactcaggatcggacttgttcatgctggtttcaaggagcttatgcatatgccgtttgtatccaaagaatcctttgaa

SEQ ID NO: 301538 - DNA, 751 bp, Unknown
  Bacterial polypeptide expressing nucleotide sequence isolated from the Sargasso Sea
atattttgactataaatccatcaaaagtagaatcaatcttccatcaattagttcttttgagtcagttaatatagaggaggattttactttaattgtaaaagataaagataaatgtcctttttactcaggaataatcattaaagatattgaagtcaaaaaatcttcagaaattattcaaaataaattaaagtcaattggtttaaaaccaatcaataacattgtagatataacaaattttgttatgcatgaaatagggcaaccacttcatgcatttgactttgataaattaaataatataaacgttaaatctttaaaagccggaaccaagttcaagactttagatgatgaaataattgaacttagtaaagatgatttaatgatttgctctgaagacataccactatgtttagctggtatttatggtggattagagtctggagtattagactcaacaaaaaatttatttttagagtcagctatttttgattcagtaacaattcgaaaatcatcaaaaagacatcaactttttactgatgcttcctacagatatgaaagaggggttgatcctgaaaaggttatttattctttaaaaagagccgcaaacctaattaaaaaagataaccctgactgtgttatctcagctgtgttttctgaggacaatcttaagttagtaaagaaggatatctatttgaggtatgaaaaagttgcagatttatgtggaaaagagattaatcatgaaactattacacaa

SEQ ID NO: 301539 - DNA, 853 bp, Unknown
  Bacterial polypeptide expressing nucleotide sequence isolated from the Sargasso Sea
gaaaagattaaaatatcaaagtctaaaataagaggtgttgtaagtaatggaatggtgtgtgctgaagatgaaataggattaggggattctcatgatggaatcatgattttagataataaggtaaagtcaggaactccactaagtcaaatttataagattgaaaaagatagtatattagaaattggactaactcctaataggtctgatgcaatgagtcattatggagtagcgagagatttaaaagcattttttgagcataacaatgaaaatataaccctgaagttaccaagtacaagtgattttacttatgatgattttaaaattgaaaccaaaataaatgtaaaggatacaaccttatctcctttgtatgcgggtataattattaaagatgttgaagtcaaagagtctcagacatggattaaaaataaacttaaatcaattgggcatgaacctataaataatatagttgatattactaactatgttttacatgaaattggacaacccttacatgcttttgacttagacaagatcactaatattgaagtcaaaaacctgccttcaaaaacaaaatttaaaacccttgacggaaatgagatatctcttaatgaggaagacatcatgatttgttcagaagatgatccattgtgtttaggtggcatatttggaggcttagactctggtgtcacctcaaatacaaagaatatttttttagaatctgctatatttaatcctgtatctataagaaaatcatcaaaaagacattcaatatatactgaagcttcttttaggtttgaaagaggtatagaccctgaaatggtattatatgccttaaaaagagcctcaatatgat

SEQ ID NO: 301540 - DNA, 925 bp, Unknown
  Bacterial polypeptide expressing nucleotide sequence isolated from the Sargasso Sea
ttgtgtgctccaaatgtatctattggcaaaaaagttcctgtcgcacctgtaggatcagttttatatccgaaaaatggtaaaaagttaaaaattaaagaaagtacaattcgaggtgaaaagagtcaaggaatgatatgtgccgaagatgaattaggaattggaaattctcacgatggaattatggttttagataatagtttagagataggaaaaccgtttaaagaagttttaaaaattaatgatgattatgtttatgacataggattaactcctaatagagctgactcaatgtctcatatgggagttgcaagagatttaaaagcttattttattcaaaacaaaattcaatattcttggaattctccaataatcgaaaacttaccaactccaactaacaccaaaaacataaatgttcaagttaacgaaccagaattggtaccttattattttggtgtaactctcactgatattgaaatttcttcctcaccagattggattcaaaacaatttaaaatccattggaattatgccaaaaaataatgttgttgacataaccaattttgtattgcatgacatggggcagcctcttcattcatttgatgctgaaaaaattgaaggagatataattgtaaaaaagtcaacaaaaggaactttttttacaacattggataaaaataaaataaaactttcagatgaagacctaatgatttgtgatgaatcaaaacctttatgtctagctggaatttatggaggcgaccactctggagtatctgaatctacaacatccatttttttagaaagtgcttatttcgatcctaaaacaatcagaaaaagttcaaaaagacatggttttaccacagatgcatcctacagatttgaaagaggaattgatccggatatgtctttaatagcactaaagcgtgcaa

SEQ ID NO: 301541 - DNA, 613 bp, Unknown
  Bacterial polypeptide expressing nucleotide sequence isolated from the Sargasso Sea
atgaagtttactttaaactggttgttagatcatttagacactgacaaatcattagatgaaatagttgagaagctttcgatgatagggttggaagttgaggatgttactgacaaatctgaaagattgaaaaattttattattgcgaaagtaattgattgcaagcctcatccaaatgcagacagactgaaaattctttctgttgatgataaatctggtgatacttatcaagtaatatgtggagcacccaatgcaaaaaaaggtttaatcggtgtttttgctaaacctggaatgtatatcccagggataaatctaaatttagaagttggaaatataagaggagaaaaatcttttggcatgatgtgttcagagagagagttagaaatctcggacgaacatgatggaattattgaattagatcaaaatgcagaaattggaaccagttttttagagtggtctggacttaatgatcctgtaataacaattggtataactccaaatagagcagattgtcttggtgtaagaggtattgcaagggatctagccgcctcaggatttggtgtattaaaaccattaaatataaagaatattaagggaacttttaaaagtcctaaaa

SEQ ID NO: 301542 - DNA, 198 bp, Unknown
  Bacterial polypeptide expressing nucleotide sequence isolated from the Sargasso Sea
ttaatcctagggtcttagaaaactgtggtcttgatccaaatgaacatcaaggttttgcttttggcatgggacttgagaggattgcaatgctaaaatatggtattccagacttaagaccattttttgaaaatgatcttagatggatgaagcactatggtttttttccttttgaacaatattcaattcatcagggataga

SEQ ID NO: 301543 - DNA, 329 bp, Unknown
  Bacterial polypeptide expressing nucleotide sequence isolated from the Sargasso Sea
ttttgctgaaatgaaaggcactttagaatattttgcaaaggaaatgtttggaaaagatacaaaaatgcgcttccgaccaagttattttccatttactgagcctagtgccgaagtagatatttggaatgaaaaattaaatcaatggatggaaattcttgggtgtggaatggtaaatccaaatgtattagaaaatgttggatatgatagtgaaagatatcaaggatttgcttttggtatgggaattgaacgtattgcaatgattaaatatggtattcgagatattcgactattttatcaaaatgataaacgatttttggagcagttttaat

SEQ ID NO: 301544 - DNA, 373 bp, Unknown
  Bacterial polypeptide expressing nucleotide sequence isolated from the Sargasso Sea
attttatttttaaaagaattttttgaaattgataacttaaaatatagatttagaccaagttattttcccttcacagaaccaagtgccgaaatggatgttgcttatacaaaaaaaaataacgttctaaaaattggtgaaggagatgattggttagaaattttaggttgtggaatggttaatccaaaagttttagaaaactgcaatatagactcttcagtatatcaaggttttgcttttggaatggggatagagcgtctctctatgttaaaatatggaataacagatatgcgcggtctgtttgatttaaaccttaagtggttagatcattacggtttttctccactagatttaaaaacaagatcggaaatttaag

SEQ ID NO: 301545 - DNA, 757 bp, Unknown
  Bacterial polypeptide expressing nucleotide sequence isolated from the Sargasso Sea
aatgattattacttttccatggttaaaagagcatttaaaaactaatgccaacgagaaagaaattataagcaaactcactaacattggattagaggttgagagtataaaagaaaacccaggagatctgggtgaatttaaaatagctaaaattattaaagctgagaaacatcctaacgctgataaattaaaagtatgtgatgtaaacattggtggaaaagaaaatttgaaagttgtttgtggagcacctaacgcaagagatggtcttgtaacagtttacgcaccgccaggtgctataatacccaaaactaagtttcaattaaaaattgctaaaataaggggtgttgagtctcgcggtatgttgtgttctgaaaacgaacttaatttgtctgatgaaagtgacggaatagtagaattaaatgttagagaaaaagaaattggaaagagttattttaaaagaagatcagaaaaagcaatcgatatttcaattacaccgaacagaccagactgtttgggtgtaagaggcatagcaagagacttatcttccactgggataggaaaattaataactttaaaaagaaaaaaaataaaacaaagttctaagcatcaagttaaaacttcaataactaaggataagcatcaggggtgtcttacatttggaagctgctatattaaagatatagttaataaggagagtccagagtggttaaaaaataagctttttgctcttggcttgaaacaatttcagctgttgttgata

SEQ ID NO: 301546 - DNA, 157 bp, Unknown
  Bacterial polypeptide expressing nucleotide sequence isolated from the Sargasso Sea
ggatttgcatttggtatgggtatagatcggttggccatgctaaaatatggtattaatgatttaagagctttttttgaaacagattacagatggttaagtcattttggttttgatcccttagatgttcctacaaattataggggcttaagtaaatgat

SEQ ID NO: 301547 - DNA, 733 bp, Unknown
  Bacterial polypeptide expressing nucleotide sequence isolated from the Sargasso Sea
atgaaatttgcggttgattggctgacagaccatttggatacaaagttaaacgatcataagattattgataaattaacaaatataggtttagaggtcgagagcttcgaaaatcagacatctgaatttgatgattttattgtaggtaaaattgtaagtgcagaaaaacacccaaatgcagatagattaagattatgtgacgttgatataggaaaaagcgaaacagtaaaagttgtttgtggcgcaccaaatgcaaaaaataatttatatactgtatatgctccaccaggaacaattattcctaaaaatcaaatgaaattatcagttagcaagataagaggagtaacttcatatggaatgctttgttccgagtcagaactaaacatatcaaatgagagtgaagggataatagatttaaatgtaaaaaaatatggcaaccagataggaaaaaaatattttaaaaatagcagtcctaaagttatagatctttcaataactcctaatcgagctgattgtcttggagtaaaaggtgtagcgagggacttagcggcagctggagctggcaaacttaaacaaaaaaaagtacataaaattaaattctcaggactacagaatattaaggtaaaaattacaaaagaaaaaaaccaaggatgcacttcatttggcagttgtttaattaaaggaataaagaatacagaaagtccaaaatggctaaaagataaaatattatcttagg

SEQ ID NO: 301548 - DNA, 340 bp, Unknown
  Bacterial polypeptide expressing nucleotide sequence isolated from the Sargasso Sea
agatcagaacataagtttttcagacctcaaaggtacaattataggatttattgattatttttttaatcagaatgtagatgtaagatttaggccttcttattttcctttcacagagccctcggctgaagtagatattagatttggcaaaaaaggttggcttgaaattttgggatgtggaatggttcaccccaatgtgcttagaaattgtaatattgatgcacgcaaataccgtggctttgcatttggggttggggttgaaaggcttgccatgctttactatggagttgaagacatcagagaattttatgcttcaaattctgaatttttaaatcagatatga

SEQ ID NO: 301549 - DNA, 597 bp, Unknown
  Bacterial polypeptide expressing nucleotide sequence isolated from the Sargasso Sea
gatgaaattaaccattaattggctaaaagaacatttagatacaaagttaaatgaggataaaataattgacaagttaaccgatattggccttgaagttgaaagctttaaaaatcaagaaactgagcaagataattttataatagcaaaagttataaattcagaaaaacatcctaatgctgataggttaaaaatatgcgaagtagatattggtttaaaagatgcagttaaggttgtgtgtggagcagcaaatgcaaaaaaaaatctaattacagtatatgcttttccgggatcaataataccaaaaaatcaaatgaaattagctgtaagtaaaataagaggcgtaacttcatatggaatgctctgttcagaatctgagttaaatatatcaaatgaaagtgaaggtattatagaactttcatctacaaaatacttaaatcaaataggaaaaaaatactttaacaaaaataatataaaagttattgatctttcaattactcctaatagagcagattgtttaggcgttagagggatagcaagagatttatcagcagcaggagctggaaaattaaaaaagattgataaaaagaaaataaaaaa

SEQ ID NO: 301550 - DNA, 943 bp, Unknown
  Bacterial polypeptide expressing nucleotide sequence isolated from the Sargasso Sea
tttcagctaggccatgagcatgaaatagaaaacaatatttttgatatggagctaacaccaaacagaggagattgcttatcaattaatggtttattaagagatttatcagttttttatgagattacgcccaataatgagatatatacagatgatattaagtctttggacataaactttgttaataactctcaagaagcatgtccaagtatctcttttttaaaaattaaaatacaaggtgaggtaagtgcatataaaggtatatttcaagactattttgatgacctagacgtaaataaaaataatttctttactgatatttctaactacatctcatacgagactggacagcccacacattgttatgatgctgaaaaagttacaagtttaatttcactagaaacttctgtcgaagaatatgaatttaaaactttattagataaaacaattaaattggaagatgaaaatcttgtatttgttcagaatgatgaagttattaatctagctggtgtgatgggtggaagtggtacagcatgttctaaagatacgaaatctgtaattgtagaatgtgcgtattttaatccagaaaatgtaatcggtcagtcaattaaatatgatattaagtcagacgcagctcataaatttgaaagaggtgtagacccactgtgtcatgaaaaagtactaagaagattccttaagattgttgacgagcacgcaaccataaaaaacgtagaaatctttaagagagattatataagccataattcaactgaaatcccttttagcatagaacgcataaataaaattttaggactttcatgtaattcagaagaactccaagattatcttactaaattaggcttcaatatagataaaaataaaattatagctccatcttatagaagtgatattaagactgagaatgatattgctgaagaggtagcaa

SEQ ID NO: 301551 - DNA, 831 bp, Unknown
  Bacterial polypeptide expressing nucleotide sequence isolated from the Sargasso Sea
tataaacatcctaatgccgacaaattaaaagtttgtgaagtaaaatcggacaacggaacattccaagttgtttgtggagctccaaatgctagaacaggaatgcttggaatttttgcaccagaaaattcttttataccaggaactaaattaaaattaaaaaaaacaaaaattagagatgttgaatcttgtggaatgttagtttctgagagagagatgggaatatcagatgagcatgaaggaattattgaagttgataaaaaatataatataggtgattctttttctgaaatttatggtttgaacgatcctataattgaaataaatataacaccaaacagatcagattgtttatctgtaagaggtattgcaagagatctacaagcagcaggagcaggaagactaaaagaattaaaaattaaaaacgttaaaggatcatttgtaagttctattaaatggttaagaaaatttgataaaaaagatgaaaatttatgtcctggagtttctggaagattttttaaaaatgttaaaaacactgagagtcctgattggttgaaaaaaaaattattagctatcggtttaagacctatttcaactcttgttgatataacgaatttagttacttttgatcttggaagacctttgcatgtttatgatgctgataaattagagggcgatttatgtatgcgtttagctaaagaaggtgaaaaatgtaaaactcttgatgaaaaagaatatgttttatcttccgacatgattgtaatagctgataaaaaaaagttacacggaataggcggtgtaatgggaggtcttgactcggggtgttcattaaaa

SEQ ID NO: 301552 - DNA, 886 bp, Unknown
  Bacterial polypeptide expressing nucleotide sequence isolated from the Sargasso Sea
agctataatccaaaaaaccaaatgaaattatctatatctaagataaggggtgttacatcttatggtatgctttgctcagagtctgagcttaagttgtccaatgagagtgaaggtattactgaactaccaaataaatttaaaaccaaaattggtacaaagtattttagcaacaaatctcccaaggtattagatttgtccataacccctaatagagctgattgtttaggcgttagaggtattgcaagagatttggctgcagctggaactggaaagttaaaagatcttaaaaatacaaaaattaagataaataataaacaaattttcaaagtaaaaattttaaacgagaaaccattgggctgttcttcttttggtagctgttttataaaaggtgtaaaaaacagagaaagcccaaattggttgaaagaaaaaattatttcacttggtcaaaagccaatttcagcaatagtagacattacaaattatgtaatgatggatttaaatagacctttacacgcttatgatgcggataagatcgataaaatgattattgtaagaaatgcaaaagaagacgagtcatttaaagctttggacaacaaaatttacaaactagagaaagatatgtgtgtgatcgcagataaatcaaatgttttaggactaggcggaatcataggaggcgcaagctcaggaactgaatttagtacagaaaatattttactagagtcagcttattttaatccaagatttataagaaaaacctcaaaacatttcaatattgatacagatgcaaaatttaggttcgaaagaggaatagatccaaatgcaatattatctggacttcaaaaagcagcagaactcattcagaaaatatgggaggaaaaatcggtaa

SEQ ID NO: 301553 - DNA, 337 bp, Unknown
  Bacterial polypeptide expressing nucleotide sequence isolated from the Sargasso Sea
aacatttcatttggtgatttgaaaggcacattggaatattttgtgaagcgtgtttttggaaacaaagtaactatgcgtttccgtccaagcttttttccgttcactgaaccaagtgcagaagtggatatatgggatgaaaaaaggggacaatggttagagattcttggttgtggtatggtagacccagctgtattcgaaaatgtcggctatgatccaaaagtgtggcatggatatgcatttggcttaggaattgaacggattgcaatgctaaagtatggtattagtgatattcgtttattttttcaaaatgataaacggtttttggatcaattctaat

SEQ ID NO: 301554 - DNA, 847 bp, Unknown
  Bacterial polypeptide expressing nucleotide sequence isolated from the Sargasso Sea
gatgaaatttactataggttggcttaaggagcatttaattacaaaatataaagataataaaattattgaaaagttaacagatgttggacttgaggtcgagagctttgaaaatataaaatctgaacttgatagttttaaagttgccaaaattataaatgccgagcagcatccaaatgctgatagactaagagtttgtgatgtcgatataggtgaaaaaaatactgttaaagttgtatgtggagcgccaaatgcaaaaaaagatcttataacggtctacgcaggtccaggttcaataataccaaaaaataaaatgaaacttgctgtaagtaaaattaggggagtcacctcatatggaatgttatgttctgagtccgagctaaatttgtctgatgaaagtgaaggtataactgagcttaaacatgtaaaatacgctaacaaaataggaaaaaacttttttaaaaataatggtgaaaaagtagttgatttatctataacaccaaatcgtcctgattgtttaggagttagaggtattgctagagacttagctgcatctggggttggtaaattaaaaaatatctcaaataaaaagattaaaaaagcaggttctcaaaatattaaagtttcaattgttaaagataaaattcaaggctgcactatatttggtagttgtttgattaaaggcgttactaataaagaaagcccaaaatggttaaaagataaaatcgaatctattggtcaaaaaccaatctcagctatcgttgatataacaaattatataatgtttgatttaaatagacctctccacgcttatgatgcagataaaattgataaagaaatcatagtgaga

SEQ ID NO: 301555 - DNA, 253 bp, Unknown
  Bacterial polypeptide expressing nucleotide sequence isolated from the Sargasso Sea
atttagagctagttatttcccatttactgaaccttcagcagaagtagacgtccagtggaaaggtaaatggttagaagtaatgggttgcggaatggttgatccaaaggtcttagaaaaattaggaatagattctgaaaaatggactggttttgcagcaggattaggagttgagagattttgtatggttagacatcaaatcgacgacataagaaaattttatacaaatgatattagattcttagaacagttctaa

SEQ ID NO: 301556 - DNA, 820 bp, Unknown
  Bacterial polypeptide expressing nucleotide sequence isolated from the Sargasso Sea
attaaaacttcaaaacatccagatgcagataaattaaaagtatgtcaggttgaaactaaaaatggagagttccaagtcgtatgtggtgcacccaatgcaagagaaggtatgttaggaatttttgctccagaaaattcttatattccagggacagaactatatttaaaaaaaaccaaaattagaggagttgagtcttgcggaatgctcgtttctgagaaagaaatgggtatttcagatgaacatgatggaattatagaagtagataggaaacacaaaataggtgaaaaatttagtgaaatatttaaactcgatgaacctgttatagaaataaatttaacaccaaatagatctgattgtttgtctgtaagaggaatagcaagagatttagctgctgcaggaattggaaaactcaaagatttaaaatttaaaataataaatgaaacatttaaaagtccaattaaatggaaaaaagaatttaaagatcaaaatatatgtcctggagtttcagggagatattttaaaaatgtaaaaaatgttgaaagtcctaaatggcttcaagatagattaacagctattggacttcgtccaatatcagctttagttgatattactaattatgtaacttttgatttaggtcgtccgctccatgtttatgatgcggataaaatttctggaaatcttactatgcgtctggcgaataaagatgaagaatgtttagcccttaatgaggtgaattataagtgtagtgaagatatgattgtaatatctgatgataataacaaactccatggtattgggtggtgttatgggaggtcttgat

SEQ ID NO: 301557 - DNA, 858 bp, Unknown
  Bacterial polypeptide expressing nucleotide sequence isolated from the Sargasso Sea
ccacgtaaatgttggaaaaaaagaattggtaaaagttgtttgtggtggaccgaatgcaaaagacaacttattaactatttacgctccaccaggatcggtgatacctaaaaataatatgaaattagaagtttcaaaaataagaggagaaacatcttacggtatgctttgttccgaatcggagctcaacatatcagatgaaagtgaaggtattattgaattaaatcaaaattacaaaaataaaataggcaaaagctattttaaaaataacttagataatgtcctagaactgtcaataactccaaataggccagattgtttaggtataagaggcattgcaagggacctttcagctagtggatttgggaaattaataaataaaaaaagtatcaaaataaaaaaaacttataagcaaagtttaaaagtaaagattgaaaaaagtaaaaatcagtcttgcaaaatatttggtagttgccttattaaaaatataaaaaatcaagaaagtccaaaatggttaaaaaaaagaattatttctttaggtctaagaccaatttcagcagttgttgatgtaacaaactatgtaatgtttgatctaaatagaccacttcatgcctacgatttagataaaataaataaagaaataatagtcagaaattcaaaaaaaggtgaaagttttaaagctttagacaataaggagtacaaattggatgatggtatgtgtgttatttcagaccatgaaggagttttagggttaggaggaataataggtggcataagatctggaacagagctaaatacaaaaaacatcttgttagaatcagcctattttgatcccgaaattaccagaaaaacagcaaaaaa

SEQ ID NO: 301558 - DNA, 812 bp, Unknown
  Bacterial polypeptide expressing nucleotide sequence isolated from the Sargasso Sea
ctaggattagaagtagaaaaaattgaatcatttgaatctataaaaggaggtctagagggagtggttgctggaaaagtaattgaatgtgttaaacatccaaatgctgatagattgaaattaacttcaattgatcttggaaataatgaaatttcagaaatagtttgtggtgcaccaaatatagaaaaagggcaaatggtccctgttgcagtcgttggatcaaaaatatacacaaatgaaggggttgaaataaaaataaaaaagtcaaaaattagaggtgttgttagtaatggaatggtatgtgccgaggacgaaattggattaggtgattcacatgacggcattatggttttagataaaaaaattaaaccaggcactcctttaagtcaaatatttaatgttaatagtgatagtattcttgaaattggtttaacacccaatagatgtgacgctatgtctcattttggcgtagcaagagacttaaaagcatattatgattataaatcaattaaaagtagaattaatcttccatcaataagttcttttgaatcagtaaatattgaggaggattttgatctaatagttgaagataaacataaatgtcctttttactcaggtataattattaaagatattgaagtcaaaaaatcttcagaaagtattcaaaataaattaaaatcaattggtttaaaaccaataaataatattgtagacataacaaattttgtaatgcatgaaataggacaaccacttcatgcatttgactttgatgaattaagtaatattaaaattaaatccttaaaaactgggactaa

SEQ ID NO: 301559 - DNA, 828 bp, Unknown
  Bacterial polypeptide expressing nucleotide sequence isolated from the Sargasso Sea
ccgaggaaagtgaagggattattgaacttaaaaacaaagagaaagaaataggaaaaagctattttaaaagtagctcacaaaaagctatcgatatttctataacccccaaccgtgctgattgtttaggcgttagagggattgcaagagatctttcatctgcaggagttggaaaattaatacccataaatagaaagaaatttaaacaaaatacaaaacaccaaattaaaacatcaattacaaaagaaaagaatcaagggtgtgagatcttcggaagctgttacataaaaaacattactaataaagaaagtccagaatggcttaaaaaaaaattaactgcactaggtctaaaatctatctctgctgtagtggatataacaaactatgtaatgtttgaccttaatagaccattgcatgcttatgatgcagataaaatcaaaaaagaaattatagttagaaacgctaaagaaggtgagatgttcgaggcattagataataaaaaatataaattaaaaaaaaacatgtgtgtcatctctgataaatctggcgttcttgggttaggtggaattattggaggaacatctacctctaccgaattagatacgaaaaatatacttttagaagctgcttattttagcccatcttcaattagaaaaacagctagagtccttaatataaatacagacgctaagtacagatttgaaagaggaattgatcccaactcgattaaagaggggctagaacttgcaattgaactaattttaaaaatttgtggaggggaagttagtaagtttcaaattattgaaagacgaaccaaaaaaataagataat

SEQ ID NO: 301560 - DNA, 758 bp, Unknown
  Bacterial polypeptide expressing nucleotide sequence isolated from the Sargasso Sea
gttgggccacgaaaatgaaatagttaaagatcttatagatattgaaataactccaaatagaggagactgtttatctttatttggtctagctcgcgatttagacaatttttttacattaaaaaaagatattgacttatataacaaagatttagatatttttgattttaattttttaaacctagcaaaagaggattgtcctaagatatcattcttattagttgaagttgaatatctaccaactaattataaaaactatctcgaggaatacttttctgaactcggaattaaaaaaaataacttttttactgatatttcaaattacttatcttacgagcttggacagccaactcattgttatgattacagcaaagtttgcggaggacttcaattaaaaagaataaaagaaaatcaagtatttaaaactatcacaaataaagaaatcaatctgcaagaatcaaacttagtttttaccttaaatgaaactcctataaatcttgcgggtattatgggaggtgcttcaactggctgtttaccagatacaaaaactattcttttagaatgtgcatatttttcatcagaatctataattggaaaatcaacaaaatatgatcttggttctgaagcagcatacaaatttgagagaggtacagatccagaagcaatagagatagcaattaggagatttattaagattgttgaggatcacacaaaaattagagatctaaaaatcttcagagaagataacataaaaaaaactg

SEQ ID NO: 301561 - DNA, 699 bp, Unknown
  Bacterial polypeptide expressing nucleotide sequence isolated from the Sargasso Sea
gatgaaattcacaattgactggttgaaacaacatttagatactaattatagtgatgaaaaaattatagataaattaaccaatattggacttgaggttgagagttttaagagccaatcatctgaatatgatgaattcattattgcaagaatagtaaatgcggaacaacatccaaatgctgatagattaatggtatgcgatgttgatataggtaaagaagaaacagtaaaagtagtttgtggcgctccaaatgcaaaaaaaaatcttctaactgtttatgcgccaccaggttcaataataccaaaaaatcaaactgaattatctgtaactaaaattagaggggtcacctcatatggaatgctttgttcggaagcagaattaaaattatcagacgaaagtgaaggaataactgaattgcctttaaaaaaatataagaattacataggtaaaaaatattttaaaaataataatttaaaagtggttgacctatcaattactccaaatagagctgattgtcttggagtaagaggagttgctagagatctagcagccgcaggtgctggtaaacttaaaaaatataatcagagtaaaataaaattaaaaggaccacaaaaaataaaaataaaaattgctaaagaaaaaaatcaaggatgcgcttcatttggaagctgtttgataaaaggcattaaaaatactgaaag

SEQ ID NO: 301562 - DNA, 211 bp, Unknown
  Bacterial polypeptide expressing nucleotide sequence isolated from the Sargasso Sea
aatggtacatccaaatgtacttaaaaatgttaaagtagatccatcaaaatttcaaggctacgcttttggaattggtatagataggttggcaatgcttaaatatggtattaacgatttaagagcattttttgaaacagactacagatggttaaatcattttggtttcgatcctttagatgtgccctcaagttatagaggattgagtagatga

SEQ ID NO: 301563 - DNA, 819 bp, Unknown
  Bacterial polypeptide expressing nucleotide sequence isolated from the Sargasso Sea
aatgaaatttacgaaagaatggcttaaagaccacctaaaaacaaacaaatccgaattacaaattattgaaaaattaaatcaaacaggtttagaagttgaaaaagttgaaccaataaaaaatgaactaagtgactttgttattgcaaaaatagttaaatcagaaaaacatccaaatgctgatagattaaaattatgtcatgttgatattggaaaaaaagaattagtaaaagttgtttgtggaggcccaaatgcaaaagataatttattaacaatttatgctcctccaggatcagtaatcccaaaaaataagatgaaattagaagtttcgaaaataagaggagaaacttcttatggaatgctttgttctgaatctgaacttaatttatctaatgaaagtgaaggtattattgaattgggtaaaaaatataaaaataaagttgggaaaagttactttgataataattcagataatgtaattgagctatctataactccaaatagaccagattgtttagggattagaggtatcgcacgagatctttccgcaagtggatttggaaaattattagatattaaaaactttaaattaaaaaagaatggtaaacaaaacttaaaggtaaaaatagaaaaaagtaaaaatcaagcttgtaccttatttgggagctgtctaattaaaaatataaaaaacaaacaaagtccacaatggttaaaaaaaagaattatttcattaggcttaagacccatatcggcagtagttgatgtaacaaattatgtgatgtacgatttgaacagacctcttcatgcctatgacgctgataa

SEQ ID NO: 301564 - DNA, 795 bp, Unknown
  Bacterial polypeptide expressing nucleotide sequence isolated from the Sargasso Sea
catgaaatttacatggaaatggttattagatcatctggaaactgataaaaatttatcagagattttggagacactcccaaaacttggtttagaggttgcttcaattgttaatttagcagaggatctaaaaagttttatatccgtagaaatcatagatgtaaaaaaacatcctaatgcagacaaacttaatgtttgtaaagtgtttgacggaaacaatacatttaacgttgtttgtggagctcctaatgtcaagctaggtatgaaaagtgtttttgcaaatgtaggaacatttattcctggtctaaatttaaaattaaagaaaggtaaaattagaggcgaagaatcttttggtatgttatgttcagaaaaagagttaactatatctgaaaatcataacggaatcatcgaactagaaacttcatctgagcttggtttgtcggtttcagatattatggatttaaatgacccaattatagaaatagaaattactcctaatagaggtgattgcttgggtgtaagaggtattgctagagatctagcatcggctgggctgggaaatttaaaggatttagatgttataattaatgacggtgaatttgatagtattataaattggcacgttgatttggatgaagatgaaaaatatctttgtcctaaggtttttggaagatcatttactaatttgaaaaatgatgaatctccattatggcttaaaaacagattaatagctgttgatcagagaccaataagttctattgtagacataactaattatattatgatagacattggaag

SEQ ID NO: 301565 - DNA, 488 bp, Unknown
  Bacterial polypeptide expressing nucleotide sequence isolated from the Sargasso Sea
gatgagtgatttggaaaaaataaattctatttttaacgcaaagatagactctgtaaaatcaaaagaagaattacaaaacttaaagacagagttttttggtaaaaatggtcaaataacaaatcagtttaaaaacctaggatcattatcaccagaagataaaaaagaatttgcttctagtttaaataaattaaaagatagtttgtctaatcaaattttagaaaaaaatttagaaattgaaactaaagaaattaatgaaaaattaaaaagtgaaaaaattgatgtaactttacctataagatcttacagacaaggaaaaattcatcctgtatctcaggtgatagatgaaatttcttctatattttcggaaattggattttctgttgcggaaggacctgatgtagaaacagagtataataattttaccgcacttaatacgcctgaagaccatccagccagggatatgcatgatacttttttatttagaaaaa

SEQ ID NO: 301566 - DNA, 718 bp, Unknown
  Bacterial polypeptide expressing nucleotide sequence isolated from the Sargasso Sea
cccgtcattgaaatcgccatcacgccaaaccgtccggacgcgcttggtatccacgggattgcccgtgatctggcagcgcgtggattggggacgctgaaaaccaccggttacacaccggttgaaggccagtatgagagcccgatcaaggtcaccatcgatgaggacactctggatggttgcccgctgttcacaggccgcatgatccgtggcgtgaaaaacggcccctcgcccaagtggctgcaggaccgactgacggcgattggcctgcgtccgatctctgcgctggtggatatcaccaacttcttcacctttgatcagaaccgcccgctgcatgtttttgatgcggccaaggtcactggcaatctgcgcgtccaccgggcggcgggcggtgaagagctgctggcacttgatgagaaaacctacacgatgcaggcgggccagatggtcatctccgatgacaatggtgccgagagcattgcaggcatcatgggtggtgaagaaaccggctgcaccgacgagactgttgatgtgttccttgagagcgcgttttgggatcacgtccaaatcgcgaccaccggtcgtgcgctcaagatcaactctgatgcccgctacaggtttgagcgcggtgtcgacccggaatacacctacgaagggttggaacgcgcaacgcagatgatccttgatctgtgcggtggcgagccctccaacgttgtgtccg

SEQ ID NO: 301567 - DNA, 492 bp, Unknown
  Bacterial polypeptide expressing nucleotide sequence isolated from the Sargasso Sea
aatgtctgatattaaaaaaataaaagatgattatatcgataagcttaatacagaaaataatgttgataaagtaaataacatcaaatcagaactatttggaaagaatggaattatatctaacgaatttaaaaagttaggctcaatttctgtagaggaaaggaaaaaattagcctcagatttaaataatattaaagacgaacttcaaaataaaatatcaatcaaaattcaagaaatagaaactaaagaaattaacttaaagcttgagaaagaaaaaattgatgtaactcttccggaaagagatattcaaattggtaaaattcacccagtctcccaggtaatagatgaaatttcatctatattttccgagattggatttagtgtggaggaaggtccagatgtagaaaatgaatataataattttacagcattaaatacaccagataatcatccagctagagacatgcatgatactttttatcttgataataataa

SEQ ID NO: 301568 - DNA, 379 bp, Unknown
  Bacterial polypeptide expressing nucleotide sequence isolated from the Sargasso Sea
gatgggcgacaatctttcagatctgtcaaactcagcaatccaagaaataaatgaatgttcatcatcaaatgatctcgagtctataagagtcaaatatcttggtaagaaaggggcagtaacaacggctcttaagtccttatcaaaaatagatcctaaggatcgtccagctcatgggaaaaaaatcaatgaaatcaaaacattgattcaagaaaggctttcggaaagaaaagcaactatacaaaaagaagagatcaatcaaaacattgaaaataaaatgattgatgtcactcttccaggaagagttaattttcaaggccatagacatcctgtaacaaagacacttttagaaattgaagaaatattctatggtgcaggcttt

SEQ ID NO: 301569 - DNA, 877 bp, Unknown
  Bacterial polypeptide expressing nucleotide sequence isolated from the Sargasso Sea
aatgaaatttacaagagattggcttaaagaacacttaaaaacaaataagtctgaagcacaaattattgaaaaattaaatcatacaggtttagaagttgaaaaagttgaacctgtaaaaaatgaattgagtgattttgttgttgcaaaaataattaaatctgaaaagcatccaaatgcggatagattaaaattatgtcacgttgatattggaaaaaaagaattagtaaaagttgtttgtggaggtccaaatgcaaaagaaaatttattaaccgtttatgctccaccaggttcagtaattccaaaaaataatatgaaattagaaatttccaaaataagaggagaaacttcttatggtatgctttgttcagaggcagaacttaatttatcgaatgaaagtgagggtattattgaattaaatcaaaattataaaaaaaaagtaggcaaaaactactttgagagtaattcagataatgtaattgagctatctataactccaaatagaccagattgtttagggattagaggcatagcaagggatctttccgcaagtggatttggaaaattaatagaaaataaaaatattaaaataaaaaagaatggtaaacaaactttaaaagtaaaaatagaaaaaagtaaaaaccaagcatgttccttatttgggagttgtttaattaaaaatataaaaaacaaagaaagtccagattggttaaaagaaagaattatttcattaggtttaagacctatatcagcagtggttgatgtaacaaactatgtgatgtttgacttaaatagacctcttcacgcttatgatgtggataaaataaaaaaaggaataattgtaagaaattctaaaaaaggagaaaaatttaaagctcta

SEQ ID NO: 301570 - DNA, 861 bp, Unknown
  Bacterial polypeptide expressing nucleotide sequence isolated from the Sargasso Sea
catgaagtttacatggcattggttgcttgaccatcttcaaacagacaagaatttaaacgaaatattagaaactttgcctaaactaggcttggaagtcgcctcggtagtgaatctggccgaagatctcaaggaatttattactgcaaaagttctagaggtaaaaaaacatccaaatgctgataaactcaatttatgtaaagtatttgatgggaataatacattcagtgtggtttgtggtgcacctaatgtaaaagctggtatgattggtgtttttgctaatgttgagacgtatgttccaggtataaattcgatattaaaaaaaactaaaattagaggtgagtcttccgagggaatgttatgctcagaaaaagagttaacattatcagataatcatgaaggaatcattgagctcccgaaggattcaaaaattggatttccaattatagatattatggatttaaatgatccaataattgaaatagaaattactcccaacagaggagattgtctaggggtaagaggaattgctagagatttagcagctgctgggatgggtgttttaaaagatttagaagttgtagaaattgaaggtgattttgaaagtataattaattggaaaatagatttaaatgaagataaaaaaaatctttgcccgaaaatatttggtagatcttttcaaaacgtagtcaatgtagattcaccatcttggttaaagaaacgcttattagctgtagatcaacgacctatttcatcgttagttgatataactaattatataatgattgatataggaagacctctacatgcctatgatgcagataaaatagttggaaacacacttacaattaaagaaagcaaaca

SEQ ID NO: 301571 - DNA, 786 bp, Unknown
  Bacterial polypeptide expressing nucleotide sequence isolated from the Sargasso Sea
attaatcttctagttgatttgacaaactatattcttttagaacaaggtcaacctttgcatgcgtttgataaagataaactatcaaacttaattggtaaggaagtttctccagaagatttctctgtaagaaaaggaaaggataacgaaagccttatttgcttagatggtaaagaatatgatttaaatgacaatatcactgttattacttgttgtgatataccggtagctattgctggggtgataggcggtttagagacttctgtaactaatactacctcatctatttaccttgaaggcgctgtttttaatccagtaactataagaaaatcttcaaaggcggttggcatacgaacagaatctagcagcagatatgaaaaagggatttcatccaaaaatacaataagtgcagtaacaagggcaattaatcttttagacgaacatttttctattaattcaccaatcatcaatacttccaatttaataagtaatgaggatatatttattaaactacggagaaatcgaatacataaaattcttggtccattaataattaacgatcaatttgaaaaaagaaatttatctgataatgaaatagttgataaattaacactcataggttgtacattaaagaataaagaatatggctgggatgtagcagtaattcctaatagatctaatgatttaataagagaaatagatttaattgaagaaatagcgagattaatagggtatgacagattcgacttaaaccttcctaatccaattaagcctggaaaattgtcatca

SEQ ID NO: 301572 - DNA, 224 bp, Unknown
  Bacterial polypeptide expressing nucleotide sequence isolated from the Sargasso Sea
tgaaaacaaagggtgccgtctatgtaaaaacacaggttggctagaagtagctggtgctggcatggtacatcctactgttctaatcaatggaggttatgatcctgaaaattggactggttttgcttttggtatgggagtagaaagacctgctctattgaaacacaatatagatgacatacgttacttctataataacgacctcagatttctgcaccaattctaat

SEQ ID NO: 301573 - DNA, 214 bp, Unknown
  Bacterial polypeptide expressing nucleotide sequence isolated from the Sargasso Sea
gttgatattggttatgaattaaaggacggtaaaatagttattggagaaggagataaatggttagaaattttgggttgtgggatggtgcccccaaatgtacttaaaaatgtaaaaataaatccagataagtatcaaggctatgcctttgggattggtatagataggttggccatgcttaagtatggaataaacgatctaagagcttttttcgaga

SEQ ID NO: 301574 - DNA, 880 bp, Unknown
  Bacterial polypeptide expressing nucleotide sequence isolated from the Sargasso Sea
tatgtttatgttgctactgtcggggcgaaattaaatgcagttgatttaactattaaaagaagtgaaattagaggtgtcatgagtgaaggaatgatatgttcacttcaggaactgggtttagaggactctagcgaagggatagagatcattgataatgatttggccctaaaacatgaattgggtactccagggtctgacttgcttcaattaaatgattttatatatgatttagcaattacagctaatagacctgatggaatgtctgttatgggtatagcccgtgaaatttctgcccttttagaatccaccttaaattttccagaattaaaccataaatacaatactcatttacttaagggaattaaactttgtccagaggctgtagaatctaattgcatttatacaataagctgcattgatggagtaaatggagagaaattatctccaaattggcttaaagaccgtatagaaaaatcaggtataaaatctattaatcttctagttgatttgacaaattatattcttttagaacaaggtcaacctttgcatgcgtttgataaagataaactatcaaacttaattggtaaggaagtttctccaaaagatttctctgtaagaaaaggcaagtataacgaaagccttatttgcttagatggtaaagaatatgacttgaattccaatatcacagtaattacttgttgtgataaaccagtagctattgctggggttataggagggttagagacttctgtaagtaatactacctcatctatttatcttgaaggcgctgtttttaatccagttactataagaaaatcttccaaggctgttggcataagaacagaatctagcagcaggtatgaaaaagggattcatcaaa

SEQ ID NO: 301575 - DNA, 397 bp, Unknown
  Bacterial polypeptide expressing nucleotide sequence isolated from the Sargasso Sea
tatggtagacttaaaatcaacgttagttaaatttcttgaggaattttttgaagttaaaaatttacaataccgttttcgtcctagttattttcctttcacagagccaagtgcagaaatggatgttgcctacactaaagttaataataaaataaaaataggagaaggaaatgactggttagaaattttaggttgtggaatggttaaccctgttgtgctagataactgtaaaattgactcaaaaatttaccaaggttttgcatttggtatgggaatagaacgtctctcgatgctaaaatatggcattacagatttaagaagtttttttgatttaaattatagatggttaaatcattatggatttagtgtattagaaaaccagacaaggtcaggactttaa

SEQ ID NO: 301576 - DNA, 629 bp, Unknown
  Bacterial polypeptide expressing nucleotide sequence isolated from the Sargasso Sea
gtgctgcgacgaggggcggagcccagctgctcgagcacagacgatggtttccagcccctccacgccgccgccgctgacggccatgtccctgttgcggagcaccttgttgcgagccggagcagcgcgctgctcatcagctcaaccgacaacgacggctgccagcccctccacatcgctgcttttcgtggccagtgcgctgttgcggagcacctgctgagccggggagcagaggccagttcgaccatgaacgatggccggcagcccctccacgctgccgcccaggagggccatcgcgttgttgcggagcacctgctgagccggggaggagcagaggccagctcgaccatgaacgatggccggcagcccctccacgcggccgcccaggagggccatctcactgttgtggagtacttgctgagccgaggggcggagcccagctctaccagcaacgatggccgacagcccctctacgttgccgccgagagcggtcatgtcactgttcaggagcaccttacgagccggggggcggcggaggccagctcgaccagcaacgatggccgacagcccctctacgttgtcgccgagagcggccatgtcactgttgaggagcaccttgcaagcctggcgac

SEQ ID NO: 301577 - DNA, 322 bp, Unknown
  Bacterial polypeptide expressing nucleotide sequence isolated from the Sargasso Sea
ataaacaatgtagttgatattacaaactatgttatgcatgaaattggtcagccattgcatgcatatgatttagataaaattaaatctggaaaaattgaaattaaaaccttaaataatgaaaaaagtttcataacccttgatggagttgaaattaaagttggcaaagatgatcttatggtttgtgatggagatgtcccaatgtgtatcgctggtgtttatggtggtcaagatcattctgtaaacaatgagactaaaacaatttttttagaaagtgcattttttaatcctgtttcagttagaaaaacatcaaaaaaacataata

SEQ ID NO: 301578 - DNA, 799 bp, Unknown
  Bacterial polypeptide expressing nucleotide sequence isolated from the Sargasso Sea
atgaaatttaccctaagttggcttaaagaacatttagaaacaaaagctaaaattgatgtcattacagataccctaacaaatattggtttagaagttgaaaatattgaagataaagaaaatgattataaagattttactatagctaaagttattagtgcagacaaacatcctaatgctgatagattaaaagtctgtaaagttgaaacttctaaaggaaatgttcaagttgtatgtggcgcacctaatgccaaatcaggtatgtttggcgtatttgcacctagtgatacttatatacctggaactaatattaatcttaaaaaatctgaaataagaggtgtggaatcaaatggaatgttactttcagagagagaattaggaatttcagatgaacatgatggaatagtagagttagaaggaaagcataaaataggtgattctattgcttctatatatggatttgatgatcctgtaatagagataaatttaacccctaatagatcagattgcttatcagttagaggaatagcaagagatcttgtagctgcaggtttaggtactttaaaagaattaaaaattaaaaagataaaaggcagttttaaaagtaatataaagtgggtaaggaaatttaaaaaagatgaagagtatttatgtcctggtgtagcaggtcgattatttaaaaatgttaaaaatagtcaaagtcctgaatggttaaaaagaagattaacacttattggcctaaggccaatcagtgcattagtagatatcactaattatgtaactttcgatctcggccgtccgc

SEQ ID NO: 301579 - DNA, 866 bp, Unknown
  Bacterial polypeptide expressing nucleotide sequence isolated from the Sargasso Sea
ccccaaatttattattgaaagacttaataaatctgatatcgcatccataaatattattgtggatatttctaattatgtaatgctagagattggtcagcctacacatgcattcgacttagacaaaataaatggaaaactcagtatagaaaagcttcagaaaaaaaacaatttcataggcatagacaataaagaatatatagtcgcaaaaggaaccgaagtcatagtagatgagaaaaatataattcatgcgttaccaggtgtaattggaagcaatatttctaaagttgatattgagacaaaaaatatcctttttgagggtgcattttttttaccagatgtagtcagagcattatcaagaaaatatagaatacaaactgattcttcttacagatttgaaagaggtgttgattataacttggccgatttcgctctttcgagagtgcattacttattatctcaagttactgatttagataaatgtaaaattattaagataagccataaacataaactaacaaaaatgaaatcatttgactttgatgctaagctttttaaaagaatattgggaatagacattggtatcaaaaagattaaatctatactcattgatttaggtatatctttcaaagctaaaaaagttatcatcccgagttatagatttgatataacaaataattatgatttagtagaagaagtcagtagaatctatggctttgacaatatacccgaagttccgttagatgctcattacagtaagccatgcaacaagttaaacataaatgaaaaactcgtgacgcttgggtataaagaagttatcaattttaccttcatatctcgtaattacatgaaaaatactagagagtaaa

SEQ ID NO: 301580 - DNA, 597 bp, Unknown
  Bacterial polypeptide expressing nucleotide sequence isolated from the Sargasso Sea
tatggttgattttacaaaactagagcaagaaattacaaattccttatctaaagttacagatttagaaagcttgaatgagtgccgtattaaatatcttggtaaaaaaggagagatctctcttttaatgaaggagcttgctaatctctcaggcgaagatagaaaaaaacaagctgaaatactaaatactcttaaaaataaaacattgagtcttatagaagataagacagaagaactaaacgataggaatttaaatgaaaaactatcctctgagaaactcgatgtaacattaccagtatcaagttctttgggatcaattcaccctataactcaagtcattgaggaagtagtcacaatatttggcgacttagatttttatgttgcagaggggccagaagtcgaaacggactataataatttcactgcgctaaatacatcagaacatcatccggcacggcaaatgcatgatacattttatgtagaaacgcaaacagacaatatgcagaatgtattaagaacgcatacatcacctgtacaaatcaggagtatgcttgagcataaacctcctattagactgattgctcctgggaaaacatttag

SEQ ID NO: 301581 - DNA, 349 bp, Unknown
  Bacterial polypeptide expressing nucleotide sequence isolated from the Sargasso Sea
cgtttcagaccaagttattttccatttactgaaccttctgcagaagttgatataggttgtaaaaaagatgcagatggaagtttatcgataggtagtggagaagactggctagaaattttaggatcaggaatggtccatcctcgtgttcttgaaggagttggaatagacccttcaatatatcaagggtttgcttttggaatgggtttagaaagattaacaatgttaaagtacggtattcctgatttgagaccgttttatgatagtgatctgagatggctgaaacattacggctttattcctgtcgataaccctagtttacactctggtctaaatggtgtttttttatgaa

SEQ ID NO: 301582 - DNA, 268 bp, Unknown
  Bacterial polypeptide expressing nucleotide sequence isolated from the Sargasso Sea
tatgtcaaagcatgctcatttaaagcctcctaaaatcaatcaagataagggtgctcgacatccaattaccactactaagaatttcattcttgatttcttggaggagcttggttttcaagtaattgagggacctgaagttgagacagaaaagtataattttgatttgcttaatataaaaaaacatcaccctgcaagacaaatgcatgatactttttatttaaataataaaacaagtttacttagaacacatacatcaccggttcaaatt

SEQ ID NO: 301583 - DNA, 865 bp, Unknown
  Bacterial polypeptide expressing nucleotide sequence isolated from the Sargasso Sea
ggggaagaaattctagacatctcattgacccccaatcgagctgattgcttcagttataaggggatcatccaagaaatcagtgctttggacaatgcgaaaattaaatatgaagatcttcttaatcctgaaatacatcacaaggaatttatgaatgttgaggttcaatccaaggaagattgtcctgtttttatgactagagtgatcaagtcaataaataaagatgcaaatacaccaaaatggctcaaaaaaagacttgagcaatcaggttataaatcgatcaatgcaattgttgatattgctaattttgtgatgctagaaactggacaacctttacatacttatgacttaaagaagattaatgaaaaaattattgtaagaagagcaaatgacaaagaggccatagatatccttgatggcagtaggaaacttctagattcagattttcttgtcattgctgactcaaaaaaggcattaggtattgcaggtatcatgggaagccttgactcaggaatatctgatgacacagaaaatattgtattagagtcagcctactttaattatgaaacaatcatgggaagagcgaggtcgcttagcttgcacagtgaagcaagcatgaggtttgaaaggggagttgatccaatgatacaggagtatgcgatacagagatttacaagcctaatcaatgaaattgctggaggatcgaatggtcccattcattcatcaatcagtaaaaaagcactgcctaaaaataaattcattactcttagaaaagataagatcaagcaaatattaggcataacaatccctaatcaaactattaagagcatacttaataggcttgatatggagattaaagagaaaggat

SEQ ID NO: 301584 - DNA, 695 bp, Unknown
  Bacterial polypeptide expressing nucleotide sequence isolated from the Sargasso Sea
tatgtttggcgtatttgctcctagtgatacttttatacctggaactaacactaatcttaaaaaatctgaaataagaggtgtagaatcaaatggaatgttactgtcagaaagagaattagggatttcagatgaacatgaaggcataatagagttaacaggtaagcataagataggtgattccattgcttctatatatggatttgatgatcctgtgatagagataaatttaacacctaatagatcagattgcttatcaatcagaggaatagcaagagatttggctgctgcaggtttaggtactttaaaagatttaaaaattaaaaagataaaaggcacttttaaaagcaatattaaatgggtaaggaaatttaaaaaagatgaagagtatttatgtcccggtgtagcaggtcgattatttaaaaatgttaaaaataatcaaagtcctgaatggttaaaaagaagattaacgcttattggtttgagacctatcagtacattagtagatatcactaattatgtaacttttgatcttggtcgtccacttcatgtttatgatgctagtaaattaaatggtaacttggtaatgcgtaaatctcaaaataaagaaaaatgtaaaactttggatgataaggaatatactttatctgatgaaatggttgtcataagtgacgataaatctttgcatggtataggag

SEQ ID NO: 301585 - DNA, 141 bp, Unknown
  Bacterial polypeptide expressing nucleotide sequence isolated from the Sargasso Sea
ttggcttaggagtagagagatttgctatgctaaaatatgggataactgatttaagaatgttttatgagaatgatcatagatggttaaagcattatagttttaggccaacaggttttccaaatactttaaaaggttcataat

SEQ ID NO: 301586 - DNA, 781 bp, Unknown
  Bacterial polypeptide expressing nucleotide sequence isolated from the Sargasso Sea
cctgaagaggcaccagtgggagttttgcttaatgaatatttaggtgatgtaatattacattttgatataaaaggcggattcagtcatttgctttccgttctcggaataggccgagaaattgccgcactgacagaagaaaatttagatcggagtgttatccctgatgtatcaaaaattaaagtggttgaaaaaccgccgtttgttgatttggaaattaatgatccagatatctgttcacgctattctgctttattaatacgtaatgttaaaattacttcatcaccattttggatgcagcagcggctattacgtcttggaatgcgcccaatcaataatattgttgacattaccaattatgtgatgatggaactgggacaaccattacatgcctttgattacgatatgcttatcaaaagggcaaatggtggcaaaccaaaaattatcgtacgtcgggctaaagagggagaacatctgatcacacttgataaaattgaacgcaaacttgacagtgatatgcttatgataactgatcaagtaggccctataggaatcgctggtataatgggcggaggagattcagaagtgagttcaaaaacaaccaatattttgcttgaagcagcaaactttgaatttctaaataatcgacgtacagcacagattcttaaactgcgaacagaagcaagtgagagattcggcaaacaggttgaccctgaaggtacgcttagggcagctttacgggcagcacaattaatggttgaatatggttcagggattctcgaag

SEQ ID NO: 301587 - DNA, 257 bp, Unknown
  Bacterial polypeptide expressing nucleotide sequence isolated from the Sargasso Sea
tgatatttattggggcctaaactctgaggctgatcatagaattacaaagggtacaggttggttggagattctaggctgcggtatggttgatccaaatgttttggaaaattgtaaaattgatcccaaaaaattttccggttatgcatttggtatgggtatcgaaagaattacaatgttattgtatcaaattgaggatattagaacattttacgaaaatgatgttagatttttacaacaatttaaatcctcaatataga

SEQ ID NO: 301588 - DNA, 522 bp, Unknown
  Bacterial polypeptide expressing nucleotide sequence isolated from the Sargasso Sea
aatgtcagatattataaaaattaaagaagaatatttaaataaacttaaaaaaaatttagatctcaactctgttaatcaattaaaatctgagctgtttggaaagaatggaaaaatttcaaatgaatttaaaaagatgggttctatttctgcagaaaacagaaaaaaatttgcctcagatttaaattcaataaaagatgaacttcaaagcttaattgaaaaaaaaattaaggatattgaaattaatgaaattaatttaaaacttcaaaatgaaaaagtagatgttactttacctgaaagaaattttattagaggtaaaatacatcctgtatctcaggtaatagatgaaatatcttcaatattttctgaaataggttttagtattcaagaagggcctgatgttgaaaatgaatacaataattttactgctttaaatacacctgataatcatcccgcaagagatatgcatgacacattctatttggataacgataaagaatttttacttagaactcatacatctcc

SEQ ID NO: 301589 - DNA, 910 bp, Unknown
  Bacterial polypeptide expressing nucleotide sequence isolated from the Sargasso Sea
agaaaagttgtttcagcttggtcatgagcatgaaattgatggcgatatatttgatatggaatttactcctaatagaggagattgtttatctttaattgggttagcaagagatcttaatattttctttggaaaatctgaaaatatagatattttcgaagataatattgaatcattggaaataaattttgaaaataattccccaaatgactgccccaaaatatcttttttagaatttgaagtaaaagaaacagaatacaaatacaagccatacctagaaagatattttaagttagttggcaataatagaaccaatctatttagtgatatttctaattatatttcttatgagttaggtcagccaactcattgctatgatgctgaattaatcaatggcaagttagtttttgaaaataaagagtctaactcttcatttaagacattattgggatcagaaataaaacttgatgatcataattgcgttttctcaataaataatgagattgtcaatttagccggagtgatgggaggaatgtctactgcatgttcacctcactcgaaaagagtattagttgaatgcgcttattttaatccagagtctgtaataggaaagtctgttaaatataatcttatatcagatgctgcatataaatttgaaagaggtgtagatatcgagttgcaggaatatgttctgagaagatttctaaaagttgcatcagagcatgcaaatattaaaaaagctaaaataaagacatttatatcaagaaaccttgaagagaaatttattgaaatagattacaaaaatattaataaaattcttggcacccaattagaaaaggatgaatatctgagctatcttaaaaaactctcttttgatgttaaagataagattaaggtccttcattcaggagcg

SEQ ID NO: 301590 - DNA, 691 bp, Unknown
  Bacterial polypeptide expressing nucleotide sequence isolated from the Sargasso Sea
atgaagttttctttttcatggctaaaagattacctagagacagagttaactgctgatgaagtaggtgacgtccttaccgatactgggttagaagtggagtccataatagacccaaaaatgcgtttgggacaattgtctgtaggagaaatactgaaggtggaaaaacacccaaatgctgacaaattgaaagtttgtcaggttaagtcaagcacaggaatattaaatatagtttgtggtgcaccaaatgttaagaatggtatgaaagtagtagttgcgagaccaggagactttatacctggattaaatgttcacctaaaagcttcaaaaatcagagatgtaaagagtgagggaatgatgtgttcagaaagggaattagaaatttctgatgaacacgatggaattatagaattaccctctgaaacagaagttgggactctgttttctgaattagtaggagatgaaaaaacagtattcgaaattgcaattaccccaaatagacccgatgcattaggtgtttatggaattgccagagatctatcagctagtggtgtcggaaaattacgcattagcgatactcctaacgttgaaggagattttaagtcaaagctaactattgatctagacgcaaaggtatcttcaaaagagtgccccctttttgtaggccgaatattttcgcggtgtagaaaataga

SEQ ID NO: 301591 - DNA, 162 bp, Unknown
  Bacterial polypeptide expressing nucleotide sequence isolated from the Sargasso Sea
ttcaaggctttgctttcgggatgggtatcgataggcttgcgatgctaaagtatgggatgcccgatcttagatcattttttgataatgacatgagatggttaagacattatggctttgcagcagaaagaagttccaatctctatgataaacttagtggataaa

SEQ ID NO: 301592 - DNA, 673 bp, Unknown
  Bacterial polypeptide expressing nucleotide sequence isolated from the Sargasso Sea
atgaaattcacccgtaactggttgtttgatcatttagaaacagatcgttcacttgccgaaattcttgatgtcttgccaatgcttgggcttgaagttgaatcaacggtggatcgtgccgcaacattagcccccttcattattgcggaggtaatttccgcggagcagcatcctaacgccgacaagttgcgtgtgtgcatggtaaatatagggagaggtgatcctattcaagtggtatgtggtgcgccaaatgcgcgttctggaatgaaaggcgttttcgctccggtcggggcgtatgttccaggtattgatttaatgctaaaagttggtgaaattcggggtgagttgtcaaatggcatgttgtgttccgagcgcgaaatggaaatctcagataaccatgatggtattattgatctcgatgatgacgctcccatcggaattccatttgcgacatatgctggccttgatgatccgatgattgaaattgccataaccccaaaccgggcagattgtcttggagtgcgcggcgtggcgcgtgatttggcagcagcaggttatggacgattaaaagacattgacaccagcccacttgagggcagtttcgatagtcctatatcctggcagttggatttaacgcctgcggatgaacatctctgtccaatggtgtctggccgag

SEQ ID NO: 301593 - DNA, 904 bp, Unknown
  Bacterial polypeptide expressing nucleotide sequence isolated from the Sargasso Sea
tggcattagcataagcaatgttactgttaaagaatctcctgtttggttaaaaaacagattaaaatctattgctgtaactccgaagaataatatagttgatgttacaaattacatattacatgaaattggacaacccttgcatgcatttgattcaaaaaaaataaataaaggaataattgtaaaaaaaattaagaaacagaaaaagtttaaaaccctggatggaattgaacgggaattagatcaaaatgacttaatgatttgcgaccataaaaaaccactctgcatagctggagttattggtggagaggaatctgccgttggaaacaaaacaaaagatatttttcttgaaagtgcctgttttaactctatttcagtcagaaaatctgcaaaaaaatttggtttaaatactgatgcctcttttagatttgaaagaggtgttgatcctgaaataggaatttatgcaattaaaagagctgctattcttattcaggaattagctgggggagatttaggtcaaataacttcttttgaaaatgaaaaagataagaaagaagtaattttaaaatttaattatataaataaattagtggggcaaaaaattgaaaaaaaacaaataattcaaattttaacctcactagacatgactatagataaaattggtcaagatgctataaaagttaatattccaagatacagagtagacgtaaatcgtcctgcagatttaattgaagaaatattgagaatttatggatatgacaatattgaaataccaaagaaatttaacagtaattcatatgactatgaatctaataaaatacataatttcaatgacaatatttctcaagttctagtaaatcagggattctatgaaactattagcaactccattagctctccaaaaaat

SEQ ID NO: 301594 - DNA, 798 bp, Unknown
  Bacterial polypeptide expressing nucleotide sequence isolated from the Sargasso Sea
tttgacgctctctggaatcgagtctgagatcgaagaatctaaaggtgaagaaattctcgatatttcattaacacccaatcgtgctgattgtttcagttataaagggattgtgcaagaagtgagtgcattagacaatgctaaaattataagtgttaaacaggctataccagagattcatcacaatctcacaatggaagttgatgttcaatcgaaggaagattgtcctgtttttatgacgagaattataaagtctataaataggaaagcaaagagtcctaaatggctcaaagaaaagctcgatcaatccggatataagtcaataaatgcaattgttgatatagccaattatgtaatgttagaaacgggccaaccacttcacacttacgatttaaaaaagataaaaaaaacaattttagttaggcgagcaaagaaaaaagaagcaattgatattctagacggcagtagaaaaatcttagatccaaactaccttgtcattgccgatttagaaaagccacttggaattgctggaatcatgggaagcttggaatcaggaatatctgaagacacggaagatattgtccttgaatctgcctattttaattttgaaaccattatgggtagagctagggctcttagtctccatagtgaagcaagcatgagatttgagcgaggcgtagacccagcaatacaagagaatgcgattcaaagatttactaacctaatcaatgagattgcaggtggtgagaatggtcagatacatttatccatcaacaagaaagaaatgcctaagaataaatt

SEQ ID NO: 301595 - DNA, 742 bp, Unknown
  Bacterial polypeptide expressing nucleotide sequence isolated from the Sargasso Sea
aaggatcttttgactatttatgctccacctggcgcagtaataccgaagaattcaatgaaaataactataagtaaaataaggggcgtgacctcttatgggatgctttgctcggggtcagaacttaaattatctgatgatagtgatggaattattgatttatcatctaaaaattacaaaaatcttataggtaaaaaatattttaaaagttttaatcaaaaagtcattgatatttctattacaccgaataggccagactgcttaggagtgagaggcattgcaagagatttagctgcatcaggcataggcaaacttaaaaaattaaattctaaaaaaataaaattaattggtaatcaaaatattcctgtaaaaattttaaatgaaaaaaatcaaggctgtatgatatttggcagctgccttatttcaggagtaaaaaataacaaaagccccaaatggcttaaagataaaattatagctctaggtcagaaaccaatttcagcaattgtagacataacaaattatgtaatgttagatttaaatagaccattacatgcttatgatgcagaaaaaatagatactgaaattatagtaagaaattctaaaaaaggagaaacctttcaagcacttgataacaaagaatatacacttgatgatgggatgtgtgtaatttcagacaaatctggagtattaggcttaggtgggattataggtggtgcaagatctggaacagaaattagtacaaaaa

SEQ ID NO: 301596 - DNA, 835 bp, Unknown
  Bacterial polypeptide expressing nucleotide sequence isolated from the Sargasso Sea
gaaaaaaaacatccaaatgcggataaattaaaactatgcaaagttgatattggtaaggaaaaggttgatgtagtttgtggtgcaccaaatgtagaaaaaggcatgaaagtggtttatgcgccagttggctcaactattccggttaatcaaataaaaattaaagctgccaagattagagggatagaatcctatggaatgatgtgttcagaatatgaacttggcatctcaaatgagcatgatggaataattcgacttgaggaaaaagaaactattggaagatctttttcagagatttatggccttaatgatattgtaatagaaattggtatcactcctaatcgacaagattgtctaggtgtaaaaggaattgcccgagatcttgcttcagctggtatgggggaattgttagagagaaaaatatctagagaaaaaggctcctttaaatcaccagttaaaattgaaatacaagataataaaatatgctcggcttttgctggaagatattttagaaatgtaaaaaatactgaaagccccgagtggcttaaaaacaaacttaagtcaataggtttaaggccaatatctgccctggtagatataactaattttgtaatgtatgacgagaaccggccacttcacgtatacgatgcagacaaaataaatggcaaaattatagtacgcgcagcaaatgatggagaaagtttcctagcgctagatgaaaaagattatcacctaaagaatggtatgtgcgtaatagcagatgaaaaaaaagtactaggcttagggggtatcatggggggcgaaagtacaggttgcagcactgagacaaagaacgttt

SEQ ID NO: 301597 - DNA, 742 bp, Unknown
  Bacterial polypeptide expressing nucleotide sequence isolated from the Sargasso Sea
gatgaaatttacaattgattggttgaaagagcatttagtaactaaatttacagatcaaaaaattatagataaactcacgaatgtaggtttggaagtagaaagttttgaaaatcagaaatcggatttagatgaatttttagtagctaaaattattactgctgaaaaacatcctaatgctgatagattaagtttgtgcgatgttgacattggtcaagataaaacagtgaaagtcgtatgtggtgcaccaaatgcaaaaagtaatctgtttacagtatatgcgccaccaggagcagttataccaaaaaaccaaactaaattatcagtaagtaaaataagaggtgtaacttcttacggtatgctttgctccgaatctgaactaaaactgtcagatgaaagtgagggtatcattgatttaccctcaaaacagtattctaaaaaagttggtaaaaaattttttgtaaacagaagtccaaaagtcattgatatctcaattacaccaaatagagctgattgtcttggagttaaaggtgtagcaagagatttagctgctgctggggcaggaaagcttaaaattaaaaaaataagcaaaattaatttttcaggatcacaaaatataaaagttcaaatctcaaaagataaaaatcaaggatgtgcagcttttggaagttgtttaattaaaggaattaaaaataaagaaagtcccaaatggttaaaagataaaataatatcactaggccagaaa

SEQ ID NO: 301598 - DNA, 180 bp, Unknown
  Bacterial polypeptide expressing nucleotide sequence isolated from the Sargasso Sea
aagtaaatccatcaatgtatcaaggttatgcttttgggatcggtatagatagattggcaatgttaaaatatggaattaatgatttacgagctttttttgagactgattatagatggctaaatcattttggatttgaccctcttgatgtgccctcaaactatagaggtttaagtagatgaa

SEQ ID NO: 301599 - DNA, 312 bp, Unknown
  Bacterial polypeptide expressing nucleotide sequence isolated from the Sargasso Sea
aggaccttatctataaaatttgctactcattattcggtgaagaggcaaaattaagattcagaccatcttactttccgtttactgagccatctgcagaggtagatgtcttatttggtgataagtggttagaaatacttggttgtggagtcgttaatccaaaagttttagaaaactgcaaaattgactcaaaaaaatattctggtctggcctttggtcttggaattgaaagaattgccatgctgaaatatgaagtaaatgacattagagatttttataaatctaatctagactttttgaggcaatttaaatgaa

SEQ ID NO: 301600 - DNA, 535 bp, Unknown
  Bacterial polypeptide expressing nucleotide sequence isolated from the Sargasso Sea
atgtcagagataaaaaatattagagatcagttcatatctaggcttgaaaatgatctaagcattgatcaaataaatgaaatcaaaacagagttgtttggtaaaaatggtttaatttcatcaaaatttaaaactataggttcaattccagagactgatagaaaaaaatttgcatcagatttaaatcaagctaaagacgaacttcagaatttgataacctctaaaatcaatgagatagagagaagaaaaataaacgaaaaattagaaaaagaaaaagttgatataactttacccgagagatctttcgttagagggaaagttcacccagtctcacaaactattgatgaaatttcgtctattttctctgaaataggatttagtgttgaagaaggaccagatgttgaaaatgagtataataattttactgctttaaatacaccgaacaatcatccagcaagagatatgcatgatacattttacttagatgaaaacaaagaggtcttgttacgaactcatacttcgccagttcaaatcagaa

SEQ ID NO: 301601 - DNA, 754 bp, Unknown
  Bacterial polypeptide expressing nucleotide sequence isolated from the Sargasso Sea
caattggttgataagcttactgctattggcttggaagtagaagagtatgaagactatgccgcctcatattctgattttagagtagctaaggttgttgatgctgttaagcacgaaaattctgataaattatcgatttgcaaagtagaaaattgtaaaggtgaggtgctgcaaatagtatgtggcgctaaaaatgttagagcgggtataaaaattgctttagcgccgattggcagtattattcctgctaataagatggtaattaaaaaagcgaaagttgcgggtgtcgaaagtcacggtatgatttgctctgctagtgagctaatggttggtgatgatggagatggcataatagaaattgatgataaatacgaagttggaactttaattagcgaaatatacggcttaaatgatgcaataattgatgttaatattactccaaatcgtggtgattgcttaggtgtttatggtattgctagagatttagcagcggctggatttggtgaactgataactccagaggttaatgtagtggaatcgcaatttgcacttgattttaatgctaaaattacagctgataagggctgtgaaatggccctttttagaaagataaaaaatgttaaaaactgccaatctcctgattggttaagaaataaattagaaaaggtaggtatcaattcaatctcggcgattgttgatatcactaattatgtgatgatgtttttaaataggccgatgcacgcttatgatgcagaca

SEQ ID NO: 301602 - DNA, 553 bp, Unknown
  Bacterial polypeptide expressing nucleotide sequence isolated from the Sargasso Sea
ttgatatctgcgatagacaaaggtgcggatgtaaatcaggctgataacagaggagtaacaccacttttgatggcagtgtataatgggcatatagaacctgtggaagcattgatagacaaaggtgcggatgtaaatcaggctgataagataggaataacaccactttggatggcagcgcaagatgggtatatagaacttgtgaaagcattgatagacaaagctgcggatgtaaataaggctgataacagaggaataacaccactttggatggcagcgcaaaatgggcatatagaacttgtgaaagcattgatagacaaaggtgcggatgtaaatcaggctgataacataggaataacaccactttggaaggcagcgcaacatgggcatatagaacttgtgaaagcattgatagacaaaagtgcggatgtaaatatagctgatgaatatggacagacggcactgcacttagctgcaatcaagggtcagacggaacttgtgaaagcattgatagacaaaagtgcggatgtaaatatagctgatgaatatggacaga

SEQ ID NO: 301603 - DNA, 915 bp, Unknown
  Bacterial polypeptide expressing nucleotide sequence isolated from the Sargasso Sea
atcaatgaagtctcagataaattatttcaattaggacatgaacatcaaattgaaaatgatatctttgatttagaaatcactccaaatagaggagattgcctttctctaaacggcatattgaatgatttaaatattttttacaacgtcaataaaaatgataatgtatacgatggagtcattgaagaatttaaatttgattttgagaatctttcaccagaattttgtcaaaaaatctcttttttaaaattagaaataactaaagaagtttcagaatataaaggtaaattaaatgactatttcaatgattttcagctaactaaaaataatttttttactgatgtctcaaattacttgatgtttgagatgggccaaccaactcactgctatgatggagataaaattaaaggaaggattgttttaaaaagaataaatcatgaactaaattttgagacattattgggtaaaacattgaaactaactgaaaacaataatgttttttttattgataaagaccctataaacttagcgggaatcatgggtggcatgaatacttcatgctctcgtgacaccacttcaattttacttgaatgcgcatatttttcacctgatgagataatgggaaagtctttaaaatatgatattaattctgatgctgctcatagatttgaaaggggtgtagatcctcaatctcatgataaagttatcagaagatttatccaaatagttaaagaacatgcagatatagaatctataatgcttttttctgatgaatataatgagtgcaaaccgattaacatacctctagaccataataaaataaataaaattattggtacaaatatctcaaaaagtgaatatattaactttttagatagactaggttttcgaattaacaataattttataacagttcct

SEQ ID NO: 301604 - DNA, 846 bp, Unknown
  Bacterial polypeptide expressing nucleotide sequence isolated from the Sargasso Sea
gatttgttctttagaagaattaggcattgaagattctagtgaaggtattgctattatcgacgaaaagatagccacaaaacatgaattaggttcttcagcagctcaattacttaatttgaatgatttcatttatgatcttgctattactgcaaatagaccagacgggatgtcagtagttggtattgcaagggaaatatcagctctattggaaacgaagttttcctttccagaaataaaaaataattacaaaattgatttaattaaagattttctactctgtcctgaagctattacaaatagttgtctatattcaattagccttattgaatccgtcaatggaatgaaattatctccacaatggctaaaagatcgcttagataaatcaggaattaaatcaatcaatttattagtagacataacaaattatattcttttagaacaaggtcaacctttacatgcatttgataaagataaattaaaaaatttaattggaagagaagttttaccaaaagatttctcagtaagaaaagcaaattctaatgaaagtctcttgtgtttgaatggagaaaattacagtttaaatgaaaagattactgtaatagcttgtgataataaaccagttgcaatagctggtgttatcggagggttagaaacggctgtaaatgaagaaacttcatcaatttatcttgaggcagcagtttttaatcctgtaacgataagaaaatcatcaaaagaaattgggataagaactgaatctagtagtaggtttgaaaaaggtatttcgcataaaaacacattagattcagttaaacgagctataaatattattgaagaatactttaatat

SEQ ID NO: 301605 - DNA, 862 bp, Unknown
  Bacterial polypeptide expressing nucleotide sequence isolated from the Sargasso Sea
gacatcactccaaatcgaggagatgctctgtcactccgagggttggaaagagaattttacgcatatcaatcaaaaaaacctagccgaaaaattgaaacttcatcattaaaacttatccaagataagaaaataattaaccatattgatgtgtctgcttgtggtaattatcacttaatgcttgttaaaggtttacaaaaaataaaaaatttagattctaaaaagcgaggtttcattgaatctgctggcattccattaattaaccctctggttgacctaggcaactatgtgatgttggagcttggtgcgcctatgcatgtgtttgatttagcgaagttagttttaccaattaatgtttgttttcctaaagacaagaataattcattaacagttattggaggcgatgaaaaagatgttcagtcttcttcattaacaattcaggaccaatctgggatccaagcgattgccggcatcataggcagtgagttatcttcggtatcatcaaacactaataaaatagctgttgaagctgcattttttagacccgaggctattgttaatcaagctagaaattatgggctggctactgatgcctctcatcgctttgagcgtggggtagatcctgaattgcagcaattagcattagagagatatctatttctattagatcaaatagcagagtatgattctactgagctttatcattcttgttcccacaagactaaaaggaaaaatgtgaaattagacattgcaagatttaatcaattttctggtttaagcttaaaggcaagcaaagccattcttatattgaaaaaccttggttttaaggtgcatgctaggagtcaaaagaatgtcacattcaata

SEQ ID NO: 301606 - DNA, 899 bp, Unknown
  Bacterial polypeptide expressing nucleotide sequence isolated from the Sargasso Sea
tctgaagattttaaaaaatttactgttgcaaaagttttaaaagctacaaaacatcctgatgcagataaacttagagtttgtcaggttaaaacaattaacggaaattttcaagtggtgtgtggtgctccgaatgcaagggagggcatgcttggaatttttgctccagaaaatagctatattcctggtactgaagtacatttaaaaaaaacaaaaataagaggagttgaatcatgtggaatgcttgtatctgaaagagagatgggtatttctgatgaacatgaaggtattatagaaattaaaagtagttataaaattggtgatcaatttagcaaaatatttaaaatagatgaacctattatagaaataaatttaacacccaatagatcagactgtttatctgtaaggggtatcgcaagggatttggctgctgcaggagttggtaaattaaaagatctaaaatttaaaaaaataaatgaatcttttaaaagtccaatgaaatggaccaaacaattcacagataatagtttatgtcctggtgtatctggtagatactttaaaaatataaaaaatgttgaaagccctcaatggcttcaaaagagattaaaagcaattggattacgaccaatttctgctttagttgacataactaattatgtaacttttgatttaggacgtcctcttcatgtatatgatgccgataaagtaactggaaatttaactatgcgattagctaataacaatgagcaatgcttagcgttaaatgaagtaaattataagtgtagtgacgatatgattgtaatatcagatgatgacaaaaaacttcatggtataggaggtgtgatgggtggattaaatagtgggtgcagtatgaatactaaaaacgtatttcttgaagttgc

SEQ ID NO: 301607 - DNA, 433 bp, Unknown
  Bacterial polypeptide expressing nucleotide sequence isolated from the Sargasso Sea
gatgggcgacaatctttcagatctgtcaaactcagcaatccaagaaataaatgaatgttcatcatcgaatgatcttgaatctatcagagtcaaatatctcggaaagaaaggtaccgtaacagcggctcttaaatccttatcagaaatagatccaagagatcgtccagctcatgggaaaagaatcaatgagattaaaacattgattcaagaaaagctttcagaaagaaaagcatcaatacagaaacaagagatcaatcaaaacattgaaaacaaaatgattgatgtcactcttcctgggagagtaaattttcaaggccatagacatcctgtaacaaagacgctattagaaattgaagaaatattctatggtgcaggctttgttgttgaagatggcccagagatagaagatgagtatcacaatttcactgcttta

SEQ ID NO: 301608 - DNA, 496 bp, Unknown
  Bacterial polypeptide expressing nucleotide sequence isolated from the Sargasso Sea
atggatgatattgagtccttgcttgcagaggcattgcaggcgattaccgattcaaaggatgaagagtcgctggatgagctgcgtgtaaattatctaggaaaaaaaggcaccttcacgaccttgttgaaatctctgggtcagctcccgtcacaagacaggccagctgcaggggaatctatcaatattgctaagcgcgagttacaagaggcgctagaccttcgtaagacttgcttacttgaggaaagtttagaggagaaattaagatctgaaaggatagatgtttccttacccggccggcgaaagaataggggtggactgcatccaataactactactatcgatcgtataaccgacatttttgctactgcaggatacgaaattgcgattggtcccgaaatcgaggacgattatcataattttgaagcattaaatattcccgcgcaccacccggcgagagcgatgcatgatacattttatgtaaatgaggatcattgtt

SEQ ID NO: 301609 - DNA, 871 bp, Unknown
  Bacterial polypeptide expressing nucleotide sequence isolated from the Sargasso Sea
gtggaatcagttaaccagcatcctaacgctgatcgtctgtccatctgcgaagtgaacaacggaaaagatattctacaagttgtgtgtggagctgaggtgatacacgtcggggggcattatccatttgcaggcgtgggtgtgactttgccagatggcctgaaactcaaaagagtgaagattcgtggtgaatattccaacgggatgctctgttctgagaaagagcttggtttggggccagatcaacaggggatcatgcatttaaagggcaaggttcatcttggtcagattcttacggaagccttagcgatagatgacgtatgtttagatgtagaggtgactcccaatcggggagacttgctttctcatttaggtgtggccagggaattggccccaggtggagacagggagattgtgttgcctgaaatcccgggtgctcctgtgtttgattttgaagtcaaaaccgaacaatcggaggtcagtcatgctgaagtcagtatacgcattgatgaacctgagttatgtcagcgattcctcggtgtcattgttcgtggcctgaaggtagggccttctccagaatggttagttagccggctgcattcagtaggccaaaaatcaataaataatgttgtcgatgctacaaactatgtgatgctagagatggggaatcccatgcatgcatacgacctaaaaaaactagaagggtctcagttgatagttcgaagagctaaggatggggaaacgatacaggctttggatggtttggattatgaactcaacaacatgggggggacaatgttattgatttctgacgtgtctgcctcacaaaatattgctggcatcgtgggtgggatgcagtcagcggtaactgaag

SEQ ID NO: 301610 - DNA, 235 bp, Unknown
  Bacterial polypeptide expressing nucleotide sequence isolated from the Sargasso Sea
tggcttgaaattttaggctgtggcatggtgcatcctaatgttttaagaaacgtaaaagtagacccttctaaatatcaaggatatgcctttggcataggtatagaccgattagcgatgctaaaatacggcattaatgatttaagagcgttttttgattgtgactacagatggttaaatcattttggttttgatccacttgatgttccttcaaattacagaggtttaagcagatgaa

SEQ ID NO: 301611 - DNA, 689 bp, Unknown
  Bacterial polypeptide expressing nucleotide sequence isolated from the Sargasso Sea
aatgcagcttggacatgaaaacgaagttgatggcaatattgttgatcttgaaataacacctaatcgaggagattgtctctcactttatggaatttcacgagagcttaagaatttttatgacatcaatacaaatcttgagatttttgaatcccatatagagaaattagaatttgactttatcaatcaagtagaggataagtgcgagagaatagcctttcttgaattagaggttgagaacttgccaaccaaatataaaccatatttagaaagctactttaccgatttagatgttaaaagaaataatttttttacagatatatcaaattatatttcttatgaacttggccaacccactcattgctatgatgcagataaacttggaacaaagcttattcttgaagaacttaaagatcaatctagcttcacaacactctctaacaaagaaataactctcagcccaaaggatttagttttctcaaatgggactgagattttaaatttggctggtatcatgggaggtatttcttcatcttgtagcactaatactaaaaaggttttaatagaatgcgcatattttcatccccccttcataattggaaaatctattaaatatgatcttaattcggatgctgcatataaatttgaaagaggtgtagatccattattgttagaaacgtcattaaggcgtt

SEQ ID NO: 301612 - DNA, 883 bp, Unknown
  Bacterial polypeptide expressing nucleotide sequence isolated from the Sargasso Sea
tttaggtgaagatgcttcaaacatattaggaatagatgatccagtaattgaaatagaaattacacctaatagaggggattgtcttggtgttagaggagtagcaagggatttatcagcttatggattagggaatttaaaaaaaatatccttatgtgaagaaaaaggtgattttgaaactttggtaaagtggaatttaaatttacctggtaataaatcagatttatgtaataaaatttatggcagaacatttacaaacttaaaaaatttttcatcccctatttggatgaaaaatagacttcaatcaatcggtttaaggccaatctcacccttggtagatattactaattatattatgatagatattggaagaccacttcatgcatatgacattaaaaaaatttcagggaacactttgacagtaagacttgcgaagactggtgagaagtttgaggctttgaatggtaaagtctatgatttaaataatgaaatgctagtcatttcagatgaacatggacctgatgaccttgcaggtataatgggaggaaaaagaactggtgtagatgaaaacactacagaaatgtttttagaatccgcaatatttttgccaaattctgtgtcaaatactgggagaaaattaaatataaatagtgatgctagatatagatttgaaagaggtctagattttaattcgcctgaattcggaataaaatatgcttcaaattttatacaacaaatttgtggtggtaagatgagttttattactttcgaaacaactgatattaaattaagagaaatagactttagtacagatgtagtcaaaaggttaataggtattgaaattgaagaaaatagaatattacaaattttaaatgatttaggattc

SEQ ID NO: 301613 - DNA, 727 bp, Unknown
  Bacterial polypeptide expressing nucleotide sequence isolated from the Sargasso Sea
actcttccttggttaaaagaacatttaaaaactaaagcgaacgaaaaagagataattaatacactaacaaatataggtctagaggtagagcgcacaaaagagagcaaaagtgaattaaatgatttcaaaattgcaaaaattattaaagttgaaaaacatcctaatgcggataaacttaaaatttgtgacgtaaacattggtggaacagaaaaaataaaagtagtttgcggagcaccaaatgctagagatggtcttataacaatttatgcccctccaggtgctactattcccaaaacaaaattacaattaaaagtagccaaaattaggggcgtagagtcaaaaggaatgttatgttccgagagcgaattaaaactatcagaagaaagtgaaggtataatagaattaaataatagggagaaagaagttggaaaatcttattttaaaagcaagtcagaaaaaattattgatatttcaattacccctaatagagccgattgtttaggggtaagaggcatagctagagatctatcttcttctggaattggaaaattaattccaattaaaaagaaaaaattaaaaaaaaattcaaaacatttaacaaaaatatcaatttctaaagatcccaaccaaggctgtattacctttggaagttgttacataaaagatataaaaaataaagaaagtcctgaatggctaaaaaataaaattattgcattagggttaaagc

SEQ ID NO: 301614 - DNA, 340 bp, Unknown
  Bacterial polypeptide expressing nucleotide sequence isolated from the Sargasso Sea
atgattctatattttactaattcaatgtttggaaagtccaagttaaggtttagaccttccttttttccgttcactgaaccaagtgcagaagttgatatctactggggactagaaactgaaacagattatagaattacaaagggtacaggttggcttgaaattatgggttgtggtatggtagatccgcaggttctggaaaattgtaatattgattctgaaaaatatactggttatgcgtttggcttaggtattgagagaattgctatgttaatctaccaaatccccgacattaggctattctttgagaatgacgttagatttttaaatcagtttaaataat

SEQ ID NO: 301615 - DNA, 850 bp, Unknown
  Bacterial polypeptide expressing nucleotide sequence isolated from the Sargasso Sea
ataattccaaaaaacggaatgaaattagaagtatcaaaaattataggagagacttcttatggaatgctttgttctgagtcagaattaaaattatctaaagaatctgagggaataattgaattaggtcaaaaatttaatcgtagtattggtgaaccctattttaagaataaaaataataataatgttatagaattatctgttacaccaaatagaccagattgtttgggcataagaggaatcgctagagatttatttgcgagtggttatggagatttaaaagaaattaaaaatgtaaaatttaagaaaaccttaaaacataatttaaaagtaaaaatagaaaaaaataaaagtcaagcttgctcaatatttggcagttgtttaattaaaaatataacaaataaagaaagtccaagttggttaaaggaaagaattttagcattaggcttaagaccaatctcagcagttgtagatgttacaaattatgtaatgtttgaccttaatagaccactccatgcatatgatttagataaaataaaaaattcaattatagtaagaaattcaaaaaaaggcgaaatactcaaagctcttgacaacaaaacttacacacttaaagaaaatatgtgtgttatagctgatgatgaaggtcctctaggcctaggaggtataatcggtggagttagatctggaactgaaataaatactaaaaatatattaattgaatctgcttattttgatcctggcattacaagaaaaacagcaaaagcattacaggtaaatagtgatgcaaaatatagatttgaaagaggaatagatcctcaatcagttaaagaaggacttgtaatggccgcta

SEQ ID NO: 301616 - DNA, 912 bp, Unknown
  Bacterial polypeptide expressing nucleotide sequence isolated from the Sargasso Sea
agatggaacatttcaagtagtgtgtggtgcacctaatgcacgagaaggaatgaagggtatatttgcaccggagaatagttttattcctggcacaggagtgaaattaaaaaaatctaaaattagaggagtagaatcatgcggcatgcttgtttcagagagagaaatgggaatatccgatgaacatgacggcataattgaagttgactcaaaacatccattgggagaaaaatttatagaagtatttaatcttgatgaccctgttattgaaataaacattacaccaaatagaggagactgtctttctattagaggtgttgcaagagatttagcagcagcaggattaggaaagttaagagaaaatacattaattaaaaatattgaaggtacatttgatagtcctgttaagtgggaaaaagatttcagtggagatatggaacatatttgtcctggtgtagcaggaagatatttcaaaaatctgaccaataaagaaagcccagtttggttgcagcagcgcttaaaggctattggcctaagaccaatttctgcccttgttgatatcactaactacatcacttatgatttaggaagacctttacatgtgtatgatgctgacaagattaacggtaatttaaaaatgcgtttcgcaaaagaaaatgaagactgccttactcttgatgaagaaaaacgtgagtgtacaaaaaatatgatcgttatctctgatgataaccaacttcatggtattggtggagtaatgggaggtttggatagtggttgtagctttgatactaaaaatgtttttcttgaagttgctttatttgatcccatttctgtaacaaaaacaggaaggcaccttaaactacaaagtgatgcaagatataggtttgagagaggtatagaccctacttcattaga

SEQ ID NO: 301617 - DNA, 304 bp, Unknown
  Bacterial polypeptide expressing nucleotide sequence isolated from the Sargasso Sea
accatcagcagaagttgatataggatacgagataaaagatgaaaaaattataattggagagggtgataagtggcttgaaattttaggctgtggaatggttcaccctaatgtattaaaaaatgtaaaagttgatccaacgaaatttcaaggttatgcatttggaataggtattgataggctagcaatgcttaaatatggcattaatgatttaagagcttttttcgattgtgattatagatggttgaatcattttggatttgatcctctagatgtgcctacaaactatagaggattgagcagatga

SEQ ID NO: 301618 - DNA, 922 bp, Unknown
  Bacterial polypeptide expressing nucleotide sequence isolated from the Sargasso Sea
gggggaagaaattctcgatatctcattgacccccaatcgagctgattgcttcagttataagggggtcatccaagaaatcagtgctttggataatgcgaagattaaatatgaagatcttcttgatcctgaaatacatcacaaggaatgtatgaaagttgaggttcaatccaaggaagactgtcctgtttttatgactagagtgatcaagtcaataaatagagatacaaaaacaccaaaatggctcaaaaaaagacttgagcaatctggttataaatcgatcaacgcaattgttgatattgctaattttgtgatgctagaaactggacaacctttacatacttatgacttaaagaagatcaatgaaaaaattattgtaagaagagcgcatgacaaagagcccatagatatccttgacggcagtagaaaacttctagattcaaattttcttgttattgctgattcaaaaaatgcattaggtattgctggtatcatgggaagccttgactcaggaatatctgatgacacagaaaacattgtattagagtcagcctattttaattatgaaacaatcatgggaagagcgaggtcgcttagcttgcatagtgaggcgagcatgaggtttgaaaggggagttgacccaaagatacaggagtatgcgatacagagatttacaagcctgatcaatgaaattgctggaggattgaatggtccaattcatgcatcaatcagtaaaaaagcactccctaaaaataaattcattactcttagaaaagataagatcaaacaaatattaggtataacaatccctaatcaaaccattaagaacatacttaataggcttgatatggagattaaggaaaaggattttggttatattggatggagtgtgaaggcaccaagttatcgattcgatattaacgaa

SEQ ID NO: 301619 - DNA, 244 bp, Unknown
  Bacterial polypeptide expressing nucleotide sequence isolated from the Sargasso Sea
ggagataaatggcttgagatcttaggttgtggaatggttcatcctaatgttttaaaaaatgtaaaagttgatccatcaaaatttcaagggtatgcatttggtatcggcatcgatagattagctatgctaaaatatggaattaatgatttgagatcgttctttgattgtgactatagatggttaaatcattttggatttgaccctttagatgtaccaacaaattatagaggcttaagtagatgaa

SEQ ID NO: 301620 - DNA, 372 bp, Unknown
  Bacterial polypeptide expressing nucleotide sequence isolated from the Sargasso Sea
taggcttagatgggtctattttcgttttcgagctgagtttagacgttttgcagaatggtatgctccccagagcacaagctctctctaaatttccagaggtgagtcgggatttagcaattgttgttagttcagaggttcctgctgcagaaatccttgcaaatgttcgacaaaatgcaggtgattaccttagtaattttagaatatttgatgtatatcaaggagatggagtcgaaaaaggtaaaaaaagtattgctttgggcttgacgtggcaacatccttcgcgcactcttagtgacgatgaaataaacaagattattagtagttgcgtcaaaggactacatgaacaatttaatgccaatttgcgagattaac

SEQ ID NO: 301621 - DNA, 145 bp, Unknown
  Bacterial polypeptide expressing nucleotide sequence isolated from the Sargasso Sea
ggaataggaatagatcgtttggctatgttaaaatatggaataaatgatttaagatctttttttgagtgtgattatcgttggctaaatcattatggctttgatccaatagatgttccaacaaattatagaggattaagtagatgaa

SEQ ID NO: 301622 - DNA, 856 bp, Unknown
  Bacterial polypeptide expressing nucleotide sequence isolated from the Sargasso Sea
actaatattggcttagaggttgagagtgtaaaaaaaaactcaggagaactaagtgaattcaaaatagctaaaatcattaaggctgtgaaacatcccaacgcagataaattaaaagtttgcgatgtaaacattggcggaaaagaaactttaaaagttgtctgtggagcaccaaacgcaagagatggccttgtaacaatttacgctcctccaggagctataatacccaaaacaaagtttcaattaaaaattgccaaaataagaggtgttgaatcttggggaatgctatgctctgaaagcgaacttaatttatcagatgaaagagatggaataatagaattaaatgtcaaggaaaaggaaataggaaaaagttattttaaaagtaaatcagaaaaagtaatcgatattgcaattactcctaatagaccagattgtttgggtataagaggtatagcaagagatttatcctctactggaataggtaaattaataactttaaaaagaaaaaaaataaaacaaagcgctaagcatcacgttaagacttcaataactaaagataagcatcaaggatgtcagacatttggaagttgctatattaaaaatatagttaataaagagagtccagagtggttaaaaaataaaattcatgctcttggcctaaaaccaatttctgctgttgtagatataactaattatgtgatgtttgatttgaaccgcccattacatgcttacgacgcagataaaattgatagagaaattattgttagagactcaaaagaaggtgaagagtttgaagctttagataataaaaaatacaaacttaaaaaaggcatgtgtgttattactgataagtccagcg

SEQ ID NO: 301623 - DNA, 313 bp, Unknown
  Bacterial polypeptide expressing nucleotide sequence isolated from the Sargasso Sea
tttactgaaccatcagcagaagtagatattggatataaaattcaagatggaaaaattagtataggcgaaggagacaaatggttagaaatccttggttgcggaatggtgcaccctaatgttctaaaaaatgtaaaagtaaatccacaacaatatcaggggtatgcgtttggtgtaggaattgatcgattagctatgctgaaatatggaataaatgacctgagagctttttttgaaagtgatattagatggttagaattttatggatttgatccactcgatgttccaacaaattacagaggtctaagtagatgat

SEQ ID NO: 301624 - DNA, 757 bp, Unknown
  Bacterial polypeptide expressing nucleotide sequence isolated from the Sargasso Sea
atgaaagttgcatataaacacttaataagctgcatcccatctaaacctaatattgatgagatctctgagagattttttcagcttggacatgagcatgaaatagaagatgaaatttttaacatggaacttaccccaaacagaggagattgtttatccgtccatggtttggttagagatctagcccctttttatgaaatagatttaactagtgatatttatgaaaaggaattaaaagaattagaactaggttttgttaatcatgctccagaagcatgttcccatatttcatttttaaaaatagaaatagaaggtgaaatagctgcatatagaggaaaacttaaagaatattttaaagatttaagtattaataaaaataatttctttacggatatctctaactatatttcatatgagatgggtcaaccaactcattgctatgatgcaaaaaaaattagtaatttgttttcattagaaatcatagaagaagacaaaaagtttcatactttgctagaaaaagaggtagttataaaaggcaggaatcttgtatttttagaggatggaaatgtaataaatcttgctggagtcatgggaggtaaaagcacctcatgctcaactaatacgaaatcagttattatcgaatgcgctcattttaatcctgaagaaattataggtaaatctgttaaatatgatatcaagtcagatgctgctcacaaattaaaagaggtatcgatccactttgtcatgaagaggttctaag

SEQ ID NO: 301625 - DNA, 101 bp, Unknown
  Bacterial polypeptide expressing nucleotide sequence isolated from the Sargasso Sea
tggtttaggcgtagaaagaatagctatgctgaaatatggagttaatgatataagggacttttacaagtctaatttagattttttaaatcaatttaaatgaa

SEQ ID NO: 301626 - DNA, 565 bp, Unknown
  Bacterial polypeptide expressing nucleotide sequence isolated from the Sargasso Sea
atgcaagattacgataagcttaaaaatgaagttctgattaaaattaaagaagctaatagtttagatgatttggaaagtcttcgtgttcaagttttagggaaaaagggatctataacttctcttatgaaacaacttggttcattggaacctgataaaagacgagaagctgggcagatactcaacagtcttcagaagaatataatagtatccatagataataaaaaatcctctcttgaagaaacttatttaaatcaaaagcttaaaaatgaggctttagatattacacttcccacaagacctgaaaatattggcagaatacacccattgtctaaaactatggatgaggttgtttctatatttgctcagatgggcttcactgttgcagaagggccagatattgaaagtgatttctataattttactgcattaaatattcctcaagaacatcctgcaaggcaagaacatgatactttttattttaatgaagatgaaaatggtgagagaaaagttttaagaactcatactagtcctgttcagataagaacaatggaaaaattaaagccac

SEQ ID NO: 301627 - DNA, 353 bp, Unknown
  Bacterial polypeptide expressing nucleotide sequence isolated from the Sargasso Sea
catgcgcgtatcgctgcagtggcttcgggaattggttcccttccgcagtgacgtcgacagcctggctgagcagctttcgatggctggctttgaggtcgaggagcaggacgacctcgcggcccgtgcggcaggcgttgtggtgggcaaggtgctcagcaaaaccccccaccccgacgccaacaagctgaatgtttgttcggtctcggttggcgctggggccgagcccctacaaatcgtttgcggcgcagccaatgtccgtgagggcatggctgtggcggtggccaccgttggcagccatttgccggcggtggatctgacgatcaaaccggccaagctccgcggcgttgaaagct

SEQ ID NO: 301628 - DNA, 775 bp, Unknown
  Bacterial polypeptide expressing nucleotide sequence isolated from the Sargasso Sea
aatgaaatttactctagactggctaaaagatcatttagatacttctgagaatttaaataccataacagatactttaaccaatattggtttagagattgaaagtgtagaagataaatcagaaatatttaagaattttacagtagctaaagttttaaaagcagaaaaacatccagatgcagataagcttaaagtatgtcaggttgaaacaataaatggaaattatcaagttgtgtgtggtgctccaaatgcaagagaaggcatgcttggaatttttgcaccagaaaatagtttcattcctggaactgacttacatttaaaaaaaactaaaattagaggagttgagtcttgcggaatgcttgtctcagaaagagagatgggtatttctgatgaacacgatggaattattgaagtaaaagataattataaaattggtgatttatttagtaaaatttttgtaatagatgaacctattattgaaattaatttaacaccaaatagatctgactgtttatcggtcagaggtatcgcaagagatctagcagcagcaggaattggtaaattaaaagacttaaattataaaaaatcgaaagaatcattcaaaagcccaattatgtggaaaaaagaatttcaaaataataatctatgtcctggagtagccggtcgatattttaaaaatgtcaaaaatgtagaaagccctaaatggcttcaaggtagattaactgcaatcggattaagacccatttcagctcttgttgacattacaaattatattgct

SEQ ID NO: 301629 - DNA, 874 bp, Unknown
  Bacterial polypeptide expressing nucleotide sequence isolated from the Sargasso Sea
gttaatattgctgattcatccttatgtcatcgattttgtggcttgattattaaagatgtaaaaattaaaccctctacaaaaaaaattattaataagttaaattcaattggattaaaatcaatcaataatattgttgatattaccaatttagttatgcatgaagttggacaacccctacatgcatatgatttagataaaattaaatctggtaaagttgaaattaaaagattaaaatccggtgtaaaatttaaaactctagatggagatgatattgatcttcataaggatgacctaatgatttgtgatggtaacactccaatgtgtatagcaggagtatatggtggaaaaaatcattcagtttcagaaaatacaacaacaatttttttagagagtgccttttttaatccaattactgttcgaaaaacttctaaaagacacaatataaacactgattcttcatataggttcgaaagaggtgttgatattgaattgttagaacattctttaaaaagagctgcctccctaattgttgaggattgtaatgctgaaattatatgtgatataattgatgaatatccaaataaaagcgatgaaaaaaatgtggttattaattttaaaaaaattaatagtcttattggtcatgaaattgataaattaaaaattaaatcaattcttaattcacttgattttaaaattaataatgttaatgatatttcagctggagttacgattccgcaatatagacatgatgttaacagggaatgtgatgttgtggaggaaatattaagaattcatggttataataatataccaattgataaaaatgtaaagttttcaatttcatcattacttaataagacacataaatatcaaa

SEQ ID NO: 301630 - DNA, 310 bp, Unknown
  Bacterial polypeptide expressing nucleotide sequence isolated from the Sargasso Sea
atgggcgacaatctttcagatctgtcaaactcagcaatccaagaaatcaatgaatgttcaacatcgaatgatcttgaatctatcagagtcaaatatcttgggaagaaagggaccgtaacagcggctcttaagtccttatcgaaaatagatccgaaagatcgtccagctcatgggaaaagaatcaatgagataaaaaaattgattcaagaaaaactctcagaaagaaaagcctcaatacaaaaacaagagatcaatcaaaacatcgaaaacaaaataattgacgtcactcttcctggaagaggaaattttc

SEQ ID NO: 301631 - DNA, 172 bp, Unknown
  Bacterial polypeptide expressing nucleotide sequence isolated from the Sargasso Sea
gggtgccggtatggttcacccgcacgtgctaaggcgtgccggctacgatcccgagcgttacagcggcttcgctgcgggtatgggggtcgaacgagtggcgatgttgaagcatgggatcgacgacattcgtcatttctacgccaatgacatgcgcttcctaagccagttctaa

SEQ ID NO: 301632 - DNA, 460 bp, Unknown
  Bacterial polypeptide expressing nucleotide sequence isolated from the Sargasso Sea
caccagatcgaggccctcgtcatcgacaagggcatcacgctcggtcacctgaaatggacgctggaaaccttcctcaaggctttcttcgaacgcgaagacatagtcctgcgcctgcgccccagctatttccccttcaccgaaccctcggtcgaggtcgatgtcggctatacgctcaccaatggccagcgcgtcatcggcggcgacggcgatgcgcccgatggcggctggctcgaagtgctgggcagcggcatggtcaatcgccgcgtgatcgaaagctgtggcctgaaccccgacgaatggcagggcttcgccttcggcaccggggtcgaccggcttgccatgctcaaatatgggatgaacgacttgcgtgccttcttcgacggcgacctgcgctggctcaaacattatggcttctccgcgctcgacgtgcccacgctcagcggaggagtaggcgcatgaa

SEQ ID NO: 301633 - DNA, 457 bp, Unknown
  Bacterial polypeptide expressing nucleotide sequence isolated from the Sargasso Sea
atgacagatttacgagaattaattttaaagatatcacaggcaaaagacaagctagagctacaaaattttaaaactcaatttcttggaaaaaatagccaaataaatcaagaatttaaaaaactaggttccttatctgaagacgaaagaaaaataaaagcatcttctctgaataaagaaaaacaaaaaattactgaagccataaacaatagattcaaggatttagaaaaatctgaaattagtcagaaacttcaaaaaaataaagttgacgttacacttccaggtcgtgagcaacctaatggtaaaatacatccagtctcacaagtaattgatgagatttcttcaattttttcagagataggtttttcagttgctgaaggtccggatgtagaaactgagtataataattttacagctttaaatactccagagagtcatcctgcaagagatatgcacgata

SEQ ID NO: 301634 - DNA, 892 bp, Unknown
  Bacterial polypeptide expressing nucleotide sequence isolated from the Sargasso Sea
aattactccaaatagagctgattgtctgggagtaagaggagttgctagagatttggcagcggcaggtgctggaaaacttaaagaatataatcataataaaataaaatttaaaggaaaccaaaaaataaaagtaaaaattactaaagaaaaaaatcaaggatgtacaaagtttggaagttgtttaattaagggaattaaaaatgtcgaaagtccaaaatggttaagagataagattttagcattaggtcaaaaaccaatctcagcaatagtagatataacaaattatgtaatgtttgacctaaatagacctctacatgcttacgatgctgataaaattaatgaaggtattattgttaggaattcaaaaaaaggcgaaagctttgaagcattagataaaaagaagtatacgcttcaagataatatgtgtgtaatatcagatacatcaggagttttaggtcttggtggaataataggcggaactagatctggaactgagctagatacaaaaaatgttttattagagtctgcatattttaatccaacatctataagaaaaacttctaaaatattaaacatagatacagatgcaaaattcagatttgaaagaggaattgatccagattcaattgaagaaggaatatttaaagcagccacattaatacaaaaaatatgtggtggtgaaattagtaaattagacgttcaatcaaataagtcttttaaaaaaataacaataaaattccctataaatttatttcaaagcattacaggctttaaagtttctgaaaaggaaataatcaaaatcttaactgacttaggatttaatataaaaaaaaagaataataatctaaatttaatacccccttctggaggccagatgtactgcaaccaatag

SEQ ID NO: 301635 - DNA, 671 bp, Unknown
  Bacterial polypeptide expressing nucleotide sequence isolated from the Sargasso Sea
agataatttattaactatttatgcgccaccaggatcagtaataccaaaaaacaaaatgaaattagaagtggcaaaaataagaggagaaacttcttatggaatgctttgttcagaatctgaactaaaattatcaaatgaaagcaagggtataattgaattaagtcaaaattataaaaaaaaaataggacaaaaatattttcaaagtaattcaaaaaatgtaattgaattatcaattacaccaaatagaccagactgcttaggtattagaggaatcgcaagagatctttcagcaagtggctttggtaaattaaaagaaaataaaactggtaaaataaaaaagtcgggcaagcaaaatataaaagtgaagatagaaaagggaaaaaatcaagcttgcacaatatttggaagttgtttgataagaaatattagcaataaagaaagtccggaatggttaaaaagaagaataatgtccttaggtttaagacctatttcagcagtagtcgatattacaaattatgtaatgtttgatttaaacagacctctgcatgcctatgatgttgataaaattaacaaaggcataatcgtaagaaattcaaaaaaaggagaaaattttaaagctctagacaataaacactacacattgaacgcatggtatgtgtgttatttctgat

SEQ ID NO: 301636 - DNA, 634 bp, Unknown
  Bacterial polypeptide expressing nucleotide sequence isolated from the Sargasso Sea
aatgtctgacattaaagatatcgaaaataatatattagacgatatatctaaggctaattcatcggacgatttgcaagaaattaaaataagagagttaggaaaaaaaggtcgtatctctcttttaatgaaatctttatctaaagttagtaatgatgaaaaaaaggttttaggaaaaagttataatgagttacgcataactatattaaaagcctttgaactgaaagaaaaagacattaaagatgaagatataataaatagaataaaaactgaaaaattagatgttactcttccaactagacctggagaaaataatgatgaaggaaaaaatcatccaataagtagaacaattgacaatataatagatatattttcaaattttaattttacagttgaaacaggcccagatatagaaaacgattttaacaactttacagcattaaatattcctgatgatcatccagcaagacaagatcatgacacattttatgtaaaaaataaaaatattgaagacagaaaactactaagaactcatacttctcctgttcaaatacgtactatgataaataaagtgccgccaataagaattattgcaccgggtagaacttttagatgtgacgatgatgcaacgcactca

SEQ ID NO: 301637 - DNA, 640 bp, Unknown
  Bacterial polypeptide expressing nucleotide sequence isolated from the Sargasso Sea
atgataattactattccatggttaaaagagcacctaaaaactaaagcaaatgagagtgaaattatagataaacttacaaatattgggttagaggttgaagggataaaagaaaactcgggtgtgttaagcgacttcaagatagcaaaaattatcaaggttgaaaaacatcctaatgcagataaattaaaaatttgtcaagtaagtgttggaggaaaagaaaatttaagagtagtctgtggagccgcaaatgcaagagaaggtttagtaacaatttatgctccacctggagccataatacctaaaacaaaatttcaattaaaaattgctaaaattagaggtgttgagtcttcaggcatgttgtgttctgaaagtgaactaaatttatcaaatgaaagtaacggtataatagaattggggaataaagaaaaagaaatcggtaaaagttattttaaaagtaggtctgaaaaagcaatcgatattgcgattactccaaatagagcggattgtttaggaattagaggtatagcaagagatttatcttctactggaataggtaaactaattccaattaaaatgagaaaatttaaacaatctgctaaacatttaataaagacttctataactaaagatttaaatcaag

SEQ ID NO: 301638 - DNA, 811 bp, Unknown
  Bacterial polypeptide expressing nucleotide sequence isolated from the Sargasso Sea
gtaagtttaggagacgatagaattacaaaagtagtttgtggagcatcaaacgcaagagatggactgataactatctatgcaccgcccggggcaattattcctaagacaaagtttcaattaaaaattgctaaaattagaggagtagagtccaaaggaatgctttgttcagaaaatgaattaaatttgtcagatgaaagcgctggtattatagaattaaagcataaagaaaaagaaattggtaaaagttattttaaaaccaaatcagaaaaggctttagatatttctataacaccaaatagagctgattgtctgggggtaagagggatagcaagagatcttgcatcatctggacttggaagtcttttaaaattaaagaaaaaatcttttaaacaaactttaaaacaacccattaaggtttcgatcttaaaggagaaaaaccaaggctgtttatcttttggaagctgttacataaaaaatattacaaacaaagaaagtccattatggttaaaaaataaaatcctagctttaggtttgaaacctatttctgcagttgttgatattacaaactatgtaatgtttgatttaaatcgacctttacatgcatacgatgccaaaaaaatagataaagaaattattgttagaaactcaaaagaaggcgaagaatttgaaggattagataacgagacatataaattaaagaaaggaatgtgtgttattgcagacaaaagcagcattcttggactaggaggggttataggcggcacaaaaacatcaaccgagtttgatacaaaaaatatattattagagtctg

SEQ ID NO: 301639 - DNA, 802 bp, Unknown
  Bacterial polypeptide expressing nucleotide sequence isolated from the Sargasso Sea
aatgaaatttactttttcttggttacaaaaatatttaaaaacaaatcaaagtcttgatagtatttgtgaaagattaacaatgttagggatagaagtatcagaagttattgataatcaaaatttttttaaacaatttaaaattgttgaagttaaagaagttcaagatcatccaaatgcagacagattgaagttatgtaaaattaatgatggtcaaagtaatttaaatatagtttgtggtgctcctaatgttaaaaaaggtatgaaagcagttttagcaccagttggtacaaaaatgctagaagatgattttataattcaaaaatcaaagattcgagatatagaaagtgaaggcatgctttgttctgaaaaagaaattggtttaggcgaaaatagtgatggaataataaatttagaagaaaatgcaaaagtaggtaagcttttatctagtctttatccttctgaaaaaattattgatgtagaaattacgccaaatagatcagattgtttaggagtttatggaattgcaagagatttatcggcgagtggatatgggactttaatagaaaaaaaaattcctaaaattaaaaataattttaaaagtaaaattaatgtaaaaataacaaatgatgctaaatcaatttgcccagtattttatggtcgttatataaaaaatgtaaaaaattgtgagagtccagattggttaaaaaaacaattaaaagcgattggattaaagcccatatcagcattagtggacattactaattatctgacaatcgattttaatagacctttgcatgtattt

SEQ ID NO: 301640 - DNA, 469 bp, Unknown
  Bacterial polypeptide expressing nucleotide sequence isolated from the Sargasso Sea
catgcgggtgtccctctcctggctcaagcaactggtccaggtggatgaatccgttgaggagctatcccagcgcctttcgatggccgggttcgaggatgaagagatcgaagatctcaacgcacgagccaagggtgttgttgttggttttgtgaaggagcgcgagaaacatcccaatgccgacaagttgagcgtctgcagggttgacatcggggctgaagaaacgctgcagattgtctgcggggcagcgaatgtccgtgccggaatccatgtcccagttgccacggttggtgccgttcttcccgctgttgacctaacgatcaaggccggtgagctgcgcggtgtaacaagcgcaggaatgatttgttcactctccgagctgggactcgcgaccgactctgagggaatcgcggtccttgacgatctcagcaaggacctgccagccctgggatctcccagtggcagccggtgc

SEQ ID NO: 301641 - DNA, 847 bp, Unknown
  Bacterial polypeptide expressing nucleotide sequence isolated from the Sargasso Sea
gattttacttatgatgattttaaaattgaaaccaaaataaatgtaaaggatccaaccttatctcctttatatgcaggtataattattaaagatattgaggtcaaagagtctcaaacatggattaaaaataaacttaaatcaattgggtatgaacctataaataatatagttgatattactaactatgttttacatgaaattggacaacccttacatgcttttgatttagacaagatcactaatattgaagttaagaacctgccttcaaaaacaaaatttaaagctcttgatggaaatgagatatctcttaatgaggaagatatcatgatttgttcagaagatgatccattatgtttgggtggcatatttggtggattagactctggtgtcacttcaaatacaaaaaatatttttttagaatctgctatatttaaccctacatctataagaagatcatcaaaaagacattcaatatacactgaagcttcttatagatttgaaaggggtatagaccctgaaatggttttatatgccttaaaaagagcctcaatattgatcaaaaacgattgccctgaatctatttcgtcaaatattattcaagagaacaatcttaagctagatgagaaaaagattttcttaaggtataatcagattaacacaatatcaggtaaagaaatagataaagatgttatagtatctattttaaactctttagatgtaacagttgaggcagcaacagatgatggcttaaatgttatatctcctcattatagagcagatgtcaatagagagattgatttaattgaggagatccttagggtatatggttatgataatattgagtcaa

SEQ ID NO: 301642 - DNA, 328 bp, Unknown
  Bacterial polypeptide expressing nucleotide sequence isolated from the Sargasso Sea
cctagtcactttcctttcactgaaccatctgcagaagtagatatcggttacgagataaaagatggcaagatagtaattggtgaaggaaataaatggttagaaattctaggttgtggcatggtacatcccaatgtgcttaagaatgttaaagtaaatccagacaagtaccaaggttacgcttttggaattggtatagatagacttggaatgcttaaatatggaataagtgatttaagagctttttttgagactgactatagatggcttaatcattttggttttgatccattggatgtcccatctaattacagaggtctcagcagatgaa

SEQ ID NO: 301643 - DNA, 805 bp, Unknown
  Bacterial polypeptide expressing nucleotide sequence isolated from the Sargasso Sea
acatgagaatgattttgtaaatggaatatttgatatagaggtaacaccaaatagaggtgattgcttatctttacttggaatagctagagatttaaatgtgttttacacattaaaaaataacacccaaattatgaatgaaccaattgaatcattcgatcttaattttgtaaataatgctgctaatgattgtccttcaatatcttttcttaacatagaaatagaaggagaaattaaagaatacaaaccatatttaagtaattatttcaaagatatgggtataaacaaaaataatttcttcacagatgtttcaaactatcttgcatacgaagttggtcagccaactcactgttatgatttttcaaaacttgatgaaccaattgaatttaataaaattgaaaaagattttgagtttaaaactttactaggtaagaaaataaatttaactggtaaaaattgcgtattcatttcaaatggccaagttataaatctagctggagtgatgggaggtattgcaacagcatgtgataaaaatacaaaaaatgttcttgttgagtgtgcttattttagaccagaagcaattattggtaaaacagttaaatatgacattaattctgatgcagcatataagtttgagagaggcgttgatccagatatgcaggaattctctttgagaagatttattcaaatagttgatgatcattctcagataaagagattaggtttatacagaaataaatttgcagacataccatcaaaaaaaattaattttaatgtagaaaatattaataatattcttggtataaat

SEQ ID NO: 301644 - DNA, 922 bp, Unknown
  Bacterial polypeptide expressing nucleotide sequence isolated from the Sargasso Sea
aaaaatcaaaaaataggaggggtggaatcatgtggcatgctggtatcagaaagagaaatgggaatatcagatgagcatgatggaataattgaaatagacaaaaaatataaaataggagattcttttgctgaaatatacggtttaaatgacccagtaatagaaattaatataactccaaatagatcagattgtttatcagttagaggaatagcaagagatttacaagcagcagaaataggaaagcttaaaaatatagagatttcagaagttaaaggatcatttgcaagtccaataaaatggttaagagaatttgatgataaaaatgaaaaattatgtcctggagtttcaggaagattgtttaagaatgttaataatgttgaaagccctgaatggttaaaaaaaagattaactgctgttggattaaggccaatttctgcattagtagatattacaaattatgtaacttttgatttaggcaggcctttgcatgtttatgatgctgataaaataactggtaatttaaaaatgcgtttagcaaaaaaaggagaaaaatgtaagactctagatgaaaaagaatacactttagaatcagatatggttgttattgctgatgaaaaaaaacttcatggtattggaggtgttatgggaggcttagacagtggttgctctatggaaactaagaatgtttttttagaagtggcattatttgatcccattagtattactaaaactggaagaaaattaaatttacaaagtgatgcaagatacagatttgaaagaggtgttgatcccacctctatagattggggtgtgaataaagctactcaaatgatactaaatttatgtggtggagaagttagtgaaataaccaaggatcaaatacctacccaacctaaaaagattttagcattcgattatcaaa

SEQ ID NO: 301645 - DNA, 778 bp, Unknown
  Bacterial polypeptide expressing nucleotide sequence isolated from the Sargasso Sea
aaaagttatttcaaaaccaattcagaaaaggtcctagatattgctattactccaaatagagctgattgtcttggagtaagaggaatagcaagagatcttgcatcatctggactaggaagtcttttaaaattaaagaaaaaatcttttaaacaaactttaaagcaatctataaaagtatcaatttctaaagaaaaaaatcaaggatgtttatcttttggaagttgttacataaaaaatattacgaataaagaaagtccggaatggttaaaaaataagattttatctttaggtttaaagcccatctcagcagttgttgatattacaaattatgtaatgttcgaccttaatcgacctttacatgcctatgatgctaacaaaatagataaagaaatcattgttagaaattctgtagaaggagaggaatttgagggattagataacgagaaatataagcttaagaaaggaatgtgtgttattactgataaaagtagcattctagggctcggaggagttattgggggaacaaaaacatctaccgaatttgatacaaaaaatatattattagaatctgcatatttttcaccttcatcaattagaaaaacaggccgtgaattaaacattaacactgatgctaaatataggtttgaaagagggatagatcctaattctataaaagaaggactagaaatagctactgaattaattattaggatttgtggaggagaagcaagcaaatttagtattaccggtcaagcttctcaaaaaaacaaaattatag

SEQ ID NO: 301646 - DNA, 367 bp, Unknown
  Bacterial polypeptide expressing nucleotide sequence isolated from the Sargasso Sea
aatgtcagaatctaaagacattataaaatctaaaaatcaattagatttaggaacacgtcacccaataaatcaaatcttaaaacatataattaactttttgcaaagcaatgggtttgaaattgttaatggtgttgaagtagagacagaagaatataattttgacatgcttaatattaaagagtctcatcctgccaggcagatgcacgatactttttatattcaggaaaagtcatttcttttaagaacacacacttcacctgttcagattcgtggaatgcttgaaaagaagcctcctttagctttcatatctggaggaaaagtttacagaaaagatgatgactctacccatttaccaatgtttcatcaa

SEQ ID NO: 301647 - DNA, 745 bp, Unknown
  Bacterial polypeptide expressing nucleotide sequence isolated from the Sargasso Sea
aatcaacttttagaaaaattaacagatataggtttggaagttgagggaataggaaatacatctttagatttagataagtttatagtatcaaaaattgtcagaactgaaaaacacccaaacgcagatagattaaaggtttgtgatgtagatattggtgaaaaaaaaataatcaaagttgtctgtggtgctccaaatgcaaaagaaggacttttgactatttatgctcctcctggagctattattccaaaaaataaaatgaaacttgttgtaacgcaaataagaggcgtgacttcacatggtatgctttgttccgattcagaacttgaattatcagatgaaagtgatggtattactgagcttaaatacagtaaatataaagataaaattggaaaaaaatatttcaataaaaataatttaaatttaattgatttatcaattacaccaaatagaccagattgtttaggagtaagaggtatagctagagatttggcgacagcaggatttggaaaacttaaaattaataaaattgataaaattaaatcaaaaacaaaacaaaaaataaaaattaaaatattaaaagaaaaaaatcaaggctgtacaacatttgggagttgtttagtaaacaatgttcaaaatagagaaagtccaaaatggctaaaagataagttaatttctataggtcaaaaacccatttctgcaattgtagatataacaaattacgtaatgttggatttaaatagaccgt

SEQ ID NO: 301648 - DNA, 826 bp, Unknown
  Bacterial polypeptide expressing nucleotide sequence isolated from the Sargasso Sea
ataactaaagcatgtaataagtttgaaggtttatttgtttctgaagtaaggtcagtaaaaaaacatccgaatgctgatagattaaatatttgtgaagttgatgtcggagaaaaagatttattaagcattgtttgtggagcacctaatgtaaaaaaaggaatgcgaacggtacttgcaaaagttggtgcacagttagcaaatcaaccaaaactaaaaccagtaaaattaaagggaatcgagtcatgcggaatgctatgctcatcaagcgaaataggattaagcgatgatagctcgggaataattgaattatccaaacatgagcctatcggcaaacctctcgacgaattaatcgatagcgacaacaatattatcgatctgtctctcactcccaatcgtggtgattgccttagtatctatggtatagcaagagaattagcggtcatcaatcagtctaatttcagtgaatatgagaaaaagacgatagaagttagcaccgagaatgcatcccaggttaaattatcggcaaaagaagcctgcccaaaatatgtttgtcgaattgttgaaaatgttgatctaagtgtcaaaacaccactatggatgtctgagaaattacgatgttcagggatacagagcataaatatcgttgttgatatagcaaactttgtaatgctagagctgggccaaccattacatatgtttgataatgatttattgaccggtggaatcgaagtccgttttccaaaaggcaaggaaaaattaaagctgcttgatgaaacggaaattgaaattaaagataagactctattaatagctgataaatctggac

SEQ ID NO: 301649 - DNA, 525 bp, Unknown
  Bacterial polypeptide expressing nucleotide sequence isolated from the Sargasso Sea
tatgattgtttcaatagattggcttagggaatttttagagattaaagaaagccctaatgaacttgcagatatgctatcaaattcaggattagaagctgaattaaatgaggttccattttcaatccctggggttataattgggaaagtagaaaatactgaaaaacaccctgatgcagataaattaaaaatctgtatagttaatgatgggcagcagactcatcaggtaatttgtggggcaccgaatgttaattcaggacaaatgatcccattcgctactgtcggctcaattcttcctggaaacctaaagattaaaaaggcaaagattagaggtgtagagtctaatggaatgatttgctccgaacgtgaattaaatatttctgatgagcatgagggtattatggttctccctaaagacctgccattaggtaaagatttcatggaagcatatggaaaaaagtttctttcattggaacttgatgtgactccaaatagacctgacgcattctctcatcagggcgtagctag

SEQ ID NO: 301650 - DNA, 853 bp, Unknown
  Bacterial polypeptide expressing nucleotide sequence isolated from the Sargasso Sea
aaagattagtaaagttgtttgtggtggaccaaatgcaaaagataatttgttaactatttatgctcccccaggatcagttattccaaaaaataatatgaaattagaggtatcaaaaataagaggagaaacatcttatggtatgctttgctctgaatcagaattaaacttatcaaacgaaagtgaaggaattattgaattaaaccaaagttacaaaactaaaataggaaaaagctattttaaaaataatttagaaaatgtaatagaactatcaataactccaaatagaccagactgtttaggtattaggggtattgcgagagacctatcagccagtgggtttggaaagttaatagataataaaaatatcaagataaaaaaaaaattcaaacaaagtttaaaagtaaaaattgaaaaaaatagtaatcaggcttgcaaaatattcggcagttgtcttattaaaaatataaaaaatcaagaaagtccaaaatggttaaaagaaagaatcctttcattgggtttaagaccaatttctgcggtggttgatgtaacaaactatgtaatgtttgacttaaatagaccacttcatgcttatgatttagataaaataaataaagaaataatagttaggaattcaaaaaaaggtgaaagttttaaagcactagacaataaggaatataaacttgatgatggtatgtgcgttatatcagatcatgatggagttttggggttaggaggaataataggtggcacaagatctggaactgaactaaatacgaaaaatattttgttagaatcggcttattttgaccccgagattacgagaaagacagccaaaaaattgggaattaaatag

SEQ ID NO: 301651 - DNA, 236 bp, Unknown
  Bacterial polypeptide expressing nucleotide sequence isolated from the Sargasso Sea
cactgagccatcggcagaggtcgatattctatcaaaagacaaaaagtggcttgagatattaggatgtggagtaataaatcctattgttttagagaattgcaacatagatcctaaatctttttcaggtctcgcgtttggtttaggtgtcgagagaatagcaatgctcaaatatggtgtaaaggatattagagatttctataagtcaaatctagattttttaaaacaatttaaatgaa

SEQ ID NO: 301652 - DNA, 634 bp, Unknown
  Bacterial polypeptide expressing nucleotide sequence isolated from the Sargasso Sea
tttgccaaaagaaatcaatattgaaactgtttcaagttatctttttcaattaggtcatgagcatgagatagataatgatacttttgatattgaatttacacctaacagaggtgactgcttatcattaatgggattgtcaagagatctaaattctctctgtgaatcaggttttccatattcagtttatgaagaagaaattttagattttaattttaattttgaaaataatgattctaatactttggataaagttacttttctatatgttgaaataaaccaaaataaaattaaagaatatgagaattaccttcaaagcttcttttctgattttgacataaagaaaaataacttttttactgatatctccaattatctaacatatgagactggcttgcccacacattgttatgactatgaaaaaatatacggcaaattttcatttgaatcctctttggtaaatagtgaatttgaaactgtattagatacaaaaatccaactcactggaacgaattcctattttaaaattgataatgatattgttaatttagctggcgtgatgggaggtaaagcaacttcttgctcaaaaaatacgcataaagtattaatagaatgtgcacatttcaatcctgaggca

SEQ ID NO: 301653 - DNA, 311 bp, Unknown
  Bacterial polypeptide expressing nucleotide sequence isolated from the Sargasso Sea
aatacttgaattttttgttaaaagaatgtttggtgacaatacaaaaatgagatttagaccgagcttctttccatttacagaaccaagcgctgaagttgatatttggagcgagcaaagacatcaatggcttgaaattctaggttcgggaatggttgatccagaggtatttaaatcggtaaatatagatccagatgtttggcatggttttgcttttggaatgggaatagaacgaatctgtatgctaaaatacggtattgacgatataagacttctctatcaaggagatatgagatttttggagcagttttaat

SEQ ID NO: 301654 - DNA, 484 bp, Unknown
  Bacterial polypeptide expressing nucleotide sequence isolated from the Sargasso Sea
aatgtctgatattaaaaaaataaaagataattatatcgataaacttaatacggaaaataatgttgataaggtaaacaacattaaatcagaactatttggaaaaaacggaattatatcgaacgaatttaaaaaattaggttcgatttctgtagaagaaagaaaaaaattagcctcagatttaaataatgttaaagacgaacttcaaaataaaatatcaatcaaaattcaggaaatagaaactaaagaaattaatttaaagcttgagaaagaaaaaattgatgtaactcttccagaaagagatattaaaattggtaaaattcatccagtctcccaggtaatagatgaaatttcatctatattttctgaaataggatttagtgttgaggaaggcccagatgtagaaaatgaatataataattttacagcattaaatacaccggataaccatccagctagagatatgcatgatacttttttaccttga

SEQ ID NO: 301655 - DNA, 923 bp, Unknown
  Bacterial polypeptide expressing nucleotide sequence isolated from the Sargasso Sea
atcatcaattggacttgaggcagaagattgtaagatatttgaaggtctagagggtattgttattggaaaagtaaagtccgttactaaacatccaaatgctgataggctgagtgtatgttctgtttatgatggtgaaattgatcaccaagttgtttgcggggcaaaaaatgtagcgaaagaccagacaatagcttatgcaaaagttggatcagttttacctggaggatttaaactaaaaaaaataaatcttaggggtgtagaatcaaatggaatgatctgctctgccaaagagctaaatataaatgacgaccatgagggaataattattctgcctaactcttgtaaggtgggggcgaatttcattgaagaatacggcaataaatttttaaaagtagaactggatattactccaaataggccagatgcgttttcgcactatgggatagctagagatatttctgtatcaaaagaacgtaaactttcaaaaatccagattaataaaaaagaagtatcaaaaaatcctacgataagtatatcaacagaagatgtcaatgattgccctcgatatgtgggcggattagttacagaggtatccgttggtcccagtccaatttggatgcaggaaaggttagtcgcagctgggcaaagaccaataaatatccttgtagatatctctaattttgttttgttagaatttggtcaaccaactcatatttttgattatgataagctaggtaataataagattcatgttagaagagcagtgaaaggtgattcaattactactctggaccaaaatcaatataaactaaataatgatcatctattgataacaaatggaaaagttccagttgcattggctggtattatgggaggatatgatagtgctgttgatgatgacacaaaaaaatattttaattgag

SEQ ID NO: 301656 - DNA, 865 bp, Unknown
  Bacterial polypeptide expressing nucleotide sequence isolated from the Sargasso Sea
ttgacgctctctggaatcgagtctgagatcgaaaaatctaaaggtgaagaaattctcgatatttcattaacacccaatcgtgctgattgtttcagttataaagggattgtgcaagaagtgagtgctttagacaatgcgaagattaaaagtgttaaacaggctctgcctgagattcatcacaacctgacaatggaagttgatgttcaatcgaaggaagattctcctgttttcatgacgagagtcataaagtctataaataggaatgcaaagagtcctaaatggctcaaagaaaaactcgatcaatccggatataagtcaatcaatgcagttgttgatatagctaattatgtgatgttagaaacgggccaaccacttcacacttacgatttaaaaaagataaaagatagaattttagttaggcgagcaaagaaaaaagaagcaattgatattctagatggcagtagaaaaatcttagatccaaactatcttgtcattgccgatgtagaaaagccacttggaattgctggaatcatgggaagcttggaatcaggaatatctgaagatacggaagatattgtccttgaatctgcctattttaattttgaaaccattatgggtagagcaagggctcttagtctccatagtgaagcgagcatgagatttgagcggggcgtagacccagcaatacaagagcatgcgattcaaagattcaccaacctaatcaatgagattgtaggtggtgaaaatggtccgatacattcatacatcaacaagaaagaaatgcctaagaataaattcatcgcacttagaaaagacaagatcaaacaaatattgggtattaccatcccaaatcaaacggtcaaaa

SEQ ID NO: 301657 - DNA, 402 bp, Unknown
  Bacterial polypeptide expressing nucleotide sequence isolated from the Sargasso Sea
acccatacatctccggtgcaggtgcgcacgatgtgaggccaccgaaccgccggtgcggatcattgttcccggacgtacctatcggtcggaccatgatgccacccattccccgatgtttcaccaatgcgagggtctggtaattgccgatggcattcatatggggcatctcaagggctgcctgatcgatttctgccgtgctttttttggcgttgatgatttgccggtacggtttcgtcccacctattttccctttactgagccatctgccgaggtcgatataggctgtacgcgtgaaggcggtggcttgaagattggcgctggtgatgactggctggagatcttgggatcaggcatggtcaaccctcgggtgctggccaattgtggctatgatcctgacaagta

SEQ ID NO: 301658 - DNA, 802 bp, Unknown
  Bacterial polypeptide expressing nucleotide sequence isolated from the Sargasso Sea
tgcagttataccaaaaactaaaataaaattagaggtggctaaaattagaggtgtgacctcttatggaatgctttgttctgagtatgaattaaatttatcagatgatagtgatggaattattgaattatctacaaaattcgaaaaaaatttaggtaagagctattttttaaaatcaaaatcaaatttaattgatttatcagttactcccaatagaccagattgtcttggtattagaggaatagctagagatctttcggcatcgggctttggaaaattgctgaatgtaaaagaaaaaaaaattaattcaaaaataaaacaaactttgaaagtaaagattaataaagaaaaaggtcaagggtgtagtatttttggaagttgtttaattacgaatgtaaaaaatattgaaagtccacaatggcttaaggataaactgatttcagttgatcaaaaaccaatctcagcaatagttgatattacaaattatattatgctcgatattaatcgtccattacatgcatatgatgcagataaaattgaaaaaggaataatagttcgaaactctaagactggagaagaattcactgccttagataataaaaaatataaattagaaaaaggtatgtgcgttattagtgataataaaggagttttaggtttaggcggaataattggaggaacaagatcgagtacagaatttaacacgaaaaatatattattggagtcagcttattttgacccaagctctataagaaatacagcaaaaaaattaagtcttgatactgatgcaaaatttagattgaaa

SEQ ID NO: 301659 - DNA, 809 bp, Unknown
  Bacterial polypeptide expressing nucleotide sequence isolated from the Sargasso Sea
ggtaagaggtatagctagagatcttgctgctgctggagttggtaaattaaaaaaaatttcacttaaaaatattaaaaaaaatggatcacaaaaaattaaagtttcaattacaaaagataaaaatcaaggttgtaccgtatttggtagttgcttaattaagggtgttactaataaagaaagtcctcaatggcttaaagaaaaaattatttcacttggtcaaaaaccaatttcagcaattgttgatattacaaattatgtaatgttagatttaaataggcctctgcatgcatatgatgcagataaaattgataaggaaattatagtaagaaattcaaaaatgggtgaaacttttgaagctcttgataacaaagaatataaattagatgatgatatgtgtgttatttctgataaatctggagttttaggcttgggaggaatcatcggaggaacacgttctggaactgaaattaatactaaaaatatttttttagagtctgcctattttattcctagatcaattagaaaaacttcaaatttattaaatattgatacggatgcaaaattcagatttgaaagaggaattgatcctcaatcgattgaattaggtttgtcaaaagctgctgaattgatatctgagatttgtggcggtaaaataagtaattttgatattcaacaaacagataagcatgaaaagaataaaattaaatttaatttctctttatttgaaaaaataactggttttaaagtaaatgataatgaaataattaaaattttaaccgatctaggatttgaagtttcaaaggaaaaat

SEQ ID NO: 301660 - DNA, 372 bp, Unknown
  Bacterial polypeptide expressing nucleotide sequence isolated from the Sargasso Sea
ttttatttttaaaagaattttttgaaattgataacttaaaatataggtttagaccaagttattttcctttcacagaaccaagtgcggaaatggacgttgcatataccaaaaaaaataacgttctaaaaattggtgaaggagatgattggttagaaattttaggttgtggaatggttaatccaaaagttttagaaaactgtaatgtagactcctctgtctatcaaggttttgctttcggaatgggtatagagcgtctttctatgttgaaatatggaataacagatatgcgcggtctgtttgacttgaatcttaagtggttagatcattatggtttttctcccttagatttaaaaacaagatcggaaatttaag

SEQ ID NO: 301661 - DNA, 880 bp, Unknown
  Bacterial polypeptide expressing nucleotide sequence isolated from the Sargasso Sea
gcgaatttctgcccttttagagtccacattaaattttccagaattaaaccataaatacaatattcatttacttaagggtattaaactttgtccagaggctatagaatctaattgtttatattcaattagctgcattgatggagtaaatggagataaattatcgccaaaatggcttaaagaccgtatagaaaaatcaggtataaagtcgattaatcttatagttgatttgacaaactatattcttttagaacaaggtcaacccttgcatgcgtttgacaaagaaaaactatctaacttaattggaaaggaagttgctccagaagacttttctgttcgaaaagctaaggataacgaaagccttgtttgtttagatggtaaaaaatatgaattaaatgaaaatattacagtagttacttgttgcgataaacctgttgctattgctggggtgataggtgggttagagacttctgtaagcaatactacgtcttctatttaccttgaaggcgccgtttttaatccagttactataagaaaatcttcaaaggctattggcattagaacagaatctagcagtaggtatgaaaaagggatttcatcaaaaaatacaataagtgcagtaacaagggcaattaatcttttagaagaatatttttctattaattcaccaattatcaatacttcgaatttagaaaaaaatgaggatttatttattaaactacggagaaatcgaattcataaaattcttggtccattaataattaacgataaatttgaaaaaagaaatttatctgataatgaaatagttgataaattaacactcataggttgtactttaaagaataaagaatatggctgggatgtagcagtaattccaaataga

SEQ ID NO: 301662 - DNA, 682 bp, Unknown
  Bacterial polypeptide expressing nucleotide sequence isolated from the Sargasso Sea
gatgaaaataacttttgattggttgaaagatcatttaaaaacaaaatcaaatgaaaataagttaattgaaaaattaactgatattggtttagaagtagaaagtgttgaagcttcttctggtttagatagctttatagtttctagaataattaaatctgaaaaacaccctaatgcagatcgtttaaaagtttgtgatgtagatattggaggagagttaaaaaaggttgtttgtggagcattaaatgccagaaagggcattttaaccatttatgcccctccaggagcaatagtgcctaaaaatcaaattaaactaactgtatcaaaaattagaggagtaacatcttacggaatgttatgttcagagtctgaacttaatttatctaatgaaagttctggaattatagagttagataataaaaaatttaaaaataaagttggaaaaaaatttttttccaaaaaacaaagtaatttaatcgatttatcaataactcctaatcgagcagattgtttaggtgttagggggattgctagagatcttgcttctactggttttggtaagattgtagattttaaagaaaaaaaaattagttcaaagttaaaacaaaaaattaatgttaaaattacaaaagataaaaatcaaggatgtatagcttttggtagttgtcttattacaggaataaag

SEQ ID NO: 301663 - DNA, 220 bp, Unknown
  Bacterial polypeptide expressing nucleotide sequence isolated from the Sargasso Sea
aggttgtggcatggttcatccaaatgtcttaaaaaatgtaaaagtagatcccttaaagtttcaagggtatgcttttggaatgggtatagatagattagcaatgcttaaatatggtattaatgacttaagagcattttttgaaacagattatagatggttaaaccattttgggtttgatcccttagatgttccttcaagctatagaggtttgagcagatga

SEQ ID NO: 301664 - DNA, 641 bp, Unknown
  Bacterial polypeptide expressing nucleotide sequence isolated from the Sargasso Sea
tatgaaatctattgaaaatcaaattgataagatattccaagatggacaagcagcaattgttgatgtccaggataaagatgccttacaggcatggcgttctcaatacactggtcgttcttctgagcttgcaggaattttaaaaaatcttaaggatattccgcaagaaaatagaaaagatattggtcaaaaaattaattcaattaaacaagaacttgaaacattatttgacaataagtcaaatgaacttgtacataacttcagtcaggctagtagtgattcaagcatagatgtatccttgcctggaacttataaaaaaaatggacatcttcatccaattaccttagccttacgggaaacgttaaatgtgctttctcgattaggcttctcaaccgttgaaggccctgaggcagaatcttcttattataactttgataggcttcgaatacccgacgatcatcctgcgcgcgatatgtgggatactttttggctagattcagaacaatctaatgatccgttattgcttaggacgcatacaagcccaatgcaaattagatttcttgaaaaaaatgatcctccaattagaattgccgtgccaggcaaatgttatagatatgaagcaacagatgctacgcatgagtgga

SEQ ID NO: 301665 - DNA, 647 bp, Unknown
  Bacterial polypeptide expressing nucleotide sequence isolated from the Sargasso Sea
tatggaaactgaagtagaaaaaatcaaatttttagatctaattaaagaagctaagtctgtaaatgatcttgagaaggttaggataagcctgctgggtaaaaagggtgagattactaacttattgagatcactgggtcagatggaagctaaagagagacaaataaaatctccacagtataacaatctcaagcaaattctagaggaggctatcaaagaaagcagggagattctgctgaataaagagattgaagccagaatggacgctgaatggcttgatatctctcaagaccccagagagatcaactcaggcctaattcacccagtaagcagagttacagaggaaatagtatcaattttctcagacctcggattttctgtagctgaagggccccaaattgaaagcgactggtacaattttgattcattaaatattcctcctgatcacccagcgcgtcaggagttcgatactttttatatcaaacctgatgatgagggtcttaaagaaaatgtttcacctaatgtactgagaactcacaccagcccagtacaagtaagatttatggaaaaacatggtgcgccttgtagaattatcgctcctggacgggtatatcgatcggactacgatctcactcataccccaatgtttc

SEQ ID NO: 301666 - DNA, 859 bp, Unknown
  Bacterial polypeptide expressing nucleotide sequence isolated from the Sargasso Sea
agctttgtcgacaatgccttccagaccctcattgatcctgagaacgacccaattaggctcgcgaacccgatttcgtccgagatgggggtcatgcgcacaacgttgtggccgggccttctcaaagcattgatttataatagaaatcgtcagcaggagcgggttcgtctgtttgaggtaggccttcgatttctgcagcccgcgaatcaggacgggatcgatctcgccacagtgcttcaggaaaagaccatagcgggcgtcgctacagggccacgtaacgcccagaactgggctgatagcgcgaagctgatggatttctttgatctcaaaggcgacgtcgagtcgctactggcgctcacgggcgcggacggttttcgcttcgaggctgcaacccaccccgcgcttcaccccggtcagtgtgcatccgttcttcgtggcgacaccgaggtggggatttttggcatgctcgaaccacgcgtacagctggaactggatgtcgtcgagccggtgtttgcgttcgaatttcgggttgaggcccttacacggcgagggattccgacgtttgccgaactttcacgttttcccgaagtgcgccgtgacattgcggtgctgctgccggtggaggtgactgcagaagcgttgatgaagcgggttaccgatgctactgacgatacccttgtaaacctaaagttgtttgacgtatatcagggagaaggtattgatcctacaaggaaaagtattgcggtgggcttgacgttccaggcttcatcacgcactcttacagatagcgaagtcagcgactctgtagagcggattgtggcttctctgattgatgggctgggtgctagtttgaggaactgat

SEQ ID NO: 301667 - DNA, 332 bp, Unknown
  Bacterial polypeptide expressing nucleotide sequence isolated from the Sargasso Sea
aaacttaacgttttctgatttaaaaggaacattggaatattttgttcaagaattttttggaaaagacttaaagacaaagtttattccacatttttttccattcactgaaccttcagctgaggttttagttagttggaaagatggagaatggcttgaaatacttggatgtggaatggtagatcctaacgttttcaagcatgttggatatgacacagattcccaaggattcgcgtttggtgtaggcgttgagagattagcaatgattagatatgggatcgatcatataaaaaacttttatgaaaatgacctaaggtttttaaggcagttttaat

SEQ ID NO: 301668 - DNA, 438 bp, Unknown
  Bacterial polypeptide expressing nucleotide sequence isolated from the Sargasso Sea
tatggacaacatagagcccccttcaataaaaaaggtaacaggcacccttcatccaatcaatcaaactaaagattttctcttaaatcttttaaaccaatttggctttaaagaagtacaaggcccagaaatagaaagtgaagaatttaatttcgacatgcttaatattaaaaaatctcatcctgcaagacagatgcatgacactttttatgtagaaaataaaaacaaggtacttcggacacatacatcaccagtccaaataagaagtatgctcaaatcaaaaccaccttttgcatttagctctgcaggaaaagtttatagaaaagatgatgatgctactcacttaccaatgtttcaccaagtagaaggcatttatgtagataaagatgtaaatttttgcaacttaaaagatttaatccataaaatcttggttaagtttat

SEQ ID NO: 301669 - DNA, 385 bp, Unknown
  Bacterial polypeptide expressing nucleotide sequence isolated from the Sargasso Sea
aatgtcgaaacctaaagagctatttttaccaagtcttgatcgtgaaatcggggctatacatccaattaatcaagtaaagtttgatctcataaaacttttaacttcttttggttttgaagttgcagaaggaccagaaatagaaagtgaggaatacaactttgatatgctcaatatcccagctactcacccagctagagagatgcatgatactttttatgtcgatggcatgaaaaatgtcttacgtacacatacttcaccggtccaagtaaggtgtatgctagaaaaaaaagggcctatggctttcgtctcaccgggaaaagtttatagaaaagatgatgatgccactcaccttcctatgttcatcaatttgaaggtattttattga

SEQ ID NO: 301670 - DNA, 268 bp, Unknown
  Bacterial polypeptide expressing nucleotide sequence isolated from the Sargasso Sea
gatggaaaaatcaatataggcgaaggagataaatggttagaaatacttggttgtgggatggtacatcctaatgttttaaaaaatgcaaaagtaaacccactacaatatcaagggtatgcttttggagtaggtattgaccgattggcaatgctgaaatacggaattaatgatctcagagctttttttgaaagtgatattagatggctagaattttatgggtttgatccactagatgttcctacaaattacagaggtttaagcagatgat

SEQ ID NO: 301671 - DNA, 283 bp, Unknown
  Bacterial polypeptide expressing nucleotide sequence isolated from the Sargasso Sea
taagaccttttttggagatattcctgtaagatttagagctagttatttcccttttactgaaccttcggcagaagtagacgttcaatggaaaggtaaatggttagaagtcatgggatgcggaatggttgatccgaaggtcttagaaaacttaggaatagattctgagaaatggactggattcgcagctggattaggagttgaaagattttgtatggtcagacatcagattgacgatatcagaaaattttatacaaatgatcttagattcttagaacagttctaa

SEQ ID NO: 301672 - DNA, 896 bp, Unknown
  Bacterial polypeptide expressing nucleotide sequence isolated from the Sargasso Sea
aaatacaataagtgcagtaacaagggcaattaatcttttagaagaatatttttctattaatccaccaattattaatacttccaatttaataactaatgaagatatatttattaaattacgaagaaatcgaatacataaaattcttggcccattaataattaacgatcagtttgaaaaaagaaatttatcagataatgaaatagttgataaattaacactaataggttgtactttaaaaaataaagaatatggctgggatgtaacagtaattcctaatagatcgcatgatttgataagagaaatagatttaattgaagaagtagcaagattaatagggtatgacagattcgatttagaacttcctaatccaattaagcctggaaaattatcatcagaacagttggcattgagaaaagtaaaaaatggttttatagaaaatggttttaacgaggtattaagctactctcttgttcctgaagataatgaaaaacttataaagatttctaatcctttattaatagaaacaagttgtcttagagataatatgtggaaagaacatttggagatagttaaccgaaatataaatgctggtcaagcaagttgttatatttttgaaattggaaatgtttttcaaaagaaaactgagttcattcaagaagaagttctgaatggtgtgatttatggaaataaaaaatttggaaaatggataaattctggtaaagataacgatcttaattattaccaagctagaggaaagttgaaggaggccttatcatctttgaacataaaaattgaggataaacctactgactcaattgattttcttcatccaggaagaacagccaaattagttattgaagggaaagatgcaggttattttggtgaaatacatccca

SEQ ID NO: 301673 - DNA, 856 bp, Unknown
  Bacterial polypeptide expressing nucleotide sequence isolated from the Sargasso Sea
tgtggagctccaaatgctagagatggattagtcagtgtgtatgcacctccgggttcagtaattccaaaaacaaaaatgaaattaaagatagcaaagataagaggagttgagtcacacgggatgctttgttctgagaatgaacttaacatttcagatgaaagcgatggtataattgagttaaagaatagagaaaaagatattggaaaaaattattttaaaagtaggggagaaaaatcaattgatgtatcaattacaccaaacagaccagattgtttgggtgttcgtggaatagccagggatttggcttcggcaggtttaggaaaactttctaatttaaaaaaaacaaaagttaaacaaaatttttctcaaccaataaaaatttcaattacaaaagaaaatagccaaggatgtatgtcatttggtgcttgctacataaggaatattcaaaataaagaaagcccagcatggttaaaagaaaaaataatttctcttggtcttaaaccaatatctgcagtagtagatattacgaattatgtaatgttggatcttaatagaccattgcatgcttatgatgctgataagatagataaagaaatcatagttcgaaattcaaaaccaggagagagttttgaagccttagatggcaaacattacaaactaaaaaataaaatgtgcgttatttcagacaagtcaggtcctctaggtctcggaggtattatagggggcacgcgttctggaactgaatttgaaacaaaaaatatacttttagaatcagcatacttttacccaacgtctgtaagaaaaacctcaagcattctcgatattaatacagatgcaaaatataggttgaaagagg

SEQ ID NO: 301674 - DNA, 406 bp, Unknown
  Bacterial polypeptide expressing nucleotide sequence isolated from the Sargasso Sea
attggggcatttaaaaggttgtttaaattattttataaaagaattttttgaagttaataaaatacaaatgagatttagaccaagtcactttccatttactgaaccatctgcagaagtagatattggttatgaattgaaagatggaaaaatagttattggcgaaggtgataaatggttagaaattctaggatgtggaatggttcatccgaacgttcttaaaaatgtaaatgttaatccagaaaaatatcaaggttatgcttttggtataggcattgatagacttggaatgctcaaatatggaataaacgacttaagagctttttttgagacagactatagatggcttaatcattttgggtttgacccattggatgttccatcaaattatagaggcctaagcagatga

SEQ ID NO: 301675 - DNA, 233 bp, Unknown
  Bacterial polypeptide expressing nucleotide sequence isolated from the Sargasso Sea
tacagagccatctgccgaagttgatattgaaggaaaagatgggtggttagaggtattaggttgcggcatggtacaccccaatgttttaaataacgttggcatcgatcctgaaaagtattcaggccttgcatttggaatgggggtcgaacgcttagctatgctttattatggtgttgacgatctgagattattttttgacaacgacttacagtttcttgaacagttccgctaat

SEQ ID NO: 301676 - DNA, 443 bp, Unknown
  Bacterial polypeptide expressing nucleotide sequence isolated from the Sargasso Sea
gatgggcgacaatctttcagatctgtcaaactcagcaatccaagaaataaatgaatgttcatcatcgaatgatcttgaatctatcagagtcaaatatctcggaaagaaaggtaccgtaacagcggctcttaaatccttatcagaaatagatccaagggatcgtccagctcatgggaaaagaatcaatgagatcaaaacattgattcaagaaaagctttcagaaagaaaagcatcaatacagaaacaagagatcaatcaaaacattgaaaacaaaatgattgatgtcactcttcctggaagagtaaattttcaaggtcatagacatcctgtaacaaagacgctattagaaattgaagaaatattctatggtgcaggctttgttgttgaagatggcccagagatagaagatgagtatcacaatttcactgctttaaatattcctc

SEQ ID NO: 301677 - DNA, 827 bp, Unknown
  Bacterial polypeptide expressing nucleotide sequence isolated from the Sargasso Sea
ttttaatggtggaataaaagaacttgttttagtgaatccaatttcttctgaattaactcatatgagaccttcagttattccaacattattactcgctgcacaaagaaatttaaatgctggtatagatactttatctttcttcgaggctggcccaatttttaaaggtaataaaccacatgatcagataagcaccatttcaggcttaagattaggtagtaaagttaaaagagattggaaaaattcttctgaagattttgatttttacgatgtaaaattggacgttttaaaaacgctcgaagctattggtgtcaatataaatagtttacaaacttatgaaaacacaacaagttacttccatcctggaagaagtgctattttaaaaataggacaaaaacttatagctaatatgggagaaatacatccaagaattacggatttttatggttttgaaaaatctattttagcttttgaaatatttcatgaaaatataccaatgcccaaaaaagttaaggtttctaagcctatgttgaaaatgtcacccttacaatcggttacaagagagtttgcattcgtaatagatgaaacaacaccagccgaaaaattagctaaaatagcaaaatcgactaataaagattttattaaagacgttttaatctttgatgtctatagaggtgaaaatattccagatggtaaaaaatcaatagcaattaaagttataatacaaccagttaatgagaatttgaccgatgaagatttagaaaagattagttctaatttaattattactattaagaaaaaaacagatggttttttaagagaacagtaac

SEQ ID NO: 301678 - DNA, 884 bp, Unknown
  Bacterial polypeptide expressing nucleotide sequence isolated from the Sargasso Sea
ttgtcttagtttttacggtatcgctagagagctttcaagtatattaaatttgagcataaaaaataattatttaaattatactaacaatgcttataaactgtctgattcaattgattctcttgctttgttaattgattccaaggacgttaaaagatatacagccattaaaatttctaatataacagttaacgattctccatcatggctaaaagttttattgtttaaattaaaacagaagccaattaacaatgttgttgatctgactaattatttaatgttcttaacaggccaacccttacacgcatttgattttgataaaatttctggaactaaaattttaatcaatgatgttacaaaagaatcaattactgttttagatggctcccttcaaaaaactaattcacacctaactatttctgatgccaaaggtccaatagcacttgctggaataattggaggcactcgtacagctgtagataaaaatacaaaaaatattttgttagaatgtgcttctttcaatccctcaaaaatacgtaggagttcaaagattctaaacttatcaaccgactcctcttacaggttcgaaagagaagtcccacaatatacaacacaatcttcactactctattgtgccgaccacatatctaagtttactaatggaattgtttcaaaaaattatctggatacaaattccgatattgtagacgaaagagttatcactattgatttaagaaaaatagctaaactattaggagtcaacattaaaaatgatgaaatactccgaatttatgaatcattatcaatcgaattaatttcatcagaaaattcaatatacaaatttcggccacctcaatttagattagatttatcttcaagatgctgat

SEQ ID NO: 301679 - DNA, 145 bp, Unknown
  Bacterial polypeptide expressing nucleotide sequence isolated from the Sargasso Sea
gatattgagagtgatttctacaattttactgcattaaatattcctcaagaacatcctgcaaggcaagaacatgataccttttattttaatgaagatgaaaacggtgagagaaaagttttaagaactcacactagtcctgttcaga

SEQ ID NO: 301680 - DNA, 269 bp, Unknown
  Bacterial polypeptide expressing nucleotide sequence isolated from the Sargasso Sea
cacaaaattacgttttcgtccttcatattttccatttacagaaccttcagctgaagttgatgttctgtttggcgataaatggttagaaattctcggatgtggagtggtaaatcctaaagtcctagaaaattgcaaaatagactcttcaaaatattcaggattagcttttggtctaggaatagagcgtatagcgatgctcaaatatggcgtaaatgatattagagatttttataaatcaaatctagatttcttgaggcagtttaaatgaa

SEQ ID NO: 301681 - DNA, 409 bp, Unknown
  Bacterial polypeptide expressing nucleotide sequence isolated from the Sargasso Sea
cattgtatttttcatcaagttgaaggaatctatgttgatgaaaatgtatcatttgcagatttaaaacagatgattctttattttactaagtcaatgtttggaaagtctaagttaagatttagaccttctttctttccattcactgaacctagtgcagaagttgatatctactggggactagaaactgaaactgactatagaattacaaagggtacaggttggcttgaaattatgggttgtggtatggtggatccacaggttctagaaaattgtaatattgattcagaaaaatatactggatacgcatttggcttaggcattgagagaattgcaatgctaatctaccaaatcccagacattagactattctttgagaatgacgttagatttttaaatcagtttaaataat

SEQ ID NO: 301682 - DNA, 864 bp, Unknown
  Bacterial polypeptide expressing nucleotide sequence isolated from the Sargasso Sea
cttgaaagtatcttataactggttaaaagattttatagatttcgatgtttctcctgatcacttgtcagagattttaactaatctaggcctagaagttgaaaaaataaagaaaattgaatccataaaaggaggtcttaaggggatttttgttggtcatgtaatcgaatgctataaacatcccaatgctgatcgattaaagttaacaaaagttaaaatagataaagacaatattttacaaataatatgtggtgctccaaatgtttcttccaatcaaaaagttgcagttgcaaccgttggcacaattttatatgatcaatctggaaaagagtttaaaataaccaagagcaaaataagaggagaattaagtatgggtatgatatgctctgaaaaagaattaggaataagtgataaccatgatggcatatttgttttaaaaagttcaattaaagctggaacaccattaaaagaaataataaaatcggaaactgaccatgtttttgatattggattaactccaaataggtcagatgcaatgagtcatatgggtatagcaagagatttaaaagctgtatttgactttaagaatataaattataaaaacaaaaaatatgaagtaaatgcatttaaaattgataataattctaccaatattcctatagaaatattaaatccaaaaaaatgttataattatcatggtttgactattagcaatgtaattgtagaggaatcacctgagtggttaaaaaatagattaacttccatcgatataaccccaaaaaacaatgttgtcgatattacaaattatgctttacatcatttaggacaacctcttcacgcatttaatgctgacataatcaaaaacaa

SEQ ID NO: 301683 - DNA, 886 bp, Unknown
  Bacterial polypeptide expressing nucleotide sequence isolated from the Sargasso Sea
aaaattattaatgctgagcagcatccgaatgcagatagactgagaatatgcgatgttgatattgggttagatgatactgttaaggtagtatgtggagcaccaaatgcaaaaaaagatcttcttactgtttatgcaggtccaggatcaataattccaaaaaataacatgaaactctcagttagtaagattagaggtgttacttcctatggaatgctgtgttcagagtctgaacttaacttatcaaatgaaagtgaaggaataacagaactaacaactagtaaatactctgataaaattggtaaaaatttttttcaaagtaatactgaaaaagttgtagatttatcaattacacctaatcgtcctgattgcttgggggtaagaggtatagctagagatcttgctgctactggagttggtaaattaaaaaaaatttcaactaaaaatattaaaaaaaatggatcacaaaaaattaaagtttcaattacaaaagataaaaatcaaggttgtactgtatttggtagttgtttaattgagggtgttactaataaagaaagtcctcaatggcttaaagaaaaaattatttcacttggtcaaaaaccaatttcagcagttgttgatattacaaattatgtgatgttagatttaaatagaccacttcatgcatatgatgcagataaaattgataaggaaattatagtaagaaattcaaaaaagggtgaaacttttgaagctcttgataacaaagagtataaattagatggtgatatgtgtgttatctctgataaatctggagttttaggcttgggaggaatcattggtggaacacgttctggaactgaaattaatactaaaaatattttattagaatccgcttattattcctaga

SEQ ID NO: 301684 - DNA, 1211 bp, Unknown
  Bacterial polypeptide expressing nucleotide sequence isolated from the Sargasso Sea
aatgaaatttacaaaagactggcttgatgttcatttaaaaacaaataaaagtgagtcacaaattatccagaaattaaatagtattggcctagaagtagaaaaggtagagccagtcaaaaatgagttaagcgacttcattgtagcaaaaataataaaagcaaataaacatcctaatgctgaccggcttaagttatgtgatgtggatataggaaaaaaagatacacttaaagttgtgtgtggtgctcctaatgcaagagatggacttttgacaatctacgcaccgccgggttcagtaattccaaaaaatggcatgaaattagaggtatcaaagatcagaggagaaacctcttacggaatgctctgttctgagtcagagttgaaactttctaatgagagcgaaggaataatagatctaaatgataaatataaaacaaaaattggaaaatctttttttgatgaaaaaaaaggaaaaaatgtaattgaattatcaattaccccaaatagaccagactgccttggtgtgagaggtatagcgagagatttgtcagcctctaactttggaaaactaaaagaactaagaaaaagcaaagttaaaaagaacattaaacataatttaaagataaagattgaaaaaaataaaaatcaggcatgttcaatttttggaagctgtataattaaaaatattaaaaatactgaaagtccaggatggttaaaaaatagaattttagcacttggcttaaggcctatttctgctgttgttgatataacaaattatgtaatgtttgatttaaaccgacccctccatgcatacgatttagacaagataaagaataaaattactgttagaaattcaaaaaaaggagaaaactttaaagccctagataataaaaattatacacttgataaagatatgtgcgtgatatcggatgatgaaggtgtgcttggtttgggtggaataattggaggcgaaaggtcaggaacagaaaaacatacaaaaaatatattattagagtcagcatattttgatcctgcaataattaggaagactgctaaaaaattagatttgaacagtgatgcaaagttccgttttgagagaggggtagatcctcagtctgtaaatgctgggctggattcagccgctgaactaattttagaaatttgtggaggagaagtttctaaatttgacgtacagcagataaagaaattaaaag

SEQ ID NO: 301685 - DNA, 1591 bp, Unknown
  Bacterial polypeptide expressing nucleotide sequence isolated from the Sargasso Sea
aataataaaataattaaagttgtttgtggagctttaaatgcaaagaaagatcttataactatttatgctcctccaggatcggtaattcctaaaagcaaaatgaaattagtagttgctcaaataagaggtgtaatttcatatggtatgctttgttcagagtcagagcttaatttatcagatgaaagtgatagaattactgaactaaactacaataaatataaaaaaaagattggaaaaaaatattttactaaaaatacttcaaattttattgatttatctattacgcctaacagacctgattgcttgggagtaagaggtatagctagagatttgtcggcagctagttttggaaaacttaaaagaaatggaattgataaaattaaatttgaaggaaaacaaaaaataagagtaaaaattttaaaagaaaaaaatcagggctgtacatcatttggaagttgtttagttactaacgttaaaaataccgaaagtcccaaatggcttaaagataagttaatttcaataggtcaaaagccaatctctgcaattgtagatataacaaattatgtaatgatggatatgaatagaccacttcatgcttatgatgctgataaaattcaaaaaggtattattgtaagaaactcaaaaaaaggtgaaaaattcaccgccctagataataaagagtacaagcttgatcatggcatgtgtgtaatttcagacaattctggtgtacttggattaggaggaattattggtggaactaaaacagcaactgagcttgaaaccaaaaacgttttaatagaatcggcttattttgatccaagatcaataagaaaaactgccaatcaattgactatagatacggatgcaaaatttagatttgaaagaggaatagatcctctatcaattgaagaaggattaattaagtctgcgaagctagtaaaagaaatttgtggtggaaaaataaataaaatagatattcaaaatataagtaattttaaaaaaactgatattaattttgagattaaattatttgaaaaaatttcaggatttaaaatttcaaataaaaaagttctaaaaattttaaatgatttaggatttgaagttaagagcaataaagatactcttaaattaaaagttccatcttggagacctgatataactcaatcaatagacgttattgaagaattattgaggatttatggttatgataagatcaaaatggttgatccgattaaaataagaagaaaaccaacattaagtaaatctcaaaaattatttcattttttgcaaagatcagtagctaccaaaggttatcaagaggctataacttggtcatttactgattctaaaattaacgatttatttaaatcaaatataaagaatattgaaattgttaatccaattagttcagatctaaatgttttaagaaattcaattttttcaaatttaattatgtatataaataaaaatttagataggggtataaaagacctttcattatttgaaattggcccagtattttatggatcaaaaccgggtgatcaaaaaatagttgttggtggtctacgttcaggaaaaatttcaagacttt

SEQ ID NO: 301686 - DNA, 935 bp, Unknown
  Bacterial polypeptide expressing nucleotide sequence isolated from the Sargasso Sea
actgtttgggcttagaggaatagcaagagatctttctgctagtggatttggaaaattaataaataatcaaagtgtcaaaataaaaaaaactggcaaacaatctttaagagtaaaaatagaaaaaagtaaaaaccaggcttgcactatatttggaagttgtcttattaaaaatattaaaaataaagaaagccccgagtggttaaaaaaaagaattctttcactgggattaagaccaatttcggctgttgtcgatgtaactaattatgtaatgtttgacttaaatagacctctacacgcttacgatgtagataaaataaataaaggaataattgtcagaaactctaaaaaaggagaaaattttaaagctttagataataaagattatattttggatgatgatatgtgtgttatttcagatcaccaaggagttttaggattgggtggaataataggcggtacaagatctggaacagagcttaattcaaagaatattttgctagagtctgcatattttgatccagagattacaagaaaaaccgcaaggagattagaattaaatagtgatgcgaagtttaggtttgaaagaggcattgatccaaattctatttcgattggactagaaaaagcttcagagatgattgtaaaaatttgtggaggcgaagtatcaaaatcagatattcaatttacaaaaaaaataaagaaaaaaaaaatattgttcgacccatttcttgcatctaaaacaattggcatacaaataaatactaatgaaataataaaaattcttgaaaatttagggtttaaaattaaaaataaaggcaaagctcttattgtggaagttcctagctggagaccagacgtacatggtcaaattgatttagttgaagaaataattagaatcaaaggatttaataaaattcaatcaattgaaccctgaa

SEQ ID NO: 301687 - DNA, 1021 bp, Unknown
  Bacterial polypeptide expressing nucleotide sequence isolated from the Sargasso Sea
aatgaaatttacaatctcatggcttaaagaacatcttgaaacaaatgcttcagatcaagaaatagttgcaaaattgactgaactgggtttagaggttgaagaatatcatgatacaagaaaggccttttcagattttattgttggtcaagttctagaggaaggcaagcatcctaatgctgacaaactcaaggtttgtaaagttgatattggcacagctaaagttgatgttgtatgtggggctccaaatgtagaaaagggcatgaaggtcgtttatgctccacctggatcaacaatccctataaatcaaatgaaattaaaagctacaaagataaggggtattgagtcaagtggaatgatgtgctctgaatacgaactgggcatttcagacaatcatgaaggaattattaggttaaatgacgactcaaagattgggcaatcttattcagaaatagcaggtttggatgatgtagtaattgaaataggaataacacctaatcgacaagattgtttaggagtttttggcatagctagagatcttgctgcttctggattagggaaactaaagattagaaaaaatagtagtcaaaaaggttcattcaaatctccaattgatattgaaactaaaaatactgatctttgtcctatttttgcaggacgttattttaagggtgtaaaaaatgttcaaagtccagattggttacaacagaagttaaaatctgttgggcttaggccgatttcagcattagtggatattacgaattttgtaatgttagaccttaatcgtccactacatgtttatgatgcagataaaattgatggtaaaataattgttagagaatcaaaagaaggtgaaagttttaatgcattggatgaaaagagctatgatttaaaagatggaatgtgtgcaattgcagatgaaagaaaagtattgggacttggtggaatcatgggaggagagagttcagggtgcaatgaaagtactgaaaatgttcttttagagtctgccctttttaatcccata

SEQ ID NO: 301688 - DNA, 1888 bp, Unknown
  Bacterial polypeptide expressing nucleotide sequence isolated from the Sargasso Sea
tctgatgcaatgagtcattatggagtagcgagagatttaaaagcattttttgagcttaacaatgaaaagacaactctgaagttacctagtacaagtaattttacttatgatgattttaaaattgaaaccaaaataaatgtaaaggatacaaacttatcccctttatatgcaggtataattattaaagatattgaggtcaaagagtctcaaacatggattaaaaataaacttaaatcaattgggtatgaacctataaataatatagttgatataactaactatgttttacatgaaattggacaacccttacatgcttttgatttagacaagatcactaatattgaagtcaaaaacctgccttcaaaaacaaaatttaaaacccttgatggaaatgagatatctcttaatgaggaagatatcatgatttgttcagaagataatccattgtgtttaggcggcatattcggaggtttagactctggtgtcacctcaaatacaaaaaatatttttttagaatctgctatatttaatcctatatctataagaaaatcatcaaaaagacattcaatatatactgaagcttcttttaggtttgaaaggggtattgaccctgaaatggttttatatgccttaaaaagagcctcaatattgatcaaaaacgattgcccagaatctatttcgtcaaatatcattcaagagaacaatcttaagctagatgagaaaaagattttcttaaggtataatgagataaactcaatatcaggtaagataatagacaaagatgttatagtatctattttaaactctctagatgtaacagttgaggcagcaacagatgatggcttaaatgttatatctcctcattatagagcagatgtaaatagagagattgatttaattgaggagatccttagagtatatggttatgataatattgaatcaagctctagattgattctttcgtcaaaggactacagtatagataattataaaataattgataatttacttagcaaaagccttattggagttggttttaatgaaatcatgactaattctatctgttctcctgaagcaaatcaactaaataatgagcatacaccaattgaaattattaaccctcaaggtatcgaattatcaaatcttagagtttcattactgccaggaatgattgatactatagcttttaatattaatagacaaagtaaagatcttaaattatttgaaataggtaatacttaccaaaaagttgataaaaataataatgaaacaaggacactttcaattgctctttgtggagaagtttttgaagaatcatggttagttaattacaatacagacaattttttctacttaaaaggaattgtcgataaattatttaatgacttgtcacttgaggttaattataatgctgcaaatgactctaactattcacagaaacttttaataagaaaaggaaaagagacaattggttttatgtgtgaattaaataaaaaaatgattaacaaatactcactagatactaaggtgtattatgcagaaatagacatatctaaaattgacgtatctaaaattaatactaaatataaagaggtttcaaaattcccatcttcacgaagagatgtatctatgatattagactctaaaattaattttgatgaaattaaaagactatcatttagtgtcgacaaaaatattttaaaagaaattaatttatttgatgtttataaggataagtcgattggtaataaaaagaaatcatatgctgttagctttattttcaatgacttaaggaaaacacttaccgatagacatatagatcaaataatgaagaagattatggataagtttattaaagaactaaatgctcaaataagagataaataat

SEQ ID NO: 301689 - DNA, 1549 bp, Unknown
  Bacterial polypeptide expressing nucleotide sequence isolated from the Sargasso Sea
ccatccaccgatcaattggttgctgattttaatcgcattggctttgagattgaagacgttctccacaaagggcaggggttatccaacattgttgttggccacattaaggaatttaggccccatccagatgccgatcgcttacgaatcgcccaagtggatattgggtcagagacggtgcaaattgtcacggctgcaaccaatgtgaatgatggcgataaaattccggtgagcttgccaggcgccattttagcgggtggcttaaaaattaaaaaaggcaaactgcgtggtgttgaatccaatggcatgatgtgttcagccgttgaatgtggcttaacggatacctcgccaggggtatgggtactaccaccaaacacacccgtcggtgtggattttattgagcacgcgcaactgatcgataccgtgttggatatcgccattttacccaatcgtggtgacgcgcttagtttggttggtttggccagagaatgccaggcattgtatgggacaaaaaaatcatttaacccacaaccgcaatccgccagtggcgatgtgcaactaacatgcacgattgatccatccttttgcaattattatcgagctcaaaaaataacaggggttaccaatcaacacaccccattaacgcatcaaacgcgcttgtactattcagggtaccggccgttatcgtggttggtggatgtaacgaacattgtcatgatcgaaaccggtcagccattgcatgccttcgatgcgtcgaacatcaccagtattgaggccacttatggcagtggtgagaccatcgagttgttaaacgaaaaagaagtaacattggactcaagcatccccgtcattaaattaaacaaccagccatcggccgttgctggtgtaatgggcgcgcaacagggcgaagtgtcccaccaaacccaagcgatcattttagaaaccgcgttgtttgattctgtggtggttcgtaaagccacaaaaaccttgggcattcggtccgaaagttccaatcggttcgaaaaacatgtggatgccagtagtgttgatcttgctgttgcacgagtccacgaactattagctgctcacgataccattacagtgcactcaccagtagaggctggccaatgccaggcaaccgcgttagacattcaagttgatattgcacgaatcaatcaatttttaggaacatcattttctgacaaagatgtacatgtgcgattggaaccacttgggtttacggtcaatggtacaacggttaccgtgccaagctatcgagcaaatgattgcactgagtggccagacattgccgaagagctttgtcggttttcaggcattgaagatgtcacgccaaccccaattgccgatatggttcccattaaccatagtgcacagtggtgccagcggcaggccattcaacaagcggccttgcaactgggtttaacggaagtggttccatttccattgcatgcacccgacgattcatctcagccggtcattttaaaccccatcacccctgaattaacagtattacgctcatcagcgattcaat

SEQ ID NO: 301690 - DNA, 1247 bp, Unknown
  Bacterial polypeptide expressing nucleotide sequence isolated from the Sargasso Sea
gatgaaatttacaattgattggcttaaacaacatttagatacagatcttaacgataaagaaataattaataatttaacgaacgttggtcttgaggttgagagttttgaaaatgcaccttccgaattagatgattttattgttgcaaaaatactaaatgcgcaacaacaccctaatgcagatagattaagagtttgtgacgttgacattggtaaaagtgaaactgttaaagttgtgtgcggagctcccaatgcaaaaaaaggtttatttacagtatatgcgggaccaggttcaataataccaaaaaatcaaatgaaactatcaatcagtaaaataagaggtgttacctcctatggaatgttgtgttctgaagctgagcttaaattatcagatgaaagcgagggaattacagagttatcagaaaagtataaggaaaaaattgggaaaaaatattttgataccaaaactcctaaagttgtagatttatctataacaccaaatcgaccagattgtcttggagttagaggtattgcaagagatcttgctgcagctggagttggttctttaaaaaaaataaaagatagtaaactaaatcaaaattttgatcaggacttaaaagtaactattaaaaaagaaaaaaaacaaggctgcacaatttttggtagttgtttaataaagggggtttcaaataaagaaagtcctcagtggttaaaagataaaattatttcgttaggtcaaaaaccgatttctgcaattgtagatataacaaactatgtgatgattgatttaaataggccacttcacgcatatgatgctgataaagtaagtaaagaaattatagtaagaaattcaaaaaaaggtgaaacttttgaagcactagacaacaaaaaatactcattagatgatgatatgtgtgtaatttctgatcaatcaggagtgttaggactaggtggaatcataggcggaacacgttcaggaactgaactagagacaaaaaatatattattagagtctgcgtattttttaccaagatcaattagaaaatcttcaaaattattaaatatagatacagacgcaaaatttagatttgaaagaggaattgatccaaaatcaattgaggctgggctaatcaaagcagcggatctaataaaagaagtgtgtgggggcgaagtaagtaaatttgatattcaaagattggaagaagaaaaaacaaataaagtaaaatttgaaatttctttgttgaaaaaat

SEQ ID NO: 301691 - DNA, 2183 bp, Unknown
  Bacterial polypeptide expressing nucleotide sequence isolated from the Sargasso Sea
tcaagttgtatgtggtgcacctaatgccaagtcaggtatgtttggtgtatttgctccaagtgatacttttatacctggaactaacattaatcttaaaaaatctgaaataagaggtgtagaatcaaatggaatgttgctttcagaacgagaattaggaatatcagatgaacatgatggcataatagagttaacaggaaaacataaaataggcgatccaattgcttctatatatggatttgatgatcctgtaatagagataaatttaacaccgaatagatcagattgcctatcagttagaggaatagcaagagatctggcagctgcaggtttaggcactttaaaagaattaaaaattaaaaagataaaaggtagttttaaaagtaatataaaatgggtaaggaaatttaaaaaagatgaagagtatttatgtcctggcgtagcaggtcgattatttaaaaatattaaaaatagtcaaagtcctgaatggttaaaaagaagattaacacttattggtctaagaccaatcagtacgttagtagatatcactaattatgtaacttttgatcttggtcgtccactccatgtttatgatgctagtaaattaagtggtaacttagtaatgcgtaaatctcaaaataaagaaaaatgcaaaaccttggatgataaggaatatattttatctgatgaaatggttgtcataagtgatgataaatctttgcacggtataggaggagtaatgggtggcttaaatagtggttgctcagaaaatacaactgatgtttttttagaagtagctctttttgatccaattagtgtaaccaaaactggtagaaaattaaatttacaaagtgatgcacggtaccggtttgaaagaggtttagattatacttcaattgattggggagtagatatagcaacacaaatgattcttgatttatgtggaggtgaaactagtgaaattgttgctgacaaattagatagtccaaaatcaaaaactattaattttaatactacacttactaaaacatatggtggtattaatatttcagaagatcaacaaaaaataattttagaaaaattaggttttttaattagcggtaaagataaaaaaaattttaaaattactataccatcttttcgacctgatattgcttcatcagcagatatagttgaagaaatacttagaatttatggatttgataaaattgaacccacttccttacaaaaagatgaaggcaatacagatgaaattctaagtcctaatttaaaaagtttttttaaatctagacgattaatagctaacagaggttacttagaaactgttacttggtcttttatggatgcaaaaaatgctgattttttaaataataattcatctataaaaattaaaaatcctataagtgttgagatggatgcaatgcgaccttctacatttccaaacttattgaattcaataaatttcaatatttcaaaattatttacggagggaaaagtatttgaggtagggccaaactttcatggattagaagaagaagatcaacaaatggttgcaactggtattcattatggttttgatagttcaatttcttggaacaaaaaacaaagatctgttgatatatatgatgtgaaaagtgatgttttttacattttagatcaattaaatgttccagtagagaatttgcaatatgataaaatagataataatatttatcatccaggtaaatctacaaaactgaggttaggcaaaaatacaattgcgacctttggtgaaataagtccgttattattaaatagatttaatattaaaactatagtttgtggctttgaaatatatttagatgaacttgatcaatttcaaacgaaaaaaacttcaactaaaaaaagttttgataataattctttacagaaaattgaaagagattttgcatttctttttcctttaaaaattcaagctatagatataattaatgctgttagaaaaattgataaaaaaataattaaaaatgtcattatctttgatgtttttgaaggaaagaatttatctgatagtaaaaaaagtatagcatttaaggttataatgcagcctcaagaaaagacattcacagatgctgaaattgaaaacctatctactaatattattgatcttatatcaaaatcatttgatggtgaattaagacaataat

SEQ ID NO: 301692 - DNA, 1270 bp, Unknown
  Bacterial polypeptide expressing nucleotide sequence isolated from the Sargasso Sea
catgaaaattcaatattcatatttaaagaattttcttaatacaaagcttagccaaaatagacttgtagatttattcactcaagtgggctttgaatgtgaatctgtgggagatgtaatagagtttgacataaccccaaatcgaggagatatgctatcgcttacaggtttggaaagggaattctatgcttaccaaggaagaaaatctaataataaattaaagacatctaaactaaatttaatcaaagaccagaaagttattagtcaaatcgatggttctggttgcgggaactatcacttaatgcttgttgagggtttgcaaaaaattaaaaatctagatgctaaaaaacgaaattttattgaatctgctggagttccattaatacatcccctagtagatttaggtaattatgtgatgttagaaattggcgctccaatgcatgtatttgatttagataagttggatctacctattaatattcaattccctaagtcaaataataattcattagaagttatagggggtgatgtaaaagatattcaattatcctcactaacaatccaagatcaatctggcattcaagctatagctggaatcattggtagtgaaagatcttcagtttcatctaatacttctaatattgctgtagaagctgctttttttaaacccgaaactatagttaatcaagctagaaaatatggtctagcaaccgatgcgtcgcatcgctttgagagaggtgtagatccagaaattcagcaattagctttagaaagatacgtgtttctattaaatcaaatctcaacatacgattcaattgagttatatcattcaaagtctataaaaactagagagaaaaatgtgcatcttaatatagaaagatttaataatttttctggtctcagcatgaaggcaagccaagcgagcctaatattaaaaaatctaggttttgatgttgtgagcaagaactcaaaaagtcttgtatttaatattcctagtcacagatttgatatttgtcttgaagaagatttatatgaggaattactaaggtgttatgggtatgacaatattcctatatcaatacccaaggctggcccaatcataaaaaataaagaggatgatgtattggataaacttaggcttgggtttgtttatgctggctttaaagagctaatgcatatgccatttgtttccataaaatcttttaaaaaattaaatcctaagaattggactgctgctgaactgagaaaccctatcaatgaaaatgagccattc

SEQ ID NO: 301693 - DNA, 805 bp, Unknown
  Bacterial polypeptide expressing nucleotide sequence isolated from the Sargasso Sea
tatgaaatttacacttagttggttaaaagatcatttagatacaaataaagatctcgcgacaattgttgatacactaacaaacattggacttgaaattgagagcgttgaagacaaatcaaaagattttaatgattttactgttgctgaagttttaaaagctgaaaaacatcctgatgcagatagacttaaagtttgtaccgtaaaatcaatagatggaacatttcaagtagtgtgtggggcacctaatgcacgagaaggaatgaagggtatatttgcacccgagaatagttttattcctggcacaggagtgaagttaaaaaaatctaaaattagaggagtagaatcatgtggcatgcttgtttcagaaagagaaatgggaatatctgatgagcatgacggtataattgaggttgactcaaaatattcattgggggaaaaatttatagaaatatttaatcttgatgaccctgttattgaaataaacattacaccaaatagaggagattgtctttccatcagaggtgttgcaagagatttagctgctgcaggattaggaaagttaaaagaatctaaattaataaaaaatattgaaggcacatttgatagtcctgttaaatgggaaaaagattttaatggagatatagaatatatttgtcccggtgtagcaggaagatattttaaaaatgttacgaataaagaaagcccagcttggttgcaacaacgattgaaaggtattggtctaagaccaatttcagcccttgttgatatcactaactacatcacttatgatttaggaagaccttta

SEQ ID NO: 301694 - DNA, 307 bp, Unknown
  Bacterial polypeptide expressing nucleotide sequence isolated from the Sargasso Sea
atgggatcaatggatctggaccagattgtcgccgacgcgcaaaaagccttcgcagaagcctccgacgtcaccaccctcgagaacgagaaagcccgctttctcggtaaatcgggtgcgctgaccgagctgttgaagggccttggcaaacttgaccccgaaacgcgcaagaccgaaggcgcacggatcaacctcgtcaagcaacaggtggaagccgcgttgacggcccgccgtcaggcgctggccgacgcgttgctgaaccagcgcctcgccgccgaggccatcgacgttacgctgcccggccgcggca

SEQ ID NO: 301695 - DNA, 1522 bp, Unknown
  Bacterial polypeptide expressing nucleotide sequence isolated from the Sargasso Sea
aatgaaatttacacttaactggctaaaagatcatttagagacctcacaagatttagatagtattgttgaaacacttacaaatattggtttagaaatagaaaatgttgaagataaatcgaaaattttcaatgattttacagttgctgaagttttaaaagcagaacagcatcctgatgcagatagacttaaagtatgtagtgtaaaaactattgatggaacttttcaagtagtctgcggtgcgccaaatgctcgtacaggaatgaaaggtatttttgcgcctgaaaatagttttattccaggcacaggaataaaattaaaaaaatctaaaataagaggtgttgagtcttgtggaatgcttgtgtctgagagagaaatgggaatatcagatgagcatgatgggattattgaagtcgatgcaaaacataaacttggtgaaaaatttattgaagtatttaatcttgatgatccagtcatagaaataaatattactccaaatagaggtgactgcttatctgttaggggagttgcaagagacttagccgctgcagggttaggaactttaaaagaaaatgctcttacaaaaagtataccaggtactttcgaaagtcctattaagtgggaaaaagtttttagtggtgatgaagaatatctttgtccaggcgttgctggtagatattttaaaaatgttaccaataaagagagcccagcatggcttcaacaaagactaaaagcaattgggctaagaccaatctctgcattggttgatattactaattacattacgtatgatttagggagacctttgcatgtgtatgatgcagataaaatagatggtaatcttacaatgcgttttgctaagaaaaatgaaacttgtttgactcttgatgaagaaaaaagagagtgcactgcagacatgattgtaatttctgataatcaacaacttcacggcattgggggagtaatgggcggccttgacagtggttgcagccttgatactaaaaatgttttcttagaagttgcattatttgatcctatttctgttacaaaaactggaagacatcttaaactacaaagtgatgccagatatagatttgagcgaggaatagattcaacctcaattgaatggggaataaatgcggctactaatatgattagtgatttatgtggtggtgaagtcagtgaaccagtcaaaactaaggttttagaaaataaaaagtcaaaaataatttttaatacaaacaaagttaaatctcttgggggtttagagattaaaaatgataaacaaaaatcaattttagagtctttaggttttaatattgtagaaaaaaacaatttttttgaaataactgttccaacttttagacctgacattgaaggagaagcagatatcgttgaagaaatcatgagaatatatggctttgataaaattcctcttactgatgtgagcgatatacataataagaaaaatatcttgagtcctgaacttaagtctttttataaaattaaaagattaattgctaat

SEQ ID NO: 301696 - DNA, 1642 bp, Unknown
  Bacterial polypeptide expressing nucleotide sequence isolated from the Sargasso Sea
atgcttacaatttatgcgccacctggctcaattattccaaaaaataatatgaagttagaggtttcaaaaattagaggcgttacatcttatggtatgctttgttcagaggcagagttaaatttatcagacgaaagtcagggaattataagtttaagtgataaatataaaaataaggttggaaaaatttattttagctctaataaagaaaatactattgagttatcaattactccaaatagaccggattgtttaggtatacgcggtatagcccgcgatctagctgccgctggaatagggaaactaaagcctattaaaaagaaaagacttaaacaaaataataaaaaattaaatgtagtaataaataaaactaaaaatcaatcatgttcaatatttggaagttgtttaattaaaaatataaaaaatcaagaaagtccgaattggttaaaagaaagacttatttcagttggcttaagacctatttctgcagttgtagacgtcactaattatataatgttagacctaaatagaccattgcacgcatacaatttagacaaaataaataaaaatataattgtaagagaatcaaaaaaaaatgaatcaataaatgctttagataataaaaaatataatttatctgaaggaatgtgtgtgatttcagatgaaagtggccctttaggtttaggtggaattattggtggtactagctcatctactgaaatagatacaaaaaatattcttatcgaatctgcttactttgatccatcaataacaaggaatacctcaaatattttaaatttaaatagtgatgctaactataggtttgagagaggtattgatccaaattctattgaagctggattacaaaaggcagcagagatgatcacagaaatatgtggaggtgatgttagtaaatttcaaattactagaataaaaaaaatatctcaaaaagaaattcaattagataataattttccaacaaaaattttaggtataaatataactgtaaaagaaattatacatatattagaaaaattaggttttaagtgtaaaaaaaataaaaattcaataactgctcaaataccaagttggcgacccgatataactaaaaaaatagatttggttgaagaaataataagaatcaaaggtttagaaacaatcaagtctatagaaccagaaaaaaatagaatcaatcaaactttaaattatgagcaaaaacattttcacctagctcaaagaactatcgcaaccagaggatatcttgaggcaatcacttggtcgtttacaaatgaaaaaactaataattattttttaaattctaaaaaatcaataaaacttattaacccaattagttctgacctaggagttttacgatcatctaatttttcaaatttaatagaaaaagttagagaaaatattgatagaggagaagaaaatatttctttattcgaaataggtccgatttttgatggcaataaaccaggagaacaaactatctcagcttgtgctatttcggctggatatgcttcaagtccaaattggaatgagaaagaaagattattagatgtatttgatgttaaaagagatctttttcatacactttatgaacttggaactgacaaagatcaaattaaaatagaaacaa

SEQ ID NO: 301697 - DNA, 1435 bp, Unknown
  Bacterial polypeptide expressing nucleotide sequence isolated from the Sargasso Sea
aatgaaagtttcgttacactggctaagaaggttcgttgactttgatttaactgctactgagttagctgaaaagctaaccatgagaggatttgagactgaagtagtgtcagattttgattctttagaaaatttagttgttggagacgttttaacagcagaaaagcaccctgatgctgacaagcttaagttatgttctgtttcagatggatcagaaacattcagtgttgtttgtggagctccaaatgtcgatgctggtcaaaaaatagtttttgcaaaagttggagctgttcttccaggcgatttcaaaataggtaaagctaaaataagaggcgtagaaagctttggaatgatttgttctgaaagagagcttggaatttcagaagagcatgatggtattatggtgttaaatgattctaataaggcaggaacaccgattaaagaagtgttaggtccactatttaatgccattgatattgaagtaactccagataaagcttttgcattaagtcatcgaggcatagcaagggaagtagcaacaattgtagggtctaaactaaaaactccaataaatagcgtaaaattaaacccaaagtccaaagacgttgtatcaatcgaattagataaaaaaggcggctgtacacgctatattgcgggtacaatgaagggagtaaaggtaggaccttctccaaaatggcttgccgaatatttgaaatcagttggtcagaagagcatcaataatcttgtcgatatatctaattttatgcttttggaaatcggtcatccaactcatgtctttgatctaaaaaaattagctaaacctgcaattaaggtgtcttgggcaaaaaagggtgaaaaattcgatgctttggatgaagaaacatatgaattaagtgctaatcatatggtgattacggatacaaaaaataccgttgctttagctggcattataggtgggatggatagctctgttaccgattcaaccacagaagtattgattgagagcgcttattttgacccagttgttatcagaaaagggtctaaaaaattaaatttattatcagaggcatctagaagatttgagagaggtacagacccaaatgctgctttagaggcatttaatatgattgtccagttaatgcaagaagttgctggtggtactttagagtctgttatcactgatgaatgttcaatgtgcttagatagcacttctgttgatttatcatctgaaaaactcctcaaatatgctggacaagaaattccttcaaaagacgtagaatctatacttaaaggacttcacatagatactaaaaaaacaaaaactggctggaattgttctattcctacatttagaactgatctaaaggtagaaacagaccttattgaagaggtgtttagatgttatggttatgacaatattaagtcttattttaattat

SEQ ID NO: 301698 - DNA, 1432 bp, Unknown
  Bacterial polypeptide expressing nucleotide sequence isolated from the Sargasso Sea
atgaaattcacaattgattggttaaaacaacacttagatacaaagtataatgacaaaaaaattttagataaattaactaacatcggacttgaagtagagagctttgaaagccaatcatcccaacaagatgaatttgttattgccaaaattataaatgcagaacgccatccaaacgctgatagattaagtgtatgtgatgttgatataggtgaaaaagaaattgtaaaagtagtttgtggagctccaaatgcaaaaaaagatctgttaactatatatgctccacctggtgcaataataccaaaaaataaaatgaaattatctgtaagcaaaattagaggagtgacttcatatggaatgctttgttcagaatcagaattaaaattatcaaatgagagtgagggaataactgaattaccttcaaaaaaatacaataatcaaatcggtaaaaaattttttacaaataacagttcaaaggtaattgatctttcaatcactcctaatagagctgattgtcttggagttaggggagttgctagagatttagcggcggcaggtgctggaaaacttaaaaaatatgatcaaaataaaataaaatttaaaggaactcaaaaaataaaagtaaaaattaataaagagaaaaatcaaggatgtgctgcatttggaagctgcttaattaaaggtattaaaaatactgaaagtccacaatggttaaaagataagatattagcattaggtcaaaaaccaatctcagcgatagtagacataacaaattatataatgtttgatttaaataggcctctgcatgcctatgatgcagataaaattaatgaaagtattattgttagaaattctaaaaaaggtgaaagttttgaagctttagataataagacatatacacttcaagacaacatgtgcgtaatatctgatcaatctggagttttggggcttggaggaataataggtggaactagatctggaacagagctagatactaaaaatattttattagagtcagcatattttaatccaaaatctattagaaaaacttcaaaattattaaatatagacactgatgcaaaattcagatttgaaagaggaattgacccaaactcaattgaagaaggactagtcaaggcagccaaactaatccaagaaatatgtggtggagaaataagcaaattagatgtacaaaaaagtgaaatttctaaaaaaatatcaataagatttcctttagatttatttgaaagcgttacaggatttaagatttctgtaaaagaaataatcaaaattttaactgatttaggatttataattaaaaaaaagaataatgatttaaatcttatagctccttcctggagacctgatatattacagccaattgacatagtggaagagatagtaaggattaaaggctatgatcaaatcaaaactg

SEQ ID NO: 301699 - DNA, 2317 bp, Unknown
  Bacterial polypeptide expressing nucleotide sequence isolated from the Sargasso Sea
gatgaaaatcacatttaattggctaaaagatcatttaaagactaatttaatagaaaaaaatcttttacagcaattaaccaacataggattagaagtagaaagcgtagaatgtctctctgctgataatgatttgttcaaagttgcaaaaatcactaaaactgaaaaacaccctaatgcagaccgactcaaaatttgtgatgttaacgttggtggtaaagatataaaaaaagttgtgtgtggtgctgcaaatgcaaaagagggattaattactatatatgcacctccaggtgcgattatccctaaaagtaaaacaaaattagtagtagccaaaataagaggtgtcacttcttatggaatgctttgttcggagtctgaattaaatttatctgatgagagtgatgggataactgaattatctgagaaatatgagaaaagtattggtaagagttatttttcaaaatcaaaatcaaaaataaatttgattgatttatcaataacaccaaatagacctgattgtcttggtgttagaggaatagctagagatcttgccgcatctggttttggaaaattattagacttacaagaaaaaaaaattaaaccagagagcaaacaaataattaaagttaaaattaatagagaaaaagatcaaggatgtagtgcttttggaagctgtttaattacaaatgtaaaaaatattgaaagtcctaagtggcttaaagatagattggtttcagttggtcagaaaccaatctcagcaatagttgatattacaaattttgttatgcttgatataaatcgtccacttcatgcatatgatgctgataaaatcgagaaaggcttaattattagaaactccaagcctggagaagaatttactgccttagataataaaacctacaaattagaaaaaggcatgtgtgttataagtgataacaagggagttttaggattaggaggaattattggagggactagatcaggaacagaatttaatactaaaaatatactattagagtcagcctattttgatccaggatcaattagaaaaacaggaaaaaaattgaatcttgatacagatgcaaaattcagatttgaaagaggtatagatccattatcaattgaagctggtttaaaaaaagcagcatcattaattaaagaaatttgtggtggcaaaatagggagaatagatattcaaaaaactgagacttataaaactaaaatgattaaatttgacattaatttgtttgaaaaaatatctggattcaaaatttcctctacgacaatgatcaaaattttggaagatcttggatttaaatgtaaaaaaaatagaaaatatttaagattaacggtgccatcttggagacctgatattttacaagaagtagatattatcgaagaattagtaagaatatgtggttatcataaaataaaagccatagatccaatcaaggagagaacaaagtctactttaactcaatctcaaaagttgtttcattttttacaaagagcaattgcttcaaaaggttatctagaaactataacctggtcttttacagactcaaaatacaataatcattttaaagaaacaaataaagaaattaaaattgtaaaccctataagttcagaattgggagttttgagaaattctatattctcaaatttgatactgcacatgagcaaaaatttagatagaggtttcaaagatttatcaatatttgagataggtcctatttttactggttcaaatcctggtcaacaaaatacagttatttgtggtttgtcagcaggtaaaaaatctagactgtcttggattgataaggagagagaagttgatgtatttgatgttaaaagagatgttattcaaaccttagttgaagctggatataattctaataaattttttatagatagtgaaacccctaattattatcaccctggaaaatcgggaagattatttttgaataaagaaaaagatttggtaattgcttattttggtgaaattcaccccaatattttaaaaaagatagatataaaaacggagtctttagtaggatttgaaattttcttagataattttgaattttcaaaaaaaacattaaatgatcaaaaaattaagtatgaagtttcggattatcaaaaatctgagagagattatgcatttatagtaaataaagatgtaagctcgcaaaatttgataagtgctatttcaagtgttgataaaaatttaataagcaatgtaagagtttttgacgtttatgagggagagaatattcctgaaaatcaaaaatcaattgcaattaacgtgacaattcaatct

SEQ ID NO: 301700 - DNA, 844 bp, Unknown
  Bacterial polypeptide expressing nucleotide sequence isolated from the Sargasso Sea
atgaaggcacctataaattggttaaaaaaatatgttgatatagatttgaataatattgatgatcttcttcataagcttactttatctggaactgaagttgattcagttcagagacaaggaaattgggaaggaatagttgtgggggaggtgttagaagtatctaaacaccctaacgcagataggctaaatttagttttagtaaatgacagaggaaatcaggtaaaggtagtttgcggagcaaataatttatataaaaatcagaaaattgcttttgcgcctgtaggttctaagctttttagccctaaaacaaatcaaatggagacattgaataaaactaaaattagaggtgagatatcaaatgggatgatttgttctgctcttgagttaggtcttggagatgatcatgatggaataatggatttgagcaatgatctaaaagtgggtcaagatttaaaagatatttataacgacatagttatagatttagagctcactccaaatcgcccagattgtcttgggatgtatggaatagcaagagagattgctgcattaactaaaagtactctaaaagaaagtattgaaataaaaaaaattaaagagagtaaggaatatagcgataatttagatataaaaattatcgatcctgatctttgtcctagatatatgggtatagttataagtgatgtcaaaatagaggattctccaagctggcttaagaatgcattaatatcaattggagaaaacccaattaataatatagttgatataacaaattatgttatgtttgagcttgggcagccattgcatgcttttgactatgaaaaagtaaaaaatggcaaaattg

SEQ ID NO: 301701 - DNA, 976 bp, Unknown
  Bacterial polypeptide expressing nucleotide sequence isolated from the Sargasso Sea
atgaagttcaccgttgactggctaaaaaaccatcttgatacaaaatttaacaataatcaaataatagataaattaactaatattggtctagaagtagaaagttttgagagtcctacatctgaattagatacatttattgttgcaaaaattataaatgccaaaactcatccaaatgctgacagattgaagttatgtgatgttgatataggtagcgacaaaacaattgaagtagtatgtggagccccgaatgcaaaaaatggtcttttgactgtttatgcacctccaggatcgattattcctaaaaatcagatgaaattatctgtaagtaaaataagaggtgtaacatcatatggaatgctctgttctgagtcagaattactattatccaatgaaagtgatggaattatagaattaaaaaacaataaatatgcaaataaaattggagaaaaatattttaaaaacacttctgaaaaagtaatagatttatcaattacgcccaatagaccagattgtttaggagtaagaggaattgctagagatttatctgctgctggtgctggtaaattaaaaattaataaaaaatccaatttaaaatatagaggtaatcaaaatataaacgtaacaataaaaaaagaaaaagctcaaggatgcacaatatttggaagttgtttaataaaaggtgtaacaaataaagagagtccaaaatggctaaaagataaaattttgtctttaggccaaaaaccaatatctgcgatagtcgatattactaattatgtaatgtttgatttaaatagaccattacacgcttatgatgcagataaaatagataatgaaattattgttagaagttcttctaaaggagaaagcttccaagccttagataataaaaaatatattttagaaaatgatatgtgtgttatttctgacagatctggagtccttggtcttggcggcataattggtgggacaagatctg

SEQ ID NO: 301702 - DNA, 1234 bp, Unknown
  Bacterial polypeptide expressing nucleotide sequence isolated from the Sargasso Sea
cctgcctgcgccgcagcccgttacgctgcgcgtggcgcgtgccgccaaggtcatcggtatgcagctgacgcaggcgcagtgcgcagacgccttgcagcgcctgggcctgccggtggcgcagggcgacggcacactcacggtcacacccccctcgttcagatttgacatcactatcgaggaagacctgatcgaagaggtcgcccgcatggtgggctacaacaacctgccgaccaccccgcctttggcgcccatcacgcccaagctggcgctggaggccacccgcagcccgtttgcggtgcgccgatcgctggcagcgctgggctatcaagaaaccatcaacttcagctttgtggaagagcggtgggagcatgagctggctgccaatccccagcccatcaagctgctgaacccgattgccagccagatgagcgtgatgcgctcgactttattgggttctttgctacaagttttgaagttcaacctcgatcgcaaggccgagcgggtacgtgtcttcgagctgggccgtgtgttcctgcgggacggcagcgtgcgcaataccgacaccacggtggaaggttttcaccagcccatgcgtgtgtcgggtctggcctacggcccgaacgacatgctgcagtgggggcgcaaagagcaggcgatcgatttcttcgatgtgaagggcgacgtggaagccctgctggcccctttgcgcgcaacgttcgaacccggcaaccatcctgccatgcaccccggccgctgcgcgcgcgttctggtcggtggtcgcgcgattggttttgtgggcgaactgcatccgcaatggcgtcaatcgtgggacctgccccaggcgcctgtgatgttcgaactggagctggacgccgtgttgcaacgtgtggtgccgcagttcaaacctgtgaccaaacaccaggcggtcgagcgcgatgtggccgtggtggtggccgagcgtgtgacccacgccgacatcatgggcgcggtcgagcaggctgttccgggcggcatgctgcgctctgcagtgttgttcgacgtgtaccgccccaaggcgctgcgtgctggcgaagaggcacccgcagggggcttggcacccggtgaaaaaagcctggctgtgcgcctcaccctcggccgtgacgaagccacgctcaccgaggcggaaatcgacgccgcagtgcagtccgtgataacgcagctgacgcagcgcacaggcgctcgtctgcgggtgtga

SEQ ID NO: 301703 - DNA, 985 bp, Unknown
  Bacterial polypeptide expressing nucleotide sequence isolated from the Sargasso Sea
gatgaagtttacaatagactggcttaaagaacatttagacactaattatgatgacaataaaattgttaatagattaactgatattggccttgaagtagagagttttcagggccaattgtcagagctagataattttattgtagcaaaaatattaaatgcagaaaaacatccaaatgcggataggcttaaagtatgcgatgtagacattggaaagaatcaagtagttaaagttgtttgtggagctacaaacgcaaaaaaaaatcttttaacaatatatgctcctccagaatctgttattccgaaaaatcaaatgaaactatctattaccaaaataagaggagtcacttcctatggaatgctttgttctgaatctgaattaaatttgtctgatgaaagtgaaggtattatagaactttcttcaaaaaaatataataatcaaattggtaaaaaatattttaagaataacacttcaaaagtaatagatctttcaataaccccaaatagaccagattgtcttggagttagaggaattgctagagatttagctgcagctgacacaggaaaattaaagaaattaactttaaaaagtgtaaaaaattctggtcctcaaaaaataaatattaaaattactaaagaaaaaaaccaaggatgtttagcttttggaagttgcctaattaagggagtaaaaaatacagaaagccctaagtggctaaaagataaaattataacattgggacaaaaaccaatttcagcaatagtagatattacaaattatgtaatgatagatttaaatagaccactccatgcatatgatgcagataaaatagataaaggaataatagttagaaattcaaaaaaaggagaagcttttaaagctttagataatgaaaattattcactcaaagaggatatgtgtgtaatatctgataattctggagttttgggtttgggtggaataattggaggaacaagaatcagggtacag

SEQ ID NO: 301704 - DNA, 533 bp, Unknown
  Bacterial polypeptide expressing nucleotide sequence isolated from the Sargasso Sea
gatggccaatcttaaaaaaataaaagaagaatttatcttaaagctaaataagaaattaaatctttcagaagtaaatttaataaaatcagaactatttggaaaaaatggattagtttcatctgaatttaaaaaaattggaacaatacctgagcaacagagaaaaaaatttgcttcagatttaaatgtcataaaagatgaattacaagaattaataaactcaaaaataaatgaaattgaaatttctgaaataaatgaaaaattaaaaaaagaaaagatagatattactttacctgagagatctttttttcaaggaaaaatacatcccgtgtcccaaactattgatgagatttcctctatattttcagaaataggttttagtgtagaggaaggtccagatgttgaaaatgagtataataatttcactgcacttaatactcctgataaccatcctgcaagagatatgcatgacacattttatttagataaaaataaagaaaaattattacgtactcatacctctcctgttcagatta

SEQ ID NO: 301705 - DNA, 1519 bp, Unknown
  Bacterial polypeptide expressing nucleotide sequence isolated from the Sargasso Sea
attacgctgctcgatggtgagcagcgcgttctcacaccggatactttggtcattgcagatcaccagaaagccctcgccatagcaggcatcatgggcggagagggcagctgcatcaatgttgaaacccgtcatctcttcctcgaagccgcttttttcgcccccgaactaatggctggtcgtgcgaggcattatggtctgcacaccgatgcgtcccatcgctacgagcgaggcgtggatcccgagctggcgcatcaggcggtcgagcgcacgacacagctgttccttgaatgtgtcggcggcgaggccgggccggtgacggatgtgacgtcatctacggatttgccccaacgtgagcccataaccctgaaggctatatcaatccaacggatgttgggcatcgatctggcgtccgatgaggtcatgcggatctttaaaggcttaggttttacagtcgaggccaacgtagataagggtagctggcggtgcactgcgccgagctggcgctttgatatgggccgcgaagccgacctgcttgaggaaatcgcgcgcattcatggttacgacaacattccggttgagcccgtccgcggcgcggcgtcagctggcactgtggcggagtctgcaaccccgccgtcagtgatcaagcagcggctggtcgcccggggcttccacgaggccattaccttcagctttgtgagtctggagcttcagcagctgatcaacccggatatcgagccggtgatactgaaaaacccaatctcgagtgatcttgcggtcatgcgtacctcgctgattccgggtttgctgggtgccgcggcccataacatcaaacggcagcagaccagagtgcggctgtttgagacgggtttgcgctttatgcccggcgagtcgctgacgcaactgcccatgctggcgctcttgctctgtggccgccgaatgcctgagggctggtcatcgaacgcagactcagtcgacttttacgacatgaagggtgagatcgaggcgttgctgcaagcctcggatcaagcgctgacatgccgctcggtagtcagaccgggtctgcacgatggtcagaccgcagaaatcctgttagggggcgagattgtcggcgtaatggggcggctacatcccagcacagcaaagacacttaacctgccggaggagactttcgttgccgagcttgagttggcctcggtggtggggcgcgccctgccggattacgaagagatttccaagtttcctgaagtacgccgcgacattgcggtgatcgtcaatcgagacactccgtcggctgcggtgcttgatacagctagggcttcggccggagctgctctggccgatgctcgaatctttgacgtctacgaaggcgatggggtcgcagaaaatgcgaaaagtctggccattggtttgactttccgagatcaaagacgcaccctgaccgatgaagagatcaacgaatctctgtcacaagttattgaatgcttgggggaaaaattgggtgccacattacggcactgat

SEQ ID NO: 301706 - DNA, 819 bp, Unknown
  Bacterial polypeptide expressing nucleotide sequence isolated from the Sargasso Sea
gatgaaatttacaatgagttggttaaaggaacaccttaaaaccaagcataaagacattcagattattgataaattgactgatgttggacttgaagttgagagttttgaaaatattagctctgattttgacaattttaaagtagcaaaaattataaatgctgaacaacatccaaacgcagatagacttagggtatgtgatgttgatatagggcaacaaaatattgttaaagttgtttgtggagcaccaaacgctaaaaaaggtcttttaactgtttacgctggtcctggatcagttattccaaaaaataatatgaaacttacagttagcaagattagaggagtaacctcatatggaatgttatgttcggagtcagaattaaaattatcagatgaaagtgaaggaataacagagctaaaactaagtaaatattcagacaaaataggtaaaaatttttttaataacaaaactgaaaaagttgttgatttatcaataaccccaaatcgacctgactgtttaggggtgagaggaatagctagagatttagctgcggcaggagctggtaaattaaaaagtatttcacataaaaacatcaagaagaatggatctcaaaatgtaaaagtttcaattactaaagataaagaccaaggttgtacaatatttgggagttgtctcataaaaggggtaaccaataaagaaagtccaaaatggttgaaagagaaaatcgagtctcttggtcaaaaaccaatttcagcaattgtagatataactaattatgtcatgcttgattttaatagacctctacatgcatatgatgcaga

SEQ ID NO: 301707 - DNA, 392 bp, Unknown
  Bacterial polypeptide expressing nucleotide sequence isolated from the Sargasso Sea
agacctaaaatcaacacttattttatttttaaaagaattttttgaaattgataacttaaaatatagatttagaccaagctattttcctttcacagaaccaagtgccgaaatggacgttgcgtatacaaacaaaaataacgttctaaaaattggtgaaggagatgattggttagaaattttaggttgtggaatggttaatccaaaagttttagaaaactgcaatatagactcttcagtctatcaaggttttgcttttggaatgggtatagagcgtctctcaatgttaaaatatggaataacagatatgcgcggtctgtttgacttaaatcttaactggttagatcattatggtttttctccactagatttaaaaacaagatcggaagtttaag

SEQ ID NO: 301708 - DNA, 1480 bp, Unknown
  Bacterial polypeptide expressing nucleotide sequence isolated from the Sargasso Sea
aatgaaagtttcattgcactggcttagaaggtttgttgattttgacttaactgcaactgagttggctgaaaagctgactatgagaggatttgagtctgaagttgtatcagattttgattctttagaaaatttagttgttggagatgttttaactgcagaaaagcaccctgatgcagataaacttaagttatgttctgtttcagatggatcagaaacatttagtgttgtttgtggagctccaaatgtcgatgctggtcaaaaaatagtttttgcaaaagttggagctgttcttccaggcgattttaaaataggcaaagctaaaattagaggtgtagaaagttttggaatgatttgttctgaaagagagcttggaatttcagaagaacatgatggtattatggttttagatgagtctcataaggcaggaacacctattaaagaagttttaggtccattatttaatgctattgatattgaagtaactcctgataaagctttcgcattaagtcatagagggatagcacgagaaatagcgacaattgttggatccaaactgaaaactccaataaatagcgtaaaattaaatccaaagtcaaaaaacgttgtatcagtcgaattagataaaaaagggggctgtacacgctatattgcgggtacaatgaagggagtaaaggtaggaccttctccaaaatggcttgcagaatatttgaaatcagttggtcagaagagcatcaataaccttgtcgatatatctaattttatgcttttggaaattggtcatccaactcatgtctttgatcttaaaaaattagccaaacctgcaattaaggtttcttgggcaaaaaagggtgaaaaatttgatgctttggatgaagaaacatatgaattaagtacagatcatatggtgattacggatacaaaaaatatcgttgctttagctggtattataggtggaatggatagttctgttactgattcaaccacagaagtattgattgagagcgcttattttgatccagttgttatcagaaaagggtctaagaaattaaatttattatctgaggcatctagaaggtttgagagaggtacagaccccaatgctgctttagaggcattcaatatgattgtccagttaatgcaggaagttgccggtggtactttagagtctgtgattactgatgaatgttcaatgagcttagacaatacttctgtcgatttatcgtttaaaaaactgctcaaatatgcaggacaagaaattccttcaaaagacatagaatctatacttaaaggacttcacatagatgctaaaaaaacaaaaactggctggaattgttctattcctacatttagaactgatctaaaggtagaaacagaccttattgaagaggtgtttagatgttatggatatgacaatattaagtcttcttttaattattcttctattatgcaatatgcaaacgatgaagaatcttctatttct

SEQ ID NO: 301709 - DNA, 1856 bp, Unknown
  Bacterial polypeptide expressing nucleotide sequence isolated from the Sargasso Sea
aatgaaagtttcacttcactggctaagaaggtttgtcgactttgatttaactgccactgaactggctgaaaagttgactatgagagggtttgaatctgaagtagtatctgattttgattctttagaaaatttagtcgttggagacgttttaacagcaaaaaaacatccagatgcagacaaacttaaattatgttctgtttcagatggatcagagacttttagtgtagtttgtggagctccaaatgtagatgctggtcaaaaaatagtttttgcaaaagttggcgccgttcttcctggtgatttcaaaataggcaaagctaaaattagaggcgtagaaagttttggtatgatttgttctgaaagagaacttggaatttcagaagaacatgacggtattatggttttagatgaatcttgcaaggctggtacaccaattaaagatgtgttaggtccattatttaatgctattgatattgaagtaactccagataaagcttttggattaagtcatagaggaatagcaagggaagtagcaacaattgttggatcaaaactaaaaactccaataaatagtataaaattaaatccaaagacaaaagacgttatatcagtcgaattagataaaaaaggcggctgtacacgctatatagcaggtacaatgaaaggtgtaaaagtaggaccttctccaaaatggcttgccgaatatttaaaatcagttggtcagaagagcattaataatcttgttgatatatcgaattttatgcttcttgaaattggtcatccaacccatgtatttgatctaaaaaaattagccaaacctgcaattaaagtttcttgggcaaaaaaaggtgaaaaatttgatgctttggatgaagaaacatatgaattaagtacagatcatatggtaattacggatacaaaaaataccgttgctttagctggtattataggcgggatagatagctctgttaccgattcaaccacagaagtattgattgaaagcgcttattttgacccagttgttatcagaaaagggtccaaaaaattaaatttattatctgaggcatctagaagatttgagaggggtacagactcaaatgctgctttagaggcattcaatatgattgttcagctaatgcaagaagttgctggtggtactttagagtctgtgattactgatgaatgttcaatgagtctagataatacttctgttgatttatcatctgaaaaactgctcaaatatgcaggacaagaaattgcttcaaaagatatagaatctatactgaaaggacttcacatagatgctaaaaaaacaaaaactggttggaattgttctattcctacatttagaactgatctaaaggtagaaacagaccttattgaagaggtgtttagatgttatggttatgacaatattaagtcttcttttaattattcttctattatgcaatatgcaaacgatgaagaatctactatttcttcattaaaacatcatttatcctccttaggatttcatcaatcttataataattcacttgaagatattgaagaagtgaagttgtttggaaaagatgctgttagtgttatgaatccttcgtccgaaagaatgaatactttgcgaacaaatcttcattcaggattgttgaaaaatttagattttaactatcgtaatggatcagcaaatacgttgatttatgaatatggaacaatttttgaaggtaagacagataaattagatgatataactcagaaaagtagtttatcgtgcttagttcacggtgatgtattttcaaaaaatgtacattttgattctatacctgcttctttttcatttttgaaaggggtggcttccaata

SEQ ID NO: 301710 - DNA, 1882 bp, Unknown
  Bacterial polypeptide expressing nucleotide sequence isolated from the Sargasso Sea
aatgaatatttcatataaatggttaaatgagcttttagattttgatctaaatgttcaagaaacttcagatttacttactgatattggtctagaggttgaaaaaaccattaaatatgaaacgccactcaccaacttgtccgaattgttaattggagaaatagtaagatgtgataaacatccaaatgctgatagattaaaattaactgaggtaaatgtaggtttaaataataatcttaatataatttgtggagcacctaatgttgcagttgggcaaaaggtaattgttgctccggttggcagtaaactaattacaataaaaaacgaatcatttaaaattaaaaaatccaaaatcagaggaattgaaagtgaaggaatgatatgtgcggaggacgaaattggtgttggtactgatcatgatggaataatagtcttaaaaaataaatacaaagttggtgactctgctgacaaggcttataaaaagttcgaagattatatttttgaaattggactaactccaaatagatgtgatgccataagtcattttggtgtagctagagatctgagagctgctctatctcatagaaatgaaaccaaaaacgaattaatattaccatctatcgtaaattttacaaatttaagattagccccctcaatatctgttaatattgctgattcatccttatgtcatcgattttgtggcttgattattaaagacgttaaaatcaaaccatctccaaaaaaaattattaataagttaaattcaattggattaaaatcaatcaataatattgttgatattaccaatttagttatgcatgaaattggacaacccctacatgcatatgatttagataaaattaaatctggtaaagttgaaattaaaagattaaaatccggtgtaaaatttaaaactctagatggagatgatattgatcttcataaggatgacctaatgatttgtgatggtaacactccaatgtgtatagcaggagtatatggtggaaaaaatcattcagtttcagaaaatacaacaacaatttttttagagagtgccttttttaatccaattactgttcgaaaaacttctaaaagacacaatataaacactgattcttcatataggttcgaaagaggtgttgatattgaattgttagaacattctttaaaaagagctgcctccctaattgttgaggattgtaatgctgaaattatatgtgatataattgatgaatatccaaataaaagcgatgaaaaaaatgtggttattaattttaataaaattaatagtcttattggtcatgaaattgataaattaaaaattaaatcaattcttaattcacttgattttaaaattaataatgttaatgatatttcagctggagttacgattccgcaatatagacatgatgttaacagggaatgtgatgttgtggaggaaatattaagaattcatggttataataatataccaattgataaaaatgtaaagttttcaatttcatcattacttaataagtcacataaatatcaaaatattatttccgattatttatcctctattggttttaatgaaataatgaataactcattagtttcagaaaattcaaacacaaataataaagattcagtttttttaaaaaattcactaagcaaagacatagcattgatgagaaatgatctcaaaagtggatttctaagttcaatatcatataatttaaatagaaaaagcatctcaaacaacctgtatgagtttggatctatttattataaatcaggaaagagttatgaagagaaaaaagttttgggagttgctttaaatggtgacgtgatttcaaaaaactggtcaaataataatgttaaatctaatttatttatttcttaa

SEQ ID NO: 301711 - DNA, 496 bp, Unknown
  Bacterial polypeptide expressing nucleotide sequence isolated from the Sargasso Sea
gatgggcgacaatctttcagatctgtcaaactcagcaatccaagaaataaatgaatgttcatcatcgaatgatcttgaatctatcagagtcaaatatctcggaaagaaaggtaccgtaacagcggctcttaaatccttatcagaaatagatccaagggatcgtccagctcatgggaaaagaatcaatgagatcaaaacattgattcaagaaaagctttcagaaagaaaagcatcaatacagaaacaagagatcaatcaaaacattgaaaacaaaatgattgatgtcactcttcctggaagagtaaattttcaaggtcatagacatcctgtaacaaagacgctattagaaattgaagaaatattctatggtgcaggctttgttgttgaagatggcccagagatagaagatgagtatcacaatttcactgctttaaatattcctcataaccacccggcaagggcaatgcatgatactttttactttaactctgagtat

SEQ ID NO: 301712 - DNA, 1198 bp, Unknown
  Bacterial polypeptide expressing nucleotide sequence isolated from the Sargasso Sea
tatgattgagataagcatggatgatttaaaagattgtccaagatatgttggaggcataattcaaaatgttaagattaaagagtcccctgattggcttaagaagaaattagaatctgttggcataagaagcataaataacctagtcgatatttcaaattatgtaatgatggaaatgggtcagcctactcacttcttcgatttagataaaattaaaaataaaaaaatattggttcgcagagctagagatggtgaaaaaataacaacgcttgatgaaattgaaagatcagtcaatagcaatgtgatgctcattacagatggtgaatcacctatcgctgttgcaggtataatgggaggttttgattcagcaatcaatgaaaatactaaaaatgtcttaattgagtgtgcttacttcaaccctgcgacaataagaaaaagctctaaaacattaaatatgattaccgatgcttctaaaagatttgaaaggggagttgattacaacgcacctgttttggcattttggagaattgtacatcttatcgatgaattaaattgtggtgaatggatacctgacattatggatacatatcctgaaaagattgaaaccaatgaaattgtcctaaagaagaaactaatcaatgagatagcaggagttaacatcccgaatgattttgttgtaaaaacattaagctctcttggttgtagaatatatgaaaaagatgatttaacctgctcacctccttcatggagaccagaccttacaagagatatcgaccttattgaagaagtcatcagagtttatggctatgataatataaagtcctctaataattatacttccattatgaattttgatgattttgaccctcatcataatttagataaaattaataattctttaattggtcttggattttatcaagttttcaataattctcttcaaactaaagaggaagcatatttttattctaataaaaaagatcttattgaaatgaagaacccgttatcggataaaatgacacatttgcgttactccttaatacatggattgatgcaaaatattgaacataatgtcaataacggcatccatgatttaatgctttttgagcatggcaatacattttcatattctgattcaaaaagattgggcatcgatgaagtacaaaccttgacaggtatattgcatggtaattatcaagaa

SEQ ID NO: 301713 - DNA, 529 bp, Unknown
  Bacterial polypeptide expressing nucleotide sequence isolated from the Sargasso Sea
aatgtcaattcttgaacaaatcgattcggtcaggaattctttcctgaccgatatcgagtcttttcccactaactcacttgaaattgacgcaattcgttcaaagtacattggcaggaagggacaggttgctcagctattttctcagcttggtaaagcgagtgatgaagagcgtccattacttggacagaaacttaatcaactcaaaaatgaactttcccaacttttcgatgataaactaaaacaagttcttactaataagcaaacaagtgaagatcaaaacctagatcttagtctaccaggccggaaaaacaggatagggtccttgcacattttagagcagacacttggggaaattaaggaaatatatcgatccattggatttcatatcgcttatggaccagaagttgatgatgattaccataactttactgcattaaacattcctgaacatcatccagcaagagacatgcaggatacgttttttatcaatcccgaaacggttttgagaacgcatacatcaaatgtgcaa

SEQ ID NO: 301714 - DNA, 959 bp, Unknown
  Bacterial polypeptide expressing nucleotide sequence isolated from the Sargasso Sea
aatgaagttcacaatttcatggttaaaagagcatctagatacacaaaaatctgatcaagaattaattgatagtctgactaatattggactagaggttgaagatgtagttaatgcaagtgaaattttctcaaattttattgttgctcaagttgttgaggaaaaaaagcatccaaatgcagataaattaaaagtttgtagggttgatattggttcagatattgttgatgtagtttgtggggctccaaatgtagaaaaagatatgaaagttgtttatgcacctcctggatcaactattccatctactcaaatgaaactaaaagcatctaagatacgcggcgtcgagtctcttggaatgatgtgctctgaatttgaactaggaatttcagatgatcatgatggaatcattaagcttgatgatagtgtgaaagtgggccaaccgtatgctgaaattgcaggactaaacgatacaattatagaaattggcattactccaaatcgccaagattgtcttggtgtttctggtgttgcgagagatctatctgccgctggattaggaacattaaaaaaaagaaaaattaaaaataataagggtaaattaaaatcacctattcaaatcgaaatagttgataatcgagcatgccctgcttttgctggcagatatattaaaaatgtaaaaaatattgagagtcccgattggttaaaaaataaattaaagtcaattggtctaaggccgatttcagcattggtagatataacaaactttgtcatgtttgatatgaaccgtcctttacacgtttatgatgctgacaaaatcaatgaaaaaataattgtcagatcctctcaaaaaggtgaatcatttagagctttagatgataaagagtatcatttagaagatggtatgtgtgttatagcagacaaatctaaagtactgggtctaggtggaataatggggggagatg

SEQ ID NO: 301715 - DNA, 265 bp, Unknown
  Bacterial polypeptide expressing nucleotide sequence isolated from the Sargasso Sea
ggaaaaatagttattggtgaaggtgataaatggttagaaattctgggatgtggaatggtacatccgaacgtactaaaaaatgtaaatgttaatccagataaatatcaaggttatgcttttggcattggtattgatagacttggaatgctcaaatatggaataaatgatctaagagctttttttgagactgactatagatggcttaatcattttggatttgatccactggatgtaccgtcaaactatagaggtcttagcagatgaa

SEQ ID NO: 301716 - DNA, 1015 bp, Unknown
  Bacterial polypeptide expressing nucleotide sequence isolated from the Sargasso Sea
tatgtcatgtaaaaaacacccaaatgctgatagactcaaacttacaagtattgacttaggagatcaagggaaatttgaaattgtatgcggtgcacccaatatcgccaaaggtcaaaaagtaccagtagcaaccgttggatctactatctacacaaattctggagaaaagattaaaatatcaaagtctaaaataaggggtgttgtaagtaatggaatggtatgtgctgaagatgaaataggattaggggattctcatgatgggatcatgattttagataataaggtaaagtcaggaactccactaagtcaaatttataagattgaaaaagatagtgtattagaaattggactaactcctaataggtctgacgcaatgagtcattatggagtagcgagagatttaaaagcattttttgagcttaacaatgagaaggtaaatctgaagttaccaagtacaagtgattttacttatgatgattttaaaattgaaactaaaataaatgtaaaggatccaatcttatctcctttatatgcaggtataattattaaggatattgaggtcaaagagtctcaaacatggattaaaaataaacttaaatcaattgggtatgaacctataaataatatagttgatattactaactatgttttacatgaaattggacaacccttacatgcttttgatttagacaagatcactaatattgaagttaaaaacctgccttcaaaaacaaaatttaaaactcttgatggaaatgagatatctcttaatgaggaggatatcatgatttgttcagaaggtgatccattgtgtttaggaggtatatttggaggcttagactctggtgtcacctcaaatacaaaaaatatttttttggaatctgctatatttaatcctatatctataagaaaatcatcaaaaagacattcaatatatactgaagcttcttttaggtttgaaaggggtattgaccctgaaatggttttatatgccttaaaaagagcctcaatatga

SEQ ID NO: 301717 - DNA, 706 bp, Unknown
  Bacterial polypeptide expressing nucleotide sequence isolated from the Sargasso Sea
atgattattactcttccttggttaaaagagcatttaaaaactaatgcaaaagaaactgaaattataaatcgactcactaatattggtttagaggttgaaagtgtaaaagaaaacactggagagctgagtgaatttagaatagctaaaattatcaaagctgagaaacatcctaacgcagataaattgaaagtgtgcgatgttaatattggtgaaaaggaaactttaaaagttgtatgtggagctcctaatgctagagatggacttataacaatttacgcacctccaggggccataatacctaaaacaaagttccagctaaaaattgctaaaataagaggagttgagtctcgcggcatgttgtgttctgagagcgaactgaatttatcagacaagagtgagggaataatagaattaaatgctaaggaaaaagaaataggaaaaagctactttaaaagcaagtcagaaaaagcaatcgatattgcaattacaccaaatagaccagactgtttaggtataagaggcattgcaagagatttatcctctactggaataggaaaattaataacttcaaaaagaaaaaagataaaacaaagctccaagcatcaagttaagatctcaataactaaagataagcatcaagggtgcctaacatttggaagctgctatattaaaaatatagttaataaagatagtccagaatggtgaa

SEQ ID NO: 301718 - DNA, 997 bp, Unknown
  Bacterial polypeptide expressing nucleotide sequence isolated from the Sargasso Sea
atgatacttacaataagttggttaaaagaacatctagacactaaatataacgaaagtaaaataatcgataagttaacaaatattggacttgaagttgagagttatgaaaatgttagttctgagcttgatagttttaaaattgctagagtcgttaatgctgaaaagcatccaaatgctgatagattaaaagtatgcgatgttgatataggtcaaaaagatacaatcaaagttgtttgtggagcgccaaatgcaaaaaaggatcttttaacaatttatgcaggtccgggtacaattattccaaaaaataaaatgaaactttctgtaagtaaaattagaggtgtaacctcatatggaatgctatgttctgaggcagaattaaacctttcaaatgaaagtgagggaattgtagaacttagtaaagataaatattctaataaggttggtaaaaaattttttaaaaatataaatgaaaaagtaattgaattatcaattactccaaatcgtccagattgtttaggggtcagaggtatagcaagggacctagccgcagctggagcgggaaaattaaaagatatttctaaaagtaatataaaaaaaacaggaccccaaaatatcaaggtttctattaaaaaagataaaaatcaagcttgtactattttcggaagttgtttgattaatggagtatcaaataaagaaagccctaaatggctgaaggacaaaatccagtcactcggtcaaaaaccgatctcggccatagttgatataaccaattatgtaatgttagatctaaacagaccacttcatgcttatgatgcagataaaattgaccaagaaattatagttagaaattcaaaaaaaggtgaaacatttgaagcgcttgataacaaaaaatatgaattagaagataatatgtgcgtaatttcagataagtcaggagttttaggtttaggcggtattattggaggaacgcgctcaggtactgaatttaatacaaaaa

SEQ ID NO: 301719 - DNA, 1363 bp, Unknown
  Bacterial polypeptide expressing nucleotide sequence isolated from the Sargasso Sea
ttggaagttgatagtcaaaaaaaattaggtaatgattatgttattgatatcgacttgacaccaaatagatctgattgtctttcaatttacggcgttgctagagatctaaacgcttcaacctataattataaatttaagaaaacacagtcttgtaagcctgtaaaattaaatgcagttaaaagtaattatgttgaaattaaagatttagatgcatgcccaaattttaattacttgattctcgactgctgtgataaagcaccaaaaacacctaaatatattattgaaaaacttaaatccagtgacatagattctatccattatgtagtcgacatattgaattacataatgcttgaaattgggcagccaatgcatgcttatgaccttgataaattatcgggaaaattaaggatatctacatctgttaaaaaggaaattttccaagggcttaataatgaagaatataaattagaaaaaggttttttgactattaaagacaatgaacacattcaatgtctagcaggtatattaggctcaaaaaatagtatggtcacaaagaaaactcagaaagtacttattgaaagcgctttttttaatccaaaatcaataattaatagagcaagatcattaaaattacaaacagaatcttcatacaggtttgaaagaggtgttgattttttattacctaactcagcattagataagtttgttagttatattaaacatacagatatcaaaatattggagagaaaatccttaggcaagaattcaagttttccaaaaaataaaaaacttaatataaatcttgaagcaataaattcagcaataggcacaaatttaagtaaaaatgaaatttataaaatatttttaaatttaggttgtaccattgaaaaagttaaaggaattgttacaagcccatctcatagatatgatttaaatatactctctgattatattgaagaagttgctcgtatatacggatataataatattgatgatcaagatgaaattttaccagttgattataaaaaaatagattatttttatgataatacaattaaaataaaaaacttcttaaaaaatataggattccatgaatgtatcaactattcattttgcgatgaatcctcttttaaccaagtaaattggaagaatgactccatagaaaaaaaagttaaaattaagaatgctcttaacgaaaatcatacaacattaagatctacaatatcaaatagccttattgaaaatattaaatttaatttaaaaagtaacagaaatgattcatataaattttttgaaatttcaaagatttttgatagaaatgaagaacttcatctctcggtgtgcttgcacggacaacattgac

SEQ ID NO: 301720 - DNA, 634 bp, Unknown
  Bacterial polypeptide expressing nucleotide sequence isolated from the Sargasso Sea
aatgaaattcactaaagattggttagatgatcatttaaaaacaaaaaaaactgagtctcagattatagaaaaacttaatagcattggtttagaagttgaaaaagttgagccaatcaaaaatgaattaagcgattttatagttgcaaaaattatcaaagctaacaaacatccaaatgctgatagacttaaactttgtgatgtagatattggaaaaaaagaaactgttaaagttgtttgtggtgcaccaaatgcaaaagacaatcttttaacaatatatgccccacctggatcaactatacctaaaaatggtatgaagttggaaatatctaaaataagaggtgaaacatcttatggaatgctttgctcagagtcggaattaaaaatttcaaatgaaagcaaaggtatcattgatttaaatgataaatttcaatcaaaaataggtaagtctttttttcagaataaaaagaataataatattattgaactatctattacgccaaatagacctgattgtttgggcataagaggtatagcaagagatttatctgcaagtaactttggtaatttaaaggaaataaaaaaaagtaaaattaaaaaaaaaattacacataatgtaaaggtaaaaatgaaaaaa

SEQ ID NO: 301721 - DNA, 355 bp, Unknown
  Bacterial polypeptide expressing nucleotide sequence isolated from the Sargasso Sea
gaaacagataaacttaaaatgagatttcgaccaagtcatttctcattcacagaaccgtcagcagaagttgatataggttatacaaaaaaaggaaatcaattagttattggtgaaggtgatgactggctagatatattaggctgcgggatggtgcacccaaaagttctacaaaatgtaaatattgatcctaatagttttcaaggttatgcctttggcatgggcatagaacgccttgcaatgctcaagtacggtataagtgatttaaggactttttttgagtgcgatttaagatggaataagcattatggcttttctcccctgaactttccttctctcatcagggacttaagctaat

SEQ ID NO: 301722 - DNA, 859 bp, Unknown
  Bacterial polypeptide expressing nucleotide sequence isolated from the Sargasso Sea
atgaagtttacgctagactggctaaaagatcatttggaaacatcaaaggatcttaaaactataacagaaacacttactaacattggattagaaatagaaagtgtagaggataagtctgaagattttaaatactttactgttgctaaagtaataaaagctgagaaacatcctgatgctgataaactcaaggtgtgtaaagttaagacaattaatggtgagtttcaagtagtatgtggtgcacctaatgccacagagggaatgttaggaatatttgcaccagaaaatagttatattccaggtactgatttacatttaaaaaaaactaaaattagaggtgttgagtcaagtggtatgcttgtatcagagagagaaatgggtatttcagatgaacatgatggcattatagaagtaaaaggtgattataaagttggtgatcaatttagtaagatatttaaattagaagaaccgattatagaaataaacttaacacctaatagatcagattgcttatcggttagaggtattgcaagagatttagctgcagcaggtgctggtaagttaaaagaacttaaatttaaaaaaattaaagatacttttaaaagtccaatgaaatggaaaaaagattttaaagataaaaaattatgccctggagtagctggtaggtattttaaaaatgttgaaaatgttgaaagtcctcagtggcttcaaaaaagacttaaagctatagggttaagaccaatttcagcactagtagacataactaattatgtgacatttgatcttggccgccctcttaatgtttatgacgctgacaaagtatcaggaaatttaacaatgcgattagctgaaaataaagaag

SEQ ID NO: 301723 - DNA, 391 bp, Unknown
  Bacterial polypeptide expressing nucleotide sequence isolated from the Sargasso Sea
agttataaaagtttttgtttatttaatcaagttgaaggactggtaataaatgaagactcttccttcgcagagatgaaaggcactcttgagtattttgttcaagaaatgtttggaaaaaatacgaaaatgcgttttaggccgagttatttcccatttactgaaccgagtgctgaagttgatatatggaatgaaaaattaaaccaatggatggagattttaggctgtggaatggtaaatcctaatgtactaaccaatgttggatatgataataaaaaatatcaaggatttgcctttggaatgggtattgaaagaatagcaatgattaaatatggtattaaagatatccgtttattttaccagaatgacaaaagatttttggagcaattttaat

SEQ ID NO: 301724 - DNA, 820 bp, Unknown
  Bacterial polypeptide expressing nucleotide sequence isolated from the Sargasso Sea
atgaaattcacaaaaaattggctagatatacacttaaagtcaaaaaaaaaagaatctcaaattatagataaactaaataatatcggtttagaggtagaaaagatagagccaataaaaaatgaactaagtgattttataatcgcaaaaattattaaatctgacaaacatcctaatgcagatagattaaaactatgcgaagtcgatattggtgaaaataaaattgttaaagttgtatgtggagcaccaaatgcaaaagacggtcttttaactatatatgctccacctggatctataattccaaaaaacggaatgaagttagaggtttcaaaaataagaggcgaaatatctcacggaatgctttgttctgaatctgaactaaaattatcagatgaaagcgagggaataattgaactaaatagtaagaataataacaaaattggcaaaccttattttggcaattctaataaaaataacgtaattgaattatcaattactccaaatagaccagattgcttaggggtgagaggaatagctagagatttagcagcatgtgactttggcgatttaaaggaactaaaaaaaaaaaaattaaataaaaaaattaaacataattttaaagtaaaaatagaaaaagataaaaatcaagcttgttatgcttttggcagttgcataattagaaatatcaataacacagagagcccgggatggttaaagaatagaattttagcattaggtttaagaccaatatcagcagtcgttgatattacaaactatgtaatgtttgatttaaatagacccctccacgcttacgatttagata

SEQ ID NO: 301725 - DNA, 1528 bp, Unknown
  Bacterial polypeptide expressing nucleotide sequence isolated from the Sargasso Sea
aatgaaagttttttattcagaccttcttgagtttattaatgataatccttcaatggaagagttatccaatagcttatttcaacttggtcatgagcatgaaataaaaggagaatcttttgagatggagattaccccaaatagaggagattgtttgtctttaatcggtttggcaagagatttatcatgcatttacgatacgaatttagaccttaatatatacgaagataaaattagagatctagatctagattttacaaatctgtctaaagaaacctgtcccaagatatcattcttagaaattgaaatagctgggcccgtagatatttatgaagattatctagagtcttattataaaaagatgggaataaataaaaataattttttcacggatatttcaaattatctatcttatgaattagggcagccaacacattgctttgacaaagaacaattaacagggaacatagtctttgaatataaagattgctccgaggaatttgaaactttattggggaaaaaaatacaactaactggaaaaaactgtgtattttcaaataatggaaaaattataagccttgctggggtgatgggtggacaaaaaacagcatgctcaaaatcgtcaacaaaagttttagtagagtgcgctttttttaatccagaagcaataattggtcaaacaactaaatataaccttcaatctgatgccgctcataaatttgaaaggtgtaccgacattgattctcatgaaaaagttctgcgcagatttataaaaattgtagaagatcatgttgaaattaagtctttaagaatttcaagtttcgaatatcaagaaatgtcagagaaaaagatagaaagggaagtaactaaaattaattcaattttgggaacctctatttcagatgatttttataaaataaatttagaaaagattggctttacctttgattcaaacattactatacccagtcacaggaacgatatctcaaatcagaatgacttagctgaagaaattgcaaggataattggatataacaatatatcgagtcagcctgttgcttttagaaatgaattacaagataaagaaaaaaattctctaaaagaggtaaaggatttctttaatcataatggtttttatgaagtaataaattttcccttttgctcaaatgaaaacaagcattcaatttctgttgataatccgcttgactctaacagaaaatatctcaggggtaacttaaaagactccttaattgagaatcttctatacaacgaaagaagacaaaaagattgtataaagttttttgaggtttctgatgtatattcaaacaaagaaaaaattaaacatgattttagacttggcataattgcctctggaagaatgggccatgatcacaatctattttcaaagaatattgatagaaattatttggaagacttgctcaaaactatttttcatcaagatgaatttaatatagaagagatccaaaggcataatttagatacaaaaattacaaataagattttttattgt

SEQ ID NO: 301726 - DNA, 1173 bp, Unknown
  Bacterial polypeptide expressing nucleotide sequence isolated from the Sargasso Sea
cttactatatatgctcctccaggtgcaattatccccaaaaccaagacaaaattagtagtcgccaaaataaggggcgttacttcttacggaatgctttgttcagaatctgaattgaatttgtctaatgaaagtaatgggattactgaattacccaagaaatttagaaaaaatattggtaaaagttatttctcaaaatcaaaatcaaatcttattgatctatctattacacctaatagaccagactgtcttggagttagggggatagctagagatctttctgcatcaggttttggaaagctagtagatttagaagaaaaaaaaattcattcaaaaaataaacacaccttaaaagtgaaaattaataaggaaaaagagcagggatgtattgcgtttggaagctgcttaataacaaatgtgaaaaattctgaaagtcctaaatggcttaaagataaattaatttctattggtcaaaaacctatctcagcaatagttgacattacaaactatgttatgcttgatattaatcgtccattacacgcttatgacgctgataaaattgaaaaaggtataattgttcgaaactctaagtttggagaagaattcacagcactagataataaaaaatataaattggaaagtggcatgtgcgttattagtgacaacaagggtgttttaggacttggagggataatcggtggtaccagatccggtacagaattatttacaaaaaatgtatttcttgagtcagcttattttgagccgggatcaataagaaatacagcaaaaaaattgaatcttgatactgatgcaaagtttagattcgaaagaggtatagatcctttatcaatcgaagatggtttaaacaaagctgcaaaattaataaaagagatttgtggtggtgaaattagcaaaattgacgttcaaaaaatagaaacttacaaaacgaaaaaaatttcatttgacccaaatatttttgaaaaaatatctggttttaaaatttccatgaaagaaatgattaaaattttagaggatcttggttttgaagtaaaaaaagataaaaaaaaactgaaattagctgttccttcatggagaccagatatttcacaggaagtagatatcgttgaggagctggtaagaataagtggttatgaaaagataaagtatatagatccc

SEQ ID NO: 301727 - DNA, 1072 bp, Unknown
  Bacterial polypeptide expressing nucleotide sequence isolated from the Sargasso Sea
tatgaaactaccagttaaatggattaatgagtcatttaagaaagattatagtgcgatcgaactatctgatctcttaacactctctggaatcgagtctgagatcgaaaaatctaaaggtgaagaaattctcgatatttcattaacacccaatcgtgctgattgtttcagttataaagggattgtgcaagaagtgagtgctttagacaatgctaagattataagtgttaaacaggctctacctaagattcatcacaatctgacaatggaagttgatgttcaatcgaaggaagattctcctgttttcatgacgagagtcataaagtctataaatagaaatgcaaagagtcctaaatggctcaaagaaaaactcgatcaatctggatataagtcaatcaatgcagttgttgatatagctaattatgtaatgttagaaacgggccaaccacttcacacttacgatttaaaaatgataaaaaaaacaattttagttagacgagcaaagaaaaaagaagcaattgatattctagacggcagtagaaaaatcttagatccaaactaccttgtcattgccgatatagaaaagccacttggaattgctggaatcatgggaagcttggaatcaggaatatctgaagatacggaagatattgtccttgaatctgcctattttaattttgaaaccattatgggtagagctagggctcttagtctccatagtgaagcgagcatgagatttgaacggggcgtagacccagcaatacaagagcatgcgattcaaagatttaccaacctaatcaatgagattgcaggcggtgaaaatggtccgatacattcatccatcaacaagaaagaaatgcctaagaataaattcatcacacttagaaaagacaagatcaaacaaatattaggtattaccatcccaaatcaaacgatcaaaaatattctcaatagattggatatggaaattgatgaaaaagattttggatacattggctggagtgtaaaagcaccgagttaccgctttgatattaatgaagaatgcgacttgattgaggagatatccagagtatag

SEQ ID NO: 301728 - DNA, 1269 bp, Unknown
  Bacterial polypeptide expressing nucleotide sequence isolated from the Sargasso Sea
aaatgcaagagatggtttgatcacagtttatgctcctcctggagcgataatacctaaatcaaaaatgaaattaaaaatagctaaaattagaggggtagagtcaagaggaatgctttgctctgagagtgagctaaatttatcagaggaaagtgctggaataatagagattgaaaatatgtctaacaaaataggtaaaagtttctttaaaagttctaatgaaaaagtgattgatttatccataacccctaaccgccctgattgtttaggaattagaggaatagcaagagatttagcagctgctggtgttggaaaattattagatttaaaaacaaataagattaatcaaaaaaaaaatcagagtattaaaatttcaataactaaagaaaaaaatcaaggttgcttagcatttggcagttgcttaattaaaggtattaaaaaccaagaaagtccaaaatggttgaaagataaaattaattctttaggactcaaacctatttctgcagtagtagatattactaattacgttatgtttgatttaaacaggcctttacacgcttatgatgctgataagattgacaaagaaattatagttagaaattcaaaaaaaggtgaaagcttttcagctcttgatgataaaaaatatactcttcaaaaagatatgtgtgttattgctgataaatctggagttcttggccttgggggtgttattggcgggactaggtctgggacagaaatagaaactaaaaatatcttactagagtcagcttattttctgccgtcatctataagaaaaacatcaaaattgttagggctagagactgatgctaaatataggtttgaaagaggaatagatcctaattcaatgatcgatggcttaaaaattgctacagatttaattttgaaaatttgcggaggggaagcaagtaagtttaatatctcaggaaaaaaaaattataaaaataaatcaattgatcttgaagtaggcaaatttaaaaaaacaataggctttgcgataacggatactgaaataaaaaaaatattaaattccctcgggttttcaactaaatctggaaaaaaaaatcttaaagttcgtatcccaacatggagaccagatgtaaatcaggaaatagacttaatagaggaattaataaggataaaaggatttgataagatcaatcttgtagagcctgaaaaagtaaggaataaagaaacacttagcttccaacaaaaattatttcacctggccaacgatctatctccagtaagggc

SEQ ID NO: 301729 - DNA, 542 bp, Unknown
  Bacterial polypeptide expressing nucleotide sequence isolated from the Sargasso Sea
aatgcctgaggttaatacagaaaagatatttgcatcttttttattaagtgttgaacaagttgcttcaattgatgaattcaatgacttagaaaaagaatacttaggtaaaaattcgctaatttcagaagaacgaaagaaattatcatctatgagtgaaatctctagaaagaaatatggaaaagtccttcaagagctatcaacccaaatttctgaaagattaaatcaagaaagattaagttttcaatctaaattttttaaagaaaaggaattaaacgacaataaagatataacaatcaattggtacaaagatttaggaagcagagagcacgtattaacaagcgttatgaatgaagttgtggatatattctctgcaattggttatacggtagcaacaggcccagaagcagaaacttcttggcataattttgatgctttaaatacacctgattggcacccagctcgctatgaatcagacacactttatttagatgaaaatttagaacaacttctcagaactcaaacaagtacggtacaagtaaggc

SEQ ID NO: 301730 - DNA, 1164 bp, Unknown
  Bacterial polypeptide expressing nucleotide sequence isolated from the Sargasso Sea
aatgaaaattattgctcaacaacttttagagtattttaaaaataaaccgaaagtatcagaattatcagaaagacttttccagcttggccatgaacacgaactcaataaaggtattttagattttgaaatcactccaaataggggagattgtctctctttgaaaggtttggcgagggatttaaactatttttacaaggcaaaaattgaaaagccaatatttacaaaaaaaattcagaaactaaatttaaattttaaaaataaaacaaaagatctttgtccaaatatctcatttttagaagttgaaatcgcaggcaaaacaaagccttataaaaactacttagaaaattattttaaaagtttaaaaattaataagaataatttttttacagatatttcaaactaccttgcctatgaaagtggacaaccgacacattgctttgatgcagaaaaaatgaatggaatatttgttttagaaaaaaacaaaaagaaatctaagtttttgacattacttaatgaagaaatcgaaatagaaaaaaatgatttagtttttactcttgacggcaaagtaataagccttgcaggagtaatgggaggcgcaagtacatcttgtggcaaaaacacatataaagttctgattgaatgcgcgtattttaaaccagaagaaattttaggtcaggctagaaaatataatcttaattctgaagcagcttataaatttgaaagaggtgttgattttctaggacaagaaaatgttttgagaagatttattaaaataatcgatgatcatgcagaaattaggtcacttaaatttatttctgaaaataaaaaaaataacacaaaaagtgtggcttgtgattcaaagaagcttaatgagattattggttgcgatataaatgaaaaagaacaaaaggctattcttagttcactaggatttactaatggaaaaaaagttgctgttcctgctcacagatctgatattgaccaaattaatgatttagctgaagaaatcactagagtggttgggtacaacaatataccttccaaagctttaaagcttccagtgaaagcaaaaattttaaatagaagttttgaattaatttgcaggaattatcttgttaataatggtttctttgaggtgataaattttccattcaatgataataa

SEQ ID NO: 301731 - DNA, 895 bp, Unknown
  Bacterial polypeptide expressing nucleotide sequence isolated from the Sargasso Sea
atgaaattcactataccttggcttaaagaacatctagaaacaaaatataaagataataaaataatcgaaaaacttacagatattggacttgaagtagagagttttggaaatttaagttctgagattgatagctttaaaattgctaaaataattaatgttgagcaacacccaaatgctgacagattaaaagtatgtgatgttgatattggacaagagagtacagttaaagtcgtatgtggcgcaccaaatgcaagaaaagatcttttaactgtctacgctggtccaggttcaataattccaaaaaataaaatgaaacttgcagtaagtaagattagaggagttacttcttatgggatgttatgctctgagtctgaattaaatatatctgaagaaagtgaaggtataactgaattaaaacaagccaaatattctaatcaaataggaaaagtcttttttaagagtgctaatacaaaaattgttgatttatcaataacacccaatcgtcctgactgtttgggtattaggggtatagcaagagaccttgcagctgctggaactgggaaattaaaaaagatttcaagtaaaaaaataaaaaaaaatggttctcaaaatattaaagtctcaattgttaaagataaaaatcaaggttgcactatgtttggaagttgtttgattaaaggagtatcaaataaagaaagtccaaaatggttaaaagataaaatagagtcattaggtcagaaaccaatctctgcaatagttgatattacaaattatattatgatagatttaaatagaccacttcatgcttatgatgctgataaaattgataaagaaattatagtaagaaattctaagaaaggtgaaacttttgaagcattagataacaaagaatatc

SEQ ID NO: 301732 - DNA, 220 bp, Unknown
  Bacterial polypeptide expressing nucleotide sequence isolated from the Sargasso Sea
ggatgtggaatggtacatccaaatgtacttaaaaatgtaaatgtaaacccggacaaatatcaaggatatgcttttggcattggtattgataggctcggaatgcttaaatatggcataaatgatttaagagctttttttgagacagattatagatggctaaatcattttggttttgatcctttggacgtgccatcaaattatagaggccttagcagatgaa

SEQ ID NO: 301733 - DNA, 231 bp, Unknown
  Bacterial polypeptide expressing nucleotide sequence isolated from the Sargasso Sea
catgaaattcagtgaaaaatggttaagagagtgggttaacccgtcgctgtcggcacatgagctgtccgaacagttgagcatggctggcctcgaagtagatggtgttgagccagtagcaggcgattttaaaggcgtgctagtaggtgaagtagttgagtgcggtcagcatcctaacgccgacaaactgcgcgtaactaaaataaacgtgggtggcgatgagctacttgatat

SEQ ID NO: 301734 - DNA, 2350 bp, Unknown
  Bacterial polypeptide expressing nucleotide sequence isolated from the Sargasso Sea
aatgaaatttacaacagagtggcttaaagaccatttaaaaacaaacaaaaccgaagcccaaattattgataagttaaatagcactggtttggaggttgaaaaggttgaaactgcaaaaaacgaattaagtgattttattattgcaaaaattattaaagcagaaaagcatccaaatgctgacagattgaagctatgccacgtaaatgttggaaaaaaagaattggtaaaagttgtttgtggtggaccgaatgcaaaagacaacttattaactatttacgctccaccaggatcagtgattcctaaaaataatatgaaattagaagtttcaaaaataagaggagaaacatcttacggtatgctttgttctgaatcggagcttaacatatcagatgaaagtgaaggtattattgagttaaatcaaagttacaaaaataaaataggcaaaagctattttaaaaataatttagagaatgtcgtagagctgtcaataactccgaatagaccagactgtttaggtataagaggtattgcaagggacctttcagctagtggatttgggaaattaataaatcgcaaaagtataaaaataaaaaaaacttctaaacaaagtttaaaagtaaagattgaaaaaaataaaaaccaatcttgcaaaatatttggtagttgttttattaaaaatataaaaaatcaagagagtcccaaatggctaaaagaaagaattgtttcattgggtttaaggccaatttcagcagtagttgatgtaacaaactatgtaatgtttgatctaaatagaccacttcatgcttacgattcagacaaaataaataaggaaataattgtcagaaattcaaaaaaaggtgaaagttttaaagcattggataataaggagtataaattagatgatggtatgtgcgttatttcagatcgtgaaggagttttagggttaggaggaataataggtggcacaagatctggaacagaactaagtacaaaaaatattttattagaatcagcctattttgatcctgaaattactagaaaaacagctaaaaaattggaactaaatagtgatgcaaaatttaggtttgaaagaggaattgatcctcaatctatttcaataggactagaaaaagcctctgaaatgatagtaaaaatttgtggtggagaagtttcaaaatcagatattcaatctataaaaaaaatagaaattagaaaaatattatttgacccaaatcttgcatccaaaacaataggaatacaaataaaaactcaagaaataattaaaattttagaggatttaggttttaaaattaaaaaaaaaagcaaggttcttagtgtagaaatcccaagttggagaccagatatatatggccagattgatttagttgaagagataataagaatcaaaggatttgataaaattaaatcatttgaacctgaaaaaaaaagattaaaaccaactttaaatttttttcaaagatattttcatttggctcagcgagccgttgcttccaaaggatatctagaggcaatcacatggtcgtttacagatgaaaaaattaataataattttagagaaaatgttgaagaagtaaaaattattaatccaataagttctgatttaagtgttttaagaaactctctatatccaaatttaatttattatttaaaaaagaatattgatagaggttttgaaaatcaatcattatttgaaattggaccttcctttacgggaaaaaaacctggtgagcaaataacaattatttgtggaattagaaaagaacatttattaaatgtatttggtattaaaaccgatgttgtacaaactttagttgaattaggtatagataaaaatgaaactgttatagaaactaagacaccaagttactaccatcctggaagatctggttcaataataacaaaaaaagatcagaaattgttagcttattttggagaaattcatccaaaaataattaatgaaacttatggatttgagatttttttggaaaatttagtcaaatataaaagtcaaaataaaaaaagtaaaccaacgataagtttttctgactatcaaaaatcagatagggactttgcttttgttgttaaaaaagatcttaaagcacaagaattaatagagataatttcaaatgttgacaatgccttgattaaaaatgttaaaatttttgatgtatatgaaggaaaaaatataccttcagataaaaaatcaatagctttaaaagttactattcagtcagactttaaaaccttaaatgaaaaagatttaaatgaaatatcaaataaaattatttctagtgttgaagaaaaagctagtgcaaaattaagatcttaa

SEQ ID NO: 301735 - DNA, 823 bp, Unknown
  Bacterial polypeptide expressing nucleotide sequence isolated from the Sargasso Sea
actgtctggaattgagtcagagatagaaaaagataaaggggaagaaattctagacatctcattgacccccaatcgagctgattgcttcagttataaggggatcatccaagaaatcagtgctttggacaatgcgaaaattaaatatgaagatcttcttaatcctgaaatacatcacaaggaatgtatgaaagttgaggttcaatccaaggaagattgtcctgtttttatgactagagtgatcaagtcaataaataaagatgcaaatacaccaaaatggctcaaaaaaagacttgagcaatctggttataaatcgatcaatgcaattgttgatattgctaattttgtgatgctagaaactggacaacctttacatacttatgacttaaagaagattaatgaaaaaattattgtaagaagagcaaatgacaaagaggccatagatatccttgatggcagtagaaaacttctagattcagattttcttgtcattgctgactcaaaaaaggcattaggtattgcaggtatcatgggaagccttgactcaggaatatctgatgacacagaaaatattgtattagagtcagcctattttaattatgaaacaatcatgggaagagcgaggtcgcttagcttgcacagtgaagcaagcatgaggtttgaaaggggagttgatccaatgatacaggagtatgcgatacagagatttacaagcctaatcaatgaaattgctggaggatcgaatggccctattcattcatcaatcagtaaaaaagcactgcctaaaaataaattcattactcttagaaaagataagatcaagcaa

SEQ ID NO: 301736 - DNA, 823 bp, Unknown
  Bacterial polypeptide expressing nucleotide sequence isolated from the Sargasso Sea
gatgaggtttactaaagattggctagaagaccatttaagaacaaaaaaaagcgagcaagagatcatcgataaacttaatggaattggtcttgaagttgaaaaagttgagcccgttaaaaatgaattgagcgattttatagtggcaaaaataattaaagcagtcaagcacccaaatgccgatagactaaaattatgtgatgttgatattggagcaacaaataccattaaagttgtgtgtggcgccccaaatgcgaaagacggtttgttaactatttatgctcctcctggttcaactataccaaaaaatggaatgaaattagaaatttcaaaaatcagaggagagacatcatacggaatgctttgctctgggtcagaactaaagttatctagtgaaactgacggaattatccaattaagtaataaatataataataaaattggaaaaccgtactttcagggaaaaaaaaataataatgttatagaattatcaattactccaaatcgacctgattgtctgggtgtcagaggaattgcaagagatttatatgcaagtggttatggagatttaaaagaaattaaaaaaattaaatttacaaaaaaaaccaaacacaatttaaaagtaaaaatagaaaaaaataataatcaagcatgttctatatttggaagctgtttaattaaaaatattacaaacaaagaaagtccaagttggctaaaagagagaattttagcactaggcttaagaccaatttctgccgttgttgacataactaactatgttatgtttgatttaaatagacctctacacgcatatgatttagataaa

SEQ ID NO: 301737 - DNA, 1510 bp, Unknown
  Bacterial polypeptide expressing nucleotide sequence isolated from the Sargasso Sea
gaccaaaatcaatataaactaattaatgatcatttattgataacgaatgggaaagtaccagttgcattagctggcattatgggtggctatgatagtgctgttgatgataatacaaaaaacattttaattgagagcgcatactttaatcctgttactgtaaggaaagggtctaaagcgttaactattagcactgaagcatcaaaacgttttgaaagaggtgcagatccagatgcttctttagatggattctggcgtgtcattaatttagttgaggagtacacaggtggtgtttttgaaggtgatttcattgactattatccagaaaaaataaaagttgatcctattagcattagaaaaagtgaacttgaattgcttcttgggttgaaaattgaagatgattttatcacaaaaatcctgaaaggcttgggttttgctctaactgcagagagcagttgctttaattgtgttcctccaaccaatagacctgatataactagagagatagatatcattgaagagatagctcgtatttacggatatgataatattccagtagataattcactttatggcatctatacttttcatcagacagatttctactcaaatttgcaacatattagagaatctttatcaggacttgggttttaccagatatattcaaactcacttcagagtgaaaatattgcaaatatttcaaagaataattcagtcccgatgatgaatccacttagcaaagatatgtcatttctaaggacctcattattacctggactcctaaaagcagcagatttcaatattaaaaattcttcaagttcttttaaactgtatgaattaggtagcgtgcatacccaattaggcaataaaattgaagatataaaagaaaatctaaggttgtctggaattgtggttggaaatgaaaatagtgagagtattcatacagaaattactccgtttgatttattttcaataaaagggtatgtatacgcattattaaaggaaaagctacgactcaagatttcattagaaaaatgtgaaaatattctatacgatgaggcatatcatattacatttaagaaaggtattattggtactctaggtaaattatcaaatgagttgtttggtactttaaaactagacaaacatgatatttatggttttgatttggatatcgatatgattcttagtcaaagggaaactataaaatatagtccaataaatttgtaccctaaaatttcccgaagaattaatcttgtcttagatgccacaaatagtgttggcccgatacttcaattaattgataaaaagggcggtaatattttaattgataaatatcccgttgaagtgttcgaagacaaagaaaatataggagaaaaccaaaaaagcgtaacctttgaaatggtatttcaagactcagaaaaaacacttgaagataaagatgtaaaccctattatagatgaaattatagatattgctgataagaaatttaatgctaaattaagagtatgaa

SEQ ID NO: 301738 - DNA, 553 bp, Unknown
  Bacterial polypeptide expressing nucleotide sequence isolated from the Sargasso Sea
ttgacgctctctggaatcgagtctgagatcgaaaaatctaaaggtgaagaaattctcgatatttcattaacacccaatcgtgctgattgtttcagttataaagggattgtgcaagaagtgagtgctttagacaatgctaagattaaaaatgttaaacaggctctgcctgagattcatcacaacctgacaatggaagttgatgttcaatcgaaggaagattctcctgttttcatgacgagagtcataaagtctataaataggaatgcaaagagtcctaaatggctcaaagaaaaactcgatcaatccggatataagtcaataaatgcagttgttgatatagctaattatgtgatgttagaaacgggccaaccacttcacacttacgatttaaaaaagataaaagaaagaattttagttagacgagcaaagaaaaaagaagcaattgatattctagatggcagtagaaaaatcttggatccaaactatcttgtcattgcagatgtagaaaagccacttgggaattgctggaatcatggggaagcttgggaatcag

SEQ ID NO: 301739 - DNA, 568 bp, Unknown
  Bacterial polypeptide expressing nucleotide sequence isolated from the Sargasso Sea
gatgaaaattacatctaactggttaaaagaacatctagatacaaaattagatgaaaatcagataatagaaaaacttacagatgttggtttagaagttgaaagtgttgaaaaacaaggtggcgaattagatgagttcattgttgcaaaaattttaaaagtagaaaagcatccaaatgctgataagcttagagtttgtgatgtggatataggtaaagaaaatcctgtcaaagttgtttgtggtgctccaaatgcgaaagaaggtttgtttacaatctatgccccaccaggttcggttattcctaaaaatcaaatgaaattagtagtcagtaaaattagaggagttagctcttatgggatgttatgttcagagtctgaattaaatttatcagatgaaagtgatggtattactgagctttcatcgaatgattttaaaaataagattggagataattattttccaaaaaaaaattcaaacgtaattgatatatctattacaccaaatagagcagactgtttaggtgttagaggaattgcagagatctggctgcagcaggctcaggtaaattaa

SEQ ID NO: 301740 - DNA, 616 bp, Unknown
  Bacterial polypeptide expressing nucleotide sequence isolated from the Sargasso Sea
aatgaaatttacactaaaatggttacttgatcatttagataccaccgctgatctaaaaactattactgacactttaactaacatcggattagaaattgaaaatgttgaagataaatcagaagattttaaaaactttactgttgctaaggttactaaagtagaaaagcatccagatgcagataaattaaaggtatgtcaggtcaaaacaaaaaatggagattttcaagttgtatgcggtgcaccaaatgctagagagggaatgctgggtatttttgctccagaaaatagttacattccaggcacagaattacatttgaaaaaatcaaaaattagaggtgttgaatctaatggaatgcttgtttctgagagagaaatgggtatttcagatgagcatgatggaataatagaaatagattcaaaccgtaaagttggagatcgatttagtagcatatttaaggtcgatgaacctgttatagaaataaatttaacacctaatagatctgattgtttatctgttagaggcatagcaagagatttagctgctgcagggcttggaaaactcaaagacttaaaatttaaaaaaatacaagagtctttcaaaagtccaatgaaatgg

SEQ ID NO: 301741 - DNA, 802 bp, Unknown
  Bacterial polypeptide expressing nucleotide sequence isolated from the Sargasso Sea
atgaaacttaccttaagttggcttaaagaacatctagatacaaaatataacgaaagtaaaataattgataagttgacagatatagggctagaagtagagagttttgagaatgttagttctgaacttgatagttttaaaattgcaagagttattaatgtcgaacaacatccaaatgctgatagattaaaagtatgtgatgttgatataggacaaaaagatacggttaaagttgtttgtggagcaccaaatgcagaaaaggatcttttaacagtatatgcgggcccaggctcaattattccaaaaaataaaatgcaacttactgtaagtaaaattagaggagtaacctcttacggcatgttgtgctccgaagcagaattaaatctttctaatgaaagtgaaggaattacagagcttagcaaaaataaatattcaagcaaaattggtaaaaatttttttaaaaatgtaagtgaaaaagttgttgatttatccataacacctaatcgtccagactgtttaggagttagaggtatagcaagagacttggctgcagcaggagcagggaaattaaaaaatatttctaaaaataaaataaaaaaagtagggcctcaaaatattaaggtatcaattaaaaaagagaaaaatcaaggttgtactatttttggaagttgtttaattaaaggtgtatcaaataaagaaagcccgaaatggcttaaagataaaattcagtcccttggtcaaaaaccaatatcagctatagttgatataaccaactatgtgatgttagacttaaataggccacttc

SEQ ID NO: 301742 - DNA, 401 bp, Unknown
  Bacterial polypeptide expressing nucleotide sequence isolated from the Sargasso Sea
acatttaaaaggttgtttaaattactttataaaagaattttttgaagttgataaaatacaaatgagatttagacctagtcattttccttttacagaaccatctgcagaggtagatattggttatgagttaaaagatggaaaaatcattataggtgaagggaataaatggttagaaatattaggatgtggaatggtccacccaaatgtactcaaaaatgtaaatgtaaatccagataggtatcaaggatatgcatttggtataggcatcgataggcttggaatgcttaaatatggtataaatgatttaagagctttttttgagacagattatagatggttaaatcattttggatttgatcctcttgatgttccatcgagttatagaggcctgagcagatgaa

SEQ ID NO: 301743 - DNA, 1879 bp, Unknown
  Bacterial polypeptide expressing nucleotide sequence isolated from the Sargasso Sea
gttgtctgataaattgcttcaacttggccatgaacatgaaatagaaggcgatattatagatcttgagattacaccaaatagaggtgattgtttgtcactaaaaggaattgccagagatctaaactatttttataaagctgaattagatagagatacatatgatgaaaatattcctaaatcagatttttctttccaaaacaaagctaaagacttgtgtccaaatatatcttttgtagaaatagaaatagatggatcaatttcaggctataagccataccttgaaaattattttaaagatctaaaaattaataaaaataatttttttacggatgtttctaactatttagcctacgaaacaggacaacccactcattgttatgatgcttcaaaaattaatgacacattagttcttgaaaagagaaataaaaaagaaaaatttaaaacccttttaggttctgaaatagagctagaaggcgataatcttgtttttacaatagatggaatagcagttgatttagcaggcactatgggcgatgaaagcacagcctgcaataataaaactactaaagttttagtggaatgtgcttatttcaaacctgaagaaatcttaggaaaagcacgacaatataaccttacttctgaggccgcatacaaatttgaaagaggagtggattatcttgctcaagaatcggttttaagaagattcttagctattgttagcgatcacacaaaaataaaatcgttatctatgtattctgaaaagaacaaaacagatcttcagcaaataaactttgatagcgataagttaaattctattttaggtacgaacattaaagaaaaagatcaattgaagtatctagaatctttgggctttagcaatgaaaaatctatgatggtgccttctcataggtctgaccttgaacatattaatgatcttgcagaagaagttgccagaatggtcggttatgacaatatagcagcagaaagtctggctcttggaataaaagtgaaatccatggagcaatctttagaagaaaaatgtaagaatctgtttgtttctcatggattctttgaagtaataaatatgccgtttactgcagatgaaagcgaatcttctataagcgtagataattcactcgataaacagagagcgaaacttagaactaatttaatgaattctttaaaaaacaatcttgcttacaatcagaatcgtcaaaaagattcgatcaaattttttgagatagcggatatttatactaaaacaagacaagaaaagagaatggctgctctaatcaatggtagatcaaataaaaattttaaagagtttaatgctcagcttgattatgcttatcttaagggtttattaaataccattgccttagaattgctgggcgaagaattaacttatagtcatgatagctgtgatgagtatgaattctttgaacatatagacttcaaaggtaaagatattggcggtataggtaaactaaataacagtttgattgattcaaaatcaaagactccagtttttgcttttgagatatctttagagaatctaaatttatcagagaaaaaaattgaaaagacttctgattttccagcaatttttcgagatatatctatgagcatagataatccggaagttttaaaagaactgagtgaaacattagcaaaatcaatcagaaagatgcctctgataaaagaatcttttatttttgattattttgagaataaaaaacttaatgtcatgaaagttggttacagatttaagttccaaactgaagataagagcttaacagataaagaagttgatgctctaatgaaagttcttactgataacgcgctatcaattaatggcgttaacatcgagggattataa

SEQ ID NO: 301744 - DNA, 583 bp, Unknown
  Bacterial polypeptide expressing nucleotide sequence isolated from the Sargasso Sea
gatgtcactagataaaaccattaaaggattaaaggcatcattttctaaagagttatccaaaagtaagacttcatctgatctcgaaaaattccgaataaaatatttaggcagaaatggaaaactagcttctttatttgaagagttcaataagttaccagcatctgaaaaacctcgctttggcaaggaattaaatattttaaagaatgaattatcatcaatgtatcaagatgttgtaggtggttctaaaggtagttctatttcaagcaatacagatttttcacttcctggatataacttgccagatggaaatattcatccattagaacaaattacttacgaaataaagtctatttttcagtcaattggtttttctgtcgcctatggtcccgaaattgatgatgattatcacaattttgaagcattgaatgttccaaaacatcatcctgcgagagatatgcaagatactttttttatcaatcctattacagtattaagaactcatacatcaaatgttcagattcatttaatggaaaatcaagatcctccacttagacatatttgttgtggaagggtatatagaaat

SEQ ID NO: 301745 - DNA, 601 bp, Unknown
  Bacterial polypeptide expressing nucleotide sequence isolated from the Sargasso Sea
tatgaaatttaccctaagttggcttaaagaacatttagaaacaaaagctaaaatcgatgtcattacagatactctaacaaatattggtttagaagttgaaaatattgaagataaagaaaacgattataaagattttactatagctaaagttattagtgcagacaaacatcctaatgctgatagattaaaagtttgtaaagttgaaacttctaaaggaaatgttcaagttgtatgtggtgcacctaatgccaagtcaggcatgtttggagtatttgctcctagtgatacttatatacccggaactaacattaatcttaaaaaatctgaaataagaggtgtggaatcaaatggaatgttgctttcagagcgagaattaggaatttcagatgaacatgaaggaatagtagagttagaaggaaagcacagaataggtgattctattgcttctatatatggatttgatgatcctataatagagataaatttaacccctaatagatcagattgcttatcagttagaggaatagcaagagatcttgcggctgcaggtttaggtactttaaaagatttaaaaattaaaaagataaaagggcagttttaa

SEQ ID NO: 301746 - DNA, 313 bp, Unknown
  Bacterial polypeptide expressing nucleotide sequence isolated from the Sargasso Sea
ctattttcctttcacagaaccaagtgccgaaatggacgttgcttatacaaaaaaaaataacgttcttaaaatcggcgaaggagatgagtggttagaaattttaggttgtggaatggttaatccaaaagttttagaaaactgtaatatagactcttccgtatatcaaggttttgcttttggaatgggcatagagcgtctttctatgttaaaatatggaattacagatatgcgtggtctgtttgacttaaatcttaaatggttagatcattatggtttttctccactagatttaaaaacaagatcggaaatttaa

SEQ ID NO: 301747 - DNA, 709 bp, Unknown
  Bacterial polypeptide expressing nucleotide sequence isolated from the Sargasso Sea
tatgaaatttacacttagttggttaaaagatcatttagatacaaataaaaatctcgagataattgttgatacactaacaaacattggacttgaaattgagagtgttgaagataaatcaaaagaatataatgattttactgttgctgaagttttaaaagctgaaaaacatcctgatgcagatagacttaaagtttgtacagtaaaatcaatagatggaacatttcaagtagtgtgtggcgcacctaatgcacgagaaggaatgaagggtatatttgcgcctgagaatagttttattcctggcacaggattgaaattaaaaaaatctaatattagaggagtagaatcatgtggcatgcttgtttcagaaaaagaaatgggaatatctgatgagcatgatggtataattgaagttgaatcaaaacattcattgggagaaaaatttatagaagtgtttaatcttgatgatcctgttattgaaataaacattacaccaaatagaggagactgtctttctatcagaggtattgcaagagatttatcagcagcaggattaggaaaattaaaagacaatacattaattaaaaatattgaaggtacatttgatagccctgttaaatgggaaaaagatttcaatggagatatggaatatatttgtcccggtgtagcagggagatattttaaaaatgttactaataaagaaagtccagct

SEQ ID NO: 301748 - DNA, 1683 bp, Unknown
  Bacterial polypeptide expressing nucleotide sequence isolated from the Sargasso Sea
aggagctggaaaattaaaagatatttcgaaaaaaaatataaaaaagaatggacctcagaatattaatgtttcaatcacaaaagataaaaatcaaggctgtactatatttggcagttgtttaattaaaggtgttacgaataaggaaagtccaaagtggttaaaagacaagattgaatctttgggtcaaaaatcgatatcagcaattgtagatataacaaattttgtaatgctaaacttaaatagacctctacatgcttatgactctgataaaattgacaaagaaattatagtaagaaattcaaaaaaaaatgaaacttttaaagcacttgataacaaagaatataaattggaagatgatatgtgcgttatctctgacaagtctggggttcttggcctaggtggaataattggaggaacacgatcaggaactgaattaaatactaaaaatattttattagagtctgcattttttttaccaaaatctattagaaaaacttcaaaacaattaaatattgatacagatgctaaatttagatttgagagaggaatagatccaaattctattgaattaggacttacagaggctgcaaacttgataactgaaatttgtggaggaacaattagtaaatttgatattcaaaaaactcaaaaatacaaaaataataaaataaaatttaaaatttcgatgattgagaaagtagcaggttttaaagtaagtgaaaaaaatattataaaaattttaaaagatttaggttttgaaatatcaaagaaaaaattagaacttgaattaaaaatcccttcttggagacctgatataactcagccaattgatattgtagaagaaatagtaagaatgaaaggttacaataatattcaaactttagaaccagaaaaaaatagaattaaagatactttaaataaaaaacaaaaactcttccattttcttcagagatctgttgcatcaaaaggatattatgagactgtaacttggtcatttacagattcaaaaataaatgaattatttaaagaaaattataaagaaataaaaatagtcaatccaatcagctcagatttaaatgttttaagaaactctatatttcctaatttaatgttttacctgaagaaaaatttagatagaggttttaaagatatctcattgtttgaaattggcccaatttttaaaaataaccaacctggcgaacagttaactgtaattggtgcaataaaatcaggaaaaatttttagaaataattggaatgaaaaggaaagaaatgttgatgtttttgacgcaaaaaaagacgttttccaaactttagtggagtctggttataataagcgcagcttttttatgagagataaatcgccaaattattatcacccaggaaagtcaggatcattatatttagataaagatgatattgatccagtggcatactttggagagatacatcctaacgtggttaaaaagcttgatattaaaacagaagctttagttagttttgagatttaccttgataatttgaaaaacaacaaaattaaacttaaggatcaaaaattaaactttgagtattcagattatcaaaaatctgaaagagactttgcttttgttgttgataaaaatttcaaagctcaagatttgacagaaataatttattctgttgataaacaattaattagatcggt

SEQ ID NO: 301749 - DNA, 2345 bp, Unknown
  Bacterial polypeptide expressing nucleotide sequence isolated from the Sargasso Sea
tgctaattttgaagaaattgaaaagaaactcacttctatcggccttgaagttgaaaatatgcaagacatgggtaaagcataccaggattttattgttggacagatacttgaagaaaaaaaacacccaaatgcggataaattaaaactatgcaaagttgatattggtaaggaaaaggttgatgtagtttgtggtgcgccaaatgtagaaaaaggcatgaaggtggtttatgcgccagttggttcaactattccggttaatcaaatgaaaattaaagctgccaagattagaggggtagaatcctatggaatgatgtgttcagaatatgaacttggtatctcaaatgagcatgatggaataattcgacttgaggaaaaagaaactattggaagatctttttcagagatttatggtcttaatgatattgtaatagaaattggtatcactcctaatcgacaagattgtctaggtgtaaaaggaattgcccgagatcttgcttcagctggtatgggggaattgttagagagaaaaatatctagagaaaaaggctcctttaaatcaccaattaaaattgaaatacaagataataaaatatgctcggcctttgttggaagatattttagaaatgtaaaaaatactgaaagcccggaatggcttaaaaataaacttaagtcaataggtttaaggccaatatctgcgctggtagatataactaattttgtaatgtatgacgagaaccggccacttcacgtttacgatgcagacaaaatagatggcaaaattatagtacgtaaagcaaatgatggagaaagtttcttggcgctagatgaaaaagattaccagctaaaaaatggtatgtgcgtaatagcggatgaaaaaaaagtacttggcttagggggaatcatggggggcgaaagtacaggttgcagcactgagacaaagaacgttttacttgaatcagctttatttgatgaaattaatacagccaagacgggaagaaacttgtcaattctaagtgatgcaagatatcgttttgaaagaggcattgatccaaattcaactttaaaagggatagaccttgcaacacaattaattcttgaaatatgtggtggtgagtgcagtgaggttgagttggctggaaatataaaagaaaataaaaatgagatttcaacttctagtagttatatttcaagaagacttggttttgaagtgtctgacaaagaattgatatcaatacttagttcgttaggaattgaaacaagccaaacaggtgatgttatcaagtgttccataccttcttggagacaagatattcacggagaagccgacataagtgaagaagttattcgtattaaaggatatgaaaatattccgacaagtaatattagactaaaaagtaaaattaataaaaatatcttaaattacgcacaaaagaagttgatgaaagctagacacttcattgcttcaattgaatatgatgaattagtaacattttcattcacagactcaaaaaattgtgaagtatttggtgatataaataaattaaaaattgtaaatcccatctcagaggagctggatatattaagacctaatcttctacctaatcttcttcaagcaattaaaaaaaacaagaatagaaactttgactcattctcgatctttgagataggtagtcagtacagatcaacatctcccgaggatcaattgaacgttgcatgcggaattaaatcaggaattaagacagaaaagtcctggaagaatatgcagacggaatttgatatatatgatgtaaaacaagatttaacttccttaattgattatttaatgccaggtaacaaaaaaatatctgtctctaatgactgtccttcctggtatcatcctggaagatctggttcgataaaaattaataattctgtaattgctggatattttggagagttgcatccaagagttgcaaatcaatttaaaattaagaataaaacaaatatatttgagttataccttgatgaattgccaaacacagaaaagaaaactaccaacaagcctgtacttaacttaagtgattttcagattgtcacaagagactttgcttttgttattgataaaaaagtaaaaagcgaagaagttgttacttcagcctttaaagtagataaggaattaattagaaatgttgaaatcttcgatttatttgaagatgatagtctgggaaaagacaaaaagtccattgctattaaggttacattacaatctaacgaaaaaactcttgccgaaaatgacatttctgaaataagttcaaaaataattaaatctgtggaaaagtctacttccggaactgtaagatcctaaa

SEQ ID NO: 301750 - DNA, 385 bp, Unknown
  Bacterial polypeptide expressing nucleotide sequence isolated from the Sargasso Sea
gatgcaactcactcaccaggtttttcatcaaatcgaaggtttggccgtagatgaaaatctaacattttcagatttaaaaggaacattggagtattttgttcaggaattttttggtaaaggaattaaaactaaatttattccacatttttttccatttactgaaccatcagctgaagtattggtaagttggaaagatggtgaatggcttgagatattgggttgcggtatggttgatcctaatgtgtttcaacatgtaggatacgataaaaattcacaaggctttgcatttggtgttggtgtagaacgattagctatgattcgttataaaattgaccacattaaaaatttctatgaaaatgatctgagatttctaaggcagttctaa

SEQ ID NO: 301751 - DNA, 1932 bp, Unknown
  Bacterial polypeptide expressing nucleotide sequence isolated from the Sargasso Sea
ttgatttatctataacgcccaatcgtcctgattgtctcggtgtcagaggtgtagctagagatcttgcagctgctggggctggtaaattaaaaaaaatttcatttaaagatattaaaaaaaatggatctcaaaaaatcaaagtttcaattagaaaagataaaaatcaaggttgcactgtatttgggagttgtttaattgagggtgtttccaatcaagagagtccacaatggctgaaagaaaaaattgtatcactcggtcaaaaaccaatttcagcaattgttgatattactaattatgtgatgttagatttgaataggcctcttcatgcatatgatgcagataaaattgataaggaaattatagtaagaaattcaaaaaaaggtgaaacttttaaagctcttgataataaggactataaattggatgatgatatgtgtgtcatttctgataattctggagttttagggttaggaggaattattggaggcacacgttctggtacagaaattaataccaaaaatattttattagagtctgcatattttcttccaagatctattcgaaaaacctctaaattacttaatattgatacagacgcaaaatttagatttgaaaggggggttgatcctcaatcaattgagataggcctaacaaaagctgcacgacttatttcagaaatttgtggaggtaaaataagtaaatttgatattcaaaaaacagcaaagcatgaaaaaaataaaattaaattcaatatatctttgtttgaaaaaataactggttttaaagtaaaagataaagaagttattgaaattttaactgatctaggatttgaaatttctaggaagaaatttgaattggatttaaaaatccctacttggagacctgatataactcaaccaattgatatagtagaggaaatagtaagaattaaaggatatagtaacatagaaaccctagagcctgaaaaaacgagaataaaagatacattaaataaacagcaaaaactctttcactttctgcaacgctctgtagcatcaaaaggttattttgaaaccgtaacatggtcatttacagactcgaaaataaacactctttttaaagaaaatcttaaagaaataaaaatagtaaatccaattagctcagatttagatgttttaagaaattcaatcttttcaaatttatctttttacttaaaaaaaaatttagatagaggttttaaagatatttctctgtttgaaattggaccaatttttaaggatagaaaaccaggacaacaattaacagtaattggagcaataaaatcaggaaaaatttcaagattaaactggaaagaaaaagaaaggttagttgatgtatttgatgtgaaaaaggatgtaattcagacactagtggaagctgggtataacaagcaaagtttttttataagagacaaatctcccacatattatcatccaggtaaagctggctcggtctatcttgataaggatgatattgaacctgttgcttactttggagaaatacatccaaacattattaaaaagctagatataaaaactgaaggtttagttggttttgaaatttatctagatcatttaaaagacaataaaataaaacttaaagaccaaaaatctaattttgagtactcagactatcaaaaatcagcaagagattttgcctttgtggttgataaaaattataaagctcaagatttaattgaaattatatcttcagtagataaaaatttgataaggtcaattaaaatttttgatgtttatgaaggtgaaaatattcctaatgacaaaaagtcgatagctctaaatgtaacaattcagtcatctcaaaaaacattagaggagagtgatcttgaaaaaattaataaattaattatttcaactgtcgaaagtaagtctggagcaaaaattaggtcttaga

SEQ ID NO: 301752 - DNA, 925 bp, Unknown
  Bacterial polypeptide expressing nucleotide sequence isolated from the Sargasso Sea
catgatagaccataatactttgcctggaaatattaatgaactcgcagtcaagcaatatctagatatgagcataccaccaatcgatgattattcatggagctatacccttgaccttccagagcagatcattgcaaaaccaacccacattaatataaaacctaacgctcacgcaatttactatgactggcaaacaagatctttccaattagatcccgaaaaagattcactttacaatgtaccaattactgattgggaatatatttttgagattgaaaagatttctcaagttttttcatcaaatatagatctagaaatatctgaggataaatctgagtttgacctgaaaatgaaaaggggacaatttaaaatatctaaaacatcattctcagctacaccaggaaaacagttagatgatcgttcaagtctatccttaccggagtttcttcttgaagcaaatgacctcgttctcaatggtagtttctctggtacacccataatacaccgcggtaaaggaaaattcaggatacgtaattttgaaataaagattccaaaagggataaaagaagagcctgagatagatgcaatgttaaaaacattgggtatatggaataactcgcttatgataaggttaatagagtttgatattaatttgataaatgaatttactggagatatggggtttagattccagactcctttcttaaaaatatcagtggatggtgattttagtcttcgacagactgattcaattccaaaactggtgcttcatgatacagaagtaagaatacatccaatttcactaggaatgagaaaatggttaagagagtgggagcaaaagaacggtaaggactttgatcggcagggtgcaacaattgtacttaagatcaatggccccattgaaaaccccattatacagggctactga

SEQ ID NO: 301753 - DNA, 1388 bp, Unknown
  Bacterial polypeptide expressing nucleotide sequence isolated from the Sargasso Sea
aagatataagagatttttacaaatcaaatttagactttctaaatcagttcaaatgaaaatcttactagaaaatatatttgaaaacatcaataaagacgtttcaaaagataatctttcctcagcattctttcagcttggacatgagcatttaatggaagatgattatatagattttgagctaacacctaatagaggagattgcctttcagtgcaaggtttattaagagaccttaatgttttgtatgaaacaaatcataattatccaatatatgaaaacgaaataacaaaactaaatattaactttaaaaacttttcagaagaagattgtccatcaattagtttcctaagattagagattgaagatgagacaaaaaaatacaaagattatatggagaattatttttcaaagctcggagttaaaaaaaataacttttttactgacgtttctaactatgttttatatgagcttggccaaccaactcattgttatgatgcaaaaaaaattaataacgaaattatttttgacaaaataaataagaatattaagttcacatcactactaaatgatgaaattgaattagatggcgaaaactgtgtttttatatctgaaggcgaggtaattaacctagcagggataatgggaggtttatcttctgcttgctcaagagacactaaaacagttcttgtggaatgtgctttctttaaccccaaagcaataattgggaaatctacaaaatataaacttaattctgatgcagcctatagatttgaaagaggtgtagatatagactttcaagaatatactcttagaagatttattaaaattgtagaagaccatgcacatattaagaaacttgagatgacttcatttaattataaaaaaaagaaggaagtcaaaattgaaaataattttaagaaaataaattcaatattgggtacaaatataactcagctagattatcaagaaatacttaaaaaacttaatttttcttttgaagaaaatatcattcctccatcctataggaatgacattaccaaccaaaatgatattgctgaagagatagccagatcaataggatataactccattaaaaatgagcgctttgagctcaaaaaatctcaatcaaataaactaatttcaaaaatatcttcattaaaatcatatcttgcctctaaaaattttaatgaggttattaatattccttttgaatcaaaaggatgccgcgatgcaataattatcgataaccccttagactcatcaaaaaaatatctaagaacaagtttaaaggaatcccttgtagaaaatcttctttataatgaaaggcgtcaaaaagatagtattaagcttttcgaagtatctaatgtatatagaaaagttgataacaaaa

SEQ ID NO: 301754 - DNA, 619 bp, Unknown
  Bacterial polypeptide expressing nucleotide sequence isolated from the Sargasso Sea
atgcctgacaatctttcagatctgtcaaaatcagcaacccaagaaataaacgaatgttcatcaacgactgaacttgattctctcaggataaaatatctaggcaaaaagggagctattacaatagctctgaaatcagtatcctctgtcgacccaaaggatagacctgcatacggaaagaaaatcaatgaactcaaatctttgattcaaggtacgctttctcaaaaaagagcatctttacaaaaaaaagaaattaatcagagtatcgatgataagaaaatagatgtctcactgcctggaagaagcaactttggtggacacagacatcctgtaacaaaaactttacttgaaattgaagagatattttatggcgctggctttgcggttgaagacggtcccgaaattgaagatgagtatcataacttcactgccctaaatattccaagtaatcatccagccagagctatgcatgacactttttactttaattctgaatttctattaagaactcatacatcaccaatccaaattcgcagcatggaaaaagaaggcgtcccaataagggttattgcaccaggaaaagtttatcgaagagattctgacataacacacacgccaatgt

SEQ ID NO: 301755 - DNA, 499 bp, Unknown
  Bacterial polypeptide expressing nucleotide sequence isolated from the Sargasso Sea
aaaagatagttacttattaaggactcatacctctaatactcaaattcactcaatgttagagcatgcagctccgatatatatgctttctcccggaagagtgtataggtgcgattctgatacaactcatcttccaatgttcacgcaggtggaaggtttggctgttgatgtggatatcagctttgctgacttgaaaggaattttgatcgactttcttgaattcttttttaacaaaaaaatggatgtccgttttaggccatcttatttcccatttactgaaccttctgcagaggtggatattaagtttgattcagattggctagaggttttgggttgtggaatggtccatccaaatgttcttaaaaactgcaatatcgatcatcataaattccaaggttatgcttttggaatgggtgtagaaaggcttgcgatgctttattacggtgttaaggatattcgagacttctactcatctaatttagaatttttagagcaaatttaa

SEQ ID NO: 301756 - DNA, 634 bp, Unknown
  Bacterial polypeptide expressing nucleotide sequence isolated from the Sargasso Sea
tatggaaaatttaaattctattaaaaaagaaatacttcaaaaaattaaatcggctgaaagcgatgataatgttgaagaaattcgtatcagagagttaggaaaaaaaggaagaattactaagctcctaagtgaattaggaaaattagatcaggataaaagaaaaaaattaggacctgaaataaataaccttaaaaataaagtcctcgaagaaatacaagaaaagaaagagttttttttagaccaagtgctaaacaaaaaactcttagaagaaaaagttgatgtaactttacctgtaaaatcaagtcaaaatacgaatggaagaatacatccagtttctcaagttttagatgaaataacagaaatttttggttcacttggttatgagattgcagatggaccagatattgaaacagaatattacaattttaatgctcttaatattcctgaatcacatccagcaaggcaaatgcatgataccttttattttgatgaatttgataaagatcaaggacaatcagtcttaagaacacatactagcccagttcaagttagaactatggaagaaggaaagcctccttttagatttatatctccaggaaggacctatagatgtgattcaaatcaaacacataca

SEQ ID NO: 301757 - DNA, 745 bp, Unknown
  Bacterial polypeptide expressing nucleotide sequence isolated from the Sargasso Sea
cacccaattagtcaaacaatatttaatattatagaaatttttggaaatttaaattatgcagtggaaacaggtccagatatagaaacagattttaataattttacagctttaaatataccagaacatcacccagcaagagaaatgcaggatactttttatattgaggataacggagataaaaatgttcttcgaacccatactagccctgttcaagtgagaactatgctcaacacaaaaccacctattaaaattattgtgcctggcagaacttatagaagtgactcagatgctacacatgcccctatgtttcatcaagtagaaggtttagtcgttgatacaagttctactatggttgatttaaaatcaacactcgtttcattcttagaagaatttttcgaagtaaaaaacttacagtaccgttttcgccctagttactttccttttaccgaacctagtgcagaaatggatgtggcttataccaaagtaaataataaaataaaaattggtgaaggagataaatggttagaaatattgggttgtggaatggtcaatcctgtagttttagataattgtaatattgattcaacacagtatcagggttttgcttttggtatgggaattgagcgtttgtcgatgcttaaatatggtatttcagatttaagaagtttttttgatcctaattatagatggttggaccattatggttttagtattctagataatcaaacacgatcagggctataaa

SEQ ID NO: 301758 - DNA, 929 bp, Unknown
  Bacterial polypeptide expressing nucleotide sequence isolated from the Sargasso Sea
gatgatacgcaaactagatgaacatatttcatatatcaaaaatttcaaatcaaaagatattgatgagatagagtctttgaagatccaatttctaggtagaaaaggaataattaacgatctgtttaatgaatttaaaaatgttccttctgatcaaaaaaaggagtatggtcaaaaaataaatgagttaaaaaatttagcgcaaagtaagtatgatgaattaaaatcagttaactcaaagtctaataaaagtatttcagaagatttaactaaaccagggttcccaatttctagcggaactttgcatccaataactttaattaagaatcagataattgaaattttttcaaaagttggatttgaattatcagaggggcctgagattgaagatgattggcataattttactgcacttaatttaccaaagcatcatcctgcaagagatatgcaagacactttcttcattcaacaagaccctgatattctattaagaactcatacctcttcagtccaggttaggtatttagaaaataattcacctcctctgaaaattctttcaccaggaagagtatatagaaatgaggcaatttcatctagatctcattgtatttttcatcaagttgaaggaatctatgttgatgaaaatgtatcatttgcagatttaaaacagatgattctatattttactaagtcaatgtttggaaagtctaagttaaggtttagaccttcctttttcccattcactgaaccaagtgcagaagttgatatctactggggactagaaactgaaactgattatagaattacaaaaggtacaggttggcttgaaattatgggttgtggtatggtagatccacaggttctggaaaattgtaatattgattcagaaaaatatactggttatgcatttggcttgggtatgagagaatgca

SEQ ID NO: 301759 - DNA, 790 bp, Unknown
  Bacterial polypeptide expressing nucleotide sequence isolated from the Sargasso Sea
tatcactttacctgaaagaccatatgtaaaaggtaaaattcatccagtatcacaaacaattgatgaaatatcctctatcttttctgaaataggtttcagtgtagaggaaggtcctgatgtcgaaaatgaatataataattttacagcattaaatacccctgataatcatcctgctagagatatgcacgacacattctatcttgatgaaaaaaaagataaattactgcgtactcatacctctcctgttcaaataaggactatgctaaaaagtaagccgccttttaaaattattgcacctggaagaacttatagatctgatagtgatcaaacacactccccaatgtttcatcaagtcgaaggtctttatattgataaagatataaacatgggtcatttaaaaggttgtttgagttactttatcaaagagttttttgaggtagataaaattaaaatgagatttagaccgagccatttcccttttacagaaccttcagcagaagttgatatagggtacaaaattaaagatgggagaataataataggagagggagataaatggcttgaaattttaggatgtggcatggttcatcctaatgtcttaaaaaatgtaaaagttaatccatcaaaatttcagggatatgcatttggtataggaatagatagattggccatgctaaaatatggaattaatgatttaagatctttttttgattgtgattatagatggttaaatcattatgggtttgatcctttagacgtgccaacaaattatagaggcttgagtagatga

SEQ ID NO: 301760 - DNA, 837 bp, Unknown
  Bacterial polypeptide expressing nucleotide sequence isolated from the Sargasso Sea
tatgaaagtttctcaaaattggttgaaaaatttagtagaaattacttcttctcctgaagatctctctgagaaattgtctattggtggatttgaggttgaatcattagaagattgttcaaaaaatataaatggtgttgttttaggtaaggtattatctgttttaaaacacgaaggatctgacaaactttctatttgccaagttgatattggcaattcgaagaatttacaaattatctgtggtgcgagcaatattaaaccaaatatttatgtttatgttgctactgtcggcgcgaaattaaatgcagttgatttaactattaaaaaaagtgaaattagaggtgtcattagtgaaggaatgatatgttcactgcaggaacttggtttagaggactctagcgaagggatagagatcattgatgaaagtttggccctaaaacatgaattgggcgctccagggtctgacttgcttcaattaaatgattttatatatgatttagctattactgctaatagacctgatggaatgtctgttataggtatagcccgtgaaatttctgcccttttagaatccaccttaaattttccagaattaaaccataaatacaatattcatttacttaaaggaattaaactttgtccagaggctatagaatctaattgcatttatacaataagctgcattgatggagtaaatggagagaaattatcaccaaattggcttaaagatcgtatagaaaaatcaggtataaaatctattaatcttctagtcgatttgacaaattatattcttttagaacaaggtcaacctttgcatgcgtttgataaagataaactgtc

SEQ ID NO: 301761 - DNA, 649 bp, Unknown
  Bacterial polypeptide expressing nucleotide sequence isolated from the Sargasso Sea
catgatcatcagcgaaaactggcttcgagagtgggttgaatttgacctcgactttaattctttgcctgcgttgctaacggctgccgggcttgagaccggggttgttgaagagatcaaggcattgccgaaaaaagtcgttgcgggtcatatcgtccggatctcaccgcaccccggcgccaccgagctaaccctctgtgatgtcgataccggggatgcaaagccggttcgggtggtttgtggcgcaccgaatgctgcactcggtgtcgttgcgccctttgcaagaatcgggtcagagctttcggccggacaaaaaattggcgaggccgtgattcgtggcgagccatcaagcggcatgctttgttctgcagcggaattaggtctcgaagagcaatcacagggcttgcttctcttggacccagagctgggtccaggtacccagttaaatgaccatctacaactaccggatcgactccttgagatagaactcacaccgaatcgcggagattgcctcagcatcttgggcgttgcccgagaggtggccgctttaacaggcggacggctgaaagaaccgaaactaccccgcgtgcgaaccaccgagtccgaaacaaggtcgatttcgctggatggcgacggacgctgcgcccgatat

SEQ ID NO: 301762 - DNA, 618 bp, Unknown
  Bacterial polypeptide expressing nucleotide sequence isolated from the Sargasso Sea
tatgtcagagataaaaaatattagagatcagtttatatcaaagcttgaaaatgatttaagcatcgatcaaataaatgaaatcaaaaccgagctctttggtaaaaatggtttaatttcatcaaaatttaaaacaataggatcaataccagagaccgatagaaaaaaatttgcatcagatttaaatcaagtaaaagatgaacttcagaatttgataacttctaaaattagcgagatagaaggaaaaaaaataaacgaaaaattagaaaaggaaaaagttgatataactttacctgaaagaccattcgttagaggaaaagttcatccagtatcacaaactattgatgaaatttcatctattttctctgaaataggatttagtgttgaggaaggccctgatgttgaaaatgaatataacaactttactgctttaaacacacctgacaatcatccagcaagagatatgcatgatacattttacttagatgaaaacaaagaggttttgttacgaactcatacttcaccagttcaaatcagaactatgctaaaagacaaacctccatttaaaatcattgctcctgggagaacctatagatctgatagtgatcaaacacacgcacc

SEQ ID NO: 301763 - DNA, 448 bp, Unknown
  Bacterial polypeptide expressing nucleotide sequence isolated from the Sargasso Sea
ctcgagtccaacccaccgccggtgcgtgtgattgccccaggccgggtctaccggcgtgatgccgtcgatgccacccactcgccggtgttccaccaagtggaggtgttagccattgatgagggccttgatttcagccacctgcgcggcacggtcagccacttcctcaaggcgttttttggggatctgccagtgcgtttccgcgccagctatttccccttcacagagcccagcgccgaagtcgatgtgcaatggcgcggccgctggctagaggtgatgggctgcggcatggtcgaccccgccgtgctggagggcatggggctcgatcccgaacgctggagcggctttgccgcgggcctcggcgttgagcgcttctgcatggtgcgccacggcatcgacgacattcgccgcctgttcaccagcgatctgcgttttctcgaacagttctgaa

SEQ ID NO: 301764 - DNA, 601 bp, Unknown
  Bacterial polypeptide expressing nucleotide sequence isolated from the Sargasso Sea
tatgttgaaactgagactgatggaatgccaaatgttctgcgaactcatacctcgccagttcaaattagaagtatgttaaagcaaaaaccgccaattcgattaattgctcctggaaaaacgtttagatgtgataatgatcaaacacactctcctatgttccatcaagttgagggtttagtaatagatcaagaaagcaacatgagccacctcaaaggttgtttagaaatattcctcaagactttttttgagaccgataaattaaatatgaggtttcgacctagtcattttccctttactgaaccatctgcagaagttgatattggatacactaagaaaggaaatcaattaattatcggagagggcgaggattggttggaaattttaggatgcggaatggttcatccaaacgtgcttgaaaatgtaaatatcaattcaaatgaatatcaaggctatgcattcggtatgggtatagagaggcttgcaatgctcaaatacggaattagtgatttaagaactttctttgatagtgatcttagatggaataagcattatggcttttcacctttgaacattccttcgatcataggagacttaagctaga

SEQ ID NO: 301765 - DNA, 448 bp, Unknown
  Bacterial polypeptide expressing nucleotide sequence isolated from the Sargasso Sea
atgtcactttttgacaaaaatcagttaccagaatcttatttaaattctggctcactacatcctattaatcagattaaagattatttagtcggtattcttatggatatgggtttttcagaagaaacaggacctgagatagaaactgaagaaaataattttgatctacttaacattgaaaaatcacatcctgcaaggcaaatgcatgatactttttatgtaaatggaatgaaaaatgttttacgtacacatacttctccagttcaagtaagaactatgctttcaaaaaatcctcccctagcaataatttcagctggtaaagtctttcgaaaggatgatgactctacacatctacctatgttccatcagattgagggtatgtatattgataaaaatgttaattttgcgaatctaaaatatgtgatttatgagattattcataagatttttg

SEQ ID NO: 301766 - DNA, 538 bp, Unknown
  Bacterial polypeptide expressing nucleotide sequence isolated from the Sargasso Sea
agaacaatgttaaatgataaacctccatttaagattattgctcctggaagaacttacaggtctgacagtgatcaaactcatgctccaatgtttcatcaggttgagggcttgcatatagataaaaatataaacatgagtcatcttaaagggtgcttaaattactttataaaagaattttttgaagttgataaaattaaaatgagatttagaccaagccattttccttttacagagccttctgcagaagttgatattggttatgagttgaaggatggtaaaataattataggagaaggaaataagtggctagaaattttaggatgtggcatggtccatccaaatgtacttagaaatgttaaagtagatacttcaaaatttcaaggatatgcttttggaataggcatagatagattggcaatgcttaaatatggcattaatgatttaagagcattttttgaaacagattatagatggttaaatcattttggattcgatcccctggatgtgccgtcaagctatagaggattgagtagatgaa

SEQ ID NO: 301767 - DNA, 395 bp, Unknown
  Bacterial polypeptide expressing nucleotide sequence isolated from the Sargasso Sea
aaaagattctgatttaactcatacccctatgtttcatcaaatcgaaggattggtagtggaagaaaatgcttctttctcgcagctgaagggattactgaatgattttttagaagacttttttggtgaagaggttgaattgagatttagaccttcttattttccatttaccgaaccttctgctgaagcagatatacgttggaataagaattggcttgaagttctgggatgcggcatggttcatcctaatgtccttgaaggagtgggagttgatacaactaagtataatggctttgctttcggattgggtgttgagaggatggctatgttgaaatatgagatacctgatctaagagcattttttgaaaatgatatacgtttcctagaccaattttaat

SEQ ID NO: 301768 - DNA, 604 bp, Unknown
  Bacterial polypeptide expressing nucleotide sequence isolated from the Sargasso Sea
tatggctggccttgaagttgatgggtttgagaacatcaattccaagattactggcacagactccataattcagctagatataaccccaaatagaggagattgtttcagtattttgggagttgcaagagaattagccgttattaataatttaaaattacacttgcctgaaataccaaaagttcatgactcttttacagatagtataaaaataaaagtttgtcctgaaggaccgtcctattttggcaggactcttaaaaatatttctatcgatgccaagacacaaccattaattgctgaaagattaaagttaagtgatcaaaagctcatagaccctgttgttgatataactaactatattttacttgaacttgggcaacctcttcatgcttttgatagagatacattgaatggaaacatttctgttagaactgctcaaaataaagagcaaataactttgcttgatgatcaacaggtagagctggatagtgattgtctcgttatttccgatgataagggtgcaattgcttttgcaggtattatgggtggaaaagagactgctgtttctaattctactaagtcaatttttcttgagagcgcctatttt

SEQ ID NO: 301769 - DNA, 679 bp, Unknown
  Bacterial polypeptide expressing nucleotide sequence isolated from the Sargasso Sea
gatggcatttgctgaaaataaaattgatgttctaaaaaaaattaaatcttcaaaatcattcgaagatttagaaaaacttcgattatattatttaggtaaaaaaggattaatacctgaagccctaaaaggattaggttctttatcaattgaagaaaaaaaatcgaaaggacaggaattaaatattatcaaaaaagaaattgaagaaggtattaaaaaccaaagagcagaaattgaaaacattgaaatttcaaacaggattaatttagagacaattgatgttactctacctcctaatatttctgacaaaggaaaaatacacccaattagtcaaacaatatttaatattatagaaatttttggaaatttaaattatgcagtggaaacaggtccagatatagaaacagattttaataattttacagccttaaatataccagaacatcacccagcaagagaaatgcaggatactttttatattcaggataacggagacaaaaatgttcttcgaactcatactagtccagttcaagtgagaactatgctcaatacaaaaccacctattaaaattattgtgcctggcagaacttatagaagtgactcagatgctacacatgctcctatgtttcatcaggtagaaggtttagtcgttgatacaagttctactatggttgatttaaaa

SEQ ID NO: 301770 - DNA, 322 bp, Unknown
  Bacterial polypeptide expressing nucleotide sequence isolated from the Sargasso Sea
ccattttcctttcacagaaccgtctgcagaagttgatataggctatagaattgaaaacaataaaattattattggagaaggcgataagtggttggaaatacttggttgtggaatggtacatccaaatgtgctcaaaaattcaaaagtagatccaaataaatttcaaggattcgcatttggtataggtattgatcgattggcaatgttaaaatatggaattaatgatctaagatctttttttgagagtgattatagatggctcaattactatggatttgatccacttgatgttccaacaaattatcgaggtttaagtaaatga

SEQ ID NO: 301771 - DNA, 350 bp, Unknown
  Bacterial polypeptide expressing nucleotide sequence isolated from the Sargasso Sea
aaaaatcaaaatgagatttagaccaagtcattttccttttacagaaccatctgcagaagtagatattggttacgaaattaaagatggtaaaattgtaataggagaaggggatcagtggcttgaaattttaggatgtggaatggttcatccaaatgttttaaaaaacgttaaagttgatcctgctaaataccaaggatatgcatttggcataggtatagacaggttagctatgctaaaatacggtattaatgatttaagagctttctttgaatgtgattatagatggttaaatcactttggatttgatccacttgatgtacccacaaattatagaggtctaagtcgatgaa

SEQ ID NO: 301772 - DNA, 456 bp, Unknown
  Bacterial polypeptide expressing nucleotide sequence isolated from the Sargasso Sea
ctacacatacacctatgtttcatcaagttgagggacttgttgtaaacaaagatgcaacaatggctgatcttaaatcaaccttaataacttttttaaaagaattttttgaaatagataatttaaagtatcgttttagaccaagctattttccatttactgaaccaagtgcagaaatggatgttgcttttaccaaaaaaaataatgttttaaaaattggtgaaggtgatgattggttggagattttaggatgtggaatggtaaatccaaaagttttagaaaattgtaaaattgactcgtcggtgtatcagggttttgcttttgggatgggaattgagagattgtcgatgttaaaatacggtatcaccgatatgcggggtttatttgacttaaatattaaatggttagaccactatggtttttccccattagatttaaagaatagatcagaggtttaaa

SEQ ID NO: 301773 - DNA, 316 bp, Unknown
  Bacterial polypeptide expressing nucleotide sequence isolated from the Sargasso Sea
ttgctaactagatttataacagaattatttggaagagatatggaaatcagatttagaccatcttacttccctttcactgaaccgtctgcagaattggatattaaatttaatggtaaatggcttgaagttcttggttgcggtatggtgcatcctaatgtcttaactaatgtaaatatcagcagtaaaaaatattctggttttgcatttgggctaggcatagagaggctagcaatgcttcaatatggtataaaagatttaagaatgttttatgagaatgacctctcattcttgtctcaatttaaaggtttaaaataaa

SEQ ID NO: 301774 - DNA, 868 bp, Unknown
  Bacterial polypeptide expressing nucleotide sequence isolated from the Sargasso Sea
atgtctttatcagttgattctgtagatattaaaaagaagattgaagattgtaaaactctacaagaagtagaagttatacgattaaagtatcttggtaaaaaaggattaataccatcggaaatgaagcttctaagtaagctgtcaatcgaacaaaaaaaaattaaaggtcaggaattaaataaattgaaaacgtttattgaagatgtagttaatgatcataaaattttaattgaaaataagaagttagaagaaaaactaaaaaatgagagtgtcgatgttactttgcctcataatgaagaagtaacaggaaaaattcatcctatttcacaaacaatttttagtattatagaaatttttggcaatttaaattactcagttgaggctggaccagatattgaaagtgattttaataatttttctgcattaaatataccacctcatcatcctgctcgtgagatgcaagatactttttatgtaaataatcctaaaggcgaagacaatgtgttaagaacacatacaagccctgttcaagttaggacaatgctgaaatcaaaacctccaataaaaattattgtaccaggaagaacctaccgaagtgattccgattccacccacacacctatgtttcatcaagtggaaggtttattggtcaataaagatgccacaatggcagatctaaaatcaacacttattttatttttaaaagaattttttgaaattgataacttaaaatatagatttagaccaagctattttcctttcacagaaccaagtgccgaaatggacgttgcttatacaaaaaaaaataacgttctaaaaattggtgaaggagatgattggttagaaattttaggttgtggaatggtta

SEQ ID NO: 301775 - DNA, 916 bp, Unknown
  Bacterial polypeptide expressing nucleotide sequence isolated from the Sargasso Sea
aagagagaaaaaattcgcatcagatttaaatcaagttaaagacgaactgcaaaatttgataatttctaaaattaatgggattcaaataaaaaaaataaatgaaaaattagaaaaagaaaaagttgatgtgactttacctgaaagaccgtttgttagaggtaaagttcatccagtttcacaaactattgatgaaatttcatctattttttctgaaataggatttaatgttgaagaaggccctgatgttgaaaatgaatataacaatttcactgcattaaacacacccgacagccatccagcaagagatatgcatgatacattttatttagacgaaaacaaaaaagttttattgagaactcatacctcgcctgttcaaataagaacgatgttaaaggataaacctccatttaaaattattgcacctggtagagcttatagatcagatagtgatcaaactcattctccaatgtttcatcaagtagaaggtttacatattgatacaaatattaatatggggcatttgaaaggatgtttgaattatttcattaaagaattttttgaaattgaaaaaattaaaatgagatttagaccaagtcattttccatttacagagccatctgctgaagtagatattggatacgaggtaaaagatggcaagataattattggagagggagatcagtggcttgaaattttaggttgtggaatggtacatcctaatgttttaaaaaatgtaaaagtagatcccacaaaataccaaggatatgcttttggtataggtatagatcgactagcaatgcttaaatacggtattaatgatttaagagcattttttgattgtgactacagatggctaaaccattttggttttgatccacttgatgttccatcgaattacagaggtttaagcagatga

SEQ ID NO: 301776 - DNA, 619 bp, Unknown
  Bacterial polypeptide expressing nucleotide sequence isolated from the Sargasso Sea
gatgcatgatcttaaaaaaattaaagaagaatttatttcaaaattaaaagagaaattaaatttatcagaaattaaccaaattaaatcagatctatttggtaaaaatggattaatttcatcacaatttaaaaaaataggaactattactgaatcacaaagaaaagaatttgccacagatttaaatgttattaaaaacgagttacaagatttaataaatacgaaaataaatgaaatagaaataaatgaaataaatgaaaaattagaaaaagaaaaaattgatgtaactttacctgaaagaacttttattagaggaaaaatacatcctgtatcacaaactatagatgaaatatcttcaattttttcagaaataggtttcagtgttgaagaaggcccagatgttgaaaatgaatataataattttacagctttaaatactcctgacaatcatccagctagggatttgcatgacactttttatttggatgttaataaagaaaaattattacgaactcatacctcaccagttcaaataagaactatgatgaaaggtaagccaccatttaaaattattgctcctggaagaacttatagatcggatagtgatcaaacacactcacca

SEQ ID NO: 301777 - DNA, 607 bp, Unknown
  Bacterial polypeptide expressing nucleotide sequence isolated from the Sargasso Sea
catgacacattctatttggataataaaaaagaatttttacttagaactcatacatcgcctgtacaagttagaacaatgttaagtagtaaacctccatttaagattattgcacctgggagaacttacagatctgacagtgatcaaacacatgcaccaatgtttcatcaagtagaaggtcttcatattgataaaaatataaatatgggacatctcaaaggatgtttaaattattttattaaagaattttttgagattgataaaattaaaatgagatttagacctagtcattttccttttacagaaccatctgctgaagttgatatcggttatgagttaaaggatggcaaaataattataggagagggtgacaagtggttagaaattttaggatgtggcatggttcatccaaatgtattaaaaaatgttaaagtagatccatcaaagtttcaaggatatgctttcggcatgggtatagatagattggcaatgctaaaatatggaattaacgatttgagagcattttttgaaacagattatagatggttaaatcattttggatttgatcctttagatgtgccttcaagctacagagggttgagtagatgaa

SEQ ID NO: 301778 - DNA, 754 bp, Unknown
  Bacterial polypeptide expressing nucleotide sequence isolated from the Sargasso Sea
attcatcctgtatctcaaacgatagatgagatttcatctatattttcagaaataggttttagtgttgaagaaggaccagatgtagaaaacgaatataataattttactgcactaaacactccagataatcacccagctcgtgacatgcatgatactttttatttagatgaaaataaggaagttttgttaagaacgcacacttcaccggttcaaattagaactatgttaaaggataaaccgccatttaaaattattgctccaggtagaacatatagatcagatagtgatcaaacacatgcgccaatgttccatcaggttgagggccttcatatagataaagatattaacatgggtcatttaaagggttgtttaaattatttcattaaagagttctttgaagtgaaaaaaatcaaaatgagatttagaccaagtcatttcccttttacagaaccatctgcagaagtagatattggttacgaaattaaagatggtaaaattgttataggagaaggggatcagtggcttgaaattttaggatgtggaatggttcatccaaacgttttaaaaaatgtcaaagtagatcctggtaaataccaaggatatgcatttggcataggtatagaccggttagctatgctaaaatatggtattaatgatttaagagctttcttcgactgtgattatagatggttaaatcactttggatttgatccactagatgttcccacaaattatagaggtttaagtcgatgaa

SEQ ID NO: 301779 - DNA, 412 bp, Unknown
  Bacterial polypeptide expressing nucleotide sequence isolated from the Sargasso Sea
aaagtatatagaaaagatgacgattcaactcatttgcctatgtttcatcaagtagaagggatatatgtaaataaaaatgttacttttgcgaatcttaaggatttaatataccaaatcgttacttctctttttgggaatgaggttaaattaagatttagaccctcatactttccttttacagagccatctgctgaagtagatattctatctgaaaatggagattggcttgaaattttaggttgtggaatagtaaatccgatagtattaaaaaattgtgatattgatccagaaagttttagtggactggcttttggtttaggagttgaaagaattgcaatgcttaaatatggcgtaagcgatataagagatttttataaatcaaatttagattttctatcacaatttaaatgaa

SEQ ID NO: 301780 - DNA, 838 bp, Unknown
  Bacterial polypeptide expressing nucleotide sequence isolated from the Sargasso Sea
gatggcatttgctgaaaataaaattgatgttctaaaaaaaattaaagcttcaaaatccttcgaagatttagaaaaacttcgattatattatctaggtaaaaaaggattaatacctgaagctttaaaaggattaggttctttgtctattgaagaaaaaaaattgaaaggacaagaattaaatattattaaaaaagaaattgaagaagctattaaaaaccaaagaacagcaattgaaaatattgaaatttcaaacaggattaatttagaatcaattgatgttactctaccacctaatatttctgaaaaaggaaaaatacacccaattagtcaaacaatatttaatattatagaaatttttggaaatttaaattatgcagtggaaacaggtccagatatagaaacagattttaataattttacagctctaaatataccagaacatcacccagcaagagaaatgcaggatactttttatattcaggataatggggataaaaatgttcttcgaacccatactagccctgttcaagtgagaactatgttcaacactaaaccacctattaaaattattgtgcctggcagaacttatagaagtgactcagatgctacacatgctcctatgtttcatcaggtagaaggtttagtcgttgatacaagttctactatggttgatttaaaatcaatactcgtctcattcttagaagaatttttcgaagtaaaaaacttacaataccgttttcgccctagttactttccttttaccgagcctagtgcagaaatggatgtagcttataccaaagtaaataataaaataaaaattggagaaagagataaatgg

SEQ ID NO: 301781 - DNA, 733 bp, Unknown
  Bacterial polypeptide expressing nucleotide sequence isolated from the Sargasso Sea
atggaaaattttaatcaaatcgaaatagatatattagaaaaaattaaaaaaataagtgatcgtagttcttacgaaactatcaagactgaaatttttggcaaaaaaggtattattactgaactttttaaaaaaattggaagtttggatcaaagtcaaagaaaagaatatgcttcaaatcttaattctttaaaaacaaaagtaaatttaattcttgaaaaaaaactttctgatttcaatcaatcagaaattaataaaaaacttaagactgaaaaagttgatgtgacattaccaggaagaacttttttctctgggaaaattcacccagtatcacaagttatagacgaagtgacttcaattttttctgaaattggtttttctgttgaagaagggcctgatgtagaaaatgaatattataatttttctgcacttaacacacctaaaaatcacccagcaagggatatgcatgatactttttatcttaatcattcaaaagatttgcttttacgcactcatacatctcccgtccaaattagaacaatgttaaaagggaaaccaccatttaaaataattgctccaggaagaacttataggcatgacagtgatcaaacgcattccccaatgtttcatcaattggaaggtttacatatagataaaaatataaatatgggtcatctcaaaggctgcttatattattttgtaaagaagttctttgaagtagaaaaagcaaaaataa

SEQ ID NO: 301782 - DNA, 680 bp, Unknown
  Bacterial polypeptide expressing nucleotide sequence isolated from the Sargasso Sea
tatggatataaaccatactgatttagaaaaattactaaaagaagatctcgattcgtgtaacaaagagcatgatttacttcaaattaaatctaaatatcttgggaaaaaaggacaccttacttcattatttacatcactaaaaaatattaacccagataagcgtaaaacttttggcgctgaacttaataatattaaaaatactctatcttctatgatagagattaaacttattaatttaagatcttcgaatgaagtaccagaaaaaatagatttagatgtaccagctagacatcacaacaatggatcccatcacccgatttcattgattataaaaaagatagaaaatatttttttagagtatggatttgatattcatgatggacctgaaattgaaactgaacattacaattttgaatcactaaatatagcaaaaaatcatcctgcacgtgatatgcatgatacattttattttgacagtcaattgcttttaagaacgcatacatcttctgttcaaatccatgcaatggaaacatctaatgccccattcagggtgttggctccaggaagagtttatcgttgtgactctgaccctacacactcaccaatgtttcatcaaatagaaggactatgtgtagatacagatataactttcagtaatcttaaatggattctgaataatt

SEQ ID NO: 301783 - DNA, 748 bp, Unknown
  Bacterial polypeptide expressing nucleotide sequence isolated from the Sargasso Sea
atgtctgatattataaaattaaaagatgattatatcgataagcttaatacagaaaataatattgataaagttaataaaatcaaagctgaactgtttggaaaaaacggaattatatcaaacgaatttaaaaaattagtttcgatttctgtagaggaaagaaaaaaattagcttcagatttaaataatattaaagacgaacttcaaaataaaatatcaatcaaaattcaagaaatagaaactaaagaaattaatttaaaacttgaaaaggaaaaaattgatgtaactcttccggaaagagatattgaaattggtaaaattcacccagtctctcaggtgatagatgaaatttcatctatattttctgaaattggatttagtgttgaagaaggtccagatgtagaaaatgaatataataattttacagcattaaatacaccagataaccatccagctcgagatatgcatgatactttctatcttgataataataaggaattacttttgagaacacacacatctccagttcaggtaagaactatgttaaaaggtaagcctccctttaaaattattgcaccaggaagaacttacagatcagatagtgatcaaacccatgctccgatgtttcatcaagttgaagggctccatatagacaagaatataaatatgggacatttaaaaggatgtttaaattattttaataaagagttttttgaagttgataaaattaaaatgagatttagaccaagtc

SEQ ID NO: 301784 - DNA, 802 bp, Unknown
  Bacterial polypeptide expressing nucleotide sequence isolated from the Sargasso Sea
tgaaaaagttgatgtaactcttccagaaagaacttttagtaagggaaagattcacccagtatcacaagttattgatgaaatatcttcaattttttcagaaattggttttaacgtagaggaaggtccagacgttgaaaatgagtataataactttacagcgctcaatacccctgaaaaccaccctgcaagagatatgcatgatactttttatttagataagaataaaaaatttctacttaggacacacacatcaccagttcaagttagaactatgttacaaggaaaaccaccttttaaaataatcgctccaggcagaacttatagatcagatagtgaccaaacgcatgcacctatgtttcatcaggtagaaggtttacatatagataaaaatataaatatgggacacctaaaaggatgtttgaactactttataaaagaattttttgaagttgagaaaattaagatgaggtttagaccaagtcattttccatttacagaaccttcagcagaggttgacattggctatgagcttaagaatggtaaaataataattggagagggagataaatggctagagattttaggatgtggaatggttcatcctaatgttcttaaaaatgttaaagtcgatccaataaaatatcaaggttatgcttttggaatgggtattgacagattggcaatgcttaaatatggaataaatgacttgagagctttttttgaaactgattataggtggttaagccattttggatttgatcctttagatgtaccatcaagttatagaggtttaagtcgatga

SEQ ID NO: 301785 - DNA, 501 bp, Unknown
  Bacterial polypeptide expressing nucleotide sequence isolated from the Sargasso Sea
ttgcaccgggaagaacatatagatctgacagcgatcagacccactcacctatgttccatcaagtggagggactccatatagataaagatataaatatgggacatttaaaaggttgtttaaattactttataaaagaattttttgaagttgataaaatacaaatgagatttaggccaagtcattttccttttacagaaccatctgcagaagtagatattggttacgagttaaaagatggaaaaatagttattggacaaggtgataaatggttagaaattttaggatgtggaatggtacatccaaatgttcttaaaaatgtgaatgttaataccgataaatatcaaggttatgcttttggtattggtatcgatagacttggaatgcttaaatatggaataaacgatttaagagctttttttgagacagactacagatggattaatcattttggttttgacccattggatgtgccatcaaactatagaggtcttagcagatgaa

SEQ ID NO: 301786 - DNA, 373 bp, Unknown
  Bacterial polypeptide expressing nucleotide sequence isolated from the Sargasso Sea
tatgttaaaagacaaacctccatttaagatcattgcccctggtagaacttatagatctgatagtgatcaaacacacgcaccaatgtttcatcaagtagaaggtttgcatatagacacaaatattaatatgggacatttaaaaggatgcttgaattattttattaaagaattttttgaggtcgaaaaaattaaaatgagatttagacccagtcattttccatttaccgaaccatctgcagaagttgatattggttatgaaataaaagatggcaaaataattatcggagaaggagataagtggcttgaaattttaggctgtggcatggtgcatcctaatgttttaaaaaatgtaaaagtagatccttctaaattt

SEQ ID NO: 301787 - DNA, 481 bp, Unknown
  Bacterial polypeptide expressing nucleotide sequence isolated from the Sargasso Sea
cgatgtgacagtgaccaaacgcatgcaccaatgtttctttttttagaaggattgcatattgataaagatataaccatgggtcatttaaaaggatgcctagattattttgttaaagaattttttgaggtaaaaaaaatccaaatgaggtttaggccaagccattttccttttacagaaccttcggcagaagttgatattggttacagactagaaaatggaagaattattgttggcgaaggtgataagtggcttgagatattaggttgtggaatggttcacccaaatgttttaaaaaatgccaaagttgatccaaaaaaatttcaaggttacgcattcggtatgggaatagatagactcgcaatgttaaaatatggaataaacgatcttagatctttttttgaagctgattttcgatggttaaattattttggatttgatcctttggatgtaccaacaaattatagaggactgagcagatgat

SEQ ID NO: 301788 - DNA, 325 bp, Unknown
  Bacterial polypeptide expressing nucleotide sequence isolated from the Sargasso Sea
tatcaactttagtcatttgagaggaacagttcttacatttctaaagaccttttttggagatattcctgtaaggttcagagctagttatttcccatttactgaaccttcggcagaagtagatgttcaatggaaaggtaaatggttagaagtaatgggatgcggaatggtagatcctatggtcttagaaaaattagggatagattctgagaaatggacaggatttgctgctggattaggagtggaaagattttgcatggtaagacatcagattgacgacatcagaaaattttatacaaatgatctaaggttcttagaacagttctaa

SEQ ID NO: 301789 - DNA, 559 bp, Unknown
  Bacterial polypeptide expressing nucleotide sequence isolated from the Sargasso Sea
ctcctgttcaatacgtacgatggaatcccagaatccgcccatccgtataatagtgccaggccggacttaccggtcagatcatgacgcaacccattcaccaatgtttcatcaatgtgaggggttggttatcggcgatggcatccatatggggcatttaaaaggctgtttgattgatttttgtcgcgccttttttggtgtcgatgatctaccggtccgtttccgcccaagctattttccctttactgagccatctgccgaagttgatattggctgcactaggcaaaatggagcactgaaaattggcgctggagataattggctagaaattctgggatctggtatggtaaacccgcgtgtgctagaaaactgtggttatgattccgaaaaatatcagggatttgcctttggtatgggaatcgagcgcattgcgatgcttaaatatggcattccagatttgcgtaccttttatgatagtgatatgcgctggatgaggcattatggatttctgccatttgatgcaccatcgatccatgccggtctttccgggggcggtgtctaa

SEQ ID NO: 301790 - DNA, 467 bp, Unknown
  Bacterial polypeptide expressing nucleotide sequence isolated from the Sargasso Sea
ccaaacccacactcctatgtttcatcaattagaaggtctccacatagataaaaatataaatatgggtcatttaaaaggttgtctcaactattttattaaagaattttttgaaataaacaaaatcaaaatgagattccgaccaagccattttccattcacagaaccttcagctgaggtagatattggttatagattagaaaataataaaattgttataggcgatggggacaaatggctcgagatacttggatgtggaatggttcacccaaatgttttaaaaaattgtaaagttgatccaaaaaaatatcaaggttttgcttttgggattggtattgatagacttgctatgcttaaatatggaataaacgatttgagatcattttttgattgtgattatagatggttgaatcattacggttttgacccattagatgtaccgactaattatagaggattaagtcgatgaa

SEQ ID NO: 301791 - DNA, 640 bp, Unknown
  Bacterial polypeptide expressing nucleotide sequence isolated from the Sargasso Sea
aatacacctgatcatcatcctgcaagagatatgcatgatactttttatttggataataaaaaagaattacttttaaggacacatacttctccagttcaagtacgtacaatgttaaaagggaaaccgcctttcaaaataatagcgccaggaaggacttatagatctgacagtgatcaaactcattctccgatgttccaccaagttgaaggacttcatatagacaaagatataaatatgggtcatttaaaaggttgtttgaattattttatcaaagagttttttgaacttgataaaatacaaatgagatttagaccaagtcattttccttttactgaaccatctgcagaagttgatattggttacgaattaaaagatgaaaaaataattattggagaaggcgataaatggttagaaattctaggatgtggaatggtacacccaaatgttcttaaaaatgtaaatgttaatccagataaatatcaaggttatgcttttggcattggtattgatagacttggaatgcttaaatatggaataaatgatttaagagccttttttgatactgactatagatggcttaaccattttggatttgatccattggatgtaccatcaaactatagaggccttagcagatgaa

SEQ ID NO: 301792 - DNA, 796 bp, Unknown
  Bacterial polypeptide expressing nucleotide sequence isolated from the Sargasso Sea
ctgaaaccatcaaagatacgaggcatcgtttcggaaggtatgatttgctccgaactggaattaggactgggagaagcccatgaaggggttttgtttcttccggatgatgcaccggttggaggaatgctgaaggattatttgggagacgcggttcttgaatttgacatcaaaggcggttttgcgcatttgctttcaatttacggacttgcgagggaaacagcagccattacccggatgcagctcaaatctgaaaaattgccggatctttcaaaactcaacttaccaaagcaaaactgttctctttctgaggcttctgaagtggattttctgaagttgagaatcgagaatccggacctctgtccacgatacagtgctcttttggttcgcgggatcaccatcggtccttctcccttctggatgcagcaaaggcttcaacgggccgggatgagaccgatcaacaacatcgttgatattaccaattacgtgatgctcgaacttggacaacctcttcatgcttttgactaccaggcgctttgcaaacgtgttgaaggagagactccagaaatatttgtcaggtgtgctgtcaatggggaggtgatgaccactcttgatggagaagaaaggaggttggacgatcagatgctgatgattaccgacaaagcaggtttgatcgccattgccggggtgatgggaggagaagaaaccgaggtcggcaatgaaacgaaagatgttttgcttgaatccgcaaatttcaattttctcaacaatcgcagaacggcccaattactcaagtgaa

SEQ ID NO: 301793 - DNA, 886 bp, Unknown
  Bacterial polypeptide expressing nucleotide sequence isolated from the Sargasso Sea
atgtcagatattataaaaatcaaagaagaatatctaaacaagctaaaagatgatttagatcttaatgctgttaatcaattaaaatctgagttatttggcaaaaatggaataatttcaaatgaatttaaaaagatgggttctatttctgcagaagatagaaaaaaatttgcctcagatctaaactcaataaaggatgaactgcaaagtctaattgaaaaaaaaattaaaaatattgaaattaatgagataaatttaaaacttcaaaatgaaaaagttgatgttactttgccagaaagaagttttaatcgaggtaaaattcatccagtatcacaagttatagatgaaatatcttcaatattttctgaaataggatttagtgttcaagaaggtcctgatgttgaaaatgaatacaataatttcactgctttaaatacacccgatgatcacccagcaagagatatgcatgacacattttatttagataataaaaaagaatttttactaagaacacatacttctccagttcaagttagaacaatgatgaatagtaagcctccatttaaaattattgctcctggaaggacttacagatctgacagtgaccaaactcatgcaccaatgtttcatcaagtggaaggacttcatattgataaaaatataaatatgggtcatctaaaaggatgcttaaactattttataaaagaattttttgaagtagataaaataaaaatgagatttagaccaagtcattttccattcacagaaccatctgctgaagttgatattggttatgaactaagagatggaaagataattataggagaaggagataaatggttagaaattttaggatgtggaatggtacatccaaatgtgccttcaaaaa

SEQ ID NO: 301794 - DNA, 631 bp, Unknown
  Bacterial polypeptide expressing nucleotide sequence isolated from the Sargasso Sea
aatttgataacttataaaattagtgagatagaaggaaaaaaaataaacgaaaaattagaaaaggaaaaagttgatataactttacctgaaagaccattcgttagaggaaaggttcatccggtatcacaaactattgatgaaatttcatctattttctctgaaataggatttagtgttgaggatggccctgatgttgaaaatgaatataacaactttactgctttaaacacaccagacaatcatccagcaagagatatgcatgatacattttacttagatgaaaacaaagaagtgctgttacgaactcatacttctccagttcaaattagaactatgctaaaagataaacccccatttaagattattgctcctggaagaacgtatagatctgatagtgatcaaacacacgcaccaatgtttcatcaagtagaaggtttacatattgacacaaacattaatatggggcatttgaaaggttgcttgaattatttcattaaagaattttttgaagtcgaaaaaattaaaatgagatttagaccaagtcattttccattcacagaaccatctgctgaagtagatattggttatgaaataaaagatggcaaaataattattggagaaggagataatt

SEQ ID NO: 301795 - DNA, 774 bp, Unknown
  Bacterial polypeptide expressing nucleotide sequence isolated from the Sargasso Sea
gatctcaaaataatgggaagatccacccggtatctcaagtaattgatgaaatatcctctattttttctgagataggattttcagtggctgagggaccagatgttgaaactgaatataataattttacagctcttaataccccagaagatcatcccgcaagggatatgcatgatactttttatttagataaaaataaaaaaactcttttaagaacacatacttctccagttcaaataagaacaatgttaaatggaaaacctccgttcaaaataatagcacccggacgaacgtatagatgtgatagtgatcaaacccatgcaccaatgtttcatcaattagagggtttacatatagacaaagatataaccatggctcatttaaaaggatgtttaaattacttcataaaagaattttttgaggtgaaaaatataaaaatgagatttaggcctagtcacttccctttcaccgagccatcagctgaagtcgatattagatataatatagagaatgataaaattgtaatcggagaaggcgacaagtggttagaaattttaggctgtggaatggttcatccaaatgttttaaacacctctggagtcaattcaaaaaaatatcaaggttttgctttcggtatgggtattgatagattagcaatgcttaagtatggcataaatgatttaagatctttttttgatacagactataggtggcttaaccactttggttttgatccattagatattccaacaaactacagaggtttaagcagatgat

SEQ ID NO: 301796 - DNA, 789 bp, Unknown
  Bacterial polypeptide expressing nucleotide sequence isolated from the Sargasso Sea
aatggcacatttagatgaattaattcaaaaggtattaaacgctaaagataaattaagtttacaaaatttaaagtccgagcttttgggcaagaatagccaaatcaaccaagactttaaaaaactcgggtctttatccgaagaagaaagaaaagaaaaagcttctagtcttaataatcagaaacaaaaaattactgaagccattgataataagtttaaagaattggagaagctagagataaatcagaaactaaaaaaagatagagtagatgtaactttaccagttagagagcaaacaaatggaaagatacatccagtttcgcaggttattgatgagatttcttctatattttctgagataggcttttctgttgctgaaggaccagatgtagaaactgaatataataattttacagctctaaatacaccagaagatcatccagccagagatatgcatgacactttttatttagataataataaaaaaattttattaaggactcacacttctccagttcaaatcagaacaatgttaaacggcaaaccaccatttaaaattattgttccagggagaacttaccgttgtgatagcgatcaaactcatgcaccaatgtttcatcaactcgaaggactacatatcgataaagatattaatatgggtcacttaaaaggatgtcttgattattttataaaagaatttttcgaagtcagaaaaattcaaatgaggtttagacctagccattttccatttacagaaccttctgctgaagttgatatttggtacagaataga

SEQ ID NO: 301797 - DNA, 214 bp, Unknown
  Bacterial polypeptide expressing nucleotide sequence isolated from the Sargasso Sea
ggaatggttcatccaaatgttttaaaaaatgtaaaagtaaatacttcgaagtatcaaggttatgcatttggtataggtatagatagattggcaatgctaaaatatggaataaatgatttgagagctttctttgagacagattataggtggataagtcattttggatttgatcctcttgatgttccctcgaactatagaggattgagtagatgaa

SEQ ID NO: 301798 - DNA, 595 bp, Unknown
  Bacterial polypeptide expressing nucleotide sequence isolated from the Sargasso Sea
aatggtagatttacgagaattaattcaaaaagtatctcaagttaaagataagttagaactgcaaaatttaaaaactcagtttctaggaaaaaatagtcagatcaatcaagagttcaaaaaacttggatctttatctgaggatgagagaaaaacaagagcagcttctcttaataatgaaaaacagaaaattactgaagcaatcggtaatagatttaaagaattagaaaaattagaaataaatcaaaaacttcaaaaagataaagtcgatgtaacgttgccagctcgagaaagaccaaatggaaagatacatcctgtttcacaggttattgatgaaatttcttctatattttctgaaataggtttttcagttgcagaaggtccagatgtagaaactgaatataataattttacagctttaaacactccagaagaccatccagccagagatatgcatgacactttttatttggatgataacaaaaaaattttattaagaacccatacttcaccagttcaaattagagcaatgttaagtggtaagccaccattcaaaattattgttccaggaagaacctatcgttgtgatagcgatcaa

SEQ ID NO: 301799 - DNA, 922 bp, Unknown
  Bacterial polypeptide expressing nucleotide sequence isolated from the Sargasso Sea
aatttaaaaaaaatgggttcacttaatcctgaagaaagaaaaaattttgctaaagaattaaataaaataaaagaccagttaacatctaaaattgaaaagaaatttaaagattttgaaaatcttgagataaatcagaaacttaaagatgaaaaaatagatattactttaccaattagatctatccatcaaggtaaaattcatcctgtttctcaagttattgacgaaatatcttctattttttctgaggtaggtttttcagttgctgaaggccctgacattgaatctgaacataataattttacagctttaaatacacctgaagatcaccctgcaagagatatgcatgatacattttatttggacaaagataaaaaaactttactaagaactcatacttctcctgttcaaataagaactatgcttaatggcaaaccaccgtttaaaattattgtgcctggtagaacttatagatgtgatagcgatcaaactcacgcacctatgtttcatcaattagagggtttacacatagataaaaatataacaatgggccaccttaaaggatgtctaaactattttataagagagttttttgaggtaaagaaaattaaaatgagattcagaccaagccattttccattcactgaaccatctgcagaggtagatattggttacaaaattgagaatggtaaaattgtaattggagagggagataaatggttggagatcttaggctgtggaatggttcaccctaatgttttaaaaaatactaaagttgaccctaaaaaatatcagggctttgcttttggtatgggtatcgatcgtcttgcaatgcttaaatatggaataaatgatttaagagcattttttgaaacggattacagatggcttaatcattttggtttcgaccccattagatgtccca

SEQ ID NO: 301800 - DNA, 628 bp, Unknown
  Bacterial polypeptide expressing nucleotide sequence isolated from the Sargasso Sea
cggcgcgacggaacaagacactttttatttgccgcccgacgataccggtgttcctagggtccttcgcacccacacgtcgccggttcaaattcgcacgatggaaaaaacagctcctccaataaaaataatagtccctggtaggacctttcgctcggatcatgatgctactcactcgcccatgtttcatcaagtcgagggcttggttattgataagaaaagccatatgggacacctgaaaggttgtttaatagatttctgcagggctttttttggggtcgatgatctgcccgtgaggtttaggccaagctatttcccatttaccgagccatcagcggaggttgatataggctgcacccgagcaggcggagaattcagaataggcaaaggggatgattggctagaaattttaggatctgggatggtccaccctcgtgtgctagcgggatgtggaatagatcctgatgagtaccaaggttttgcctttggcatgggtatagaacgaattgccatgcttaaatatggcatacccgatttgcgcccgttttacgatagtgatatccgttggctgaagcattacggttttgttcctctggacattccaactgtttctaaaggtattaatcaatga

SEQ ID NO: 301801 - DNA, 268 bp, Unknown
  Bacterial polypeptide expressing nucleotide sequence isolated from the Sargasso Sea
aaatggtaaaataattataggcgaaggtaataaatggttagaaattttaggttgtggaatggttcatcctaatgttctgaagaatgtaaaagtggatccatcaaaataccaaggatatgcatttggtataggtattgatagattggctatgctaaaatatggaataaatgacttacgagctttctttgaatgtgactatagatggttaaatcattttgggtttgatccattagacgttccatcaagttacagaggtttgagtagatga

SEQ ID NO: 301802 - DNA, 646 bp, Unknown
  Bacterial polypeptide expressing nucleotide sequence isolated from the Sargasso Sea
cttgaacattgaaaatgtaaatcaaattaaatcggagttatttggtaagaatggtaaaatttctaactcttttaaaaatcttggatctttgccagctgaagaacgtaaaaaatttgcatcagatttaaattttataaaagatgtacttcaagaaacaattaataaaaaaattcaagaaatagaaattaaagaaataaattctaaactagagaatgaaaaagtggatgtaactttacctgaaagaaatattgttcaaggtaaaatacaccctgtttctcaagttatagatgaaatatcatctatattttctgaaattggtttcagtgtcgaagaaggcccagatgtggagaatgagcattataattttacagcactaaatacaccagataaccatccagcaagagacatgcatgacactttctatttagatgataaaaaagaattacttttaagaactcatacatccccagttcaagtaagaacaatgttaaaaggcaaacctccttttaaaattattgctcctggtcggacttatagatctgacagtgatcaaactcatgccccaatgtttcatcaagtagaggggctacatatcgataaaaaaataaatatgggacatttaaaaggctgtctaattattttataa

SEQ ID NO: 301803 - DNA, 931 bp, Unknown
  Bacterial polypeptide expressing nucleotide sequence isolated from the Sargasso Sea
aaatttagtagaaattacatctactcctgaagatctctctgagaaattgtctattggtggatttgaggtcgaatcattagaagattgttcagaaaatttaaatggtgtcgttttaggtaaggttttatctgttttaaaacacgaaggatctgacaaactctctatttgccaagtcgatattgggacttcaacgaatttacaaattatctgtggagcgcaaaatattaaaccagatatttatgtttatattgctactgtaggtgcgaaattaaaagcagttaatttaactattaaaagaagcgaaattagaggtgtcatgagtgaaggaatgatatgctcacttcaggaactgggattagaggactatagtgaagggataatgatcattgatggagatttagccttaaaacatgaattgggcacgccagcatgtaatttacttcaattaaatgattttatatatgatttagcaattacagctaatagacctgatggaatgtcggttataggcatagcccgcgaaatttctgctctattagaatcaacattaaattttccagaattaaatcataaatacaatatccatttacttaagtgttttcaacatagcccagaagccataacatctgattgcatttatacaataacctgtattgatggagtaaatggagaaatattatcgccaaaatggattaaagaccgtatagaaaaatcaggtataaaatctattaatcttctagttgatttaacaaactatattcttttagaacaaggccaaccattgcatgcgtttgataaggataaactatcaaacttaattggaaaagaagtttctcctgaggacttctctgtaagaaaagcgatggataacgaaagccttgtatgtttagatgggaaaaaatatgaattaaatgaaaatatcacagtaata

SEQ ID NO: 301804 - DNA, 850 bp, Unknown
  Bacterial polypeptide expressing nucleotide sequence isolated from the Sargasso Sea
atgcctgatattaaaaaaataaaaaatgaatatttagataaattaagtgaagacttaaatattgaaaacataaatcaaattaagtctgaattatttggaaagaatggtaaaatttctaattcatttaaaatactcggctcaatacctgctgaagaaagaaaaaattttgcatcagatttaaattttatcaaagatgaactccaagaaaaaattaataaaaaaattaaagaaatagaaattaaagaaataaattctaagcttgaaaatgaaagagtagacgtaactttacctgagagagaaattattcaaggtaaaatacatcctgtatctcaagttatagacgagatatcctcgatattctctgaaattggatttagtgtcgaagaaggaccagatgtagagaatgagtattataatttcactgcattaaatacgcctgataatcatccagcaagagacatgcatgacaccttttatttagatgataaaaaagaattacttttaagaactcatacgtcaccagttcaagtacgaacaatgttaaaaggcaagcctccctttaaaattattgctcctggtagaacttatagatctgacagtgatcaaactcatgcaccaatgtttcatcaagtagagggacttcatattgataaaaacataaatatgggacatttaaaaggctgcttaaactattttataaaatcattttttgaagtggacaaaatcaaaatgagatttagaccaagtcacttcccttttacagaaccatcggcagaagtcgacattagttatgaattgaaagacggaaaaattgtctttggtgagggagacaaatggtggaaattttagg

SEQ ID NO: 301805 - DNA, 817 bp, Unknown
  Bacterial polypeptide expressing nucleotide sequence isolated from the Sargasso Sea
ccgaggaaaagcccaaaacttggaaaagacattaaccttctcaagaagcatattgaaaataaaataaacagcaagggaacagatctgggttccaaatcctttaaaaaatcttacgaaattttcgacactactttacctggaaaaaaagagctgccaggcactctccatcccattacccagattatggaagaaatcacttcaatattttttgggttagggtttcagatagaagaggggcctgaaatagaaacagactattataattttaaggctctcaacattcctgaagatcatcctgcgagagatatgcaagataccttctatgtaggagataaaaccgttttgcgtacgcacacctcgcctgtccaaattcatgtgatggaaaaccgggaaccgcctctccgaattattgcaccgggaaaagtttatcgttgcgattcagatgtttcgcacacaccgatgttccatcagattgaaggcttaatggtcgacgacggaatttccttcagtcatttaaaagggatcatgaatatttttcttcaagaagtttttggcaaagatacacaaactcgctttagacccagtttttttccttttacttgtcccagcgctgaagtagatattcaatgtgtgatttgtgatgggaaaggttgtcgggtgtgctcgcagacaggttggttggaaattcttggtgctggaatggtagaccctgccgtttttcagttcgtcgattacgattccgaaaaatggacaggatttgcatttggtcttggcatcgaacgtatcgcaatgcttaaatttggcatcaatgacatcc

SEQ ID NO: 301806 - DNA, 982 bp, Unknown
  Bacterial polypeptide expressing nucleotide sequence isolated from the Sargasso Sea
aggcatcaaagaaaactcgggggagatgggaaaattcaaaattgcaaaagttcttaaggcagataaacatcctaatgcagataaactgaaagtttgcgatgtaactattggaggtaaagagattttaaaagttgtttgcggagcaccaaatgctagagagggcttaatcacaatttatgcacctccaggtgctgtaataccaaaaactaattttgaacttaaggtagctaaaattagaggtgtagagtcaaaagggatgctttgctctgaaagtgaacttaatttgtctaatgagagcgatggtataattgaacttaaaaacaaagataaagaaataggaaaaagttattttaaaaagaagtcagaaaaagccatagatatatcaattacaccaaatcgagctgattgtttaggtattaggggaatcgcaagagatctctcttcatcaggtattggaaaattaatacagttaaagagaaaaaaaattaaacaaagtacaaaacataaaattaaaacatcaattacaaaagaaaagaatcaaggatgcgatatttttggaagctgtttcattaaaaatattactaataaggaaagccctgactggcttaaaaataaattaatcgcattaggtttaaaaccgatttctgctgtagtggatataaccaactatgtaatgtttgatttaaacagaccactacatgtctatgatgctgataagataaataaagaaattatagtaagaaacgctaaggaaggagaggtattcgaggcacttgataataaaaagtataaacttaaaaaagacatgtgtgttatttctgataaatctggcgttttaggtttaggcgggattattgggggaacgactacctcgactgaattagatacaaaaaatatactcttagaggcagcttattttagcccatcgtcaataagaaaaacagctagagccttaaatataaatactgatgcaaaatacaga

SEQ ID NO: 301807 - DNA, 688 bp, Unknown
  Bacterial polypeptide expressing nucleotide sequence isolated from the Sargasso Sea
atgataattacccttccttggctcaaagaacatttgcaaaccaaagccaatcaaaaagaaattatagaaaaacttactaatattggtctagaagtagagggaacaaaagaaaattacagtgaaattggaaaatttaaaatagcaaaaatcctaaaagctgaaaagcatcctaatgcagataaactaaaagtctgtgatgttgatatcggcggaagagaaattttaaaagttgtttgtggcgcacctaatgcaagagacggacttattacaatttatgctcctccaggcgcagtgattccaaaaacaaaatttcaattaaaagtagccaagattagaggtgttgaatctagaggcatgttatgttctgagagtgagctaaatctttctaatgaaagcgatggcataattgaattgaaaaataaggagacagacattggaaaaagttattttaaaagtaaatctgaaaaaacaatagatatttcaattactcctaatagagcagactgtttaggaataagaggaattgccagagatttatcatctacaggtattggtaaattaattccacttaagaagaaaaaatttaaacaatttattaaaaattcaattaaaacatcaattaaaaaggacccaaagcaaggatgtgcagtattcggaagctgttatataaagaatttatctaacaaag

SEQ ID NO: 301808 - DNA, 533 bp, Unknown
  Bacterial polypeptide expressing nucleotide sequence isolated from the Sargasso Sea
tgatttagaagcaattatcggcttgacagtttccgcatcagaatttagctttagagtagcgacgcattctgctcttcatccagggcaatgtgctgaaatattgagaaatgatcgagtgatcggtcatataggtgctatccatcctagtttggagaagccttttggactcaatggtaaaaccatcgtttttgagttggaattggatgctttattgcataccagtttaccgctagcccaagctgtatctaagttcccggctaatcgtcgtgacatcgcagtagtcgtagatgaaagtgtatctgcaggcgatgtaatgaaattgataagaaaagttggcgaaaatcagttggttggcataaacttgttcgatgtatacttaggtaaaggtgttgagcccggcaagaagagcttggcgatagcacttacattacaagacactactcgtacacttgaggaaaaagagatcgctgaaactgtagattcagttgtttctgccctgaagaccgagttcaacgcatcgttgagggattaaa

SEQ ID NO: 301809 - DNA, 565 bp, Unknown
  Bacterial polypeptide expressing nucleotide sequence isolated from the Sargasso Sea
atgtctgatattataaaaattaaagatgaatatcttttaaaattaaaagatgatctagatttaaataatattaatcaaatcaagtcggaactatttggcaaaactggaaaaatttcaaatgagtttaaaaaaatgggttctatgtcaccagatagtagaaaaaagtttgcatctgatcttaacgcaattaaagacgaacttcaggaacttattgagaaaaaaatcaaagatattgaaataaaagaaattaatctaaaacttcaaaacgaaaaagtagatgttactttgccagaaagaagttttaaaagaggaaaaatacatcctgtatcacaagtaattgatgaaatatcctctatattttctgaaataggttttagcgttgcagaaggacccgatgttgaaaacgaatataacaatttcactgcacttaacacaccagacaatcatccagcaagagatatgcatgatactttttatctagatgataataaagaatatttattaagaactcatacttcacctgttcaagtgagaactatgattaggaggaaaaccaccttttaag

SEQ ID NO: 301810 - DNA, 672 bp, Unknown
  Bacterial polypeptide expressing nucleotide sequence isolated from the Sargasso Sea
tagaaacagaatataataattttacagctcttaatacacccgaagatcatccagcaagagatatgcatgacactttttatcttgataaaaacaaaaaacttttattaagaacacacacttcaccagttcaaattaggagcatgttaaatgaaaaaccaccttttaagattatcgtgcccggaagaacttatcgatcagatagcgatcaaactcatgctcctatgtttcatcaattagaaggtcttcacatagataagaatataacaatggggcatttaaaaggatgtttagattatttcataaaggaattctttgaagtcagaaatgttaaaatgagatttaggccaagtcatttcccatttactgaaccttcggctgaagtagatattggttatagattagagaacggaaaaatagttattggagagggtgataagtggctagaagttttgggttgcggaatggtccaccctaatgttttaaaaaatgtcaaagtcgatacaaaaaaatatcaaggttatgcgtttggaatcggaatagataggcttgcgatgctaaaatatggaattaatgatctaagggcactttttgaaacagattatcgatggttaagtcattttggttttgatcctttggatgttccaacaaattatagaggtttaagtaaatgat

SEQ ID NO: 301811 - DNA, 596 bp, Unknown
  Bacterial polypeptide expressing nucleotide sequence isolated from the Sargasso Sea
ttatcttgataaaaatatgaaaacattattacgaactcatacttcaccagttcaggttagaacgatgttaaaaggcaaacctccttttaaaattattgctccaggaagaacatatagaagcgatagcgaccaaactcatactccaatgtttcatcaattagagggactgcatattgataaggaaataaatatgggtcatttaaaaggatgtctcaattattttattaaagagttttttgaggttaaaaaaattaaaatgaggtttagaccaagccatttcccatttactgaaccatctgcagaagtagacattggttatagaattgaaaataataaaataattataggtgagggagataaatggcttgaaattttaggttgtggaatggttcacccaaatgttttaaaaaattgtaaagtcgactcaaaaatatatcaaggtttcgcttttggaataggaattgatagattggcaatgttaaagtatggaattaatgatcttagatctttttttgaatgtgattacaggtggttgaattattacggctttgatccattggatgtcccaacaaactataggggtctaagtagatgaa

SEQ ID NO: 301812 - DNA, 823 bp, Unknown
  Bacterial polypeptide expressing nucleotide sequence isolated from the Sargasso Sea
ataaataagaaattagataaagaaaaaattgatgttacattacccgaaagaccaattataagaggaagaatacatccagtttcacaaacaatagatgagatctcttcaatattttcagaaataggttttagtgttgaagagggtccagatgttgaaaatgagtataataattttacagccttaaatactcccatccatcatcctgctcgagatatgcacgatactttttatttggatgagcaaaaaaaaaaattattgagaactcatacatctcctgttcaaattagaactatgatgaaaggtaaacctccttttaagattattgctccaggtagaacttataggtcagatagcgatcaaactcatgctccaatgttccatcaagtagaaggtctacacatcgataaagatattagcatgggtcatctgaaggggtgcttaaattattttataaaagaattctttgagattgataagattaagatgagatttagacctagtcattttccatttactgaaccttcagcggaggttgatataggttatgacattaaagatggaaaaattaaaattggtgaaggtaatcaatggttagagatattaggttgtggaatggtacatccgaatgttttaagaaatgttaaggttaaccctgataaatatcaaggttatgcttttggcataggaatagataggttagcaatgttaaaatatgggataaatgatttaagagcattttttgaatgtgattacagatggttaaatcattttggttttgatcctatagatgtcccaacaaattacagaggcctaagtcgatgaa

SEQ ID NO: 301813 - DNA, 283 bp, Unknown
  Bacterial polypeptide expressing nucleotide sequence isolated from the Sargasso Sea
ggatatcgtatcgagaataacaaaattgtaattggagagggagataaatggttagaaatacttggctgtggaatggttcaccctaatgttttaataaattcaaaagttgacccaaaaaaatatcaaggatttgcatttggaataggtatagacaggttagcaatgcttaaatatggaattaatgatttaaggtcattctttgaatgtgattttaggtggttaaattattatggttttgatcccttagatgttccaacaaattatagaggtttaagtaaatgaa

SEQ ID NO: 301814 - DNA, 391 bp, Unknown
  Bacterial polypeptide expressing nucleotide sequence isolated from the Sargasso Sea
cgatgcaactcatttgccaatgtttcatcaggtagagggaatatatgttgataaagatataactttttctcaattaaaagatctaatttataaaatcattcatgaactattcgataatgatataaaaataagatttaggccttcatattttccctttacagaaccatctgctgaagttgatattcaatctgataataaagaatggcttgaaatattaggttgtgggattgttaatcccattgtcttagaaaactgtaaaatagacagtaaaaaatatagtggcttagcttttggtatcggagttgaaagaatagcaatgttaaaatatggcgtaaatgatattagagaattctacaaatcaaacttagattttttggaacaatttaagtga

SEQ ID NO: 301815 - DNA, 484 bp, Unknown
  Bacterial polypeptide expressing nucleotide sequence isolated from the Sargasso Sea
tatagatgtgatagtgatcagactcacgcacctatgtttcatcaactagagggcttacacatagataaaaatattaccatgggtcaccttaagggatgtttaaattattttattagagagttttttgaagtaaagaaaattaaaatgagatttagacctagccattttccattcacagagccatcagctgaggtagacattggttacaaaattgaaaacggtaaaattattatcggagatggagataaatggttagagattttaggttgcggtatggttcaccctaatgttttaaaaaatactaaagtcgatcctaaaaaataccaaggttttgcttttggaatgggaatagatcgtcttgcaatgctaaaatatggaataaatgatttaagagcattttttgaaaccgattacaggtggctaaatcattttggtttcgatccattagatgttccaactaactacaggggattgagcagatgat

SEQ ID NO: 301816 - DNA, 876 bp, Unknown
  Bacterial polypeptide expressing nucleotide sequence isolated from the Sargasso Sea
aagaactaataaaattattttctgataaagctatcaagttagctgactgcgaaatagacgaacaggttaaaaaagaaaaggatgacgtaactcttccagaaaaagattttagaattggtaaaatacatcctgtgtcacaagtaatcgatgaaatttcttctatattttcagaaattggatttagtgttgaagaaggccctgatattgaaagtgaatattataattttacagcactaaatacacctgaaaatcatcctgcaaaagacatgcatgatactttttatattgaagaaaatatgaaaacactattaagaacgcatacttctccagtgcaagtaagaacaatgttaaaaggaagaccaccatttaaaattatagcaccaggaagaacatatagaagtgatagtgatcagacacatactcctatgtttcaccaactagagggacttcatattgataaaaatataaatatgggtcacttaaaaggttgtttaaattattttataaaagagttttttgaagtagataaaatcaaaatgagatttcgtccgagtcactttccatttactgagccttctgcagaagttgatataggatataggattgaaaataataaaattataattggagagggagacaaatggttagaaatactaggttgtggaatggttcatcctaatgttttaaaaaattcaaaagttgatccaaataaatttcaagggtttgcatttggcattggcatagataggttggcaatgttaaaatatggaattaatgatttaagatccttctttgaatgtgattatagatggttaaattattatggttttgatcctcttgatgttccaactaattataggggtctaagcaaatgaa

SEQ ID NO: 301817 - DNA, 883 bp, Unknown
  Bacterial polypeptide expressing nucleotide sequence isolated from the Sargasso Sea
aaaaagggagctattacaatagctctgaaatcagtatcctctgtcgacccaaaggatagacctgcatacggaaagaaaataaatgaactcaaatctttgattcaaggtacgctttcacaaaaaagagcatctttacaaaaaaaagaaattaatcagagtatcgatgataagaaaatagatgtctcactgcctggaagaagcaactttggtggacataggcatcctgtaacaaaaactttacttgaaattgaagagatattttatggtgctggctttgcggttgaagacggtcccgaaattgaagatgagtatcataacttcactgccctaaatatttcaagtaatcatccagccagagctatgcacgatactttttactttaattctgaatttctattaagaactcatacatcaccaatccaaattcgcagcatggaaaaagaaggcgtcccgataagggttattgcaccaggaaaagtttatcgaagagattctgacataacacacacgccaatgtttcatcaaattgagggcttggtaattgataaaggaataaatttcagtcaccttaaaggaatcctgcatcaatttattgatacattttttgaagaaaacactgaggtacgtttcagaccttcctattttccttttacagagccatcggcagaagttgatatattgtctaaagaaaataaatggcttgaaatactaggctgtggaatggttcacccaaaagttcttgaaaaccttgacattaatactgaaatctacagtggttatgcttttggtatgggtgtagaaagattggcaatgctgaaatacggcatcaaagacattcgatctttttatgaaaatgattttaatttcttaaaccagttctaaa

SEQ ID NO: 301818 - DNA, 988 bp, Unknown
  Bacterial polypeptide expressing nucleotide sequence isolated from the Sargasso Sea
atgcagaatctggacgagctttcatctgaaatcctgagcgcggtcgagcccgccaacaccaccgacgccctcgaagccgtgcgcatcgacgcgctgggcaagaaaggccgcatctcgctgatgatgcgcgagctaggtggcatggacccggaagagcgtaaggccgccggtcagacgctgaacaaggtgaaggacggcatcgcggccgccatcgagacccgtcaggccgtcctgtcgcgcgctgcgctggatgcgcggcttgccgccgaggcggtcgatgtcagcttgccgtcgcgtcccgagacagaggcgcggctgcatcctttgtcgcgaaccatcgaagaggttgttgccatctttgccgagatgggattcacagttgccgaggggccggacatcgagtccgactattacaacttcaccgcgctgaacattccggaggaacaccccgcccggcaggagcacgacaccttttacctgccgccagatgaagagggacggcgcaaggtgctgcgcacccacacttcgccagtgcagatccggaccatggaggcgaccgaaccgccggtgcggatcatcgttcccggccgcacctaccggtccgaccatgacgcgacccattcaccgatgttccatcagtgcgaggggctagtcatcggcgacggcatccatatgggccacctgaagggctgcctgatcgatttctgccgcgccttcttcggcgtggacgacctgccggtgcgctttcgccccagctattttccgttcaccgagccgtcggccgaggtcgatatcggctgcacccgcgacgacggcgggctgaagatcggggccggcgacgactggctggagattctcggctctggtatggtcaacccgcgcgttctggcgaattgcggatacgacccggagaaatatcagggctttgccttcggcatggggatcgagcggattgcgatgctgaaatacggcattccggacctgcgca

SEQ ID NO: 301819 - DNA, 853 bp, Unknown
  Bacterial polypeptide expressing nucleotide sequence isolated from the Sargasso Sea
gatgactgaattagaaagaatacagaaagaatttctagataaattttcaaaaataagttctaaagacgagcttcagaatttgaaatcagctttttttggaaaaagcggtttaatttctttacaatttaaaaaaatcggtgctttaaatgaaaatgagaagaaaaattttgcaaaagatttaaataaaatcaaaaacaatctatcaaataaaattgacgagaagtttaaagaaattgaaaatttaattataaatgagaagttaaaagatgagaaaattgatataactcttccaataaggtctcagcagaaaggaaaaattcatcccgtatcacaagtaattgatgagatatcttcaatattttcagaagttggcttctctgtagctgagggaccagatgttgaaactgagtataataattttacagctttaaatactcccgaagatcatcctgctagagatatgcacgacactttttatttagaccaagacaaaaaaattttattgagaacccacacttcacctgtccagataagaacgatgcttaatggcaaaccacctttcaaaataatagttccaggaagaacttaccgttgtgatagcgatcaaacgcatgctcctatgtttcaccaattagaggggttacatattgataaagatatatctatggctcatttaaaaggatgtttaaattattttataaaagaattttttgaggtaaaaaaaataaaaatgaggtttagaccaagtcattttccatttactgaaccttccgcagaagttgacataggttatagcttggttgacggaaagattgtaattggtgaaggagataagtggcttgagattttaggc

SEQ ID NO: 301820 - DNA, 806 bp, Unknown
  Bacterial polypeptide expressing nucleotide sequence isolated from the Sargasso Sea
aatgtctgatattataaaaataaaagatgattatatcgataagcttaatacagagaacaatattgataaagtaaataacattaaatccgaactatttggaaaaaatggaattatatcgaacgaatttaaaaaattaggttcgatttctgtggaggaaagaaaaaaattagcttcagatttaaataatattaaagacgaacttcaaaataaaatatcaattaaaattcaagaaatagaaactaaagaaattaatttaaagcttgagaaagaaaaaattgatgtaactcttccagagagagatattgaaattggtaaaattcacccagtctctcaggtgatagatgaaatttcatctatattttctgaaattggatttagtgttgaggaaggcccagatgttgaaaatgaatataataattttacagcattaaatacaccagataaccatccagctagagatatgcatgatactttttatcttgataataacaaggaattgcttttgagaacacacacatctccagttcaggtaagaactatgttaaaaggtaagcctccttttaaaattattgcaccaggaagaacttacaggtcagacagtgatcagactcatgctccaatgtttcatcaagttgaagggctacatatagataaaaatataaacatgggacatttaaaaggatgtttaaattattttattaaggagttttttgaagttgataaaattaaaatgagatttagaccaagccattttccatttactgaaccttcagcggaagtagatataggatatgaaataaaaatgg

SEQ ID NO: 301821 - DNA, 859 bp, Unknown
  Bacterial polypeptide expressing nucleotide sequence isolated from the Sargasso Sea
aatgtcagatttacgagaattaattcaaaaagtattgcaagcaaaagataagttagaattgcaaaatctcaagtctcagtttttaggaaaaaatagccaaattaatcaagaatttaaaaaacttggttcacttagcgaaaacgacagaaaaattcgagcatcttctttaaatgatgaaaaacaaaaaattaccgaagctattaacaataagtttaaagagctagaaaatttagaaataaatcaaaaattacaaaaaaataaagttgatgtaactttaccagctcgcgagagaccaaacggaaaaattcacccagtctcacaagtaattgatgagatttcttctatattttctgaaataggttttactgttgctgagggaccagatgtagaaagtgaatataataattttactgctttaaacacgcctgaagaccatcctgctagagatatgcatgatactttttatttagataaaaataaaaaaatattactaagaacacatacatcaccagttcaaattagaacaatgttaagtggcaaagctccatttaaaattatagttccaggtagaacttatcgatgtgatagtgaccaaacgcatgcaccgatgtttcatcagcttgaaggattacacattgataaagacataaacatgggtcatttaaaaggatgcttagattattttgttaaagaattttttgaggtgaaaaaaatccgaatgagatttaggccaagccattttccattcaccgaaccttcagcagaagttgatattggttacagactagaaaacgggagaataattgttggtgagggtgataaatggcttgagatattaggttgtgggatggttcatcca

SEQ ID NO: 301822 - DNA, 715 bp, Unknown
  Bacterial polypeptide expressing nucleotide sequence isolated from the Sargasso Sea
atgtctgatattaaaaaaatcaaagaagattatttaggtaagctacgtagtaaattaaatctagaagaagtaaatcaaattaaaacagaattatttggtaaaaatggtttaatttctaattcatttaaggaacttggttcgatgcaatcagaagatagaaaaaaatttgcatcagacttaaattttattaaagatgagttacaagaaaagataaatagtaaacttcaagaaattgaaataaatgaaattaattccaaactaaaaaatgaaaaagtagatgtaactttacctgagagagaaattaatctaggaaaaattcatccagtctcccaagtaattgatgagatatcgtcaatcttttcagaaattggatttagtgtagaagaaggaccagatgttgaaaaccaacattataattttacggcgttaaatacaccagatgatcatcctgcaagagatatgcacgatacattttatctagatgataaaaaagaattacttttacggacacatacttctccggttcaaatacgtactatgttaaaagataagccaccttttaaaataatagcaccaggaagaacctatagatctgacagtgatcaaactcattccccgatgtttcatcaagttgagggacttaatatagataaagatataaatatgggtcatttaaaagattgtttgaattattttatcaaacgagttttttgaa

SEQ ID NO: 301823 - DNA, 921 bp, Unknown
  Bacterial polypeptide expressing nucleotide sequence isolated from the Sargasso Sea
ataggaacaattgctgagagtgaaaaaaaaaaatttgcttccgacttaaacattatcaaagatgaactacaaagcttaattaattctaaaataaatgaggctgaaaacacagaaataaacaaaaaattagagcaagaaagaatagatattactttacctgagcgatcttttgtaagaggaaagattcatcctgtgtcccaaacaatcgatgaaatatcatctattttttctgaaataggttttagtgtcgaggaaggtccagatgtagaaaatgaatataacaatttcacagctttaaatactcctgaaaatcatccagcaagggatatgcacgacacattttatttagatgaaaaaaaacaaaatttattacgaacacacacatctccagttcaaatcagaactatgataaaagataaaccaccttttaaaattattgcaccaggaagaacttatagatcagatagtgatcaaactcatgctcctatgtttcatcaggttgaaggtttgcatatagataaagacattaatatgggccacttaaaaggatgtttaaattattttataaaagagttttttgaggttgataaaattaaaatgagatttagacctagtcattttccttttacagaaccatcagctgaagttgatattggttacgagatgaaagatggaaaaataattgttggtgaaggtgatcaatggcttgagattttaggatgtggaatggttcaccccaatgttttaaaaaatgtaaatgtagatgcagcgaagtatcaagggtatgcatttggtatcggtattgataggcttgcaatgttgaagtatggcataaacgatttaagagcattcttcgattgtgattatagatggctaagtcattttggatttgatccactagacgtaccatcaaattataga

SEQ ID NO: 301824 - DNA, 748 bp, Unknown
  Bacterial polypeptide expressing nucleotide sequence isolated from the Sargasso Sea
tcagagttaaattcaataaaagacgaactacaagaaaaaataaattttaaacttcatgaaattgaaataaaagagattaactctaaacttgtaaacgaaaaagtagatgtaaccttacctgaaagagaaatcaatcaaggaaaaatacatcctgtttctcaagtaatagatgaaatatcttcaatattttctgaaattggcttcagtgttgaagagggtccagatatagagaacgagcattataactttacagcattaaatacacctgacaaccacccagcgagagatatgcacgatactttttatttagatgataataaagaattgttgctaagaactcatacttctccagttcaagttagaacaatgttaaatgggaaacctccatttaaaattatagctccaggtagaacatatagatctgatagtgatcaaactcattcccctatgtttcaccaagttgaaggacttcatattgataaaaatataaatatgggccatctaaaaggctgcttaaattattttataaaatcattttttgaagttgataaaatcaaaatgagatttagaccaagtcattttccttttactgagccatctgcagaagttgatattggttatgaattaaaagatggaaaaatagtgattggtgaaggagacaaatggctagaaattcttggttgtgggatggttcaccctaatgtacttaaaaatgtaaaagtaaatcctgagaaatatcaaggttatg

SEQ ID NO: 301825 - DNA, 733 bp, Unknown
  Bacterial polypeptide expressing nucleotide sequence isolated from the Sargasso Sea
tgtcagcagaagagaaaaaaagaatttgcatctgatttaaatagattgaaagacagtttatctaaacaaattgaggcaaagaatttagaaattgaaacacaagaaattaatgaaaaattaaaaaatgaaaaaattgatgtaactttacctataagatcttataggcaaggaaagatccatccagtatctcaagttatagatgaaatttcttctatattttctgagattggattttctgttgctgaaggtccagatgttgaaacagagtataataattttacagctcttaatacacctgaagatcatccagcaagagatatgcatgacacgttttatttagataaaaataaaaaacttttattaaggactcatacttctcctgttcaaattagaagtatgataaatgaaaaaccaccttttaagattatagttcctggaagaacttaccgatctgatagcgatcaaactcattcccctatgttccatcaattagaaggacttcatatagataaaaatataacaatgggtcatttaaaaggatgcttagattattttattaaagaattttttgaagtcaaaaacgttaaaatgagatttagaccaagtcattttccatttaccgaaccttcggccgaagtagatattggttatagactagagaatggtaaaataattattggagaaggtgataaatggcttgaagttttgggttgtgagaatggtgcaccctaat

SEQ ID NO: 301826 - DNA, 792 bp, Unknown
  Bacterial polypeptide expressing nucleotide sequence isolated from the Sargasso Sea
tagagatgtctgtgcagtcaataatttaaaattaaaactgccaaagtttaagaagcaacgacaaaatcttgattcaaaaaaaactgtttctatagataaaagcgcctgttcaagctatctaggtcaaatcatcaaactaaagaataagggtaaaactccgcaatacatcaaaaaaactctaaaggctgctgatattggccaagtaaatactatagttgatattacaaactacgtaatgctccataccggacaacccttgcatgcttttgatagtaaaaaaattggcaaaaaaatttacgtcaaatttccatccaaaagaacaaagttaaaacttcttgatggcgcttcccacttcataactaaagactacttgacaatatgcgatgaaaaaggagcaatagccctagctggaataatgggttgtgcaaattccgaagtggatgaaacaacccaggaaatttttttagagtcagcatgttttgaacctgccagcatcagaggaaatgcaagaaagttaggctttcaatctgaggcatcaataagattcgaaagaggagttgataaagaaatccaagagtacgcaattaattttgccggacaactttatgctgaaatctttggaggagacttttcaaagatttttagacaatctaaaaaccataaagcaaagaaaatattaataagtaaggaattcattgattcaaggcttggcacagaaattcccaccaccaaggtcattaaacttctaaaggctcttgaatttcgagttgaattaaaaagaaatttaatgga

SEQ ID NO: 301827 - DNA, 544 bp, Unknown
  Bacterial polypeptide expressing nucleotide sequence isolated from the Sargasso Sea
cccgaggagcatccggcccgggacatgcaggacaccttctacctgcctggcgattgcctgctacgcacccacacctcaccggtgcaaattcgccatctcgagtccaacccaccgccggtgcgcgtgattgccccaggccgggtctaccggcgtgatgccgtcgatgccacccactcgccggtgttccaccaagtggaggtattagccattgatgagggccttgatttcagccacctgcgcggcaccgtcagccacttcctcaaggcgtttttcggggatctgccagtgcgttttcgcgccagctatttccccttcacagagcccagcgccgaagtcgatgtgcagtggcgcggccgctggcttgaggtgatgggctgcggcatggtcgaccccgccgtgctcgaaggcatggggctcgaccctgagcgatggagcggctttgctgctggcctcggcgttgagcgcttctgcatggtgcgccacggcatcgatgacattcgccgcctgttcaccagcgatctgcgttttctcgaacagttctgaa

SEQ ID NO: 301828 - DNA, 535 bp, Unknown
  Bacterial polypeptide expressing nucleotide sequence isolated from the Sargasso Sea
atgtcagatattataaaaattaaagaagaatatctaaacaagcttaaagataatttagatctcaatactattaatcaattaaaatctgaattgtttggcaagaatggaaaaatttcaaatgaatttaaaaagatgggttctattcctgcggaagatagaaaaaaatttgcttcagatttaaattcaataaaagatgaattacaaagcttaattgaaaaaaaaattcaagatatcgaaataaatgagataaatttaaagcttcaaattgaacaagtggatgttactttaccagaaagaagttttaatcaaggtaaaatacatccagtatctcaagttatagatgaaatatcatcaatattttctgaaataggctttagtgttcaagaaggccccgatgttgaaaatgagtataataattttactgctttaaatacaccagacaatcatcctgcaagagatatgcatgatacattctatttagataataaaaaagaatttttacttagaactcatacatctcccgttcaagttagaa

SEQ ID NO: 301829 - DNA, 793 bp, Unknown
  Bacterial polypeptide expressing nucleotide sequence isolated from the Sargasso Sea
gcctcgttggaaaacgagaaggcccgctttctcggtaagtccggcgtgctgaccgacttgctcaaaggcttgggtaagctcgatccggaaacccgcaagtccgaaggcgcgcgcatcaaccaagccaagagccgggtagaagaagcgctcaacgcccgccgccaggcgctggccgatgcgctgatgaatgcccgcctggccgcagaggcgatcgacgtgacgctgcccgggcgcgacgtggcagagggcagtctgcaccctgtgatgaacacctgggagcgcgtcgccaagatcttcggttcgatcggcttcgatgtcgctgacggccccgaaatcgagtccgactggatgaacttcacggcgctgaacaacccggacaaccatccggcacgctcgatgcaggatacgttctacatcgacggtcgcgacagcgaagacaagctcttgctcctgcgcacgcacacgagcccgatgcaggtgcgctatgcccgcatgcacgtggagaagtacaagcacctcgaccgcatcccgccgatcaaggttatcgccccgggccgcacgtatcgtgtcgacagcgatgccacgcactcgccgatgttccaccaggtcgaaggcctctggattgcagacaacatcagctttgccgacctgaagggcgtctataccgatttcctgcgcaatttcttcgagcgcgacgacatccaggtgcgtttccgcccgtcctatttcccgttcaccgaaccgtcggcagagatcgatatggcgttcgggcacggtaaatggctgggagatt

SEQ ID NO: 301830 - DNA, 436 bp, Unknown
  Bacterial polypeptide expressing nucleotide sequence isolated from the Sargasso Sea
ggaaggtttgcatattgatacaaatatttatatggggcatttgaaaggatgtttaaattatttcattaaagaattttttgaagtcgaaaaaattaaaatgagatttagacccagtcattttccattcacagaaccatctgctgaagtagatattggttatgaaataaaagatggccaaataattattggagaaggagataagtggcttgaaattttaggctgtggcatggtgcatcctaatgtcttaagaaatgtaaaagtagatccttctaaataccaaggatatgcttttggaataggcatagaccgactagcaatgcttaaatatggtattaatgatttacgagcattttttgattgtgactatagatggttaaatcattttggttttgatccactagatgttccatcaaattatagaggcttaagcagatga

SEQ ID NO: 301831 - DNA, 592 bp, Unknown
  Bacterial polypeptide expressing nucleotide sequence isolated from the Sargasso Sea
cttagaaaaaaataaaaaattactgttaagaactcatacttctccagtacaaattagggcaatgcttgatggaaaaccaccgtttaaaataattgttccaggtagaacttatagatgcgatagtgatcaaactcatgctccaatgtttcatcaattagaaggtcttcacatagataaagatataactatgggtcatcttaagggatgtttagattattttattaaagaatttttcgaagttaaaaatgttaaaatgagattcagacctagccattttccatttaccgagccatctgctgaagtagatattggatacaaaattgagaatgagaaaattgtaattggcgaaggcgataaatggttagaaattttaggttgtggaatggttcatcctaatgttctgaaaaatgcaaaagttgactcaaaaaagtatcaaggatttgcattcggaatgggtattgatcgattggctatgttaaaatatggaatcaacgatttaagagcttttttcgaaacagattttagatggttaagtcattttggtttcgaccctttagatgtaccgactaactatagagggctaagcaaatga

SEQ ID NO: 301832 - DNA, 592 bp, Unknown
  Bacterial polypeptide expressing nucleotide sequence isolated from the Sargasso Sea
tatgtcagatattataaaaataaaaacagaatatcttaacaagcttaaagaagtttctgatcttaaagaaattaaccaaataaaatctgaattatttggaaagagtggaaaaatatctaatgaatttaagaaattgggctctcaaaattctgaagagagaaaaaaaatttcatcagaattaaatgatacaaaaagtgagttacaaaattcaattgaaaaaaaaataaaagatatcgaaataaatgaaattaatttaaaacttaaaaatgaaagagttgatgtaactttacctgaaagaacttttaataggggaaaaattcatcctgtttcacaagttatagatgaaatatcatctatcttttcagaaattggtttttctgttgaagagggaccagatgttgaaaatgaatacaataactttacagctttaaatacgccagaaagccatcctgcaagagatatgcatgatactttttatctggacaaaaataaaaaatttttacttagaacccacacatctcctgtacaagtaagaactatgttaaaagggaagcctccttttaaaataattgccccaggaagaacttacaga

SEQ ID NO: 301833 - DNA, 390 bp, Unknown
  Bacterial polypeptide expressing nucleotide sequence isolated from the Sargasso Sea
gatgtttaaattattttattaaagaattttttgaagtgaaaaaaattaagatgagatttagacctagtcactttccattcacagaaccttcagccgaggtagatattgggtatagaattgaaaataacaaaattattattggtgaaggtgataaatggcttgagattcttggatgtggaatggttcatccaaatgttttaaaaaactgtaaggttgacccaaaaatttatcagggtttcgcatttggtattggtattgatagattggcaatgcttaaatacggaattaatgatataagatctttttttgaatgtgattatagatggttaaattattatggttttgatcctttagatgttccaacaaactatagaggtttaagtaaatgaa

SEQ ID NO: 301834 - DNA, 640 bp, Unknown
  Bacterial polypeptide expressing nucleotide sequence isolated from the Sargasso Sea
tatgccagatacaaaagatgttagttctccaaggttaatcaaagaaattggagcatatcacccaataaatcaaatgaaagattcattaatgaatcttttgatatcttttggctttgaaataatcgatgggcctgaaatagaaactgaagaatttaattttgatatgttaaatatcaaagaatctcatcctgctcgtcaaatgcacgatacattttacgttaacaaaaaatctagtgttttaagaacacacacatctccagttcaaataagaggaatgttagaaaagaaaccaccattggcttttatttcaggtggtaaagtttatagaaaagatgatgatgcaacacatctaccaatgtttcatcaaattgaaggtatgtatattgatgagggtgttaatttcgcaaatttaaaagatctcatatacaaaataatacaagctttatttggagaagaaattaaaatcagatttaggccttcttacttcccatttacagaaccttcagcagaagttgatatattatcaccggatggggaatggcttgaaatcttggggtgtggagttatcaacccaatagtattagaaaactgtaaaattaattctaataaatattcaggttttgcttttggattaggaata

SEQ ID NO: 301835 - DNA, 634 bp, Unknown
  Bacterial polypeptide expressing nucleotide sequence isolated from the Sargasso Sea
cctggaaaatcacccggcaagagatatgcatgatactttttatcttagtaactctaaggatttacttttaagaacacatacttcgccagtacaaattagaacgatgttaaaaagtaaaccaccttttaaaataattgctcctggaagaacttatagacacgatagtgatcaaactcattcaccaatgtttcatcagttagaaggtttacatattgatcaaaatattaatatgggtcaccttaaaggttgtttatattattttgttaaaaaattttttgaagttgaaaaagtgaaaataaggtttagaccaagccattttccttttactgagccttctgcagaggttgatattggatataaaattcaagatggaaaaattaagattggagaaggcgacaaatggttagaaatacttggttgtggaatggtacaccctcaagttttaaaaaatgcaaaagttaatacaaaacaatatcagggatatgcttttggtgtaggaatagatcgattagctatgttgaaatatggaatcaatgatcttagagctttttttgaaagcgacattagatggttagaattttatggatttgatccacttgatgtacctacaaattatagaggtttgagcagatga

SEQ ID NO: 301836 - DNA, 635 bp, Unknown
  Bacterial polypeptide expressing nucleotide sequence isolated from the Sargasso Sea
tccagataatcatccagcaagagatatgcatgatacattttatcttgatgataaaaaagaaagattgttacgtactcacacgtcccctgttcaaattagaacaatgttaaaagacaaaccgccttttaaaataatcgcacctggtagaacatacagatcagatagtgaccaaacacattcaccaatgtttcatcaagttgaaggtcttcatatagataaaaatataaatatgggccatttaaaaggttgtttgaattattttatcaaagaattttttgaagttaaaaaaataaaaatgagatttaggccaagtcattttcctttcactgaaccatctgccgaagttgatattggatatgaaatcaaagatggaaaaattattataggggaaggtgatcagtggctagaaatattaggttgtgggatggttcatccaaatgttttaaaaaatgtaaaggtagatccaactaattttcaaggttatgcgtttggaataggaattgatagattggcgatgctaaaatatggaattaatgatcttagagctttctttgattgtgattatagatggttaaatcattttggatttgatcccttagacgtacccacaaactatagaggcttaagtagatgaa

SEQ ID NO: 301837 - DNA, 766 bp, Unknown
  Bacterial polypeptide expressing nucleotide sequence isolated from the Sargasso Sea
tatggaaaatttacgcaataagtacattgaggcaatagccactgtagatgacgaaaatgcattagaagccgttaggctcgctgcactaggtaaaaaaggcgaagtcagtctcaaaatgcgtgaattaggtcaaatgtcaccagaagaaagacaagtggctgggcccgcattaaatgacctgaaaaacgaaatcataagtgctatttctgcaaaaaaagaagctctagaagatttggtgcttaacgacagactgaaatcagaatggttagatgttactttaccgtctcgggaaaggccgagtggtacgatccatccgatatctcaggtgaccgaagaggtaataagtatatttgctagtatggatttttctgtggcggaaggccctaggatagaaacagactggtataattttgatgcattaaatattccaagtcatcacccggcaagagctgagatggatacattttatatgtatcgttcagaaaatgatgatagagcccctcatgtattaagaactcatacatcaccagtgcaaattagaactatggaaaatactggtgccccggtgagagtgatatgtccaggtggtgtttatagagcggattatgatcagacgcatacaccaatgtttcatcaggtagaaggtttagcaattgatcaatcgctatctatggctaatttaaaatgggttttagaagaatttgttaaagcatattttgaagtgagtgatgttgagcttcgatttagagcttcccattttccgtta

SEQ ID NO: 301838 - DNA, 540 bp, Unknown
  Bacterial polypeptide expressing nucleotide sequence isolated from the Sargasso Sea
ttagaactatgctaaaagacaaacccccatttaagatcattgctcctggaagaacttatagatctgatagtgatcaaacgcactcaccaatgtttcatcaagtagaaggtttgcatattgatacaaatattaatatggggcatttgaaagggtgcttgaattattttattaaagaattttttgaagttgaaaaaattaaaatgagatttagacctagtcatttcccattcacagaaccatctgcagaagtcgatattggttatgaaataaaagatggtaaaataattattggagaaggagataagtggcttgaaattttaggctgtggtatggtgcatcctaatgttttaaagaatgtgaaagtagatccttctaaatatcaaggatatgcttttggcataggtatagatcgattagcaatgcttaaatatggcattaatgatttaagagcgttttttgattgtgactacagatggttaaatcattttggttttgatccacttgatgttccttcaaattatagaggtttaagcagatgaa

SEQ ID NO: 301839 - DNA, 411 bp, Unknown
  Bacterial polypeptide expressing nucleotide sequence isolated from the Sargasso Sea
aagtcttcagaaaagatgacgatgctactcatttaccaatgtttcatcaagtggagggtatttatgttgataaagacgtaaacttttcgcaattaaaagatcttatctacaaaataattcatgacttatttggtaataatgtagaggttagattcagaccatcttatttcccctttacagaaccatctgctgaggtagatattttatctgattctggaaagtggcttgaaattttaggttgtgggattgtaaatcctattgtattggaaaactgtaatatagactcagaagaatttagtggtctggcatttggcttgggtgttgaaaggatagcaatgttgaaatatggtgtaaatgacataagagatttctataagtcaaacttagattttttggctcaattcaaatgaa

SEQ ID NO: 301840 - DNA, 519 bp, Unknown
  Bacterial polypeptide expressing nucleotide sequence isolated from the Sargasso Sea
aaccgccatttaaaataattgtgcctggaagaacttatagatgcgatagcgatcaaactcatgctccaatgtttcatcaattagaaggtcttcacattgatagaaatataactatgggccatcttaagggatgtttagattattttattaaggaattttttgaggtcaaaaatgttaaaatgagatttagacctagtcatttcccattcaccgaaccatctgctgaagtagacattggatatagaattgagaatgaaaaaatcataattggtgaaggagataaatggttagaaatcttaggttgtgggatggttcatcccaatgttctaaacaatgcaaaagttgatccaaaaaaatatcaaggatttgcattcggtatgggtattgatcgtttggccatgttaaaatatggaattaacgatttaagggctttttttgaaacagattatagatggttaagtcattttggttttgatcctttagatgtgccgactaactatagagggctaagcaaatgat

SEQ ID NO: 301841 - DNA, 709 bp, Unknown
  Bacterial polypeptide expressing nucleotide sequence isolated from the Sargasso Sea
ggaactaaagaagtttctgaaagaaaaaaattcgcctctgatttgaatgtaataaagaatgagcttcaagatttaattaatatgaaaataaatgaaattcaaaacgcaaatattaatgaaaaattagaaaaagaaaaaattgatgtcactttgccagaacgaccattcgcaagaggtaaaattcatcctgtatctcaaacaattgacgagatatcttctatattttctgaaataggttttaatgtagaggaaggaccagatgttgaaaatgaatataacaattttacagccttaaacactccagacaatcatccggcaagagatatgcatgatacattttatcttgatgataaaaaaaaaaaattattacgtactcatacatctcctgttcaaataagaacgatgttaaaaggtaaaccaccttttaaaatcattgcacctggcagaacctatagatctgatagtgatcaaactcattcaccaatgtttcaccaagttgaaggtctccatatagataaagacataaatatgggtcatttaaaaggttgcttaaactactttatcaaagaattttttgaaattaaaaaaatcaagatgaggtttagaccaagtcatttcccttttacagaaccatctgctgaagttgatattggatacgaaataaaagatgaaaaaataatttataggggaaaggtgataagtggttaga

SEQ ID NO: 301842 - DNA, 643 bp, Unknown
  Bacterial polypeptide expressing nucleotide sequence isolated from the Sargasso Sea
aatgagtgatttagataaaataagttcagtatttaatgcaaagattgactctgtaaaaactaaagacgatcttcaaaatatcaaaacagaattttttggaaaaaacggtcaaattactcaacagttcaaatctctcggatctttagatcctgaaaaaagaaaagaatttgcctcaaatttaaataaaattaaagatgatctttcaaatcagttagagcaaaaaaatattgagattgaagctacagaaattaatgaaaaacttaaaaatgaaaaagttgatgtcacacttccgattagacctgatcgacaaggaaaaattcatccagtttcacaagttatagatgaaatatcttgtatcttttcagaaataggcttttcagttgctgaagggcctgatgttgaatcagagtataataattttacagcattaaatactcccgaggaacacccggcaagagacatgcatgatactttttatttagaagaaaataaaaaattattattaaggacacatacatcaccggttcaaataagaacaatgcaggcaggtaaacctccttttaaaataattgtacctggaagaacttatagatgtgacagtgatcagacacatgctccaatgttccatcaacttgaaggtctt

SEQ ID NO: 301843 - DNA, 640 bp, Unknown
  Bacterial polypeptide expressing nucleotide sequence isolated from the Sargasso Sea
tactttcatattcttaattattcatcatattttggtaatgaaattgaatctgattactataattttgaggccttaaattttccacaaaatcatcctgcaagacaaatgcatgacactttttatttgaataagtcactgaatgataagtgtttgctaagaactcatacttcaaatacacaaattcatatgatgttaaataaatcagcacctatttatatgctctcaccaggaagggtctatagatgcgatcatgatatgactcatttgccaatgtttacacaagtcgaaggtttagctgtagatcagaacataagtttttcagacctcaaaggtacaatcataggatttattgattatttttttaatcagagtgtagatgtaagatttaggccttcttactttcctttcacagagccctcggctgaagtagatattagatttggcaaaaaaggttggcttgaaattttgggatgtggaatggttcaccccaatgtgcttagaaattgcaatattgatgcacgcaaataccgtggctttgcatttggagttggggttgaaaggcttgccatgctttactatggagttgaagacattagagaattttatgcttcaaattctgaatttttaaatcagatatgaa

SEQ ID NO: 301844 - DNA, 556 bp, Unknown
  Bacterial polypeptide expressing nucleotide sequence isolated from the Sargasso Sea
catggagcttgacgctattatcaatcaggcacaaagccagattgacgctgcacaagatgcagccacattagaccaagttagggtcgaattcatgggtaagaaaggtaaacttaccgacttacttaaagggcttggaaagttatctaacgaagaacgtcctgccgcaggccaaaagattaaccaagctaagcaggttattcagcaagctatttctgcaaaaggtgagtttttacgcactgaagagcttaacaaaaagctagcagaagaggcagtagatgtaactttgcctggtcgcacagaaaagccaggaaacttacacccggttagccgcacgattgcacgtatcgagtctttctttggcgagcttggcttttcagttaaaaccggccctgaaattgaagatggttttcacaacttcgacgcgctgaacatccctgcgaatcacccagcgcgtgccgaccacgataccttttatttcaacccagacatgatgcttcgtacgcaaacctctggtgttcaaattcgtactatggaagcggaaaagccaccattgcgt

SEQ ID NO: 301845 - DNA, 688 bp, Unknown
  Bacterial polypeptide expressing nucleotide sequence isolated from the Sargasso Sea
atggatttagcccaagagaaaataactttcttaaataaatttaaagaagcaaattctcaagattctcttaattctctaaaaattgaataccttggcaaaaaaggtgttctttcgtcattaatgtctcaactttcaaaagctcctgctgaaaagaaacctgagttaggtaaatcgatcaatgaatttaaatctttaattgaagaatcaatcagttcgtcgttagaaaaaattgaacaatctgctcttgatgaacaattatctaatgaagcaattgatgttaccttgccattaagtccagacgtaggaagttaccatcctatatctttgatagctaatgaaatctcaaattattttaaaaataaaggttatgttcttcgagaggggcctgaaattgaatcggagtatttcaatttttccgcattgaatattcctgagaatcatcctgctagagatatgcatgacaccttttattttgataatggtaatctactacgaactcatacctcacctgtacaaatcaggtcaatggaattggaatctcctcctttaaaaatattgtgtccgggcaaagtattcagatgtgattcagatcagacccatactccaatgtttcatcaggtggaaggtcttgttgtcgataaagatataaattttgcccatctgaaaaatgaaattttggagtttgtcg

SEQ ID NO: 301846 - DNA, 793 bp, Unknown
  Bacterial polypeptide expressing nucleotide sequence isolated from the Sargasso Sea
aaatcagagttatttggtaagaatggtaaaatttctaattcatttaaaaatcttggatctttacctgctgaagagcgaaaaaaatttgcatcagatttaaattttataaaagatgaacttcaagaaaaaattaataaaaagattcaagaaatagaaattacagaaataaattctaagctagagagtgaaaaagtagacgtaactttgcctgagagagatattgttcgaggtaagatacatcctgtttctcaagttatagatgaaatatcctctatcttttctgaaattggttttagtgttgaagaaggacccgatgtagagaatgaacattttaattttactgcattaaatactccagataatcatccagcgagagacatgcatgacactttttatttagatgataaaaaagaattacttttaagaactcatacatcaccagttcaagtgagaacaatgttaaaaggcaaacctccttttaaaattattgctcccggtagaacatataggtctgatagtgatcaaactcatgcaccaatgtttcatcaagtagagggacttcatatcgataaaaatataaatatgggtcatttaaaaggctgcttaaattattttattaaatccttttttgaggtagataaaattaaaatgagatttagaccaagtcattttccctttacagaaccatcagctgaagttgatattggttataaagtaaaagatggtaaaataataatcggcgagggagataaatggttagagattttaggttgtggaatggtacatccaaatg

SEQ ID NO: 301847 - DNA, 274 bp, Unknown
  Bacterial polypeptide expressing nucleotide sequence isolated from the Sargasso Sea
attagaaaataataaaattattatcggggagggagatagatggcttgaaatattaggatgtggaatggttcacccaaatgttttaaaaaattgtaaagttgacccaattaaattccagggttttgcttttggtattggtatagatagattggctatgttaaaatatggcataaatgatttaagatctttttttgaatgtgattatagatggttaaaccattatggatttgatcctttagatgttccaactaactatcgaggtctaagcagatga

SEQ ID NO: 301848 - DNA, 547 bp, Unknown
  Bacterial polypeptide expressing nucleotide sequence isolated from the Sargasso Sea
ttgaataaattagacagcgatttaaatgttgaaattttaaatcaaataaaaacagaattatttggtaaaaatggaaagatttctaattcttttaaatcattagggtctttaccaaatgatgaaagaaaaaagtttgcatcagacttaaattcaataaaagaagagctgcaagataaaataaattttaaacttctagaaatcgaaacaaaagagattaactctaaacttgaaaatgaaaaattagatgtaacactgccggaaagagaatttagtagaggaaaaatacatcctgtttcacaagtaattgacgagatatcatcgatattttcagaaattggatttagtgttgaggaagggccagatatagagaatgagcactataattttactgcattaaatacacctgataatcatccagcgagagatatgcatgatactttttatttagataaaaataaggaattattactaagaactcatacatccccagtgcaggttagaactatgttaaacggaaaacctccatttaaaattatagctccaggca

SEQ ID NO: 301849 - DNA, 703 bp, Unknown
  Bacterial polypeptide expressing nucleotide sequence isolated from the Sargasso Sea
gatgagtgatttagataaaataagttcattatttaatgcaaagattgatactgttaaaacaaaagacgatcttcaaattgttaagacagaattttttggaaaaaaaggtcaaattacccaacagttcaaatctcttgggtctttagaatcagaaaaaaggaaagagtttgcttcaaatttaaatagaattaaggaagacctaactcgacagttagagcaaaaaaatattgaaattgaaactagcgaaattaatgaaaaacttaaaaatgaaaaagtagatgttactttaccaattagacccgaacgacagggaaaaattcatcctgtctcacaagtaattgatgaaatatcttctatcttttcagaaataggcttttcagttgctgaggggcctgacgttgaaacagaaaattataattttacagcattaaatactccagaggaacatcctgctagagatatgcatgatactttttatctagaggaaaataaaaaattattgctaagaactcatacatcacctgttcaaattagaacaatgttatcaagtaaaccacctttcagaataattgcacctgggagaacttatagatgcgacagtgatcagactcatgctccaatgtttcatcaacttgaaggtcttcacatagataaaggtattacaatgggacatcttaaaggttgtcttgattattttataaaa

SEQ ID NO: 301850 - DNA, 826 bp, Unknown
  Bacterial polypeptide expressing nucleotide sequence isolated from the Sargasso Sea
ttggagaaaaacataactgatataatcaaaaaagcaaaagaacttagtcttaacttaaaacaagaaatcaaccacataaaagatctaaaagaaattgatcttattaaaataaagtatactggaaaaaaaggtttgtttactttattactgaagtctctggctgatttaaatagtgatgatagggcgaaagtaggaaaagcaataaacctaattaaaaaggatatagaaaaaattataatatcccataaaagtttaatagaaaataaaatattaaatgaaagtttagaaaaggaaaaaattgatataagtcttccaggtaggccagttttaagaggaggcattcacccaatctctaaaacaatggatgaaatcattagtattttgggtgccttagactttaatgtagaagaaggccctcacattgaagatgattattttaattttacagcattaaacatacctgaagatcacccagcaagacaagagcatgatacattttacataaagggtagtaataaaaaaaaattactacgcactcatacgtctccaatacaaattcgagttatgaaagagaaaaaaccgcctataaaaattatagctcccggaaacacgtatagatgtgatgatgatgctacccactctcctatgtttcaccaaatagagggattggttgtagataaaaatatctctatggcgaacttaaaatggacaataaaagaattgttagcatctttctttaatgtaaaagaccttcctatgaggttcagaccttcatattttccttttactgagccctctgcggaagttgatataggttgtgaagtag

SEQ ID NO: 301851 - DNA, 862 bp, Unknown
  Bacterial polypeptide expressing nucleotide sequence isolated from the Sargasso Sea
gttaaactgaaaacagagaaaataaataatgaaattttagataagcaaataaaaacggagtctcttgatgttacactttctgtcaatagtccatcaggaaccatccatcctataacccaggtcattgatgaggtgatagcaatatttgcggatttagatttctgtgttgcagaagggccagaaattgaaactgattacaacaattttactgcgttaaatacatctgaacatcatccagcaaggcaaatgcacgatacattttatgtaaattctgaaacagatggtatgcaaaacgtaatgaggacgcacacttctcccgtccaaataagaagtatgttatgtcaagatcctccaattaggcttattgctccaggaaagacttttcgatgtgacaatgatcaaactcatactccaatgtttcatcaagttgagggtcttgtcatagataaagaaagtaatatgggtcacttaaaaggatgtcttgaaatatttttaaaatcattttttgaaacggatagtttaaatatgcgatttagaccaagtcattttcctttcactgaaccctcagcagaagtagatattggttataaaaagaaaggtaatcaacttatcattggcgaaggttcagattggttagagattcttggatgtggaatggttcatccaaatgtattaagaaacgtcaatattgatccggatgtatatcaaggttatgcctttggtatgggcatcgaaagacttgcaatgttaaaatatggaataagtgacttaagaaccttttttgaaaatgacattgactggaaccaacactacgggttttctcctctcaataaacctacaatttttggagatctaagttaat

SEQ ID NO: 301852 - DNA, 655 bp, Unknown
  Bacterial polypeptide expressing nucleotide sequence isolated from the Sargasso Sea
taatttcactgcattgaatactcccgagaatcatcctgcaagagacatgcacgataccttttatctagacaatgataaaaaaattttattgagaactcatacttctccagttcaagtaaggacaatgctaaatggcaaaccccctttcaaaattattgttcctggaagaacttatcgttgtgatagtgaccaaacccatgcaccaatgttccatcagcttgaaggcttacatatagataaagatataaccatgggacatttgaaaggttgtttagattattttgtaaaagaattttttgaggttaaaaaaatcaaaatgagatttagaccaagtcactttccttttacagaaccatcagctgaagtagatattggttacaaactagaaaacggaagaataatcgtgggtgagggagacaagtggttagaaattttgggctgtggaatggttcaccccaatgttttaaaaaatgcaaaagttgatcctaataagttccaaggatttgcatttggtatgggtatagatagacttgctatgttaaaatatggaattaacgacctcagatctttttttgaaagtgattatagatggttaaattattttggttttgatccattggatgttccaaccaattatagaggtttaagtagatga

SEQ ID NO: 301853 - DNA, 234 bp, Unknown
  Bacterial polypeptide expressing nucleotide sequence isolated from the Sargasso Sea
aaggcgaaggttgtaatatttgcaaacacacaggatgggtagagattggaggctgtggaatggtagacccaaatgttcttgaaaactgcaagatagaccctgataaatacaccggctttgctttcggaatgggtgttgaaagaattgcaatgcttaaatacaagattaatgacataaggttgttctttgataatgacattcgttttctcaaacaattctcgagcattatatgat

SEQ ID NO: 301854 - DNA, 974 bp, Unknown
  Bacterial polypeptide expressing nucleotide sequence isolated from the Sargasso Sea
gttgatggggtcgttttaggaaaagttttatctgttttgaaacatgaaggatctgataaactctctatttgtcaagtagatattggtacttcaaagaatttacaaattatttgtggtgcgcacaatataaaaccagacatttacgtttatgttgctactgtcggtgcgaaattaaatgcagttaatttaactatcaaaagaagcgaaattagaggtgtcatgagtgaaggaatgatatgttcactacatgaattgggaatagaggactatagcgaaggtattgagattattgatgaagatttagcgttagagcatgaattgggcactccaggatctattttacttcaattgaatgattttatatatgatttagcaattacagctaatagacctgacggaatgtcggttattggtatagcgcgagaaatttctgctcttttagaatcaacatttaactttccagaattaaatcataaatacaatattcatttacttaatgatattgaactttgccaagaagctataacatctgattgcatttatacaattagttgtattgatggagtagatggagagatattatcgccaaaatggcttaaagaccgtatagaaaaatcaggtattaaatcgattaatcttctagttgacttaacaaattatattcttttagaacaaggccaacctttacatgcgtttgataaagataaactatcaaacttaattggtaaacaagtttcaccagaggacttttctgtaagaaaagccaaagataacgaaaaccttgtatgcttggatggtaaaaaatatgacttaaacgaaaatattacagtaattacttgttgcgataaaccggtcgctattgcaggggtaataggaggattagagacatctgtaaccaatactacttcatctatttatctagaaggcgctgtttttaatccagttaccataagaaaatcttcaaaagcgattgg

SEQ ID NO: 301855 - DNA, 577 bp, Unknown
  Bacterial polypeptide expressing nucleotide sequence isolated from the Sargasso Sea
gagtataactttgatatgcttaatatccctgcatctcatccagcaagggatatgcatgatacattctatgttgataataagaaaaaactcttaagaacacacacttctcctgtacaagtaagatgtatgcttaaagataagcctccattagcatttatatctccgggtaaagtctatagaaaagatgacgattcaacgcatctacctatgtttcatcagattgaaggattatatgtcgatgaagatgtaagtttcgctcaattaaaggacttaatgtataaaatttgtcattctttatttggcgaagccacaaaattacgttttcgtccttcgtattttccatttacagaaccctcagctgaagttgacgttctgtttggcaataaatggttagaaattctcggatgtggagtggtaaatcctaaagttctagaaaattgcaaaatagactcttcaaaatattcaggattagcttttggtctaggaatagagcgtatagcgatgcttaaatatggcgtaaatgatattagagatttttataaatcaaatctagattttttgaggcagtttaaatgaa

SEQ ID NO: 301856 - DNA, 825 bp, Unknown
  Bacterial polypeptide expressing nucleotide sequence isolated from the Sargasso Sea
aatttgagaatcgagaatccggacctctgtcctcgatacagtgccctcctgattcgcgggatcaccatcggaccttctcccttctggatgcagcaaaggcttcaacgggccgggatgagaccgatcaacaacatcgttgacattaccaattatgtgatgctcgaacttggacagcctctgcatgcttttgactaccaggcgctttgccagcgtgcagcaggagaaactccagaaatatttgtcaggtgtgctgtcaatggggaggtgatgaccactcttgatggagaagaaaggaagttggacgagcagatgctgatgattaccgacgaagcgggtttgatcgccatcgccggggtgatgggaggagaagaaaccgaggtcggcaatgaaacgaaagatgttttgcttgaatccgcaaatttcgattttctcaacaatcgccgaacgtcccaattactcaaattgaaaaccgaagccagtgaacgttttggaaaacggttgaatgcagacggaaccatgactgcggcgttaagagctgcagaattgtgtgtatcgattgcaggagggactttggaactccaggcagcagatctctatccaggaaagctggcagatgagtcggtggaactcgatttggaatatcttgagagggtcctgggaattaaggtggaaaagaacgaagtaaaccggattcttgaggcgctgggttttacagtccagaacaaaacagaccaattgcttgaagtgacggtccctcatcatcgtcttgatatcgcgattcccgccgatttagtcgaagaaatagccagggtctatggttacaac

SEQ ID NO: 301857 - DNA, 277 bp, Unknown
  Bacterial polypeptide expressing nucleotide sequence isolated from the Sargasso Sea
caaaattgagaatgaaaaaattgtaattggtgacggggataaatggttggaaattttgggatgtgggatggtccatccaaatgttttgaaaaatgctaaaattaatccaaaaaactaccaaggatttgcattcggaatgggcattgatcgattggccatgttaaaatatgggatcaacgatttaagagctttttttgaaacagattatagatggctcagtcattttggttttgaccctttagatgtgccgactaactatagagggctaagtaaatga

SEQ ID NO: 301858 - DNA, 841 bp, Unknown
  Bacterial polypeptide expressing nucleotide sequence isolated from the Sargasso Sea
agaaactcaaaaccaagaaataaataaaaaacttaaaaatgatactattgatgtaactttgccaggaagaacctactacgctggtaaaattcatccagtttcacaggtaattgatgaagtcacttctattttttccgaaataggcttttctgttgaagaagggccagacgtagaaagtgaatattataatttttctgcacttaatactccagaaaatcatccagcacgagatatgcatgatactttttatcttgatcaatctaaagatttacttttaagaactcatacatcgcctgttcaaattagaacaatgttgaaaagcaagccaccatttaaaataattgcgcctggaagaacttatagacatgatagcgatcaaactcattcgccgatgtttcatcaattagaaggattacatatagataaaaatataaacatgggccacctaaagggatgtttatattattttgttaagaaattttttgaagttgataaagtaaagatcagatttagacctagccattttcctttcactgaaccttcagcagaagtagatattggatataaaataaaagatggaaaaattaagattggcgaaggtgataaatggttagaaattcttggctgtggaatggtacatcctaatgttttaaaaaatgcaaaagtaaatccaaaacaataccaaggttatgcttttggagtaggtattgatcgattggctatgttgaaatatggaataaatgacttaagagctttttttgaaagtgatattagatggttggaattttacgggtttgatccgctagatatcccaacaaattatagaggtttaagcagatga

SEQ ID NO: 301859 - DNA, 847 bp, Unknown
  Bacterial polypeptide expressing nucleotide sequence isolated from the Sargasso Sea
tccgaagaccagagaaaaacaagagcatcttctcttaataatgaaaaacaaaaaattagtgaagctattaatgatagatttaaagaattagagaaatcggaaataaatcaaaaacttcaaaaagataaagttgatgttacattaccagctccagaaagaccaaatgggaaaatacatcctgtgtcacaagtcatcgatgaaatctcttccatattttctgaaataggtttttcagttgctgagggtccagatgtagaaactgaatacaataactttacagctttaaacaccccggaagatcatcctgctagagatatgcatgatactttttatttagatagtaataaaaaaattctattaagaactcatacttctccggttcaaataagagcaatgttgagtggcaagccaccattcaaaattattgttccaggaagaacttatcgttgtgatagtgaccaaactcatgccccaatgtttcatcagcttgaagggttacatattgataagaatataactatgggtcatttaaaaggatgtctagattattttgtaaaagaattttttgaagttaaaaaacttcagatgagatttagaccaagtcattttccattcactgaaccctcagctgaagttgatattggttatagattagaaaatggaagaatcattgttggcgaaggtgacaagtggcttgagatattaggatgtggaatggttcatcctaaagttttaaaaaatgccaaagttgataccaaaaagtttcaaggttttgcatttggaatgggaatagacagacttgcaatgctaaaatatggaataaatgatcttagatctttttttgaag

SEQ ID NO: 301860 - DNA, 517 bp, Unknown
  Bacterial polypeptide expressing nucleotide sequence isolated from the Sargasso Sea
tatattttggacaacaaacttgaaaaattactaaggacacaaacaagtactgttcaagtaagacatatgcaaaacaataaaccacctgtttatattgttgctccaggaagagtttacagatcagaccaacttgatgctactcactcaccagtatttcatcaaattgaaggtttagcagtagatgaaaacttaacgttttctgatttaaaaggaacattggagtattttgttaaagaattttttggaaaagacttaaagacaaagtttattcctcatttttttccattcactgaaccatcagctgaagttttagttagttggaaagatggagaatggcttgaaatcctaggatgtggaatggtagatccaaatgttttcaagcatgttggatatgacaaagattcccaaggattcgcatttggtgtaggagttgaaagattagcaatgattagatacggaatagatcatattaaaaacttttatgaaaatgacctaaggtttttaaggcagttttaat

SEQ ID NO: 301861 - DNA, 1000 bp, Unknown
  Bacterial polypeptide expressing nucleotide sequence isolated from the Sargasso Sea
tgatttgggtgatggaaatgctcctgttcaaattgtatgtggtgctcctaatgttgctgctggtcaaaaagtacctgtagctaccattggtacaaaattatacgacaaagacggaaatgcttttgaaatcaaaaaaggaaaaattcgcggacaagaaagttacggaatgatttgtgctgaagatgaattaggtcttggtgagagtcatgacggaattttaattttagatgaaaatttaaagcctggaaccttaggtaaagatgttttcaatattgaaactgatgaagtatttgaaattggcttaactcctaatcgtgctgatgcaatgagccattggggtgttgctcgtgatttaaaagctggattaattcaaagtaacgttacttcagaattaatgactccttcagtgagtagctttagaattgataaaagaaccttaaaaattgacattgatgttgaaaataaagaattagttcctcgttattgcggtgttactatttctggtgtttctgtgaaaacctctcctacttggttacaaaatagattgaaagctattgggttaaccccaaaaaacaatattgtggacgtaaccaattatgtaatgcacgaattggggcaacctacacacgcttttgatgcaaataaaataaaaggcaataaagttattgttaaaaccgtaaaagctggaactaaattcacaacattagatggtgtagaacgtgaattagacgcagaagatgtaatgatttgcaacgctgaaagtccaatgtgtattgctggagtttttggaggaatagaatcaggtgtaacagaacatactactaatatatttttagaaagtgcttattttaatccggtttcggttcgtaaaacagctaaaagacatggtttaaatactgatgcttcttaccgttttgaaagaggaattgatccaagtattactgaatatgctttaaaacgtgccgctttattgattcaagaagtagctggggagaaatca

SEQ ID NO: 301862 - DNA, 571 bp, Unknown
  Bacterial polypeptide expressing nucleotide sequence isolated from the Sargasso Sea
atgtctgatattaaaaaaattaaagatgaatttttagaaagattaaatgaggatttaaacattgaaagcgttaatgaaatcaaatcagaattatttggtaaaaatggtaaaatttcaacttcttttaaaaatcttggatctttaccagccgaagaacgaaaaaaatttgcatcagatttaaattttgtaaaagatgagctacaagagaaaattaataaaaaaattcaagaaatagagattaaagaaataaattctaagctagagaatgagaagatagacgtaacactgcctgaaagaaatattgtacaaggtaagatacaccctgtttctcaagttatagacgaattatcctcaatcttttctgaaattggttttagcgttgaagaaggaccagatgtagagaatgagcattataattttacagcattaaatacaccagataaccatccagcaagagacatgcacgatactttttatttagatgataaaaaggaattacttttaagaactcacacatctccagttcaagtacgaacaatgttaaaaggtaaacctccatttaaaatcattg

SEQ ID NO: 301863 - DNA, 921 bp, Unknown
  Bacterial polypeptide expressing nucleotide sequence isolated from the Sargasso Sea
ctggaacgcgccggcatcaatcgcgtcaatgccgtggtcgacgtcaccaacgtggtgatgctcgagcagggccagcccctgcatgcctttgacgctgatgccctggaacagctgaccggccagccggtggatgccgccagcttcgcactgcgacaggcccatgagggcgaagcgttcaccggactggatgaccgagagctcgtcctcgacccgagggcacaggtggtgacctgccacgaccgtccggtggctctggccggggtaatcggcagtcgcgagagcggcgtcaccgaggcgacccggcgcatctggctggaatccgcgatgttcacgccctcctccgttcgagaaacggcccggtccgtcggcctgcgcaccgatgccagcgcccgtttcgagaagggactgccgaaggatctcaccctggcctgcagcgtccgtgccgttgaactgcttgaggatctgttccgttgccgagtcacggggcgctgggtgtgcggcgatgtgtcgcccgagtcgaagcctgttctgctgcgacgtgaagccctgcagcgtctgctcggatcactggagtcgcaggaggaggtccggcatctggaggatgcggagatcgaacgctgcctgacggccctcggctgtgagctcacggcgatggatgaaggctggcaggtgatcgccccaccctcacgcagacaggatctctgccgcgaagtcgatctgatcgaggaggtggcccgtctcgtgggcttcgatcgcttcggttcccatctgcctgatccgatcgttccgggacgcctcacaccgacccagcaggccgaacgccgtctgcgtcgtcttttcagtggctgtggtcttcaggagatcaccacgctgtcgctggtcggtcccagtgaaacggaaaacccggatcccgctcacgaa

SEQ ID NO: 301864 - DNA, 799 bp, Unknown
  Bacterial polypeptide expressing nucleotide sequence isolated from the Sargasso Sea
aaaaattgatattactttacccgaaagaccttttgttagaggaagaattcatccagtttcacaaacgattgatgaaatatcctctatcttttctgaaataggatttagtgttgaggaaggtcctgatgttgaaaatgaatacaataacttcacagcattaaataccccagacaatcatccagctagagacatgcatgataccttttatctagatgaaaaaaaacaaaaactactccgaacacacacttcaccagttcaaataaggaccatgttgaaagacaaaccaccttttaaaattattgctcctggaagaacttacagatcagatagtgatcaaacacattctccaatgtttcatcaagtagaaggtttgcatattgatacaaatattaatatgggacatttaaaaggatgtttaagttattttattaaagaattttttgaggtcaaaaaaattaaaatgagatttagacctagtcattttccattcacggaaccatctgctgaagtggacattggttatgaaataaaagatggcaagataattattggagaaggagataagtggcttgaaattttaggttgtggcatggtgcatcctaatgttttaagaaatgtaaaagtagaccctgctaaatatcaaggatatgcttttgggataggtatagaccgactagcaatgcttaaatatggaattaatgatttaagagcattttttgattgtgattatagatggttaaaccattttggttttgatccacttgatgttccatcgaattatagaggactaagcagatga

SEQ ID NO: 301865 - DNA, 552 bp, Unknown
  Bacterial polypeptide expressing nucleotide sequence isolated from the Sargasso Sea
cacctgttcaaattagaacgatgttatcaagtaaaccacctttaaaaataattgtacctggaagaacttacagatgtgacagtgatcaaacgcatgcaccaatgtttcatcaacttgaaggtcttcatatagatacaggaattactatgggacacctcaaaggctgcctagattattttataaaagaattttttgaagttaaaaatgtaaaaatgagatttagaccaagtcattttccttttacagaaccatcagcagaagtcgacattggatataaaattgaaaaagggaaaatcgtaattggtgaaggtgataaatggctagaaattttaggatgcggaatggttcatcctaatgttttaagaaatgtaaaaatagactcaaaaaaatttcagggctttgcttttgggataggtattgaccgtttagcaatgttaaaatatggaatcaatgatttaagagctttctttgaagcagattatagatggttaaatcattttggatttgacccattagatgttccaacaaattatagagggctaagcaaatgat

SEQ ID NO: 301866 - DNA, 508 bp, Unknown
  Bacterial polypeptide expressing nucleotide sequence isolated from the Sargasso Sea
tcaaataaaaagtttgtccttagaactcacacctcgcctgtccagattcggagtattcttcagtctaaaccaccatttgcatatatttctggtggaaaagtatatagaaaagatgatgattcaacccatttaccgatgtttcatcaaatcgaaggaattcttgtggataaatcagttacttttggtaatttaaaatatctgatgcatgagatattaaatgaactatttggacatgaagtgaaagtaagatttagaccatcatactttccatttactgaaccatcagcagaagtagatattctttccaaaaatggtaaatggcttgaaatcctagggtgtggcattgttaatcctatagtattgtcgaattgtaatatcgatcctcataaatttagtggtttagcctttggtcttggagtagaaagaattgcaatgctcaagtatggagtgactgacataagggaattttataaatcaaacctcgattttttagagcaatttaaatgaa

SEQ ID NO: 301867 - DNA, 625 bp, Unknown
  Bacterial polypeptide expressing nucleotide sequence isolated from the Sargasso Sea
catccagcaagagacatgcatgacactttttatttagatagtaataaagaattattattaagaactcacacttctccagtacaggttagaacaatgttaaatggaaaacctccattcaagattatagcaccaggcagaacatataggtctgatagtgatcaaactcattctcctatgtttcatcaagtggaaggtcttcatattgataaagatataaatatgggtcatctaaaagggtgcttgaattatttcataaaatcattttttgaagtggataaaattaaaatgagatttagacctagtcactttcctttcacagaaccatctgctgaagtagatattggttacgagatgaaagatggaaaaatagtgattggtgaaggagataagtggttagaaatactaggttgtggtatggtgcatccaaacgtacttaaaaatgttaaagtaaatccagacaaattccaaggctatgcttttgggattggtatagatagacttggaatgcttaagtatggcataaacgatttaagagctttttttgagacagattatagatggcttaatcattttggttttgatccattagatgtaccgtcaaattatagaggccttagtagatgaa

SEQ ID NO: 301868 - DNA, 619 bp, Unknown
  Bacterial polypeptide expressing nucleotide sequence isolated from the Sargasso Sea
aatgtcagatcttaaaaaaataaaagatgaatttctttcaaaactaagtggtaaattagatattcctgaaataaaccaaattaagtctgacctatttggtaaaagtggtttaatttcaacccaatttaaaaagattggaacaattgcagagtcagagagaaaaaaatttgcttctgatttaaacattataaaagatgaactccaagatttaataagctcaaaaataaaagaagttgaaagtgccgaaattaataaaaaattagaaaaagaaaaaattgatattactttacctgaaagatcatttgtaagaggaaaaattcatccagtttcacaaacgatcgatgaaatatcatcgattttttccgaaataggttttagtgttgaggaagggccagatgttgaaaatgaatataacaattttactgcactaaatacaccagaaagtcacccagctagagatatgcatgatactttctatctagatgaaaaaaagcagaaactattacgaacacatacttctccagttcaaataagaactatgttgaaagataaaccaccatttaaaattattgcacctggaagaacttacagatcagatagtgatcaaacacactcacca

SEQ ID NO: 301869 - DNA, 852 bp, Unknown
  Bacterial polypeptide expressing nucleotide sequence isolated from the Sargasso Sea
tcagatttaaattttgtaaaagatgagctacaagagaaaattaataaaaaaattcaagaaatagagattaaagaaataaattctaagctaaagaatgagaagatagacgtaacactgcctgaaagaaatattatacaaggtaagatacaccctgtttctcaagttatagacgaattatcctcaatcttttctgaaattggttttagtgttgaagaaggaccagatgtagagaatgagcattataattttacagcattaaatacaccagataaccatccagcaagagacatgcacgatactttttatttagatgataaaaaggaattacttttaagaactcacacatctccagttcaagtacgaacaatgttaaaaggtaaacctccatttaaaatcattgctcctggtagaacatacagatctgatagtgatcaaactcacgccccaatgtttcatcaagtagaaggacttcatattgataaaaatataaacatgggacatttaaaaggctgcttagattattttataaaatctttttttgaagtagataaaatcaaaatgagatttagaccaagtcactttccttttacagagccatcagcagaggttgatattggttatgaattaaaggacggtaaaatagttatcggagaaggagataaatggttagaaattttgggttgcgggatggtgcacccaaatgtacttaaaaatgtaaaaataaatccagaaaagtatcaaggctatgcatttgggattggtatagataggttggcaatgcttaagtatggaataaacgatctaagagcttttttcgagactgactataggtggctaaatcattttggtttt

SEQ ID NO: 301870 - DNA, 835 bp, Unknown
  Bacterial polypeptide expressing nucleotide sequence isolated from the Sargasso Sea
gaaagccaagctgcgtggcatgccatcagaaggcatgttgtgttcatacagcgagcttggcattaacgtcgaaagcgatggcattattgaactgccattggacgcgccattaggcacggatctgcgtgagtatctcaagcttgatgacgccgtgatagaagtggatttaaccgctaaccgtgccgattgtttaggcatggtaggtcttgcccgtgaagtgggcgtgttaaaccgccaagcagtggttgagccacagtggcaagccgttatgccaacgatagatgctaaagtaaccattaacgttaaggcgccaacggcatgcccccgctacttaggtcgtgtggtgaaaaacgtcaatgtgaaagcggcaacgcctttatggatgcaggaaaaactgcgccgtagcggtattcgctctatcgatcctattgttgatatcactaactttgtgttagttgaatttggtcaaccgatgcacgctttcgatctggccaagctaacgggcgatatccaagtgcgtttaggtaacggtgatgagaaaatcactctgcttgatggcagcgaagtgacgattccaagcgataccttagtgatcgccgacgatgcgcgtccattagcccttgcaggcgtgtttggcggcgaatactcaggggtaagcgacacgacccaagatattctacttgaatgtgccttcttcgcgcctttagcgattatgggtaaatcacgtcgcttaggtttgcacacagattcatcacaccgctttgaacgtggtgttgaccctgagatgcaacacaaggttatcgaccgtgcgacccgtttagtacttgatatctgt

SEQ ID NO: 301871 - DNA, 610 bp, Unknown
  Bacterial polypeptide expressing nucleotide sequence isolated from the Sargasso Sea
ggttgcgtcatcctggcctccaaatgacgaacattgggctatggaatcgaaaactgttgattttttcgaccttaaaggcgatttagaagcaattatcggcttgacagtttccgcatcagaatttagctttagagtagcgacgcattctgctcttcatccagggcaatgtgctgaaatattgagaaatgatcgagtgatcggtcatataggtgctatccatcctagtttggagaagccttttggactcaatggtaaaaccatcgtttttgagttggaattggatgctttattgcataccagtttgccgctagcccaagctgtatctaagttcccggctaatcgtcgtgacatcgcagtagtcgtagatgaaagtgtatctgcaggcgatgtaatgaaattgataagaaaagttggcgaaaatcagttggttggcataaacttgttcgatgtatacttaggtaaaggtgttgagcccggcaagaagagcttggcgatagcacttacattacaagacactactcgtacacttgaggaaaaagagatcgctgagacagtagaatcagttgtttctgccctgaagaccgagttcaacgcatcgttgagggattaa

SEQ ID NO: 301872 - DNA, 421 bp, Unknown
  Bacterial polypeptide expressing nucleotide sequence isolated from the Sargasso Sea
acccattcgcctatgttccatcaggtcgagggcttactgattgatgaagaagtcagctttgggcagctgaagggcattattcaggattttttgcacgcgttcttcgaacaggacgcgctggcggtccgctttcgtccctcttattttcccttcaccgagccgtcggcagaggtggacatccagtgcgtgaagtgcgcgggcgagggctgtcgtatctgcagcggcaccggctggttggaagtcatgggttgcggcatggtgcatccgcgcgtgctggagatgagcggcgtggataccgagcgctatcagggctttgcctttggtatgggcgtagagcgcttggccatgttgcgctatggcatcggtgacctgcgtctcaatttcgagaacgacctgcgctttctcgcgcagttccggtgag

SEQ ID NO: 301873 - DNA, 844 bp, Unknown
  Bacterial polypeptide expressing nucleotide sequence isolated from the Sargasso Sea
gatctcacgccgaatcgcagtgactgcctgtccatcaaaggcctggctcgtgaagtgggtgttctgaacagcctgctggtgaacgcgccggcgatcgaaccagttgaggccgtgcattcagaggttcctgacattcgtgtggaagctcccgccggctgtccccgctatctgggtcgggtactgcgcaacgtgaacctgcaggcggagaccccgctgtggatgcaggaaaagctgcgtcgttccggtatccgttccattgacgcggcggtggatgtcaccaactacgtcatgctggagcttggccagcccatgcacgcgttcgatcgcgaagagatccagggcggcattgtggtgcgcatggcaaagcccgctgaaaagctggtgttgctggatggccaggaagtggaactgactgaaaacaccctggtgattgccgatcacgagaagccggtggccattgccggtgtgatgggtggcgaacactctggtgtgagcgccaagacccgggacctggtgctggagtctgcctattttgacccgatcaccctggccggtaaggcgcgcgagtatggcctgcataccgatgcttcccaccgcttcgaacgtggcgtcgattacgagttggcccgggatgccatggagcgggctacccgactgttgatggacattgtcggcggtgagcctggcgagattgttgaagtatacagccagaagcatttgccaaaggcacgtgagattgacctgcgtgagcagcgcctggcggatgtccttggcctggcgattgatcgcaccaccgttgaagaaatcctcactcgcctgggcctgcgaatgaaaagctgctgaa

SEQ ID NO: 301874 - DNA, 628 bp, Unknown
  Bacterial polypeptide expressing nucleotide sequence isolated from the Sargasso Sea
agatcatccagcaaaagatatgcatgacacattttatttggatgaaaatatgaagactttgcttaggacccacacttctccagttcaagttcgcacgatgttaaaaggtaaacctccttttaagattattgcacctggaagaacttatcgtagcgatagtgatcaaactcatacaccgatgtttcatcagctggaaggtcttcatattgataaaaatattaatatgggacatttaaaaggatgtttaaattatttcattaaagaattttttgaagtggataaaattaagatgagatttagacctagtcactttccatttacagaaccttcagctgaggtagatattgggtatagaattgaaaataacaaaattattattggtgagggcgataaatggcttgagatacttggatgtggaatggttcacccaaatgttttaaaaaactgcaaagttgactcgaaaatttatcagggtttcgcatttggtattggtattgatagattggcaatgcttaagtatggaataaacgatttaaggtcatttttcgaatgtgattatagatggttaaattattatggttttgatcctttagatgttccaacaaattacagaggtttaagtaaatga

SEQ ID NO: 301875 - DNA, 766 bp, Unknown
  Bacterial polypeptide expressing nucleotide sequence isolated from the Sargasso Sea
atgtctttatcagttgattctgtagatattaaaaagaagattgaaaattgtaaaactctacaagaggtagaagttatacgattagagtaccttggtaaaaaaggattaataccatcggaaatgaagcttctaagcaatctaacaatcgatcaaaaaaaaattaaaggtcatgaattaaataaattaaaaaattttgttgaagatacaattaataatcataaaattttaattgaaaataaacagttagaagaaaaactaaaaaatgagagtgtcgatgttactttgcctcataatgaagaagtagcaggaaaaattcatcctatttcacaaactatttttagtattatagaaatctttggcaatttaaattactcagttgaagccggaccagatattgaaagtgattttaataatttttctgcattaaatataccacctcatcatcctgctcgtgagatgcaagatactttttatgtaaataatccaaatggtgaagacaatgtgttgagaacacatacaagtcctgtacaagttagaacaatgcttaaatcaagacctccaataaaaattattgtaccaggaagaacctaccgaagtgattctgactccacgcatacacctatgtttcatcaagtcgaaggcttattggtgaataaagatgccacaatggcagatttaaaatcaacacttattttatttttaaaagaattttttgaaattgataacttaaaatatagatttagaccaaagttatttcccttcacag

SEQ ID NO: 301876 - DNA, 963 bp, Unknown
  Bacterial polypeptide expressing nucleotide sequence isolated from the Sargasso Sea
tgtattgaataacctagatgtgaacgaaccggctattagcgcggttgccgctactatcgacgatagtattgatattacactaagtgcccctgaagcgtgcccacgttatttaggccgtgtgctgcgtaatgttgatgttactgctgcaacacccttgtggttaagcgaaaagcttcgccgctgtggtattcgcagtatcgaccctattgtagatgtaaccaactttattttgttagagcttggccaacctatgcacgcgttcaaccttgctgctattgaaggtaacgtaaacgtgcgtatggcgaataagggcgaaacccttaccttgttagatgaaaccgaagctaagcttaacgacgataccttggttattgccgacgataataaagcgttagctatggcaggtatttttggtggtttgcactcgggtgtaaattcagacaccaaagatattttgctagaaagtgcgttcttcagccgcgatgccattatgggccgtgcacgtcagtatggtttacataccgatgcatcgcaccgctatgagcgtggcgtagactcacaacttcaacgtaatgctatggagcgtgctactgctcttatcttagacatttgtggtggtgaagctggccctgttgttgaagcgtgtgaagaaagcaaattacctcaacaagctagcgttttattacgacgtgatcgtttagctcgcgtgttgggtataactatcgatgacgctcaagtgcttgaaatgcttgaacgtcttggtttagacgttgtccaaactgcacaaggttgggaagcgaaagcgccaagctatcgtttcgacattgctattgaagaagacttgatagaagaagtagcgcgtgtgtatggctataacaacattccacatgttgcgcctacagcgtcgttatctatgttgccttcacaagaagcggtgttgccgattaacaccatgaaatcgtt

SEQ ID NO: 301877 - DNA, 793 bp, Unknown
  Bacterial polypeptide expressing nucleotide sequence isolated from the Sargasso Sea
agttctcaatgatttaaaaaatgagatttcaaaatcattagataaaataaatccatcttcttcatcaaaaatgactcaagaggatatttctttgccaggcttagaattcccttcaggcacaatacatcctctgcaacaaacaatgaatgatataaaaagaatttttatgaacgttggtttttctgttgcctatggtcctgagattgatgatgattttcataattttagtgcgttgaattttcctccggagcatccagctcgagacatgcaagatactttttttatagatccaaaaaccatgctaagaactcacacatctaatgttcaaattcatttaatggaaaacgaacccccacctttaaggtatatagtacctggtagagtttaccggaatgaagatataagctttaaaagctattgcttgtttcatcaagtcgaaggtatctatgtagataaaaatgtttcgtttgctgatcataaaggcattcttgaattctttgtaaaaagaatgtttggtgataatacaaaaatgagatttaggcctagtttttttccatttacagaacctagtgcagaagtggatatttggagcgataaaagacagcaatggcttgaaattcttggctcagggatggttgatcctgaggtatttaaatcagtcaatatagatccagatatctggcatggatttgcatttggaatgggtatagaaagaatttgtatgcttaaatatggcattgatgatatacgacttctttatcagggcgacatgagattcttggagcaattctaa

SEQ ID NO: 301878 - DNA, 482 bp, Unknown
  Bacterial polypeptide expressing nucleotide sequence isolated from the Sargasso Sea
tagacacgatagtgaccaaacacactcacctatgtttcatcagttagaaggtttgcacatagataaagatataaatatgggacatcttaagggctgtttatattattttgtaaaaaagttttttgaagttgaaaaagtaaaaataagatttagacctagccactttccttttaccgaaccatctgcagaagtagacatcggatataaaattcaagatggaaaaattaagattggtgaaggtgataaatggttagaaattcttggttgtggaatggtacaccccaatgttttaaaaaatgcaaaagtaaatccaaaacaataccaaggttatgcttttggcgtcggtattgatcggttagcaatgttaaaatatggaatcaatgatcttagagctttttttgaaagcgatattagatggttaaaattttatggatttgatccacttgatgttccaacaaattatagaggtttgagtagatgat

SEQ ID NO: 301879 - DNA, 574 bp, Unknown
  Bacterial polypeptide expressing nucleotide sequence isolated from the Sargasso Sea
aatgtcagaatttgaaaaaaaaatcatagagctaaaagataaaataaaatcttcattaaaaatagatgaagttgaaatcatacgatcagagctatttggtaaaaatggtataataaattctgagttcaaaaaaattggatcattgtctggggaagaaaaaaaagaatttgcagccaatataaataaagtaaagcaagaattattagatatttataaagcaaaatcagatgagttattaaacaaagatttgatcgaaaaagttgcaaaggaaaaaattgacataactttaccagaaaaagaatttagaattggtaaaattcatcctgtttcacaagttattgatgaaatttcatgtattttttcagaacttggtttttcagttgaagaaggacctgatgtagaaaatgaatacaacaattttacagctcttaatactccagaaaatcatcctgcaaaagatatgcatgatactttttatcttgatcaagacatgaaaacattattgagaacccatacttcccctgttcaagtacgtacaatgctcaaggggaaaccaccatttaaaattatagca

SEQ ID NO: 301880 - DNA, 629 bp, Unknown
  Bacterial polypeptide expressing nucleotide sequence isolated from the Sargasso Sea
taatcacccagcaaaagacatgcatgacactttttatttagatgaaaaaaaagagaaattattgcgtactcatacttcacctgttcaaattagaactatgctaaaaaacaaacctccatttaaaattattgctcctggaagaacttatagatctgatagcgaccagacacatactccaatgtttcatcaagttgaaggtctccatatagataaagatataaacatgggtcacttaaagggttgtttaaactattttattaaagaattttttgaagttgataaaattagaatgagatttagaccgagtcactttcctttcacagagccttcagcagaagttgatattggttatgaaattaagggtggaaaaattgttatcggtgaaggtgatcaatggcttgagattttaggatgtggaatggttcatccaaatgtcctgaaaaatgtaaaagttaacccaacaaagttccaagggtatgcgtttggtattgggatagatagattggcaatgcttaaatatggtattaatgatttaagagctttctttgattgtgattatagatggttaaaccattttggatttgaccctttagatgtaccaacaaattacagaggcttaagtagatgaa

SEQ ID NO: 301881 - DNA, 859 bp, Unknown
  Bacterial polypeptide expressing nucleotide sequence isolated from the Sargasso Sea
ggagctatcagacgagcacgatggtattattgaactcccgtcgggagatgtaggtgaagcctatggtaattggctattaaaaaacgagtctgaaaaggtcgacgccgttgttgaaatagcaataacgccaaacaggccagatgcattgggtgttcgcggcattgcccgtgacttagcggcacggggtttgggtactttaaagccgatggaggtacgacccattccgggaaaatttgaatgtccaatatctgtatccattgatcccgatactctagtaaatgcgccggttttctatggtagattaataaggggggtaaaaaatggtccatcaccaaaatggttgcagaatagattacgtgcgattgggttacggcctatttcaactttagtagatattacgaatttttttacttatgataccaatcgaccgctacacgtttttgacgcagataagttaaatggaacctctatcagattgcatgatgcactgggaggggaaaagtttagcgctttggatgataaagagtatgtgttgtcaaaacgtatgacagtaatttctgatagcgaaggaatagaaagtttagcaggcataatggggggtagcgcctctggatgtactgataccacagaaaatgttttcattgaggctgcatactttaacccaataaggacagcctacactggaagagaactaaaaataaattcggatgctcgatatcgctttgaaagaggaatagatccagagtggacggcttttggtattgaggcggccacaaaaatgattattgagttatgcggcggggaaccatccaatgttgtccaggcaggtgaaatacctaatcatggcagggcatacaaa

SEQ ID NO: 301882 - DNA, 877 bp, Unknown
  Bacterial polypeptide expressing nucleotide sequence isolated from the Sargasso Sea
gaactgtgttctaatcaaagagacttacaagacattaaagtagcttatttaggaaaaaaaggaaaaataactgagttactaaaaagtttaaaagatctttcgttagaagaaaaaaaaaatacgggagcaaaattaaactttttaagaattgaggttgataatcttataagaaataaatctgataaattaaaaatccaagaaattaatacaaaattacaaaatgaagctatcgacataagctttcctcctccaaattcaataaattcaaaagttcacccaatatcaaaaacatttgatgaggttattaatatttttggatcaatgggttactctgttgctgaaggacctgatattgaaacagattattttaatttttctgctctcaatatacccgaaaatcatcctgcccgagaaatgcaggatactttctatataaatgacaaggataaaaatgacaaaccttatgttttaagaacacatacaagtccagttcaaattagaactctactagatcagaaacccccagtaaaaataattgctccaggaagaacttacaggtgtgactcagactcaacacattccccgatgttccatcaagttgagggattattgataaatcaaaatgcgaatatgggagatttgaagggaactctgattgaattttgcaaacaattttttaatgtacaaaatttaaaagttaggtttcgacctagttacttcccttttacagagccttcagcagagatggacatcgcttatgagatagtaaataacaaaattaagttaggccaaggtgaacgttggcttgaaattcttggttgtgggatggtaaaccctatagttttgaaaaattgcaatgtagatacaaatatttttc

SEQ ID NO: 301883 - DNA, 619 bp, Unknown
  Bacterial polypeptide expressing nucleotide sequence isolated from the Sargasso Sea
aatgagtgatttagaaaaaataaactctatttttaatgcaaagatagactctgtaaaatcaaaagatgaattacaaaatttaaaaacagagtttttcggtaaaaatggtcaaatcacaactcaatttaaaaatttaggatctttatctgcagaagataaaaaagaatttgcctctcgcttaaataaattaaaatatagtttatcccaacagattgaggaaaagaatttagaacttgaaacacaagaaattaatgagaaattaaaaagtgaaaaaattgatgtaactttacctataagatcttacagaaaaggaaaaattcatccagtatcacaagtgattgacgaaatttcttctatattttcagagattggattttcagtagcagaaggtcctgatgttgaaacagagtataataattttaccgcacttaatacacccgaagatcatcctgcaagagacatgcatgatactttttatttggataaaagtaaaaaacttttattaagaacacatacttctccagttcaaattagaactatgttaaatgaaaaaccaccttttaagattatagttcctggaagaacttatcgatctgacagtgatcaaactcatgctccc

SEQ ID NO: 301884 - DNA, 625 bp, Unknown
  Bacterial polypeptide expressing nucleotide sequence isolated from the Sargasso Sea
tcatccagcaagagatatgcatgatactttttatcttagcaattctaaagatttacttttaagaacacatacatcaccagtacaaattagaacaatgttgaaaagcaaaccaccttttaaaataattgctcccggaagaacttataggcacgatagcgatcaaactcattcaccaatgtttcatcaattagaaggtttacatattgatcgaaatattaacatgggacaccttaaaggttgcttatattattttgttaaaaaattttttgaagttgaaaaagtaaaaataagatttaggccaagccattttccctttactgaaccttcagcggaagttgatattggatataaaattcaagatggaaaaattaaaattggggaaggagataaatggttagaaatactagggtgtggaatggtgcaccctcaagttttaaaaaatgcaaaagttaatccaaagcaatatcagggatatgcattcggcgtaggaatagatcgattagctatgttaaaatatggaattaatgatcttagagctttttttgaaagtgatattagatggttagaattttatggatttgatccacttgatgtaccaacaaattatagaggtttaagcagatga

SEQ ID NO: 301885 - DNA, 865 bp, Unknown
  Bacterial polypeptide expressing nucleotide sequence isolated from the Sargasso Sea
aatgtcacttaaggatagtatcgaatcggttaaaaacgattttttaaccgaatttgctagtatcaatgatagtactggttctgaattaataagacagaagtatctaggcagaaacggtctagtaactaatctatttaaagagctaggtcgagcttcaaatgatgatcgtcctgttcttggtcagttattaaaccagctcaaaaatgaattatctgaaaagataaattctattcaagctgaagatagaacagccagcgataatgaggttgttgatattgctttacccggtaagctttatgcatcaggttcaacccatatactagagcagacttttaatgatattaaaaagattttcagtgatattggttttagtatctcgtatggtcccgaaatagatgatgaatatcataattttacagcattaaatgtacctgagcatcatccagctagagatatgcaagatactttttttgtagataaagatatcgttcttagaacgcacacatcaaatgttcaaatacatttaatggaagaaaaagctccaccgttaagattcattgttccaggacgggtatatagaaatgaatcaatcagctataaaagctactgtctttttcatcaagttgagggtttatttgtagacaagaatgttagcttttctcagcttaagggatgcttggaatattttgtaaaaaagatgtttggctctgatcgtaagatgcgatggagaccaagttatttcccttttactgaacctagtgctgaggtagatatttgggatgagcagcgaaatcaatggatggagattcttggttgcggaatggttgaccctgaagtgtttaacagtgttaattacgatccaaaa

SEQ ID NO: 301886 - DNA, 721 bp, Unknown
  Bacterial polypeptide expressing nucleotide sequence isolated from the Sargasso Sea
atgtcagattttgaaaaattaaaaagtcaactaaaagacaaacttactaaagctcaaagttctcaagaagtagatattataaaagcagagatttttagtaaaaatggttttataaattctgaatttaaaaagcttgggtctctatctccagaagataaaaaaaaagcggcttcaaaaataaatagtgcaaaacaagaattaacaatattgtttaacgaaaaagcacttaatttagtagatgctgaaatagataacagaattaaaaaagaaaaagatgatgtaacgcttccagaaaaagattttagaatcggtaaaatacatccagtatcacaagtaattgatgaaatttcatccatattttcagaaataggttttagtgttgaagagggacccgatgttgaaactgaatattataactttactgcacttaatacgcctgaaaatcatccagcaaaagatatgcatgatactttttatattgaagaaaatatgaaaacattattaagaacacatacttctccagttcaagtaagaacaatgctaaaaggaaaacctccatttaaaattattgcaccaggcagaacatacagaagtgatagtgatcaaactcatactcccatgtttcatcaacttgaaggattgcatattgataaaaatataactatgggtcatttgaaaggttgtttaaattattttgtaaaagagttttttgaagcagaca

SEQ ID NO: 301887 - DNA, 601 bp, Unknown
  Bacterial polypeptide expressing nucleotide sequence isolated from the Sargasso Sea
acactttctatttagacataataaggaatatttattaagaacacatacttctcctgtacaggttagaacaatgttaaaaggaaaaccaccttttaaaataatagctccaggtagaacctatagatcagatagtgatcaaacacattccccaatgtttcatcaagttgaaggtcttcacatagataaaaatatcaacatgggacatttaaaaggttgtttaaattattttataaaggaattttttgaagttaataagataaaaatgagatttagaccaagccattttccatttacagaaccatcagctgaggttgatattggatataaaataaaagacggcaagataattattggcgaaggggataagtggctagaaattttaggatgtggaatggttcatcctaatgtactaaaaaatgtgaaagtagacccatcaaaatatcaaggttatgcatttggaataggtatagatagattggctatgcttaagtatggaataaacgacctaagatctttttttgaaacagattacagatggttaaatcattttggatttgatccattggatgttcccacaaattatagaggtctaagcagatga

SEQ ID NO: 301888 - DNA, 735 bp, Unknown
  Bacterial polypeptide expressing nucleotide sequence isolated from the Sargasso Sea
taattgatgaaatatcatgtattttttcagaaatcggatttagtgtggaagaaggacctgacgttgaaaatgattataataattttactgctttaaatactcccgaagatcatccagcaaaagatatgcacgacacattctatttggatgagaacatgaaaactttgcttaggacgcacacttctcctgttcaggtccggacaatgttaaagggaaaacctccttttaaaataattgcacctggaagaacgtatcgaagtgacagtgatcaaactcacacaccaatgttccatcaattagaaggtctacacatagataaaaatattaatatgggtcatttaaaagggtgtttaaactattttataaaagaattttttgaagtagataaaattaagatgaggtttagacccagtcactttccatttacagagccttcggctgaagtagatattggttatagaatcgaaaaaaataaaattatcattggcgaaggcgataaatggctagaggttcttggatgtgggatggttcatccaaatgttttaaaaaactgtaaggttgacccaaaaatttatcaaggttttgcttttggtattggtattgatagattggcaatgcttaagtacggaattaatgatttaagatctttttttgaatgtgattatagatggttaaattattatggttttgatcctttagatgttccaacaaactatagaggtttaagcaaatgaa

SEQ ID NO: 301889 - DNA, 864 bp, Unknown
  Bacterial polypeptide expressing nucleotide sequence isolated from the Sargasso Sea
tactgaaacatttagatactgacaaacttttggaagagattactgaaaaactatctatgataggattggaggttgaggatgttactgataaatctaaaaagcttaaagattttattattgctaaagtgatagatgaaaagcctcatccaaatgctgatagacttaagattctatcagttgatgataattcaggtgatatccatcaagttatttgtggagcaccaaacgcaaaaaaaaatcttattggtgtatttgcaaaacctggaacctacattcctggaattgatcttaaattagctgttggtaaaataagaggcgagaactcgtttggtatgatgtgttctgaacgtgaattagaaatttctgatgaacatgacgggattatagaacttgataaaagtgctaagatagggtcgaattttcttgactggtctggtcttggagatcctgttataacaattggaataacaccaaatagagctgattgccttggtgttagagggattgccagagacttagctgctgctggttttggtaatttaaaaccgttaaaaattaaagaaatagaagggagttttgaaagtccaaaacaatttataatttctaaagaacttaatgataataaacttgttcctactttatctagtaggtacttcaaaaaattaaataattgtcagagtcctaagtggatgcaacaaaggttaaatgcaatagggcaaagaccaatttcagctcttgttgatattacaaattatgtaatgtttgatttaaatagacctttacatgcttatgatggagaaaaaatttcaggtgataaactagaaataagatttgcaaaagaaaatgaggttattcaacgctgaa

SEQ ID NO: 301890 - DNA, 664 bp, Unknown
  Bacterial polypeptide expressing nucleotide sequence isolated from the Sargasso Sea
atggtagatttacgagaattaattcaaaaagtattacaagctaaagataagtcagaactacaaggtctaaaaactgagtttttgggaaaaaatagtcaaatcaaccaagagttcaaaaaacttggttctttatccgaggaccaaagaaaagtaagagcatcttctcttaacaacgaaaaacaaaaaattaccgaagctattaacggtagattaaaagaattagaaaaattagaaataaatcaaaaactgcaaaaaaacaaagttgatgtaactttgccagcacgagaaagaccaaatggaaaaatacatcctgtctcacaagttattgatgagatttcttcgatattttctgaaataggtttttcagttgcagaaggtccagatgtagaaactgaatataataattttacagctttaaatacccctgaagatcatccagccagagatatgcatgatactttttatttagataataatcaaaaaattctattaagaactcatacctctccagttcaaattagaacaatgttagctggtaagccaccatttaaaattatagttcccggaagaacttaccgttgtgacagtgaccaaacccacgcaccaatgtttcatcaactcgagggattacatattgataaagatataactatgggtcattaaa

SEQ ID NO: 301891 - DNA, 886 bp, Unknown
  Bacterial polypeptide expressing nucleotide sequence isolated from the Sargasso Sea
ttaggaaaaaaaggtgaagtcaatattcttttaaagtcactaggatcactgcctcaagagaaacgaaaggaggccggaaaactccttaataatttaaaaagtgatttagagaaaaattatgctctcactaactctttgcttaacgataaagccaatctatcaagattagagaaggataagcttgatattagtcttcctggattcagcagtagaaaaggatccatccaccctgtcacacgaactatccgtgatgtttgtaatttttttgaacagatgggttttgatgttgaggctgggcctgaagctgaaatagattactataattttgaagctttaaatgttcctgaagatcatcctgcaaaagacatgcatgatactttttacctcaacaatgaaggattactaagaactcatacttctccagttcaaataaggactatggaaaagagcgaggctcctcacaggatagtttgtccaggtaaagtctatagaaaagactcagatttaactcacactcccatgttccatcagattgaaggtcttgtagtggaagagggagcatcatttgctcaattaaaaggtttattgaatgattttttaactgatttctttggagaagaagtcgagttgagatttaggccctcatatttcccttttacagaaccatccgcagaagttgatataagatggaaaaaaaattggttagaggtattaggatgcggcatggtccatccaaatgttctaaagaatgttggtgttgatactaaaaaatacagtggatttgcatttggattgggcgttgaaagaatggctatgctgaaatatgacattcctgacttaagagctttttttgaaaatgatattcgctttttagatcaattttaat

SEQ ID NO: 301892 - DNA, 394 bp, Unknown
  Bacterial polypeptide expressing nucleotide sequence isolated from the Sargasso Sea
taaagggtgtttatattattttgttcaaaaattttttgaggttgaaaaagtaaaaataagatttaggcctagtcacttcccatttaccgaaccttcagcggaagtagatattggttataaaattgaaaatggaaaaattaaaattggtgaaggagataaatggttagaaattcttggatgcggcatggtacatcctaatgttttaaaaaatgcaaaagtaaacccaaaacaatatcaaggttatgctttcggagtaggaattgatcgtttagctatgttgaagtatggcattaacgatcttcgtgctttttttgagagtgatatcagatggttagaattttatggatttgacccactcgacgttccaacaaactatagaggtttaagcagatga

SEQ ID NO: 301893 - DNA, 562 bp, Unknown
  Bacterial polypeptide expressing nucleotide sequence isolated from the Sargasso Sea
acttaatgttccaaagcatcacccagctagagatatgcaagatacattctttatcaaccctaatgctgtactaagaacacatacatctaatgttcaaattcatttaatggaaaatcaagatcctcctctaagacatatttgttgtggtagagtatttagaaatgaagcagtaagctataaaagtttttgtttatttaatcaagtagaagggttggttattaacgaaacctcctcatttgccgagatgaaaggaactttagagtattttgttcaagaaatgtttggaaaagatactaaaatgcgttttagacctagttacttcccatttactgaaccaagtgccgaagttgatatttggaacagtaaattaaatcaatggatggaaattttaggctgtggaatggttaatccaaatgttttatcaaatgtaggatatgacaatgaaaaatatcaaggattcgcctttggtatgggaattgaaagaattgctatgattaaatatggcattaaagatattaggttgttttatcagaacgataaacgctttttggagcagttttaa

SEQ ID NO: 301894 - DNA, 742 bp, Unknown
  Bacterial polypeptide expressing nucleotide sequence isolated from the Sargasso Sea
atggttgattttacaaaactagagcaagaaattacaaattctttatctaaagttaaagatttagaaagcttgaatgaatgccgtataaaatatcttggtaaaaaaggagagatatctcttttaatgaaggagcttgctaatctctcaggcgaagatagaaaaaaacaagctgaaatactaaatactcttaaaaataaaacattgagtcttatagaagagaagacagaagaactaaacgataggaatttaaatgaaaaactatcatctgagacactcgatgtaacattaccagtatcaagttctttgggatcaattcaccctataactcaagttattgaggaagtagtcacaatatttggcgacttagatttttatgttgcagaggggccagaagtcgaaacggactataataatttcactgcgctaaatacatcagaacatcatccggcaaggcaaatgcatgatacattttatgtagaaacacaaacagacagtatgcagaatgtgttaagaacgcatacatcacctgtacaaatcaggagtatgcttgagcataaacctcctattagactgattgctcctgggaaaacatttagatgcgataatgaccaaacacattctccaatgtttcatcaagttgagggattagtaatcgatcaagaaagcaatatgagtcatctcaagggatgtcttgaaatatttcttaaaactttttttgaaacagataaacttaaaatgagat

SEQ ID NO: 301895 - DNA, 277 bp, Unknown
  Bacterial polypeptide expressing nucleotide sequence isolated from the Sargasso Sea
taaaattgaaaacgataaaattataatcggagagggagacaagtggttagaaatccttggttgcggaatggtccatccaaatgttttaaaaaattcaaaagtagatccaaataaatatcaaggttttgcatttggaataggcatcgatagattagctatgttaaaatatggcattaatgatcttaggtctttctttgagtgtgactatagatggttaaattattatggttttgatcctttagatgttccaacaaattatcgaggtttaagtaaatga

SEQ ID NO: 301896 - DNA, 475 bp, Unknown
  Bacterial polypeptide expressing nucleotide sequence isolated from the Sargasso Sea
tgatagtgaccaaacacatgctccaatgtttcaccaagtagaaggtttgcatattgatagaaacattaatatggggcatttgaagggatgtttgaattattttattaaagaattttttgaggtcgaaaaaattaaaatgagatttagacctagtcattttccattcacagaaccatctgctgaagtagatattggttatgaaataaaagatggtaaaataattattggagaaggcgacaagtggcttgaaattttaggctgtggaatggtgcatcctaatgttttaagaaatgtaaaagtaaatccctctaaatatcaaggatatgcctttggcataggtatagaccgattagcaatgcttaaatatggcattaatgatttaagagcgttttttgattgtgactacagatggctaaatcattttggttttgatccacttgatgttccttcaaattatagaggtttaagcagatga

SEQ ID NO: 301897 - DNA, 847 bp, Unknown
  Bacterial polypeptide expressing nucleotide sequence isolated from the Sargasso Sea
acttaccgacttacttaaagggcttggaaagttatcgaacgaagaacgtcctgccgcgggccaaaaaattaaccaagctaagcaagttattcagcaagctatttctgctaaaggtgagtttttacgcactgaagagcttaacaagaagctagctgaagaagccattgatgtaactttacctggtcgcactgaaaagccaggtaacttgcacccggttagccgcacaattgcgcgtattgaatctttctttggtgagcttggcttttcagttaagacaggccctgaaatagaagatggtttccacaacttcgacgcgctgaacattcctgcgaatcacccagcgcgtgccgatcacgataccttttatttcaacccagacatgatgcttcgtacgcaaacctctggtgtacaaattcgtaccatggaagcggaaaagccgccattgcgtattatctcgccaggtcgcgtttatcgtaacgattacgatcaaactcacacgccaatgttccaccaagtggaaggtttaatggttgataagaacgttagctttaccgaccttaaaggtattttgcacgacttcttacatcacttctttgaagagtcgctagaaattcgcttccgtccgtcttacttcccgtttactgagccgtcagctgaagtagacgtaatgggtaaaaacggtcagtggcttgaagtattgggctgcggcatggtgcacccaaatgtacttaaagctgtgggtatcgaccctgaagagtacacaggttttgcctttggtatgggcgtagagcgcttaactatgcttcgttacggtgttaacgacttgcgcgcgttctttgaaaacgat

SEQ ID NO: 301898 - DNA, 592 bp, Unknown
  Bacterial polypeptide expressing nucleotide sequence isolated from the Sargasso Sea
aatgtcagattttgaaaaattaaaagaggaatataaaaataaactcattaaagctcaaaattctaaagaattagatattataagaacagagatttttggtaaaaatggtttaataaattcacaatttaaaaaacttggatcactttctccagaagataaaaaaaaattagcttcaaaaataaataattcaaaactagaactaacaaaattatttaacgataaattattaaaattagaagaagctgaaatagacgaaagagtaaaaaaagaaaaagatgatgtaacactaccagaaaaagattttaaaattgggaaaatacatccagtatcacaagtaattgatgaaatttcatctatattttccgaaattggttttagcgttgaagaggggccggatatagaaagtgaatattataattttactgcacttaatactcctgaaaatcatcctgcaaaagatatgcacgatactttttatattgagaaaaatatgaaaacattattaagaacacatacttctccagttcaagtgagaacaatgttaaaggggaaacccccatttaaaatcatagcaccagggagaacatacaga

SEQ ID NO: 301899 - DNA, 828 bp, Unknown
  Bacterial polypeptide expressing nucleotide sequence isolated from the Sargasso Sea
gatcgcaagagagcttgctgctttgactggcaagactgtaggtcaaccagatttgagttttccaaccaccgataaattgaccaaaaatataatttcaatcgatgttagagaccctgatttatgtttgcgatacactgcaagcgtaatagaaggggtcaaaatcaaggagtctccccagtggcttcaagatatattagtaaaaagtggccaaaggccaattaataatgttgttgatataaccaattatgtgatgttggagttgaatcaaccattacatgcatttgatattgattcaataaatgatcattcaataattgttagaaaagcaataagcaaggagaagttgaccactttagatggtgaacaaagagaacttgaaccacctatgcttgtcattgcagatacatctggcgcaattggtctggcaggaatcatgggaggttctaattctgaggtaagtgacaaaaccaatacaattctacttgaagcagcaaattttgagccaataaataccagaaggacttcttcaaatctcagattaagtactgcagcatcttacagattcgagcgcactttaagtccagatctagcagaaattgggcttcgcagagcgacggcattgataaaacagatcgctggcggagaagtatatgatgaaattgtagacataaggtctaaaaccgctaaggtccataatataccgttcgaaagaacaagattaaatcaagttcttggagcgaatattaagtatcaagatgcaattaaagtacttgagtctttgggatttgtttcagacaacgctatggatgacgatttaaatctaattga

SEQ ID NO: 301900 - DNA, 616 bp, Unknown
  Bacterial polypeptide expressing nucleotide sequence isolated from the Sargasso Sea
tatgtctgatattaaaaaaattaaaaatgaatatttagaaaaactaagtagcaatttaaatatagaaaatataaatcagattaaaacagaattatttggtaaaagtggtgctattactaattcattcaagaaacttgcttctttaccgtcggaagaaagaaaaaaatttgcatcagaattaaattttattaaagatcaattgcagcaaaagattaataacaaaattcaagaaattgaaactaaagaaatcaattctaagctcgaaaatgaaaaagtagatgtaactttacctgagagagatattaatcaaggaaaaattcatccagtatcccaagtaattgatgagatatcatcaatcttttcagaaattggattcagtgttgaagaaggaccagacgttgagagtcaatattacaatttttcagcgttaaatactccagatgatcatccagcgagggatatgcatgatactttttatttagataataataaggaattgcttttaagaacgcatacttctccagtacaagtaagaaccatgttaaaaagtaagccaccatttaaaataattgcgccaggaagaacatacagatctgacagtgatcaaactcactcc

SEQ ID NO: 301901 - DNA, 862 bp, Unknown
  Bacterial polypeptide expressing nucleotide sequence isolated from the Sargasso Sea
tatgtccgatattaaaaaaatcaaagatgattatttgaataaattaaataatgatttgaatattgaaagtttaaatcaaataaaaacagaattatttggtaaaaatggaaagatttctaattcttttaaaaaattaggatctttaccaaatgatgagcgaaaaaaatttgcatcggatttaaattcaataaaaaacgaacttcaagataagataaattctaaacttcaagaaattgaaacaaaagagattaactctaaacttgaaaatgaaaaagtagatgtaacattacctgagagagaatttagtcgaggaaaaatacatcctgtttcacaagtaattgacgagatatcgtcaatattttcagaaattgggtttagcgttgaagaagggccagatatagagaatgagcattataattttactgcattaaatacacctgacaatcatccagcgagagatatgcatgatactttttatatagacaataataaagaattattattaagaactcatacttctccagtacaagttagaacaatgctaaatggaaaacctccatttaaaattatagctccaggcagaacatatagatcagacagtgatcaaactcattctcctatgtttcaccaagttgaaggtcttcatatagataaagacataaacatgggtcatctaaaaggatgcttgaattatttcataaaatcgttttttgaagtggataaaataaaaatgagattcaggcctagtcactttcctttcactgaaccatctgcagaagtagatattggttatgagataaaagatggaaaaatagtaattggagaaggagataaatggttagaaattcttggttgtgggatg

SEQ ID NO: 301902 - DNA, 727 bp, Unknown
  Bacterial polypeptide expressing nucleotide sequence isolated from the Sargasso Sea
aatgtccaacttaaacgacattaaacctccaaaagtttttagaaactctggttcggttcaccccataaacaagacaaaaaactttataatcaagtttcttgttgaacaaggttttgagattatcgatggtcctgaaattgagacagaagaatttaattttgacatgttaaatattaaagaatctcatcctgcgaggcaaatgcatgataccttttacattaataagaaatctaaccttctaagaacgcatacttcacctgttcaaataagaggcatgctttcaagaaaacctccaatttctctagtatctggaggcaaggtatacagaaaagatgacgatgccacacatttaccaatgtttcatcaaatagaaggaatatatatagataaaaatgttaactttgctaatttaaaagacatgatctttagaattgttaaattattatttggcacaaaagtaaaaataagatttagaccatcatatttcccatttactgagccttctgcagaagtagatatcttatcaagtgatgggaaatggttagagattttaggatgtggaattgttaatcctgttgttatcaaaaactgtaatatcgatcctgaaaagtattctggatttgcctttggtttaggagttgagagaattgcaatgttgaaatattgcgtttctgatattagagatttttataaatctaatcttgattttttagaacagtttaaatga

SEQ ID NO: 301903 - DNA, 828 bp, Unknown
  Bacterial polypeptide expressing nucleotide sequence isolated from the Sargasso Sea
cagtcagaaattaataaaaaacttaaaaatgagaaaatagatgtaactttaccaggtcgaacttactttgcaggaaaaattcatccagtctcacaagttatagatgaggttatttctattttttctgagattggtttttctgttgaggaaggacctgatgttgaaaatgagtattataatttttcagcactcaatacacctgaaaatcatccagcaagagatatgcatgatactttttatcttgatcgttctaaagatttgcttttacgaacacatacatcaccagttcaaattagaacaatgttgaagagcaaaccaccattcaaaataattgctcctggaaaaacttatagacatgatagtgatcaaacacattcacccatgtttcatcaattggaaggtttacatatagacaaaaatgttaatatgggtcatcttaaaggttgtctatattattttgttaaaaagttttttgaagttgaaaaagtaaaaataagatttaggcctagccattttccttttaccgaaccatcggcagaagtagatattggatacaaaatacaaaatggaaaaattaagatcggcgaaggcgataagtggttagaaattctcggttgtggaatggtacatcccaacgttttgaaaaacgtaaaagtaaatccaaaacaataccaagggtatgcttttggtgtaggaattgatcgattggccatgttgaaatatggaataaacgatctcagagctttttttgaaagtgatattagatggatagaattttatggatttgatccgcttgatgtttccgacaaaaattatagaaggtttaag

SEQ ID NO: 301904 - DNA, 406 bp, Unknown
  Bacterial polypeptide expressing nucleotide sequence isolated from the Sargasso Sea
tatgggccatttaaaaggatgccttaattattttattaaagagttttttgaagtggataagattaagatgagatttagaccaagtcattttcctttcacagaaccatcagcagaagttgatataagatatgaaataaaaaatggcaagatagttattggtgaaggcaatcaatggcttgagatcctgggatgtggaatggttcaccctaatgttttaagaaatgtaaaagtagatccaagcaagtttcaagggtatgcatttggtattggcatcgatagacttgctatgttgaagtatggaattaacgatttaagagctttctttgattgtgattatagatggttaaatcactttgggtttgatcctttggatgtaccatcaaactatagaggcttaagtagatga

SEQ ID NO: 301905 - DNA, 817 bp, Unknown
  Bacterial polypeptide expressing nucleotide sequence isolated from the Sargasso Sea
catgcaatttccggaatcctggcttcgcagtttcgtcaatccgtcgatcaccacggatgagctttcccatcgcctgacgatggctggcctcgaggtggaagaggtcgaccccgtcgcgccgccgttctcgcagatcgtcgtcggccatgtggtcgaggtgaacaagcacccggacgccgatcgcctcaacgtgtgcaaggtcgatgcgggcacgggcgaattgctgcagatcgtctgcggtgcgccgaacgtgtcggtaggcatcaaggtgccgtgcgcgctggtcggcgcggacctgccgccgggcgaagacggcaagccgttcaagatcaagatcggcaagctgcgtggcgtggagagctacggcatgctgtgttcggcgcgcgagctgaagctgtcggaagaccacggcgggctgctgatcctgccggaagacacgccggtgggcgaagacatccgcaaggtgctcgatctggacgaccagatcttcgtcatcaagctcacacccaacaaggccgactgcctgtcgatccatggcgtggcgcgtgaagtgtccgcgctgacgggcgcccccattaccgtgccgtcgatggcacccgtggcggtaacgctggccgacaagttgccggtcaaggtggaagcaccggacctgtgtggtcgcttctcgggccgcatcatccgcggtgtgaacgcgcacgcgaagacgccggcctggatggtgtcgcgcatcgagcgcgcgggcatgcgcagcgtgtcggcgctggtggatatctcgaactacgtgatgctggagctgggccgtccgtcgcaccttcca

SEQ ID NO: 301906 - DNA, 754 bp, Unknown
  Bacterial polypeptide expressing nucleotide sequence isolated from the Sargasso Sea
tatgaaattagataagaatggggttatagaagaaataaataaaatttcttctgtagaacaaattgaaaatctacgtataaaatatttaggaaaaaaaggtttaatttctttagaaatgaaatcattggcctccttatcaattgaagataaaaaaattaaaggtcaggaattaaataatttcaaatttttttttgaaaaagaattaattggtaaaaaaaatgcaatagaaaaaaaattaattaacgaaaaattacaaaaagaaaaaattgacacatccttaccaccaagggattttagttcaggtaagatacatccaataagccaaactatgtttaaaattattgatacttttggatcaatgggttttgcagttaaaagtggaccagatattgaatcagattttaataattttagtgcattaaatataccagaccatcatcccgcaagagaaatgcaagatactttttatattgatgataaggttttaagaacacatacaagtcctgttcaagttagaacaatgttagaatcgaagcccccaattagaattattgttccaggcagaacatacagaagtgattcagattctactcatactccaatgtttcatcaagttgaaggattgttgattgataattcatcaacaatggcacatcttaagggctgtctaattgattttttacaagattattttgagattaatgaattaaaatatcgatttcgtccaagttattttccttttactgaacctagt

SEQ ID NO: 301907 - DNA, 439 bp, Unknown
  Bacterial polypeptide expressing nucleotide sequence isolated from the Sargasso Sea
tttcatcaagtggaaggattagtggtaaacaaagatgcaaccatggcagatctaaaatctaccctcattatttttttaaaagagttttttgaaatagataacttaaagtatcgatttagaccaagttattttccgtttactgaaccaagcgcagaaatggatgttgcttttacaaaaaaaaataatgttttaaaaattggcgagggtgaccaatggttggagattttaggatgtggtatggtcaatccaaaagtgttagagaattgtaatatagattcttctgtgtatcagggttttgcatttggtatgggaatagaaagattgtcgatgctaaaatacggtattactgacatgcgaggtttatttgatttgaatattaagtggttagatcactatggattttctccattagatctaagaaatagatcagaggtttaaa

SEQ ID NO: 301908 - DNA, 502 bp, Unknown
  Bacterial polypeptide expressing nucleotide sequence isolated from the Sargasso Sea
taaactagaaaaattactaaggacacaaacaagtactgttcaagtaagacatatgcaaaacaataaaccacctgtttatattgttgctccaggaagagtttacagatcagaccaacttgatgctactcactcaccggtttttcatcagattgaaggtttagcagtagatgaaaacttaacgttttctgatttaaaaggaacattggagtattttgttaaagaattttttggaaaagacttaaagacaaagtttattcctcatttttttccattcactgaaccatcagctgaagttttagttagttggaaagatggagaatggcttgaaatcctaggatgtggaatggtagatcctaacgttttcaaacatgttggatataacacagattcccagggattcgcgtttggtgtaggagttgagagattagcaatgattagatatggtattgatcatataaaaaacttttatgaaaatgacttaaggtttttaaggcagttttaa

SEQ ID NO: 301909 - DNA, 763 bp, Unknown
  Bacterial polypeptide expressing nucleotide sequence isolated from the Sargasso Sea
atgtcagatattataaaaattaaagaagaatatttaaataagcttaaaaataatttagatctaaacacagttaaccaactaaaatcagagttgtttggcaagaatggtaaaatttcaagtgaatttaaaaaaatgagttcaattcctgatgcagatagaaaaaaatttgcatcagatctaaattcaataaaagatgaattacaaagtttaattgataaaaaaattcaggatattgaaattaatgaaataaatttaaagcttcaaaacgaaaaagtggatatcactttaccagaaagaagttttaatagaggtaaaatacatccagtatctcaggtgatagatgaaatatcttcaatattttctgaaataggttttagtgttgaagagggtcctgatgttgaaaatgaatacaataatttcacagctctaaatacacctgaaaatcacccagctagagatatgcatgacacattctatttggataataaaaaagaatttttactaagaacacatacttctcctgtacaagttagaacaatgttaaatggaaaacctccatttaaaattattgcacctggaagaacttatagatctgatagtgatcaaactcatgctccaatgtttcatcaagtagagggtcttcatatagataaaaatataaatatgggccatcttaaaggatgcttaaattattttataaaagaattttttgaagtcgataaaattaaaatgagatttaggccaagtccacttccctttacag

SEQ ID NO: 301910 - DNA, 610 bp, Unknown
  Bacterial polypeptide expressing nucleotide sequence isolated from the Sargasso Sea
tatgcatgatactttttatcttgataataataaggaattacttttgagaactcacacatctccagttcaggtaagaactatgctaaaaggtaaacctccttttaaaattattgctccagggcgaacttacagatcagatagtgatcaaacccatgctccgatgtttcatcaagttgagggacttcatatagataagaatataaatatgggacatttaaaaggatgtttaaattattttattaaggagttttttgaagttgataaaattaaaatgagattcagaccaagtcattttccatttacggaaccttcagcagaagtagatataggatatgaaattaaaaatggaaagatagtaattggtgaaggtaataaatggttagaaattctaggctgtggaatggttcatccaaatgttttaaaaaatgtaaaagttaatccaagtaaatatcaaggatatgcctttggaattggcatagacagacttggaatgttaaaatatggaattaatgatttaagagccttttttgagactgattatagatggttaagtcactttggctttgatccattggacgtcccttcaaattatagaggactaagtagatga

SEQ ID NO: 301911 - DNA, 758 bp, Unknown
  Bacterial polypeptide expressing nucleotide sequence isolated from the Sargasso Sea
aaaaattcatcctgtatctcaagtgattgacgaaatttcttctatattttcagagataggattttcagtcgcggaaggccctgatgttgaaacggagtatcataattttactgcacttaatacacccgaaaatcatcctgcaagagatatgcatgatactttttatttagataaaaataaaaaacttttattaagaactcatacttccccagttcaaattagaactatgttaaatgaaaaacctccttttaagattatagttcctggtagaacttatagatctgatagtgatcaaactcactcaccaatgtttcaccaattagaaggacttcatatagataagaatattactatgggtcatttaaaaggatgtttaaattattttattaaagaattttttgaggtcaaaaatgttaagatgagatttagaccaagtcattttccatttaccgaaccttcagccgaggtagatattggttataggttagagaatggcaaaatagttattggagaaggagacaaatggttagaaattttgggttgtggaatggtacatccaaatgttttgaaaaatgtgaaagtagatgtaaaaaaatatcaaggttatgcttttggtatcggaattgatagattagcgatgctaaaatacggaattaatgatctaagagcattttttgaaactgattatcgatggttaagtcattttggttttgatcctttggatgttccaacaaattatagaggtttaagtaaatgat

SEQ ID NO: 301912 - DNA, 705 bp, Unknown
  Bacterial polypeptide expressing nucleotide sequence isolated from the Sargasso Sea
aaattggttttagtgtgaagaaaggacctgatattgaaactgaatattatatttttactgctttaaacacaccagaaaatcatccagcaaaagatatgcatgacactttttacattgaagaaaatatgaaaacattattgagaacacatacttctccagttcaaataagaactatgttaaaaggtaaacctccatttaaaattattgcaccaggaagaacgtatagaagcgatagtgatcagactcataccccaatgtttcatcaactagaagggcttcatattgataaaaatataacaatgggtcatttaaaaggttgcttaaattattttgtaaaagagttttttgaagtcgagaaaattaaaatgagatttcgtccaagtcattttccttttacagagccttcagctgaggttgatattggatacagaattgaaaataataaaattataataggagaaggagataagtggttagaaattcttggttgtggcatggttcacccaaatgttttaaaaaattcaaaagttgatccaaataaatatcaaggttttgcatttggaataggtatcgataggctagcaatgttaaaatatagcattaatgatttaagatcattttttgagtgtgattatagatggttaaattattatggatttgatcctctagatgttccaactaattaccgaggtttaagcaaatgaa

SEQ ID NO: 301913 - DNA, 610 bp, Unknown
  Bacterial polypeptide expressing nucleotide sequence isolated from the Sargasso Sea
atgtctgatattaaaaaaataaaagatgattatatcgataagcttaacacagaaaataatattgaaaaagtaaataacgtcaaatccgaactatttggaaaaaatggaattatatcgaacgaatttaaaaaattaggttcgatttctgtagaggaaagaaaaaaattagccacagatttaaataatattaaagatgaacttcaaaataaaatatcaatcaaaattcaagaaattgaaactaaagaaattaatttaaagcttgagaaagaaaaaattgatgtaactcttccagaaagaaatattgaaattggtaaaattcatccagtctcccaggtaatagatgaaatttcatctatattttctgaaataggatttagtgttgaggaaggcccagatgtagaaaatgaatataataattttactgcattaaatacaccggataaccatccagctagagatatgcatgatactttttaccttgataatagtaaggaattacttttgagaactcacacatctccagttcaggtaagaactatgctaaaaggtaaacctccttttaaaattattgctccgggacgaacttacagatcagatagtgatcaaaccc

SEQ ID NO: 301914 - DNA, 430 bp, Unknown
  Bacterial polypeptide expressing nucleotide sequence isolated from the Sargasso Sea
cttcatatagataaaaatattaatatgggtcatttaaaggggtgtttaaattattttatcaaagagttctttgaagtaaaaaaaattaaaatgagatttagaccaagtcatttcccttttacagaaccatctgcggaagtagatattggttacgaaattaaagatggaaaaattgttataggagaaggagacaagtggcttgaaatattaggatgtggaatggttcatccaaacgttttaaaaaatgtcaaagttgatcctattaaataccagggatatgcatttggtatagggatagatcggttagccatgttaaaatatgggattaatgatttaagagctttctttgactgtgattacagatggttaaatcattttggatttgatcctcttgatgtaccaacaaattatagaggtttaagtcgatgaa

SEQ ID NO: 301915 - DNA, 403 bp, Unknown
  Bacterial polypeptide expressing nucleotide sequence isolated from the Sargasso Sea
agtttataggagagatgctgtagatgcaactcattcacctgtatttaatcaagttgaggttttatgtcttgatcaagatataaattttagtcatttaagaggaactgttttaactttcttaaaaaccttttttggagatattcctgttagatttagagccagctatttcccatttactgaaccttcagcggaagtagatgttaaatggaaaggcaaatggctagaagtaatgggatgcgggatggtagatcctaaggttctaacaaaattaggaatagattctgagaaatggactggatttgcagctggattaggtgttgagagattttgtatggtgagacatcagattgatgatataagaagattttatacaaatgatctaagattcttagaacagttctaa

SEQ ID NO: 301916 - DNA, 673 bp, Unknown
  Bacterial polypeptide expressing nucleotide sequence isolated from the Sargasso Sea
gtagagaatgagcattataattttactgcattgaatacccctgacaaccatccagcaagagacatgcacgatactttttatttagataataaaaaagaattacttttaagaactcatacatctccagttcaagtaagaacaatgctaaaagggaaacctccttttaaaatcattgctcctggtagaacatatagatctgacagtgatcaaactcatgctccaatgtttcatcaagttgagggacttcatattgataaaaatataaatatgggacatttaaaaggttgtctaaattattttataaaatctttttttgaagttgataaaatcaaaatgagatttagaccaagtcacttcccctttacagaaccatcagccgaagttgacattggttatgaattaaaagatggcaaaatagtcatcggtgaaggagataaatggttggagattttaggttgtgggatggtacatccaaatgtacttaagaatgtaaaaataaatccagacaagtatcaaggttacgcatttggaattggcatagatagattagccatgcttaagtatggaataaatgatctaagagctttttttgagactgactataggtggctaaatcactttgggtttgatccattagatgtaccatcaaattacagaggccttagtcgatgaa

SEQ ID NO: 301917 - DNA, 634 bp, Unknown
  Bacterial polypeptide expressing nucleotide sequence isolated from the Sargasso Sea
atgaacttaaaatctaagtttctaggaaaaaaaggtttgatttctgaattaacatctgaacttaaaaatttaagtatcgatgaaaagaaaaataggggagctgaaataaattccacaaaaaaagatattgaaattgctattggaaaaaaacttaaagatatagaagaggctgaaataaacaaaaagttaaatagtgaaaaaattgatattacattgcctggtaaagctccagcattcggatcattacacccaataacccaagttctagaaaacgttatagatatttttgaaggatatggatttcagactgttgaaggaccagaggtcgaaaccaatttttataatttcgaagctttaaatattcctgaaaatcatcctgcacgtgacatgcaagacactttttatttagatgataatcagcttttaaggactcacacatcaccaatgcaagtaaggattatggaaaataataatcctccaattaaaattatatcgcctggaaaagtttatagatgtgatagtgatgtaactcatactcctatgtttcatcaggttgaaggtctttttgtggatgaaaacgttagctttgctaatctcaagagcatacttaataacttttgtatcgattttttta

SEQ ID NO: 301918 - DNA, 813 bp, Unknown
  Bacterial polypeptide expressing nucleotide sequence isolated from the Sargasso Sea
atcattaaataatgaaaaacaaaaaattactgaaaccattaacaataggtttaaagaattagaaaaattagaaataagcaaaaaattacaaaaagataaagttgatgttactttaccagcaagagagagacctaatggtaaaatacatccagtttcccaggtgatagatgaaatctcatcaattttttctgagatcggtttttcggttgcagaaggtcccgatgttgagactgaatataataatttcacagcattgaataccccagaggatcatcctgcaagagatatgcatgataccttttatctagataatgataaaaaaattttattgagaactcatacttctccagttcaagtaagaacaatgctaaatggcaaagcccctttcaaaattattgttcctggaagaacttatcgttgtgatagtgatcaaacccatgcaccaatgttccatcagcttgagggcttacatatagataaagatataaccatgggacatttgaaaggatgtttagattattttgtaaaagaattttttgaagttaaaaaaatcagaatgagatttagaccaagtcactttccttttactgaaccatcagctgaagtagatattggttacaaactagaaaacggaagaataattgtgggtgaaggagataagtggttagaaattttgggctgtggaatggttcaccctaatgttttaaaaaatgcaaaagtcgatcctaataagttccaaggttttgcatttggcatgggtatagatagacttgctatgttaaaatatggaattaacgatcttagatctttttt

SEQ ID NO: 301919 - DNA, 667 bp, Unknown
  Bacterial polypeptide expressing nucleotide sequence isolated from the Sargasso Sea
atggagattttaccagaaaatataaagtatttagagcttgttgagaatgcccagtctgttaatgatctcgaacaggttaggataaagcttcttggtaaaaagggggagatttctaacctgttgagatcattgggtcagatggatgccaaagagcgacaaataaaatctccacagtataacaatcttaagcaatctctggacgaggctatcaaggagagaagggaactattacgtaataaggagattgaaggcagaatggatgcggaatggcttgatatctcgcaagaccccagagagatgaactcaggcctaatgcacccggtaagcagagttacggaagaaatagtatcaattttttcagacctcggattttcggtagctgaaggaccccagattgaaagcgactggtacaattttgattcactaaatattcctcctgatcatccagctcgtcaggagtttgatactttttatatcgatcctggggatgagagcattatggaaaatggttcacctgacgtacttagaacgcatactagcccagtacaagtaagatttatggaaaaacacggagcaccctgtagaattatcgcacctggacgggtatatagatcggaatacgatctcacccatacaccaatgtttcatcagatgaaggttagcggta

SEQ ID NO: 301920 - DNA, 538 bp, Unknown
  Bacterial polypeptide expressing nucleotide sequence isolated from the Sargasso Sea
atgaaattcagtgaacagtggctgcgcacctgggtgaaccccgacgtctcccgcgatgaactggtggcgcgcctgtccatgaccggactcgaagtagacagcgttaccccggcagccggcgagttttccggtgtcgtggtgggcgagattctcagtgcagagcaacacccggacgccgacaagctgcgcgtatgccgcgtcagcaacggcagcgaagaattccaggtggtatgcggcgcacccaatgcccgtgccggtatcaagatcccgtttgccatggtaggcgcggtactgggcgaagacttcaagatcaagaaggccaagctgcgcggtgtcgaatccttcggcatgctgtgctctgcggccgagctgcagatttccgaagaccacgacggcctgtacgagctgccgcaggatgccccggttggccagagcgtgcgcgagtatctgggcctggacgacgccatcattgaggtcgacctgaccccgaaccgcggtgactgcctctctattgctggcttggcccgtgaggtggggg

SEQ ID NO: 301921 - DNA, 362 bp, Unknown
  Bacterial polypeptide expressing nucleotide sequence isolated from the Sargasso Sea
tgagggtgtgagctttgctgatctgaaaggcaccatcgagcagtttctgcgcgagttcttcgaggctgatctggaagtgcgcttccgtccctcgttcttcccctttactgagccgtccgccgaggtggatatccgtcgccgtgtggtcaagaacggcgaagagaaggccgactggctggaagtactgggttgcggcatggtgcacccggacgtactgcgcatgtccggtatcgacccggaaaaatatcaggggtttgctttcgggatgggcgtagagcgtctgaccatgctgcgttatggcgtgggcgatctgcgtattttcttcgacaacgatctgcgtttccttgagcagttccgttgag

SEQ ID NO: 301922 - DNA, 871 bp, Unknown
  Bacterial polypeptide expressing nucleotide sequence isolated from the Sargasso Sea
gatggtggaaaaattacgccgctctggtatccgttctattgatgctgtggtggacgtgaccaacttcgtattgctggagctgggtcatcctatgcacgcttttgatttaacaaaaatcgaaggtgatatcgatgtgcgtatggccaaagagggtgaaaagcttactctgctggatagcaacgaagtgaccttaaaagccaatacgctggtgattgcggatagccaaaaagccttagcaatggccggtatctttggtggtttgcacagtggtgtcaccaaagacagcaaccacattttccttgagagcgcattcttctctccggttgaaatggctggtattgcccgtcaatacggcttacataccgatgcatcacaccgctatgagcgtggtgttgacccagagttgcaacgcacagccatggaaagagcaacagcattgctgttagctattgtcggtggtgaagctggccctgtggttgaagctgtctcagtgactcatttacctaaagcagctcaaattgcgttaacccgcactaagctggatcgtattttaggcatttctattgcgacagagacagtcactgaaattttccagcgtttaggtatgcaggttcagacatcagctgacgagtggcaggtgacagtaccaagctaccgttttgatatctctattcctgaggatttaatcgaagaagtagcccgggtctatggttacaacaatattcctaatgtagcaccacaagctgcgcttgcgatgagcaaacatcaggaaagccgtatttccgttcacagcttacgtgatttgttggtggcccgtggttatcaggaagctattacttatagttttgttgatcctaaagtgcaggaaacc

SEQ ID NO: 301923 - DNA, 475 bp, Unknown
  Bacterial polypeptide expressing nucleotide sequence isolated from the Sargasso Sea
atgtcacatctcgcagagctggttgccagtgcaacggccgccattaaccaggcttcagatgttgccgcgttagacaatgtccgcgtcgaatatttgggcaagaaagggcacctgacccttcagatgacaaccctgcgcgaactgccgccagaagagcgcccggcagcaggtgcggtgataaacgaagccaaagagcaggtgcagcaagcgctgaacgcgcgtaaggccgaattagaaagtgttgccctgaatgcccgtctggcagaagaaactatcgatatctccctgccagggcgtcgtatcgaaaacggcggtctgcatcctgtaacgcgtacaattgacaggattgaaagtttctttggtgagctgggctttaccgtggcgactggtccggaaatcgaagatgactatcataacttcgatgcgctgaacattcctggccatcatccggcgcgcgctgaccacgacactttct

SEQ ID NO: 301924 - DNA, 607 bp, Unknown
  Bacterial polypeptide expressing nucleotide sequence isolated from the Sargasso Sea
atgtcggattttgaaaaattaaaaggtgaattaaaagttaaacttaatcatgccaagacttctcaagaagtagatattataagaactaatatttttggaaaaaatggtttgataaattcagagtttaaaaaacttggatcattatctccagaagataaaaaaaaagtagcatcagaaataaacaatgcaaaacaagaactaacaaaattatttaatgataaagttttaacgcttacaaattctgaaatagatgaacaagttaaaaaagaaaaagatgatgtaacactaccagaaaaagattttagaattggaaaaatacatcctgtgtcacaagtaattgatgaaatttcatctatattttcagaaatcggttttagtgtagaagaaggccctgatgttgagagtgaatattataattttacagctcttaacactcccgaaaatcatcctgcaaaagatatgcatgatactttttatcttgataaaaatatgaaaacattattaagaactcatacctccccagtccaggtaagaacaatgttaaatggaaagccaccttttaaaattatagcgccaggaagaacttacagaagcgatagtgatcaga

SEQ ID NO: 301925 - DNA, 571 bp, Unknown
  Bacterial polypeptide expressing nucleotide sequence isolated from the Sargasso Sea
tatggaatcgaaaactgttgattttttcgaccttaaaggcgatttagaagcaattatcggcttgacagtttccgcatcagaatttagctttagagtagcgacgcattctgctcttcatccagggcaatgtgctgaaatattgagaaatgatcgagtgatcggtcatataggtgctatccatcctagtttggagaagccttttggactcaatggtaaaaccatcgtttttgagttggaattggatgctttattgcataccagtttgccgctagcccaagctgtatctaagttcccggctaatcgtcgtgacatcgcagtagtcgtagatgaaagtgtatctgcaggcgatgtaatgaaattgataagaaaagttggcgaaaatcagttggttggcataaacttgttcgatgtatacttaggtaaaggtgttgagcccggcaagaagagcttggcgatagcacttacattacaagacactactcgtacacttgaggaaaaagagatcgctgagacagtagaatcagttgtttctgccctgaagaccgagttcaacgcatcgttgagggattaa

SEQ ID NO: 301926 - DNA, 565 bp, Unknown
  Bacterial polypeptide expressing nucleotide sequence isolated from the Sargasso Sea
atgtccgatataaaaaaaattaaggatgaatatttaggcaaactaagtggagatttaaatctagaaagtgtaaatcatattaaaactgaattatttggaaagaacggtgcaatttctaattcatttaaaaaacttggttctatgccttcagaggaaagaaaaaaatttgcatcagacttaaattttgtaaaagaggaacttcaagaaaagataaatgataaacttcaagaaattgaaattaaagaaattaattctaaacttgagaacgagaaagtagatgtaactttacctgagagagatattaatcaaggaaaaatacatccagtttctcaagttattgatgaaatatcatcaatattttcggaaattggatttagtgttgaagaaggaccggatgtagaaactgaaaattataatttcacagcacttaatactccagagaatcatccagcgagagatatgcatgatactttttaccttgataataataagaaactgcttttaaggactcatacctctcctgtccaagtaagaacaatgattaaaggaaaaccaccttttaaaa

SEQ ID NO: 301927 - DNA, 448 bp, Unknown
  Bacterial polypeptide expressing nucleotide sequence isolated from the Sargasso Sea
tttcaccaattagaaggtttacacatagacaaaaatataaccatgggccatctaaaaggatgtttaaactattttataaaagaattttttgaagttaaaagtgtcaaaatgagatttagacccagccactttccattcaccgaaccatccgctgaagtagacatcggatacagaattgaaaatgataaaattataatcggagagggtgataaatggttagagattttaggatgcggaatggtacaccccaatgtacttaaaaatgcaaaagttgatccaaaaaaatatcaaggatttgcgtttggaatgggtatcgaccgattagcaatgttaaaatatggtattaacgatttaagagctttttttgaaacggactatagatggttaagccattttggtttcgacccattagatgtacctacaaactataggggcttaagcaaatgat

SEQ ID NO: 301928 - DNA, 685 bp, Unknown
  Bacterial polypeptide expressing nucleotide sequence isolated from the Sargasso Sea
aggaggccctgatgttgaaaatgaatataacaattttacggctttaaacacacctgataaccatccagcaagagatatgcatgatacattttatttggatgagaatagggaagttttattaagaactcatacttcaccagttcaaattagaactatgcttaaagataaacccccatttaagatcattgctcctggtagaacttatagatctgatagtgaccaaacacatgctccaatgtttcatcaagtcgaaggtttgcatattgatgtaaacataaatatggggcatttgaaaggatgtttaaattatttcattaaagaattttttgaagtcgaaaaaattaaaatgagatttagacctagtcattttccattcacagaaccatctgctgaagtagatattggttatgaaataaaagatagcaaaataattattggagaaggagataagtggcttgaaattttaggttgtggaatggtgcatcctaatgttttaagaaatgtaaaagtagatccttctaaatatcaaggatatgcctttggtataggtatcgaccgattagcaatgcttaaatatggtattaaagatttaagagctttttttgattgtgactacagatggctaaatcattttggttttgatccacttgatgttccttctaattacagaggtttaagcagatga

SEQ ID NO: 301929 - DNA, 895 bp, Unknown
  Bacterial polypeptide expressing nucleotide sequence isolated from the Sargasso Sea
aaaagaatatacaggaaaagaatctctgctttctgttgaaagaaaaaatttatctaatctttcaaatgaagacaaaaaagtctatggtgaaacattaaataatgtaaataaatcgattgtttcaaatataaaaaaatccaaagaagaatatataaataataaatatgcttcgttagaaaatgaagaaaatgaagatataacaatagattggatcacacagacaggaacgcatagacatattctttcacaagttatggatgaggttgtaaatatttttgcttccataggatataaagtagcttatggacctgaagttgaaacatcttggcacaactttgacgcattaaacaccccggactggcaccctgcacgatatgaatctgacactctatatacagataataatatggaaactttacttagaacccaaactagtaccgtacagatcaggcatatggaagaaaatgatccacctgtttatattgttgcaccaggtagagtatttagatcagatcagcttgatgccactcactcaccggtttttcatcaacttgaaggtctcgcagttgataaaaacttaaaatttacagatcttaaaggtacattagagtactttgtcaaacaattttttggtgaaaatattgaaacaaaatttattccacatttttttcctttcacagaaccctctgctgaagtcctagttaagtggaagaatggtgactggttagaaatattaggatgtggaatggtagatccaaatgtaataaaacatgttggttactcagatgaatatcaagggtttgcttggggagttggtatagaaagactagctatgcttaaatatcaaattgatcacattaaaaacttttatgataatgattttaagattcttgga

SEQ ID NO: 301930 - DNA, 811 bp, Unknown
  Bacterial polypeptide expressing nucleotide sequence isolated from the Sargasso Sea
ggttgaaaacgtaaaagagaactcaagtgatttaagtgactttaaagttgcaaagattttgaaagtcgaaaagcatccaaatgctgataagctaaaagtttgtgacgttagtttaggtgataccaaaataataaaagtagtttgtggagcatcaaatgccagagatggactagtaactatctatgcacctccaggagcaattattcttaagacaaagtttcaattaaaaattgctaaaattagaggagttgaatcaagaggaatgctctgttccgaaaatgaattaaatttatctgatgaaagtgagggtatcatagaattaaataataaggataaagaaattggtaaaagttattttaaaaccaaatcagaaaaagctttagatatttccattacaccaaatagagctgattgcttaggagtaaggggaatagcaagagaccttgcatcatcaggacttggaagttttttaaagttaaagaaaaaatctttaaagcaaacttttagtcagcccattaaggtttcgattattaatgataaaaatcaaggttgtttatcttttggaagttgctacataaaaaatatcaaaaacaaagaaagtccggattggttaaaaaataaaattttagctttaggtttaaaacctatttctgctgtagttgatattacaaattatgtaatgtttgatttgaatcgacctttacatgcgtatgatgccaaaaaaatagataaagaaattattgttagaaattctcgggaaggtgaacaatttaggggattggatcacgagacatataaattaaaaaaagga

SEQ ID NO: 301931 - DNA, 727 bp, Unknown
  Bacterial polypeptide expressing nucleotide sequence isolated from the Sargasso Sea
aatgtcttccgacaaagatgttatttttccaaaattagataaatcatatggcgcatatcatcctataaatcatattaaagatttgataatgaatcttttaatttcatatggatttgaaatagctgaaggccctgaaatagaaacagaggaatttaatttcgacatgctaaatataaaagaatctcatccagccagacaaatgcatgatacattttatgtagaaaataaatcatatcttcttcgaactcatacttcaccagttcaaattagaggtatgttagaaaaagagcctcctatagcttttatatcaggtggaaaagtttatagaaaagatgatgatgccactcacttacctatgtttcaccaagttgaggcaatatatgttgataaagacgtaaattttgcaaatttaaaggatttaatctttaggataatttatgatctatttggtcaagatattaaaattaggtttaggccatcttattttccatttacagaaccatctgcagaggtagatattttttctgaaaatggaaaatggcttgaggtcttaggatgtggaattgttaatcctattgttttagataattgtaaaattagttccaaaaagtatagtggcttggcgcttggaattggaattgaaagaatagcaatgcttaaatatggcgttaatgatataagagaattttataaatctaatctaaattttctcagtcagttcaaatga

SEQ ID NO: 301932 - DNA, 634 bp, Unknown
  Bacterial polypeptide expressing nucleotide sequence isolated from the Sargasso Sea
atgtctgatattaaaaaaattaaagatgaatatttagataaactagatggtgatttaaacttagagaatgtaaatcagataaaaacagaactttttggaaaaaatggagcaatttctaattcattcaagaaacttggcacgttgccaccagaagatagaaaaaaatttgcatcagacttaaactttataaaagatcaacttcaagaaaaaataaatagtaaacttaatgaaattgaaactaaagagatcaattccaagcttgaaaatgaaaaagtagatgtaactttaccagaaagagatattcatcaaggaaaaattcacccagtttcacaagtaattgatgaaatatcttcaatattttctgaaattggatttagtgttgaagaagggccggatgttgaaaatcaacattataattttacagctttaaatactccagacaatcatccagcaagagatatgcacgatactttttatctagatgataaaaaagaattacttttaagaacccatacttccccagttcaggtaaggactatgttgaaaggtaaaccacctttcaaaataattgcaccgggaagaacatatagatctgatagtgatcaaactcactcgcctatgttcatcaagtaga

SEQ ID NO: 301933 - DNA, 453 bp, Unknown
  Bacterial polypeptide expressing nucleotide sequence isolated from the Sargasso Sea
aaaaaaataatcctcctataagggttgttgtgcctgaaaaatgttacagatatgaggcaacagatgcaactcatgaatgggaattccatcaaatagaaggccttgcaattgataaaaatatatcattttccgaattgaaaggaactttatatcaaatggcaagaaaaatttttggatcagatcaacaggttagatttagatgtgactttttcccttttgttgaaccaggtgttgatatgtcaattttgtggaaaggacgatggattgaaattctaggtgcaggcatggtgcatccaaaagtcttaacaggagttggatatgatccaaatgaatatagcggatttgcatttggtataggtcctgaaagagtttcaatgctaaaaaataaaataaaagacataaggaattttcacgcaaatgatttgagatttctaagtcaatttgtgaattaaa

SEQ ID NO: 301934 - DNA, 791 bp, Unknown
  Bacterial polypeptide expressing nucleotide sequence isolated from the Sargasso Sea
gatgcctgacaatctttcagatctgtcaaaatcagcaacccaagaaataaacgaatgctcatcaacgactgaacttgattctctcagggtaaaatatttaggtaaaaagggagctattacaatagctctgaaatcagtatcctctatcgacccaaaggatagacctgcatacggaaagaaaatcaatgaactcaaatctttgattcaaggtacgctttctcaaaaaagagcatctttacaaaaaaaagaaattaatcagagtatcgatgataagaaaatagatgtctcactgcctggaagaagcaactttggtggacacagacatcctgtaacaaaaactttacttgaaattgaagagatattttatggcgctggctttgcggttgaagacggtcccgaaattgaagatgagtatcataacttcactgccctgaatattccaagcaatcatccagccagagctatgcatgacactttttactttaattctgaatttctattaagaactcatacatcaccaatccaaattcggagcatggaaaaagaaggcgtcccgataagggtcattgcaccaggaaaagtttatcgaagagattctgacataacacacacgccaatgtttcatcaaattgagggcttggtaattgataaaggaataaatttcagccaccttaaaggaatcctgcatcaatttattgatacattttttgaagaaaacactgaggtacgtttcagaccttcctattttccttttacagaaccatcggcggaagtcgacattttgtccaaag

SEQ ID NO: 301935 - DNA, 567 bp, Unknown
  Bacterial polypeptide expressing nucleotide sequence isolated from the Sargasso Sea
tatggctttatcttttgataagaatgggattttaaaaaaaataaaaaatgttaaatcttttgacgagttagaaaaaatccgtttagaatttttaggaaaaaaaggaatcatttcaatagaaatgaaatctctttcacaactttctattgaagagaaaaaattaaaaggacaagagcttaatttattaaagcagacacttgaggaagctattaacaatcaaaaatctcttcttgaaaataatgaactaactaaaagaatagaaggcgaaaagctagatgctacacttcctccaaatttaattcagcaaggtaaaatacatccgattagccaaacaatttttagtgttattgaaatctttgggaatttaaatttttcagttcaaactggtcctgatattgagacagactttaataattttactgctttaaacataccagctcatcatcccgcaagagaaatgcaggatacattttatgttaagggtgaagaaaaagaaaataatatccttcgaacgcatactagtcctgtgcaagttagaacgatgttaaatacaaaccacctattaaa

SEQ ID NO: 301936 - DNA, 774 bp, Unknown
  Bacterial polypeptide expressing nucleotide sequence isolated from the Sargasso Sea
taaatcaggttaaagacgaacttcagaatttaataacttctaaaattagtgagatagaaggaaaaaaaataaacgaaaaattagaaaaggaaaaagttgatataactttgcctgaaagaccattcgttagaggaaaagttcatccagtatcacaaactattgatgaaatttcatctattttctctgaaataggatttagtgttgaggaaggccctgatgttgaaaatgaatataacaactttactgctttaaacacaccttacaatcatccagcaagagatatgcatgatacattttacttggatgaaaacaaagaggttttgttaagaactcatacttcaccagttcaaatcagaactatgctaaaagacaaacctccattcaaaatcattgctcctggaagaacttatagatctgatagtgatcaaacacacgcaccaatgtttcatcaagtagaaggtttgcatgttgatacaaatattaatatggggcatttgaaaggatgcttgaattatttcattaaagaattttttgaagtagaaaaaattaaaatgagatttagacctagtcattttccattcacagaaccatctgctgaagtagatattggttatgaaataaaagatggaaaaataattattggagagggagataagtggcttgaaattttaggttgcggtatggtgcatccaaatgtcttaagaaatgtaaaagtagatccttcaaaatatcaaggatatgcctttggcataggtatagacctgattagctaat

SEQ ID NO: 301937 - DNA, 163 bp, Unknown
  Bacterial polypeptide expressing nucleotide sequence isolated from the Sargasso Sea
attgtcaatccaaaagtcttgggagaattgtaatattgattcttcaaattatagtggttttgcttttggcctaggtgttgagagaatagcgatgctcaaatatggaatcactgacataagagaattttataaatcaaatctagattttcttaagcagttctaa

SEQ ID NO: 301938 - DNA, 869 bp, Unknown
  Bacterial polypeptide expressing nucleotide sequence isolated from the Sargasso Sea
gatgaaaatttcctacaactggctcaaagaatatttagattttaaagaagatcacgaatcaattgctgaaaaattaacttctctaggccttgaggttgagggcataacaaagtttcagtctatacctggtggacttgaaggtgttgtaataggaaaaacaaaatccatcaaaaaacaccctaatgctgacagattaaaaataaccacagtagatataggtcaggatgaattacttcaaattatttgtggtgcgcctaacgttgataaaaaccaaacagtggcagttgccaccgcaggaacaacactatatcctaataatgaaaagctgaaaattaaaaaaagtaagattagaggagaggtaagcaatggaatgatttgcggtcaagacgaactaaatctaggagaatttgatcaaggtataatgatttttgatgataaatataaagccggtataccactgtctgaaatttacaatattgagagtgattggatatatgatataggattaacccctaatcgagctgatgcaatgagtcattacggaactgccagagatttaagggctaggctattgcatgagggaaataagattgagcttaaaacatcttctgttagtaattttatagttgacaatagaacaaaaaatataaaaatcaatattgatgacgatggctctacaactagatattgtggaattgttatggacaatattacggttcaagaatccccaaaatggcttcaaaataaaatcatttcaataggccttactccaataaataatatagttgatattactaactatatactacacgatataggacaaccactccacgcctttgactacgataaaattgaaatcaaacaatcaa

SEQ ID NO: 301939 - DNA, 674 bp, Unknown
  Bacterial polypeptide expressing nucleotide sequence isolated from the Sargasso Sea
aatgtctgatattaaaaaaataaaaaatgattatatcgataagcttaatacagaaaataacattgaaaaagtaaataacctcaaatccgaactatttggaaaaaatggaattatatcgaacgaatttaaaaaattaggttcgatttctgtagtggaaagaaaaaaattagcttcagatttaaataatattaaagacgaacttcaaaataaaatatcaaccaaaattcaagaaatagaaactaaagaaattaatttaaagcttgagaaagaaaaaattgatgtaactcttccagaaaggaatattgaaattggtaaaattcatccagtctcccaggtaatagatgaaatttcatctatattttctgaaataggatttagtgttgaggaaggcccagatgtagaaaatgaatataataattttacagcattaaatacaccggataaccatccagctagagatatgcatgatactttttatcttgataataataaggaattacttttaagaactcacacatctccagttcaggtaagaactatgctaaaaggcaaacccccttttaaaattattgctccaggacgaacttacagatcagatagtgatcaaacccatgctccgatgtttcatcaagttgagggacttcatatagataagaatataaatatgggacatt

SEQ ID NO: 301940 - DNA, 613 bp, Unknown
  Bacterial polypeptide expressing nucleotide sequence isolated from the Sargasso Sea
atggcatttgctgaaaataaaattgatgttcttaaaaaaattaaagcttcaaaatccttcgaagatttagaaaaacttcgactatattatctaggtaaaaaaggattaatacctgaagctttaaaaggattaggttctttgtcgattgaagaaaaaaaatcgaaaggacaggaattaaatattattaaaaaagaaattgaagaaggtattaaaatccaaagaacagaaattgaaaatattgaaatttcaaacaagattaatttagaatcaattgatgttactctaccacctaatatttctgaaaaaggaaaaatacacccaattagtcaaacaatatttaatattatagaaatttttggaaatttaaattatgcagtggaaacaggtccagatatagaaacagattttaataattttacagctttaaatatcccagaacatcatccagcaagagaaatgcaggatactttttatgttcaggataatggagacaaaaatgttcttcgaacccataccagtcctgttcaagtaagaactatgctcaacactaaaccacctattaaaattattgtgcctggaagaacttatagaagtgactcagatgctacacaaa

SEQ ID NO: 301941 - DNA, 578 bp, Unknown
  Bacterial polypeptide expressing nucleotide sequence isolated from the Sargasso Sea
aatgtctgatattttaaaattaaaagaagagtatctaaaaaaactaagtgaaaatataagtcttgaaaatataaatcaaattaagtcagaattgtttggcaaaaacggaaaaattacaaatgaatttaaaaaaatttcaaacatatctgcagatgaaaaaaaaaaatttgcatctgaggtaaattctgcaaaagatgaaattcaaactgttattgaaaaaaaaataaagaattttgaaattgagcaaattaattcgaaacttcaaagtgaaaaagtcgatgtaacattaccagcaagaagttttgtccagggtaaaatacacccagtgtcacaggttattgatgaaatatcatcaatattttcagaaataggttttagtgtcgaggaaggtcctgatgtcgagaatgaatataataattttacagcactcaatacaccagataaccatccagcaagagacatgcatgatactttttatttagatcataagaaagaatttttattaagaactcatacttctccagtgcaagtaagaacaatgttgaaaggtaaacctccatttaaaataattgctccag

SEQ ID NO: 301942 - DNA, 916 bp, Unknown
  Bacterial polypeptide expressing nucleotide sequence isolated from the Sargasso Sea
gcaaaaattttaaaagcagaaaagcatccaaatgctgataagcttagagtttgtgatgtagatataggtaaagaaaatcctgtcaaagttgtttgtggtgcccctaatgcaaaagagggcttgtttacaatctatgccccaccaggttcagttattcctaaaaatcaaatgaaattggttgtcagcaaaattagaggtgtcagctcttatgggatgttatgttcagagtccgaattaaaattatcagatgaaagtgatggcataactgagctttcttcaaatgattttaaagataagattggagagaattatttcccaaaaaaaaattcaaacgtgatcgatatatccattacaccaaatagagcagattgtttaggtgttagaggaattgccagagatctggctgcagcaggctcaggtaaattaaaagatcttaaagaaaacaaattaaaaaaagatggaaaacaaacagttaatgttaaaattgaaaatgaagataatcaagcttgtacaatatttggaagctgtttaattacaggagttaaaaatattgaaagtccagattggttaaaagaaaaaataatttctatagggcaaaaaccaatttcagccattgttgatattaccaactatgtaatgtttgatttaaatagacctcttcatgcttatgatgttgaaaaaattgacaagggaataatagttagaaattcaaaaaaaaatgaaacttttacagcgttagataataaagaatataaacttgatgaaggaatgtgcgtaatttcagatgcctcaggtgtattaggtttaggtggaataattggaggcactagatctggaacagaacttgatacaaaaaatgtattaatagagtcagcttattttttacctagatcaattagaaaatcatctaaaattt

SEQ ID NO: 301943 - DNA, 834 bp, Unknown
  Bacterial polypeptide expressing nucleotide sequence isolated from the Sargasso Sea
gttggggctagaagttgaccattcaaaaaaagaaaaaaattatttattaatcaaactagatttaactcctaacagaggagactgctttagcctgataggtatagctagagatgtttgtgcagttaataatttaaaattaaaacttccaaagtttaagaaacaacatcaaagtctcgattctaaaaaaactgtttctatagataagatcgcctgttcaagctatctaggtctaatcattaaactaaagagtaaaggcaaaactccgcaatacatcaaaaaaacgttaaaggctgctgatattggtcaagttaatccaatagttgatattacaaactatgtaatgcttcacaccggacaacctttgcatgcttttgataataaaaagattggcaaaaaaatttatgtcaaattcccttccaaaagaacaaagttgaaacttttggatggtgcttcctatgagataaataaagatttccttacaatatccgatgaaaaagaagaaatagctctggctggaattatggggtgtgctaattccgaagtggatgaaacaactcaagaaatttttttagagtcagcttgctttgaacctgaaagcatcagaggaaatgcaagaaagttaggctttcaatctgaggcatcattaagattcgaaagaggagttgataaagaaatccaagagtatgcacttaattttgcagcacaactttatgctgaaatctttggaggagacttttcaaagatttttaaagaatctaaaaatcataaagcaaagaaaatatcgataagtaaggaattcattgattcaaggctcggcacagagattcctgctgc

SEQ ID NO: 301944 - DNA, 817 bp, Unknown
  Bacterial polypeptide expressing nucleotide sequence isolated from the Sargasso Sea
cgcggtttcacgggacactacagatgtatttctggaatgtgcgttcttttcacctctggcaatagcgggtaaagctcgctcatatggcatgcatactgacgcatcgcatcgctatgagagaggggttgactatgagttacagcgtaaagcgatggagagagcaaccaagattttgacctctatcgttggtggggaagcgggcccaataacggaggagataggtaatttgccggaatttcctgcagttgaccttctctttgaaaatgttggatcagtgttaggtatcgatatacctgtcgatgaaatacgagatatattagttagattgggctttactgttactaacgaaaccccgcaaggtctgaccgtcgcggtgccaacctatcgatttgacgtaagccttgaggcggacttaattgaggaacttgttcgtatctatggatatgagaatgtgccaacaacagcagggttgtttaaacagtctcttgaaccaatatctgaagaaaacgttccgctgcgaagaatacgacattctctggttgatttaggttatcaggaagtgattacttattcatttgttgatcccataaagtcagattcaatctccatggtttccgattctgcaaaaatagtcttgcaaaatcctatttcaaatgaaatgtcggttatgcgcaatagtttgctaccgggtctcatagatgcatttaggtataatgcaaaccggcaccaagagcgcattcgacttttcgagagcggacttgtgtttaaaagacgagacggggagatagtgcaggagtcctggctagctggtttgatt

SEQ ID NO: 301945 - DNA, 816 bp, Unknown
  Bacterial polypeptide expressing nucleotide sequence isolated from the Sargasso Sea
tatggaaaagaacttaataaattaaaagttgccgttacagcaaaagtaaaaaagctgcagatcatatctaaaaatgtctctgaaaattcaataattaatgactctagcagaacagcttttccaattgaaacaggaaataggcatccactttcaattgtaaaaaacagaattataaatattttttctcagattggtttcactatatcagagggtccagaaatagaagatgattggcataatttcacagcactcaatcttcctcattaccatccagctcgtgatatgcaagacactttttttatacaaactgatcctgaaatgcttttaagaacacatacttcttcagttcaagtgcggcatatggaaaataaccctccgcctatacgaaccatttcacctggacgtgtgtttagaaatgaatctatatcctctagatcccactgcatatttcatcaaatagaaggcttatatataactaaaaatgtttcttttatagaccttaaggaaacattaaaatattttacggaggctttgtttggaaaatcaaaaatacgatttagaccatcttactttccttttacagagccaagtgcagaggttgatatttattggggactagaaaccgaatcagactatcgtattactaaaggtactggatggttagagattatgggttgtggaatggtagatcctaatgtattagaaaactgtagcattgatcccaataaattttctggttttgcctttggaatgggaattgaaagaatagcaatgttattatatcaagtaagtgatattcgattgttttttgaaaat

SEQ ID NO: 301946 - DNA, 260 bp, Unknown
  Bacterial polypeptide expressing nucleotide sequence isolated from the Sargasso Sea
aattataattggtgaaggagataaatggttagaaatattaggttgtggaatggttcatcccaatgttttaaaaaattcgaaagttgatccaaataaatttcaaggatttgcgtttggtataggcatagataggctagcgatgttaaaatatggaattaatgatttaagatccttttttgaatgtgattatagatggttaaattactatggttttgatcctcttgatgttccaacaaattatagaggtttaagcaaatgaa

SEQ ID NO: 301947 - DNA, 643 bp, Unknown
  Bacterial polypeptide expressing nucleotide sequence isolated from the Sargasso Sea
ggccaccacccggcgcgcgccgagatggacaccttctacatgaaccgtgccgagggcgacgagcgcccgccgcatgtgctgcgcacccacacctcgccggtgcagatccgttcgatggaagcgcagggcgcgccgctgcgcatcatctgcccgggccgcgtttaccgcgccgactacgaccagacccacacgccgatgttccaccaggtcgagggcctcgccatcgacaagaacatctccatggcgaacctgaaatgggtgctggaagagttcttctcggcctatttcggcaccacggtgaagacccgcttccgcgcctcgcacttccccttcaccgaaccctcggcagaggtcgacatccagtgccagtggaaggacggctcggtcgtggtgggcgagggcgacgactggctcgaggtcctgggctcgggcatggtgcaccccaaggtgctggccgccggcggcatcgatcccgacgaatggcagggctttgccttcggcatgggcatcgaccgcatcgcgatgctgaaatacggcatccccgacctacgcgccttcttcgacagcgacctgcgctggctgcgccattacggcttcgcctcgctcgacgtgccgacgatccggggtgggcttagtcggtgag

SEQ ID NO: 301948 - DNA, 553 bp, Unknown
  Bacterial polypeptide expressing nucleotide sequence isolated from the Sargasso Sea
atggcatttgctgaagataaaattgatgttctaacaaaaattaaagcttcaagatcctttgaagaattagaaaagcttcgattatattatttaggtaaaaaaggattaatacctgaagctttaaagggattaggttctttgtctattgaagaaaaaaaatccaaagggcaggaattaaatattatcaaaaaagaaattgaagaaggtattaaaaaccaaagaacagaaattgaaaatattgaaatctcagacaggattaatttagagtcaattgatgttactctaccaccaaatatttctgcaaaaggaaaaatacacccaattagtcaaacaatatttaatattatagaaatttttggaaatttaaattatgcattggaaacaggtccagatatagaaacagattttaataatttcacagctttaaatataccagaacatcatccagcaagagaaatgcaggatactttttatgttcaggacaatggagacaaaaatgttctccgaacccatactagtcctgttcaggtgagaacaatgctcaacacaaaac

SEQ ID NO: 301949 - DNA, 336 bp, Unknown
  Bacterial polypeptide expressing nucleotide sequence isolated from the Sargasso Sea
gatttagaccgagtcactttccgtttacagaaccttcagctgaagtagatattggctatagaatggagaacggaagaattatagttggcgaaggtaacaagtggctagaaatattgggctgtggaatggttcatccaaacgttttaaaaaatgctaaagttgatacaaagaaatttcaaggatacgcttttggaatgggaatagatagacttgctatgttaaaatatggaataaatgatcttagatctttctttgaggcagactacagatggttaaattattttggttttgaccctttagatgttccaacaaattataggggattaagcagatgat

SEQ ID NO: 301950 - DNA, 859 bp, Unknown
  Bacterial polypeptide expressing nucleotide sequence isolated from the Sargasso Sea
agaattgggtctcgaagagcagtcacagggcttgctgctcttagacccagagttgagcccaggtgctcagttaaatgatcatcttcagcttccggatcggctcctcgaagtcgaactgacacccaatcgcggagattgcctaagcatcttgggcgtggcccgagaggtagccgcattgacaggaggacggctgaaagaaccaaagcttccccgcgtgcgcattaccgaatcggaaacaaggtcgatttcgctcgatgaggacggccgttgtgctcgatacgtggggcgatccatcacaggtgtccggccaggggcgcgcactccggatcgcatccgcgagcgagtcacgcgggcagggttacgtagcattgacgcgctggtggatgtcagcaactacatcatgcttgaactgggtcagccaatgcacgcctttgacggagagcggctaaaaggcaatattcaggtgagaccagcgaagtccaaggaaaagattaagcttcttgacggcgagcgactcacattggacgcggaatctctccttattactgatcagaagggagccgtcgcgctggccggaatcaaaggcggcgcgagcacgatgatccatccgaaaacgcgcactatctttatcgaagccgcattttttgacccagacggggtggcacgcactgcccgaaagtacggacttaacaccgatgcatcgcatcgtttcgagcggggcgtggatttcaccctcccggcaaaggcgatcgaccgtgccagcgcgctgatcatccagatctgtggggggcgctgcggccctcagatcgagtcatccgaaaaatcatttcttccgaagcgcacgtgggtgccactgcgc

SEQ ID NO: 301951 - DNA, 622 bp, Unknown
  Bacterial polypeptide expressing nucleotide sequence isolated from the Sargasso Sea
tttttgtggtttaggatactcagtagaaagtggtcctgaaatagaaactgatttttataattttgagtctcttaatatacccaaaaatcatcccgcaagagatatgcaggatactttctacttagatgaaaatagacttttaaggactcatacttcccctgtccagataagatacttagagaagaatcctcctccagtaagaattattgcccccggtagagtatataggagagatgctgtagatgctactcattcccctgtatttaatcaggttgaggttttatgtattgatcaagatattaattttagtcatttaagaggaacagttcttacttttttaaagaccttttttggagatattcctgtaagatttagagcaagttatttcccatttactgaaccttcggcggaagtagatgttcaatggaaaggtaaatggttagaagtaatgggatgcggaatggtagatccaaaggtcttagaaaaacttggaatagattctgagaaatggaccgggtttgcagctggattaggagttgaaagattttgtatggtaagacatcagattgatgatataagaaaattttatacaaatgatcttagattcttagaacagttctaa

SEQ ID NO: 301952 - DNA, 648 bp, Unknown
  Bacterial polypeptide expressing nucleotide sequence isolated from the Sargasso Sea
tatgtctgatattaaaaaaattaaagatgaatttttagaaagattaaatgaggatttaaacattgaaagcgttaatgaaatcaaatcagaattatttggtaaaaatggtaaaatttcaacttcttttaaaaatcttggatctttaccagccgaagaacgaaaaaaatttgcatcagatttaaattttgtaaaagatgagctacaagagaaaattaataaaaaaattcaagaaatagagattaaagaaataaattctaagctagagaatgagaagatagacgtaacactgcctgaaagaaatattgtacaaggtaagatacaccctgtttctcaagttatagacgaattatcctcaatcttttctgaaattggttttagcgttgaagaaggaccagatgtagagaatgagcattataattttacagcattaaatacaccagataaccatccagcaagagacatgcacgatactttttatttagatgataaaaaggaattacttttaagaactcacacatctccagttcaagtacgaacaatgttaaaaggtaaacctccatttaaaatcattgctcctggtagaacatacaggtctgatagtgatcaaactcacgccccaatgtttcatcactatcagacctgtatgtt

SEQ ID NO: 301953 - DNA, 726 bp, Unknown
  Bacterial polypeptide expressing nucleotide sequence isolated from the Sargasso Sea
tatggaaaatttaaatcaaattgaatcagaaattttaaaaaaaataggtaatgcaaaagatcgcaatgcttacgaaacaatcaaaagtgaaatttttggtaaaaaaggaattattactgatctttttaaaaaaataggcaatttagatcaagaccaaaggaaagattatgcttcaaaactcaactcattaaagttaaaagtaacagaaattttagaaaaaaaacttactgattttgatcaaatagaaataaataaaagacttaaaaatgaaaaaatagatataactttacctggtcgaacttactttgcagggaaaattcatccagtatcacaagttattgatgaagtaacttccattttttcagagattggcttttccgttgaagaaggtcccgacatagaaaatgaatattataatttttcagcactcaatacgccagcagatcatcccgcaagagacatgcatgatactttttaccttgatcattctaaagatttacttttacgcactcatacttctcctgttcaaataagaacgatgttaaaaggtaagccaccatttaaaataattgctcctggtagaacttatagacatgatagcgatcaaacacattcacctatgtttcatccactcgagggtttgcatatagataaaaacataagtatgggtcatcttaaaggtttgctatattattttgttaaaaattttttgaaagtgaaaggtaa

SEQ ID NO: 301954 - DNA, 472 bp, Unknown
  Bacterial polypeptide expressing nucleotide sequence isolated from the Sargasso Sea
atcaccaatccaaattcgcagcatggaaaaagaaggcgtcccgataagggttattgcaccaggaaaagtttatcgaagagattctgacataacacacacgccaatgtttcatcaaattgagggcttggtaattgataaaggaataaatttcagtcaccttaaaggaatcctgcatcaatttattgatacattttttgaagaaaacactgaggtacgtttcagaccttcctattttccttttacagagccatcggcagaagttgatatattgtctaaagaaaataaatggcttgaaatactaggctgtggaatggttcacccaaaagttcttgaaaaccttgacattaatactgaaatctacagtggttatgcttttggtatgggtgtagaaagattggcaatgctgaaatacggcatcaaagacattcgatctttttatgaaaatgattttaatttcttaaaccagttctaa

SEQ ID NO: 301955 - DNA, 566 bp, Unknown
  Bacterial polypeptide expressing nucleotide sequence isolated from the Sargasso Sea
tatgggccgtgcccgtcagtacggtttgcacaccgacgcatcacatcgttacgagcgtggcgtggatccaaaattacagcgtaaagcaatggagcgcgctaccgcactcgttttagaaatttgtggcggtgaagcgggcccggttattgaagcggtttcagaagataaactgcctaaacaagctacggttacgcttcgtcgtgaccgcttaactcgggtgcttggtattagtattgatgacgcaaaagtaagcgagatgctttctcgtttaggcttagacgttaccgctaccattgagggttggaaagccattgcacctagctatcgttttgatatttcaattgaagaagatttgattgaagagattgcccgcgtttacggctacaacaacattcctaatgttgcgcctgccgcaacgcttgctatgttgccttcccaagaagcgcagctgccgttaggtacaatgaagtcgttgttgttaagcagaggctataacgaagctattacctattcgtttgtcgaccctaaaatacaaaacgcattgttccctgatgtaaaaggcatgg

SEQ ID NO: 301956 - DNA, 532 bp, Unknown
  Bacterial polypeptide expressing nucleotide sequence isolated from the Sargasso Sea
aatgttaagtggcaagccaccatttaaaattattgttccaggaagaacttaccgttgtgatagcgatcaaactcatgcacccatgtttcatcaacttgaaggattacatattgataaagatataactatgggtcatttaaaaggatgtttagactattttgttaaagaattttttgaagttaaaaaacttaaaatgagatttagaccaagtcattttccatttacagaaccttctgctgaagttgatattggttatagattggaaaacggaagaattattgttggcgagggtgacaaatggcttgagatattaggttgcggaatggttcatccaaatgttttaaaaaacaccaaagttgatccaaaaaaatttcaaggttttgcattcggaatgggaatagacagacttgcgatgttaaagtatggaataaacgaccttagatctttttttgaagctgattataggtggttaaattattttggttttgatccattagatgttccaacaaactatagaggactaagcagatga

SEQ ID NO: 301957 - DNA, 351 bp, Unknown
  Bacterial polypeptide expressing nucleotide sequence isolated from the Sargasso Sea
aaaaaattaaaatgagatttagacctagtcattttccatttacagaaccatctgcagaagttgatattggttatgaaataaaagagggcaaaataattattggagaaggagataagtggcttgaaattttaggctgtggcatggtgcatcctaatgttttaagaaatgtaaaagtagatccttctaaatatcaaggatatgcctttggcataggtatagaccgattagcaatgcttaaatacggcattaatgatttaagagcgttttttgattgtgattacagatggctaaatcattttggttttgatccgcttgatgtcccctcaaattacagaggtttaagcagatgaa

SEQ ID NO: 301958 - DNA, 904 bp, Unknown
  Bacterial polypeptide expressing nucleotide sequence isolated from the Sargasso Sea
cgggccgggatgagaccgatcaacaacattgttgacattaccaattatgtgatgctcgaacttggacagcctctgcatgcttttgactaccaggcactttgccagcgtgcaggaggagagactccagaaatttttgtcaggtgtgctgtcaatggggaggtgatgaccactcttgatggagaagagaggaagttggacgagcagatgctgatgattaccgacgaagggggtttgatcgccatcgccggggtgatgggaggagaagaaaccgaggtcggcaatgaaacgaaagatgttttgcttgaatccgcaaatttcgattttctcaacaatcgccgaacgtcccaaatactcaaattgaagaccgaagccagtgaacgtttcggaaaacggttgaatgcggacggaacaatgacggcggcgttaagagctgcagaattgtgtgtgtcgattgcaggagggactctggaacaccaggcagcagatctttatccaggtaagctcgcagatgaatcggtggatctcgatttggaatatcttgaaagggtcctgggaattaaggtggaaaagaacgaagtaaaccgaatccttgaggcgctggaatttacagtccagaacaaaacagaccaattgcttgaagtgacggttcctcatcatcgtcttgatatcgcgattcccgccgatttagtcgaagaaatagccagggtctatggttacaacaggatgccctcaactttgattcgggatgcgcttcctccccaaagagagaactttcaactccagggagtggaggcaattcgagatatcctggtcgcctcaggtatagatgaagtcattacttacaccatgaccaaccctcttgatgaatcgaatttaatgctgcaggagggattgaccagaagaa

SEQ ID NO: 301959 - DNA, 694 bp, Unknown
  Bacterial polypeptide expressing nucleotide sequence isolated from the Sargasso Sea
tatgtcagagataaaaaatattagagatcagtatatatcaaagcttgaaaatgatttaagcattgatcaaataaatgaaatcaaaacggagctctttggaaaaaatggtttaatttcatcaaaatttaaaacaatagggtcaattccagagactgatagaaaaaaatttgcatcagatttaaatcaagctaaagacgaacttcaaaatttgataacttctaaaattattgagatagaagcaaaaaaaataaacgaaaaattagaaaaagaaaaagttgatataactttacctgaaagaccattcgtcagaggaaaagttcatccagtatcacaaactattgatgaaatttcgtctattttctctgaaataggattcagtgttgaggaaggccctgatattgaaaatgaatataacaactttactgctttaaatacacctgacaatcatccagcaagagatatgcatgatacattttacttagatgaaaacaaagaggttttgttgcgaactcatacttcaccagttcaaatcagaactatgctaaaagacaaacccccatttaagatcattgctcccggaagaacttatagatctgatagtgatcaaacacactcaccgatgtttcatcaagtagaaggtttgcatatagatacaaatattaatatggggcatttgaaagggtgcttgaattat

SEQ ID NO: 301960 - DNA, 954 bp, Unknown
  Bacterial polypeptide expressing nucleotide sequence isolated from the Sargasso Sea
tatctgggccgcgtggttaaaggcatcaatgttaaagcgccgaccccgctgtggatgaaagaaaaactgcgtcgttgcggtattcgttcaatcgatgccgtggttgacgtgactaactatgtgctgctcgaactgggccagccgatgcacgcattcgacaaagaccgcattgaaggcggaattgttgtccgtatggcaaaagagggtgagaccctggtattgctggatggcagcgaagcgaagctgaatgcggatacgctggtgattgcggaccataacaaagcgctggcgatgggcggcatctttggtggcgaacattccggcgtgaatgatgaaacgcaaaacgtcctgctggaatgtgcattcttcagcccgctgtctattaccggtcgcgcacgtcgtcacggtctgcacaccgatgcttctcaccgctatgagcgtggtgttgatccggctctgcaacataaggccatggaacgtgcaacgcgcctgctgatcgatatctgcggcggcgaagcgggtccagtcattgacgtgacgaacgaagacacgctgccaaaacgcgcaaccattacgcttcgtcgtagcaaactggatcgtctgatcggacaccatattgcggatgagcaggtgagcgacattctgcgtcgtctgggttgtgacgtgacggaagggcaggatgagtggaaagcggtcgcgccgagctggcgtttcgatatggaaatcgaagaagacctggtcgaagaagtcgcccgcgtatacggttatgacaatatcccgaacacgccgattcaggcgggtcttatcatgggtacgcatcgtgaagcggatttatcgctgagacgtgtaaaaaccatgctgaatgacaaaggctaccaggaagtaattacctacagcttcgtcgacccgaaagtccagtcgctgctgcacccgggtgaagaagcgctgctgctg

SEQ ID NO: 301961 - DNA, 550 bp, Unknown
  Bacterial polypeptide expressing nucleotide sequence isolated from the Sargasso Sea
aaaattgatctaaaaaattttgatgagattaggtatattatacctggaagaacatacagatctgatcatgatgcgacacactctcctatgtttcatcaatgtgaaggcctagtacttggtaaaaatattaatatgggtcacttaaaaggatgtttaatagaattttgtagaacttattttaatgaagacaatttaccagttcgttttagacctagttatttcccttttacagaaccctcagcagaagtagatattggttgtaaaaaagaaaatgatggtagcctagtaataggtgagggagaagattggttagaaattttgggatcaggtatggtccatcctagagttttacaaggtgtaggaatagatccatcaaaatatcaaggatttgcatttggaatgggtctagaaagactaactatgttaaagtacggaatccctgacttaagacctttttatgatagtgatctaagatggttaaaacattatggatttatacccgttgacaatccaagcttacactctggtttgaatggtgtcttttcatgaa

SEQ ID NO: 301962 - DNA, 663 bp, Unknown
  Bacterial polypeptide expressing nucleotide sequence isolated from the Sargasso Sea
aatattataatttttctgcattgaatacacctgaaaatcatcctgctagagatatgcatgatactttctatcttaataattctaaagagttacttttacgaacacatacttctccagtacagattagaacaatgttaaaaggcaagccgccatttaaaataattgcccccgggagaacatacagacatgatagtgatcaaacacactcacccatgtttcatcaattggaaggtcttcacatagataaaaatgttaatatgggacatcttaaaggttgtttatattattttgtaaaaaaattttttgaagttgaaaaagtaaaaataagatttagacctagtcactttccttttacagaaccttctgcagaggtagatattggatataaaatccaagacggtaaaattaaaattggtgaaggagataaatggttagaaattttgggttgtggaatggtacatcctaatgttttaaaaaatgcgaaggtaaatccaaaactgtatcagggatatgctttcggtgttggaattgatcgattagcaatgttaaaatatggaattaatgatctaagagctttttttgaaagtgatattagatggttagaattttacggttttgatccacttgatgttccaacaaattatagaggtttaagcagatgat

SEQ ID NO: 301963 - DNA, 643 bp, Unknown
  Bacterial polypeptide expressing nucleotide sequence isolated from the Sargasso Sea
catggagcttgacgctattatcaatcaggcacaaagccagattgacgctgcacaagatgcagccacattagaccaagttagggtcgaattcatgggtaagaaaggtaaacttaccgacttacttaaagggcttggaaagttatctaacgaagaacgtcctgccgcaggccaaaagattaaccaagctaagcaggttattcagcaagctatttctgcaaaaggtgagtttttacgcactgaagagcttaacaaaaagctagcagaagaggcagtagatgtaacgctgcctggtcgcacagaaaagccaggaaacttacacccggttagccgcacgattgcacgcattgagtctttctttggtgagctaggcttttcagttaagactggccctgaaattgaagatggttttcacaacttcgacgcgctgaacattccagcgaatcaccccgcgcgtgccgaccatgatactttttatttcaacccagacatgatgcttcgtacgcaaacctctggtgttcaaattcgtactatggaagcggaaaagccaccattgcgtattatctcgccaggccgcgtgtatcgtaacgactatgaccaaacacacacgccgatgttcccaccagtggaaaggttgatggtttga

SEQ ID NO: 301964 - DNA, 613 bp, Unknown
  Bacterial polypeptide expressing nucleotide sequence isolated from the Sargasso Sea
aatgtccgaatttgaaaaaaaaattgctgagtataaatctaaaataaaatcctcctcgaaaattgaagaaatcgatttattaagatcagaggtatttggaaaaaatggtataataaatcttgaatttaaaaaacttgtagaattaccattagaagaaaaaaaatcattcgcagcaaatttaaataaaattaaacaagagttgcaagacatatacaagacaaaatcaacagagatattagataaagatattatcgaaaaagtagaaaaagaaaaaattgatataacattaccagaaaaagaatttaaaataggtaaagttcacccagtctcacaggtgatagatgaaatatcttgtattttttcagaaattggattttctgttgaagaaggaccagatgtggaaaatgagtataacaattttacagcactcaatactcctgaaaaccatccagctaaagatatgcatgatactttttatttagacaaagacatgaaaactatgctgagaactcatacatccccagtacaagtacgaacaatgcttaaaggcaaaccaccttttaaaattatagccccaggcagaacatacagaagcgatagtgatcaaactcat

SEQ ID NO: 301965 - DNA, 610 bp, Unknown
  Bacterial polypeptide expressing nucleotide sequence isolated from the Sargasso Sea
tatgcatgatactttttatttagatgataatcaaaaaattcttttaagaacccatacatcaccagttcaaattagaacaatgttaggcagcaagccaccatttaaaattattgtaccaggaagaacctatcgttgtgatagtgatcaaacacactctcctatgttccatcaacttgaagggcttcacatcgataaagatataactatgggtcatttaaaaggatgtcttgattatttcgttaaagaattttttgaagtcaaaaaacttcaaatgagatttagaccaagtcattttccatttacagagccctctgcagaagttgatattggttatagattagaaaacggtagaattattgtaggcgagggtgataagtggcttgagatattaggttgtggaatggtacatccaaacgttttaaaaaatgcaaaagttgattcaaaaaaattccaaggttttgcatttggaatgggaatagatagacttgcaatgttaaaatatggaattaatgatcttagatctttttttgaggcagattttagatggttaaatcattttggttttgatcctttagacgttccaacaaattatagaggtttaagcagatga

SEQ ID NO: 301966 - DNA, 919 bp, Unknown
  Bacterial polypeptide expressing nucleotide sequence isolated from the Sargasso Sea
gattatcaagtaaattatccaattgagaaaaaagcttcaatcatagcaattgaggataaagatatatgctttaggtatacaggaattcaaattgagtctgtaaatattaaagaatctccagattggctgaaaaaaagattaatttcaatcggtgaaagaccaataaacaatattgtagatataactaattatgtaatgtttgaattggggcaacctcttcatgcttttgatcaagataaaattgatggaagcaagatatatgttagaaaatcaaaatccaaagaaaaaatgcttactttagatggagagaatagggaacttcctaaggatagtatagttattgctgatcaaaaatctccaattggcttagcaggaataatgggaggaaaaagctcagaaataacatctgataccactaatgtgtttttagaagcggccaactttaattcttctatgataagatcaacctcaaaacaattaggattatctacagaagcttcaatccgttttgaaagaaatcttgatccaaaacttgcaatctatggtctctctagagcagcagatttgatagtagaacttgctggtggcaaaattaatcagaaaattcaagataactatccctcaagaattaaagatcaaaaaattattcttaacaaagataaattaagaaatcatttaggcttagatatatccaataatcaaattgatcaaactctagacaacttaaattttcattttacttttgatcaaatcaatcaaatctgggaaatagaaaaacctttttggaggacagatattcagattccagaggatattcatgaagagattgcgaggattattggatatgatgaaattccattagcttacttgtcaggcagtgtgccaaaatgggaaccaaataaatctttagatatcaaat

SEQ ID NO: 301967 - DNA, 904 bp, Unknown
  Bacterial polypeptide expressing nucleotide sequence isolated from the Sargasso Sea
aatgtcgaataatttaattgacaatcttaaggttgaattgagccaagtaaattcagaaaatgacttaatgaatttaaagtccaattatttggggaaaaaaggtgaaataaccaagttggcagctagcattaaaaatctaagtgttgaggaaaaaaaagaagttggttcaaaattgaatttactaaaaaaagaagcagagcttttaatttctgaaaagtttaagtttttaaagaatgaaataattaataagaagttagagagtgaaaagattgacattacattgccccaaagagaatcaaacctaggttcaattcatcccataactcagatattagatgaggttttagatatatttgaaagttatggttttcagatagttgaaggtccagaaattgaaaatgattattataatttcgaagccttaaatataccaaaagatcacccagcaagagatatgcaagatacattttatcttgaagacgaaaaagttttgagaacccatacatcaccaatgcaagttagaattatggagaacaatctcccaccaataaaaattatttcaccaggaaaagtctataggtgcgatagtgatgtaacacatactccaatgtttcaccaagttgaaggactattagttaatcatgatgtcagcttttcaaatttaaagagtattctaagtagtttttgctctgatttttttggaaaaaagatcaaaacaagattcagaccaagctattttccatttacagagccaagtgccgaattagatatagaatgggtggacaaatctggcgagaaaagatggatggaagttttaggttgtggaattgttaatccaaaagtttttgaatttgctaaatatgatttagatgaagtatcaggttttgcttttggaatgggatag

SEQ ID NO: 301968 - DNA, 841 bp, Unknown
  Bacterial polypeptide expressing nucleotide sequence isolated from the Sargasso Sea
cttggagaaaaacataattgatataatcaaaaaagcaaaagaacttagtcttaacttaaaacaagaaattaaccacataaaagatctaaaagaaattgatcttattaaaataaagtatacaggaaaaaaaggtttggttactttattaatgaagtctttggctgagttaaataatgatgatagggcaaaagcaggaagagctataaatataattaaaagggatatagaaaagatgataatatcccataaaagtttaatagaaaataaaatattaaatgaaagtttagaaaaagaaaagattgatataactctaccaggtaggccaaccttaagaggaggtattcacccaatttctaaaacaatggacgaaatcataagtattttaagtttattaggctttaatgtagaggaagggcctcatattgaggatgaatattttaattttacagcattaaatatacctgaggatcatccagcaagacaagagcatgatacattttacatgcagggtagcaataaaaaaaaattattacgtactcatacttcaccaatacaaattcgggtcatgaaagagaaaaaacctcctataaaaattatagctcctggaaacacatatagatgtgatgacgatgctacccattcccctatgtttcatcaaatagagggattggttgttgataaaaatatttctatggcgcatttaaaatggacaataaaagagttattagcctctttctttaatgtaaaagatctagttatgaggttcagaccttcatattttccatttactgagccctctgcagaagttgatatagggtgtgaggtagaagatggaaaatta

SEQ ID NO: 301969 - DNA, 560 bp, Unknown
  Bacterial polypeptide expressing nucleotide sequence isolated from the Sargasso Sea
tatgtctgatattaaaaaaatcaaagaagaatatttagataaactaagtgacgatttaaacttagataatgtaaatcagattaaaacagaattatttggtaaaaatggtgtaatctctaattcatttaaaaaacttggctcaatgccatcagaagacagaaaaaaatttgcgtcagatctgaattctataaaagatgaattacaagaaaagataaatagcaaactccaagaaattgaaactaaagaaattaattccaagcttgacaatgaaaaaatagatgtaactttgcctgagagagatattaatcaaggaaaaattcatccagtttcacaagtaattgatgaaatatcatcaatattttcagaaattggatttagcgtcgaagaaggaccagatgttgaaagtcaacattataattttacggcattaaatactccagataatcatccagcaagagatatgcatgatactttttatttagataataaaaaggaattgctcttaaggactcacacttctccagtccaagtaagaactatgttaaaaggtaagccgcctt

SEQ ID NO: 301970 - DNA, 616 bp, Unknown
  Bacterial polypeptide expressing nucleotide sequence isolated from the Sargasso Sea
atgtcagagataaaaaatattagagatcagttcatatcaaagcttgagaatgatttaagcattgatcaaataaacgacatcaaaactgaactctttggcaaaaatggtttaatttcatcaaaatttaaaataataggctcaattccagagaatgatagaaaaaaatttgcatcagatttaaataaagttaaagacgaacttcagaatttaataatttctaaaattaatgagatagaaggaaaaaaaataaacgaaaaattagaaaaagaaaaagttgatataactttacctgaaagaccattcgttagaggaaaggttcatccagtatcgcaaactattgatgaaatttcgtctattttctctgagataggatttagtgttgaagaaggccctgatgttgaaaatgaatataacaactttactgctttaaacacacctgacaatcatccagcaagagatatgcatgatacattttacttagatgaaaacaaagaaattttgttacgaactcatacttcaccagttcaaattagaactatgctaaaagacaaacctccatttaagattattgctcctgggagaacttatagatctgatagtgatcaaacacacgcac

SEQ ID NO: 301971 - DNA, 490 bp, Unknown
  Bacterial polypeptide expressing nucleotide sequence isolated from the Sargasso Sea
agaacatatagaagtgatagtgatcaaacacacactcctatgttccaccaactagagggtcttcatattgataaagatataaacatgggacacttaaagggttgtttaaactattttattaaagaatttttcgaagttgaaaaaattaaaatgagatttcgcccaagccattttccttttaccgaaccatcagcagaggtagatataggttacagaatagaaaataataaaattataattggagagggagacaaatggcttgaaatattaggttgtggaatggttcatccaaatgttttaaaaaattgcaaagtagatccaaataaatttcaaggtttcgcttttggcataggcatagatagactggctatgttgaaatacggaattaatgatttgagatctttttttgaatgtgattatagatggttaaatcattatggttttgacccattagatgtcccaactaattatagaggactaagtagatgaa

SEQ ID NO: 301972 - DNA, 771 bp, Unknown
  Bacterial polypeptide expressing nucleotide sequence isolated from the Sargasso Sea
gatgcctgacaatctttcagatctgtcaaaatcagcaacccaagaaataaacgaatgttcatcaacgactgaacttgattctctcagggtaaaatatctaggcaaaaagggagctattacaatagctctgaaatcagtatcctctgtcgacccaaaggatagacctgcatacggaaagaaaatcaatgaactcaaatctttgattcaaggtacgctttctcaaaaaagagcatctttacaaaaaaaagaaattaatcagagtatcaatgataagaaaatagatgtctcactgcctggaagaagcaactttggtgggcatagacatcctgtaacaaaaactttacttgaaattgaagagatattttatggcgctggctttgcggttgtagacggtcccgaaattgaagatgagtatcataacttcactgccttaaatattccaagtaatcatccagccagagctatgcacgacactttttactttaattctgaatttctattaagaacccatacatcaccaatccaaattcgcagcatggaaaaagaaggcgtcccgataagggtcattgcaccaggaaaagtttatcgaagagattctgacataacacacacgccaatgtttcatcaaattgagggcttggtaattgataaaggaataaatttcagccaccttaaaggaatcctgcatcaatttattgatacattttttgaagaaaacactgaggtacgtttcagaccttcctattttccttttacagaaccatcggccga

SEQ ID NO: 301973 - DNA, 850 bp, Unknown
  Bacterial polypeptide expressing nucleotide sequence isolated from the Sargasso Sea
aatctgaactattttggaaaaaatggaattatatcgaatgaatttttaaaattaggttcgatttctgtagaagaaagaaaaaaattagcctcagatttaaatagtattaaagatgaacttcaaaataaaatatcaatcaaaattcaagaaattgaaactaaagaaattaacataaagcttgagaaagaaaaaattgatgtaactcttccagaaagaaacattgaaattggtaaaattcatccagtctcccaggtaatagatgaaatttcatctatattttctgaaataggatttagtgttgaggaaggcccagatgtagaaaatgaatataataattttacagcattaaatacaccggataaccatccagctagagatatgcatgatactttttaccttgataataataaggaattacttttgagaacacacacatctccagttcaggtaagaactatgctaaaaggtaaacctccttttaaaataattgctcctggacgaacttacagatcagatagtgatcaaacccatgctccgatgtttcatcaagttgagggacttcatatagataagaatataaatatgggacatttaaaaggatgtttaaattattttattaaggagttttttgaagttgataaaattaaaatgagattcagaccaagtcattttccatttactgaaccttcagcagaagtagatataggatatgaaattaaaaatggaaagatagtaattggtgaaggtaataaatggttagaaattctaggctgtgggatggttcatccaaatgttttaaaaaatgtaaatgttaatccaagtaaatatcaaggatatgcctttggaattg

SEQ ID NO: 301974 - DNA, 427 bp, Unknown
  Bacterial polypeptide expressing nucleotide sequence isolated from the Sargasso Sea
gagagctcattgtttttttcatcaagtagaaggattatatattgataaaggagtgtcatttgcagatttgaaacaaacccttctatattttgctcaagagttatttggatctaaaactaaaataagacttaggccttcttattttccttttacagaacctagtgctgaggtagatatatcttgttcaatatgttctgctaaagggtgctctgtttgtaaatatactggttggcttgagattttaggatgcggaatggtggatcctaatgtattagaatcatgtggaatagattctaatcttttttcaggctttgcttttggtatgggaatagaaagaatagcccaattaaaatataaagtaagtgatttgcggtactattctgaaaatgacattcgttttttagatcagtttaaatcagctttataa

SEQ ID NO: 301975 - DNA, 856 bp, Unknown
  Bacterial polypeptide expressing nucleotide sequence isolated from the Sargasso Sea
tatgcaatttagtagaaattggctcaaggattttattgatctaaatatttcaactgaagatatttgttcacaactgactatggcaggtatagaagttgatggctatgattcttttcattccaaaataacaggtaaagattcaataataaaattggatataacacctaatcgtggtgattgctttagtgtttttggagtagccagagagttggcagttataaataatataaggctaaagaatccaaaaattaaagcaattaagggctcttttaaagaagacttgaaaattcaggtatgccaagaagcaccaagatatgttggaagatctataactaatatagatataaaagcacaaacactacctttagttgcagaaagattagtaataagtgatcaaaaactcattgacccagttgtagacataaccaactacgtactcttggagctaggtcagccccttcatgcttttgatagagataagttagaaggagatatttatgtaaggaaggcaaaaagagatgaaggtctaactctacttgatgacaaagaaatcaatttaaatcaagattacatagttatttctgatgaaaagaaagcaatagccctagctggaattatgggaggtaagaacacttgtgttgcttcaaatactaagtcaattttcttggaaagtgctttctttaaacctacggctattagaggaagggcaagaagacttggttttcaaacagatgcttctataaggtttgaaaggggagttgattatgagatccagctgcttgctgttgatagagcaagtgaaattcttcatgaaacagtaggcggtgaatttggaacaatagagaaagtaaattaa

SEQ ID NO: 301976 - DNA, 496 bp, Unknown
  Bacterial polypeptide expressing nucleotide sequence isolated from the Sargasso Sea
atgttatttgcgaactcatacatcaccagttcaaataagaactatgacacactccaagccaccatttgctttttcatctgctggtaaagtttacagaaaagatgatgactctactcatcttccaatgtttcatcaaattgagggaatatatgttgataaagatgttaattttgcaaatttaaaagatttaatacataaaataatttacacgatatttgatgattcaactaagatcagatttagaccatcatattttcctttcactgaaccatcagctgaagtggatatcctttctgaagatggaaaatggttagagattcttggctgcgggattgtaaacccgaaggttctccaaaattgcaaaattgattctaaagaatttagtggcttagcttttggattaggcattgagcggatagctatgctcaaatttggagtgactgacataagagagttttataaatctaatttagatttcttaaatcaatttaaatga

SEQ ID NO: 301977 - DNA, 622 bp, Unknown
  Bacterial polypeptide expressing nucleotide sequence isolated from the Sargasso Sea
aatgagtgatttggataaaataaattctatttttaacgcaaaaattgactctgtcaaaaccaaagaggatttacaaaatgttaagacagagttttttggaaaaaacggtcaaatcactaaacaatttaaaactcttggttctttagaacccgataaaagaagagactttgcttctaatttaaataaaattaaagacgatttaacaaatcaaattgagcaaaaagattttgaaatcagcaatgcagaaataattgaaaaattaaaaaatgaaaaagttgatgtaactttaccaattcgaccttatcaacaaggaaaaattcatccagtatctcaagtgatagatgaaatttcctctattttttccgaaattggttttactgttgcagaaggtccggatgttgaaactgagtataataattttacggcattaaacacacctgaagatcatcctgcaagagatatgcatgacacattttatttagaaaaaaataaaaaaattcttttgagaacacacacttctccggttcaaattagagcaatgcttgatggaaaaccaccatttaaaataattgttcctggaagaacttatagatgtgatagtgatcaaactcatgctccaatg

SEQ ID NO: 301978 - DNA, 838 bp, Unknown
  Bacterial polypeptide expressing nucleotide sequence isolated from the Sargasso Sea
aatgattattaccctcccttggcttaaagagcatttaaaaactaaagctaatcaaactgagataatcaataaacttacaaatattggattggaagttgagggggttaaagaaaacaataatcaacttaaagaattaaaaatagcacaaatcataaaagcagaaaaacatcccaatgcggataaattaaaagtctgtgatgtgaatattggaggaaataaaattctaaaagttgtttgtggagcgccaaatgctaaagatggactaattacggtttacgctcctccaggcactataattccaaaaacaaaacttgaactaaaaatagttaaaattagaggcgtagaatctactggtatgttgtgttctgaaagtgaattaaatatttcaaatgaaagcgatggtatcattgaattatcaaacaaagaaaatgaaattggtaaaagtttctttaaatccaaatctgaaaaatcaattgatatttcaatcacaccaaatagagcagattgtttaggtgtaagaggaatagcgagagatttgtcatctactggaattggtaaactaataccacttaagaaaaaaaaatttaatcaatctctaaaaaatttgatcaaaatatcagttaagaatgatcctaatcaaggttgtaaaatatttgggagctgctatataaaaaatatttctaataaagaaagtccagagtggttaaaaaataaacttatagccatcgggctaaaaccaatttcagcagtagttgatattactaattatgtaatgtttgatttgaaccgtcctttacacgcatatgacgctgataaaattgatagtgaaatcattgtt

SEQ ID NO: 301979 - DNA, 739 bp, Unknown
  Bacterial polypeptide expressing nucleotide sequence isolated from the Sargasso Sea
atgagtgatttggaaaaaataaattctatttttaacgctaaaattgatactgtcaaaaataaagaagatctacaaaatcttaaaactgaattttttggaaaaaacggtcaaattactcaacaatttaaaactttagtaaacttaaatcctgaaaaaagaaaagaatttgcttctgatttaaataaaattaaagatgattttacaaatcaaattgaagaaaaatcttttgaattagataatctagaaataaatgaaaaactcaaaaatgaaaaagttgatataactttaccgattagaccttttcaaaagggtaaaatacatccagtgtcgcaagtaatagatgagatctcatccatattttctgaaattggattttctgtagctgaaggacctgatgttgagactgaatataacaatttcacagctttgaatacaccagaagatcatcccgcaagagatatgcatgacactttttatttagagaaaaataaaaagctgctgttgagaactcatacttcaccagttcaaattagaacaatgttgaatggaaaacccccatttaaaataattgtaccaggtagaacttataggtgtgatagcgatcaaacacacgctccaatgtttcatcaacttgaaggcctccatatagataaaaatattacaatgggtcatcttaaaggttgtttagattactttataaaagaattttttgaggttaagaatgtgaaaatgagattta

SEQ ID NO: 301980 - DNA, 538 bp, Unknown
  Bacterial polypeptide expressing nucleotide sequence isolated from the Sargasso Sea
aatgctaggcttagaagtagatggatatgaaaaacttaaatctaaaataactggtgatgactcaattattaagttggatatcactcctaataggggagattgttttagtatcttaggaattgctagagagctatcagcattaaatggagttaaggttattttgcctagcaggcaaaaaataactgaaactatagatagcccaataaatgtagatatttgcgatgaatctcctagatacgtaggaagatatattgaagggataaatctaagtaagaaagtctctccattaatcgtcgaaagacttaaattaagcgatatcaggtctattgaccctatagtagatataactaattatgttttattagaaactggacaacctttacatgcttttgatgcagaaaaaatttctaatggtctaagtgtaagacttgccaaagataaagaaaaaataaaacttcttgatgaacaagttctaaaattatctaaagattgcttggttataacggataaatctcagcccagttgctttagccaggaa

SEQ ID NO: 301981 - DNA, 273 bp, Unknown
  Bacterial polypeptide expressing nucleotide sequence isolated from the Sargasso Sea
gatctgatacagatattagattcagaccgtcttattttccattcactgaaccatctgctgaagtggatatcaaatggaagaaaggctggctagaaattttaggttgtggaatggtgcaccctaatgtcttagagatggctggtatagactctaaaaaattcacaggctttgcttttggtcttggacctgaaagaattgctatgcttaagcatgacatacccgacttgagagccttctttgaaaacgatataagatttataaaacaattctaag

SEQ ID NO: 301982 - DNA, 902 bp, Unknown
  Bacterial polypeptide expressing nucleotide sequence isolated from the Sargasso Sea
atccgttccacagaaattcctggtgtcgttattggaaaggttaaaacagcggaaaagcatcctgatgcggacaaattaaaattatgcacggtcaatgatgggaagcacgtacatcaggttgtatgcggtgcgccaaatgttgatgcagggcaaacaatagcattcgctaaagtcggttctgtactcccaggaaaattaaaaataaaaaaggccaacatacgtggcgtggaatcatcaggaatgatatgctcagaacgtgaactgaacttatcagatgaacatgaaggcataatggtgcttccaaaccatctcaagcctggagatgactttgtttcttcatatggatacaaatacatatcagtagagctcgatataacgcctaaccgcccagatgcattttcacatcaaggtgtggcccgggatattgcatgtaaaaccaatagagattttaaacagatatctgttgaaccgatcacggtaaaaggaaatgaatccatagatatatctatggaagaccatcatgactgccctagatatattggaggtattgtaaaaaatgtgaaggtcggaccaagtccagactggttagttgaaaggcttaaagcgggtggacagcgaagtataaataatattgtagatatatctaattatgtcctaatggaaatggggcatcccactcatatttttgatcatgattcattgaaaaacaagtccatatatgtaagaagagcagaaaaaggtgagacgctgaccacactggatgatcaaaaacataaattggataaaacacatttattaataacagatggtagggaacctttggcattggcgggtgtaatgggtggtgcaaatactgccgtgtctgatgatactagtatagtccaagtagagagtgcctattt

SEQ ID NO: 301983 - DNA, 376 bp, Unknown
  Bacterial polypeptide expressing nucleotide sequence isolated from the Sargasso Sea
tcatacccctatgtttcatcaaatcgaaggattggttgtagaagaagatgcttctttctctcagttgaagggattactgaatgattttttagaagacttctttggtgaagaggttgaattgagatttagaccttcttattttccatttaccgaaccttctgctgaagcagatatacgttggaataagaattggcttgaagttctgggatgcggcatggttcaccctaatgtccttgaaggtgtgggggtcgatacaaataaatatactggctttgctttcggattgggtgttgagaggatggctatgctgaagtatgacatacccgacctaagagccttctttgaaaacgatatacgtttcctagatcaattttaa

SEQ ID NO: 301984 - DNA, 438 bp, Unknown
  Bacterial polypeptide expressing nucleotide sequence isolated from the Sargasso Sea
tatggctggccttgaagttgatgggtttgaaaatatcaattctaagattactggaaaagactccataattaagctagacataacccctaatagaggagattgtttcagtattttgggagttgcaagagaattagctgttattaataatttaaaattacatttgcctgaaatacccaaagttcaagacacttttaaagatagtataaaaataaaagtttgtcctgaaggaccctcttattttggtaggactcttaaaaatatttctgtcgattctaaaacacaaccattaattgcagaaagattaaagctaagcgatcaaaagcttatagatcctgttgtagatataaccaattatattttacttgaacttggccaacctcttcatgcttttgatagggatacattgaatggaaacatttctgttagaactgctcagaa

SEQ ID NO: 301985 - DNA, 847 bp, Unknown
  Bacterial polypeptide expressing nucleotide sequence isolated from the Sargasso Sea
agataatgatttaaatatagaaagtgtaaatcaaattaaaacacagttattcggtaaaaatggacaaatttctaatttttttaaaactttaggatctttgccgactgatgatagaaaaaaatttgcatcagaattaaattctataaaagatgaactacaagaaaaaataaattctaaacttcgagaaatcgagacaaaagaaattaattctaaacttgtcaatgagaaagtagacgtaactttgcctgaaagagaaattaatcaaggaaaaatacatcctgtttcacaagtaatagatgagatatcctcaatattttctgaaattggcttcagtgttgaagagggtccagacatagagaatgaacattataattttactgcattaaatacaccagataatcatccagctagagatatgcatgatactttttatttagataacaataaagaattattactaagaactcatacatcacctgttcaagtaagaacaatgttaaatgggaaacctccatttaaaattatagctccaggcagaacatatagatctgatagtgaccaaactcattctcctatgtttcatcaagttgaaggacttcatattgataaagatattaatatgggccatctaaaaggatgcttaaactattttataaaatcattttttgaagtggacaaaatcaaaatgagatttagaccaagccactttccttttactgagccatctgcagaggtagatattggttatgaaataaaaaatggaaaaattgttattggcgagggtgataagtggttagaaattctaggttgtggcatggtacatccaaatgtgcttaaaaatgtaaaa

SEQ ID NO: 301986 - DNA, 801 bp, Unknown
  Bacterial polypeptide expressing nucleotide sequence isolated from the Sargasso Sea
taaagcttgagaaagaaaaaattgatgtaactcttccagaaagaaatattgaaattggtaaaattcatccagtctcccaggtaatagatgaaatttcatctatattttctgagataggatttagtgttgaggaaggcccagatgtagaaaatgaatataataattttacagcattaaatacaccggataaccatccagctagagatatgcatgacactttttatctagataataataaggaattacttttgagaactcacacatctccagttcaggtaagaactatgctaaaaggtaaacctccttttaaaattatagctccgggacgaacttacagatcagatagtgaccaaacccatgctccgatgtttcatcaagttgaagggttacatatagataagaatataaatatgggacatttaaaaggatgtttaaattattttattaaggagttttttgaagttgataaaattaaaatgagattcagaccaagtcattttccatttacggaaccctcagcagaagtagatataggatatgaaattaaaaatggaaagatagtaattggtgaaggtaataaatggttagaaattctaggctgtggaatggttcatccaaatgttttaaaaaatgtaaatgttaatcctagtaaatatcaaggatatgcctttggaattggcatagacagactaggaatgttaaaatatggaattaatgatttaagagctttctttgagactgattatagatggttaagtcactttggttttgatccgattagatgtcccatcaaattataga

SEQ ID NO: 301987 - DNA, 796 bp, Unknown
  Bacterial polypeptide expressing nucleotide sequence isolated from the Sargasso Sea
tatggaaaattttaatcaaattgagtcggaaattttaaacaaaataaaaagtataaaagatcgcagttcatacgaatcaacaaaatcagaaatttttggaaaaaaaggaattatcactgaactttttaaaaagattggtagtttagaccaatcaaaaagaaaagattatgcttcaaaattaaattctttaaaaacaaaagtaactgaaatattagaaaaaaaacttgaaaactttgatcaatcggaaataaataaaaaacttaataacgaaaaaatagatgttactttacctggaagaacttattttacaggaaaaattcatccagtttcacaagttatagatgaagttacttctatattttctgaaattggattttcagttgaggaaggtcctgatgttgaaaatgaatactataatttttcagctcttaacacgcctgaaaatcatccagcacgagatatgcatgatactttttatcttagcaactctaaagatttacttttaagaacgcatacatcaccggtacaaattagaacaatgttgaaaagtaaaccgccttttaaaataatagctcccggaagaacttatagacatgatagtgatcaaacacattcacctatgtttcatcaattagaaggcttgcatattgatagaaatattaatatgggccaccttaaaggttgtttatattattttgttaaaaaatttttcgaggttgaaaaagtaaaaataagatttagacccagccattttccttttactgaaccttcagcagaagttgacattggatataaa

SEQ ID NO: 301988 - DNA, 283 bp, Unknown
  Bacterial polypeptide expressing nucleotide sequence isolated from the Sargasso Sea
tgctatagaattgaaaatgaaaaaattataattggagaaggtaataagtggttagaaattttaggatgtgggatggtgcatcccacagtgcttaaaaatgtaaaagtaaatccgaaaaaatatcaaggatttgcattcgggatgggtattgatcgattggcaatgttaaaatacggcattaatgatttgagagccttttttgaaacagattacagatggttaaattatttcgggtttgatcctttagatgttccaacaaactatagagggttaagtaaatgat

SEQ ID NO: 301989 - DNA, 919 bp, Unknown
  Bacterial polypeptide expressing nucleotide sequence isolated from the Sargasso Sea
gaggtcgaaggcgtaaaggaaaattctggtgaaactggaaaatttaaaattgcaaaagttcttaaagcagaaaaacatccaaatgcagataaattaaaagtttgcgatgtatctatcggtggtaaagaaattttacaagttgtttgtggagcacctaatgttagagaaggtctcgtaacagtttatgctacaccaggggcaataataccaaaaacaaaatttgaattaaaagtagctaaaattcgaggtgtagagtctaaagggatgctttgctctgagcatgaactaaatttatcagaaaatagtgaaggaataattgaacttaaaaataaagagagagatattggcaaaagttattttcaaagtaatttagaaaaagccattgatatttcaataactccaaatcgggctgattgtctaggaatgagaggtattgcaagggatctttcttctgtaggtgttggtaaattaattggaattaaaagaaaaaaaattaagcaagttgttaaacactctataaaaacatcgatcgcaaaagataaaaaccagggatgtgaaacttttggcagctgttacattaagaatataaccaacagagaaagcccagattggcttaaaaataaattagttactctaggtcttaaacctatttctgcagtagttgatatcactaattatgtaatgtttgatttaaatcgaccattgcacgcctacgatgctgacaaaataaataaagaaattatagttagaaattctaaagagggtgaaatatttgaaggactagataacaaaaaatataagttaaaaaaagatatgtgtgttatctctgataaatctggtgttctgggtttaggcggaattataggaggaacaactacttctacagaatttaagacaaaaaatatattattagaagctg

SEQ ID NO: 301990 - DNA, 812 bp, Unknown
  Bacterial polypeptide expressing nucleotide sequence isolated from the Sargasso Sea
aaagattaaccaagctaagcaggttattcagcaagctatttctgcaaaaggtgagtttttacgcactgaagagcttaacaaaaagctagcagaagaggcagtagatgtaacgttgcctggtcgcacagaaaagccaggaaacttacacccggttagccgcacgattgcacgtatcgaatctttctttggcgagcttggcttctcggttaaaactggccctgaaattgaagatggttttcacaacttcgacgcgctgaacattcctgcgaatcacccagcgcgtgccgaccacgatacgttttacttcaacccagacatgatgcttcgtacgcaaacctctggtgttcaaattcgtactatggaagcagaaaagccaccattgcgtattatctcgccaggccgtgtgtatcgtaacgactacgaccaaacacacacgccgatgttccaccaagtggaaggtttgatggttgataagaatgtcagctttaccgatcttaaaggtattttgcacgacttcttacatcacttctttgaagagtcactagaaattcgcttccgtccgtcttatttcccgtttactgagccttcagctgaagtagacgttatgggtaaaaacggtcagtggcttgaagtattgggctgcggcatggtgcacccaaatgtacttaaagcggtaggtatcgacccagaagagtacacaggttttgcctttggtatgggcgtagagcgtttaacaatgcttcgttacggtgttaacgacttacgcgcgttctttgaaaacgatcttcgtttccttaagcagttcaactaag

SEQ ID NO: 301991 - DNA, 896 bp, Unknown
  Bacterial polypeptide expressing nucleotide sequence isolated from the Sargasso Sea
tgatctaggacaagatgatgatggtatactcgaacttcctgatgacgcaccagttggtgaagatcttggagcatatcttaatctacccgataatatcctgaatctagatttaacgccaaatagaggtgattgtttttctctgataggtatagcacgtgatttgaatacggaacctaagagcaagttaaattattgttttaaaataaaaaataatattacttcaaaagtaaagtgtaaggttaaaacacctcaccctgacatttgcccaagatttgcatctcagacaatcgaaggtattgataacagagccagaacaccaatacacttgactgaaaaactcagaaaatctggtatacgaacaatcaacccggttgtagatattaccaattatgtgatgcttgagttagggcaacctcttcatgcatatgatctcaataagattactggcgtcgtcagcccaagatttgcaaagaataacgagacactgcaattattagatggtaatacaatcaagcttaataaaaatacgattgtggtatcagatgaatctggctcaatagggttagctggcatcatgggtggtaattcaacatctgtttctgataagactacttcagttttttttgaagcggcattctggccaccaaaattcatggcaggaaaagcgagagaatatggaatgcaaactgatgcatcattgagatttgaaagaggtgtggatccagatatacaggcttttgccattgaaagagctactcaacttttgctatcaattacaggaggtaaggcaggacctattgatgacataagaaataaaaaatatttaccaaaatcaaaatcaattagattgaggaaatctcgtttatataaaatcctcggtaaaaaaatacctaaat

SEQ ID NO: 301992 - DNA, 817 bp, Unknown
  Bacterial polypeptide expressing nucleotide sequence isolated from the Sargasso Sea
atggaaaattttaataaaattgaatccgatattttaaacaaaataaaaaatgtaagcaatcgcagctcttacgatgcaattaaaactgaaatttttggtaaaaaaggaattattacagagctttttaaaaaaattggaagcttggatcaaaatcaaagaaaagaatatgcttcaaaacttaattttctaaaaacaaaagtaactgaaattcttgaaaaaaaacttactgattttgatcagttagaaattgataaaaaacttaaaaatgaaaaaattgatgtaactttaccaggaagaacatattttgctggaaaaattcatccagtttcacaagttatagatgaagtaacttctattttttccgaaattggtttttctgttgaagaaggtcctgatgtagaaaatgaatattataatttttctgcacttaatacacccgaagatcatccagcaaaagatatgcatgatactttctatttagatcattctaaagaactgcttttacgaactcatacatctccagttcaaattagaacgatgttaaaaggtaaaccgccattcaaaataattgctcctggaagaacttatagacatgacagtgatcaaacacattcacctatgtttcaccagttggaaggtttgcatatagacaaaaatgttaacatgggccatttaaaaggttgcctgtattattttgttaagaaattttttgaagttgaaaaagtaaaaataagatttagacccagccattttccttttaccgagccttctgctgaagtagatattggatacaaaattcaagatggaagaattaaga

SEQ ID NO: 301993 - DNA, 666 bp, Unknown
  Bacterial polypeptide expressing nucleotide sequence isolated from the Sargasso Sea
aaagtgattttaacaattttactgctttaaatatacctcctcatcatcctgctcgtgagatgcaagacactttttatgtcaataatctcaatggtgaagacaatgttttgagaacacatacaagtcctgttcaagttagaacaatgcttaaatcaaaacctccaataaaaattattgtaccagggagaacctatcgaagtgattctgactctacgcatacacctatgtttcatcaagttgaaggcttagtggtaaacaaagatgctacaatggcagatttaaaatcaacacttattttatttttaaaagaattttttgaaattgataatttaaaatatagatttagaccaagctattttcctttcactgaaccaagtgctgaaatggatgttgcatataccaaaaaaaataacgttctaaaaattggagaaggagatgattggttggaaattttaggttgtggaatggttaatccaaaagttctagaaaactgtaatatagactcatcggtctaccaaggttttgcttttggaatgggcatagagcgtctgtctatgctaaaatatggaataacagatatgcgcggcctgtttgacttaaatattaaatggttagatcattatggtttttcgccactagatttaaaaactagatcggaaatttaaa

SEQ ID NO: 301994 - DNA, 690 bp, Unknown
  Bacterial polypeptide expressing nucleotide sequence isolated from the Sargasso Sea
ataatttcactgctttaaatatcccaaaagaacatccagctcgtcaagaacatgatactttttatctacaaccagatatgaaaggggctagaaaagttctaagaacccatacaagtccagtacaaataagaactatggaaagaattgatttagataattttgatgaaataaggtatataatacctggtagaacatatagatctgatcatgatgcaacacactcacctatgtttcatcaatgtgaaggtttagttcttggtaaaaatataaatatgagccatttaaaaggctgtttaattgaattttgtagatcttattttaatgaggaaaatcttcctgttcgttttagaccaagttactttccctttaccgaaccatcagcagaagttgatataggctgtaaaaaagaaacagatggaagtctctcaattggtgaaagtgaagaatggttggagattttaggatcaggcatggttcatcctagggtacttcaaggtgttggaattgaccctaacatatatcaaggttttgcttttggaatgggtttggaaagattaactatgttaaaatatggaattcctgatttgagacctttctacgatagtgatttaagatggttgaaacattatggttttattccagtagataatccaagtttacattatggtttaaatggtgtttttacatgaa

SEQ ID NO: 301995 - DNA, 830 bp, Unknown
  Bacterial polypeptide expressing nucleotide sequence isolated from the Sargasso Sea
cgaggagcgcatcacgctactcgatggagaggagcgcgctctcgcgtcggatactttggtcattgcggatcaccagaaagccctcgccatggccggtatcatgggtggagagggtagcgggatcagtggtgagacccgccatctcttccttgaagccgctttttttgcccccgaactgatggccggtcgagcacgacactacggcctgcacaccgatgcttcccatcgttacgagcgaggcgtggaccccgagctcgcgtatcaggcggttgagcgtgcgactcagctgttcattgggtgtgtcggtggtgaggcggggcctgtgacggatgtgacgtcatcggcagatttgcctcagcgtgagcctgtcacccttaaagctgcctcgatccgacggatgttgggcattgacctttcggccgatcaggtcacacggatctttacaggtttgggttttgcagttgaccccgacacagatagcggtagttggctttgcactgcgccaagttggcgctttgatatgggccgcgaagccgacctgctcgaggagatcgcgcggatttatggttacgataacattccggttgagcccgttctcggcgcggcatcagccaatgctgcggcggagtctgcaacaccgcagtcagtgatcaagcagcgattggtcgcccggggtttcaacgaagccatttccttcagttttttgagcccggagcttcagcagctgatcgacccggagatcgaaccggtcgcattgaagaacccgatctccaatgacctcgcggtcatgcgcacctcgctgattccaggcttgctgagcgcggcggcgc

SEQ ID NO: 301996 - DNA, 664 bp, Unknown
  Bacterial polypeptide expressing nucleotide sequence isolated from the Sargasso Sea
taaacatcctttaatttcaactcaagacgaaataatagatattttttgcggtttaggatactcagttgaaagtggccctgaaatagagactgatttttataattttgaatctctcaatatacccaaaaatcatcccgcaagagatatgcaggatactttctacttgggtgaaaatcgacttttaaggacccatacttctcctgttcagataagatacttagagaaaaatcctcctccagtaagaattattgctcccgggagagtatataggagagatgcagtagatgctactcattcccctgtatttaatcaggttgaggttttatgtatcgatcaagatattaattttagtcatttaagaggaacagttcttacctttttaaagaccttttttggagatattcctgtaagatttagagctagttatttcccatttactgaaccttctgcagaggtagatgttcaatggaaaggtaaatggttagaagtaatgggctgtggaatggtagatccgaaggtcttagaaaaattaggaatagattctgaaaaatggactggattcgcagctggattaggagttgaaaggttttgtatggtaagacatcagattgacgacatcaggaaattttatacaaatgaccttagattcttggaacagttctaa

SEQ ID NO: 301997 - DNA, 656 bp, Unknown
  Bacterial polypeptide expressing nucleotide sequence isolated from the Sargasso Sea
ccaatcaataaggtgaaattctctttagaaaaacttctatgttcttttgggtttgagattgcggagggtccagaaattgagagtgaaaagtataattttgatatgctcaatatcccctctacacatccagctagggagatgcatgacactttttatgtaaataataagaagagtgttttacgaacacatacatcaccagttcaagttagatgtatgctctcaaacaaaatgccaatagcttttatttctcctggaaaagtatacagaaaagatgacgattcaactcacctgccaatgttccatcagattgaaggaatatatgtagatgagaatgtgaattttgctcatctcaaagaccttatatataaaatttgcttttcactattcggcgataaaattaaattgcgctttagaccatcattttttccatttactgaaccctctgctgaagtcgacatactttttggtgataaatggctagaaattcttggctgtggcattgtgaatccaaaggtacttaaaaattgttcgatagatacaaaaaaatattcaggattagcatttggtttaggaattgagcgaatcgcaatgcttaaatatggagttaaagacattagagacttttataaatcaaacttagactttttaaggcaatt

SEQ ID NO: 301998 - DNA, 643 bp, Unknown
  Bacterial polypeptide expressing nucleotide sequence isolated from the Sargasso Sea
tattcttgaagaattatcttcccttggatttgaaattatcgacggacctgaaattgaaaccgaagaatttaattttgatatgcttaatattaaagaatcacatcccgcaagacagatgcatgacaccttctactgtaatgctaaaaaaaatgtcttaagaacacatacatctcctgtacaaattagaggattgcttgaagatggacctcctagggcttttatttccgctggtaaggtttatagaaaagatgatgattcaactcaccttccaatgtttcatcagattgaaggaatgtttgtcgataaagaagttacttttgctaatttaaagatgttaatacataaaatattatttcaaatctttaatacaaatgttaagttaagatttcggccttcatattttccttttacagagccctctgcagaggttgatataatgtctaaagacggcaagtggcttgaaattttgggatgcggaatagtgaatccaatagtcttagaaaattgtaagattgattcaaacatttttagcggtttagcttttggtttgggtgttgagcggatcgcgatgctcaagtatgaggtaaatgatattagagatttttacaaatcaaatttagattttttagaacaatttaaatga

SEQ ID NO: 301999 - DNA, 799 bp, Unknown
  Bacterial polypeptide expressing nucleotide sequence isolated from the Sargasso Sea
gaaagatgacgtaacccttccagaaaaagattttagattaggtaaaattcaccctgtatcacaagtaatagatgaaatttcctctatattttcagaaattggttttagcgtcgaagaaggtcccgatgttgaaacagagtattataattttacagcacttaatactccagagaatcatcctgctaaagatatgcatgacactttttatcttgaagaaaatatgaaaacattattaagaactcatacatcgcctgtccaagtaagaacgatgttaaatggaaaaccaccttttaagattatagcacctggtagaacttaccgaagtgatagtgatcagacacatactccaatgtttcatcaattagaaggacttcatattgataaaaatattacaatgggacatttaaaaggttgtttaaactattttataaaagaattttttgaattagataaaattaaaatgagatttagaccaagtcattttccattcacagaaccatctgctgaagttgatattggttatagaattgagaataataaaattataattggagaaggtgataaatggctagaaattcttggttgtggaatggtacatcccaatgttcttaagaatgcaaaagttgatccaaataaatttcaaggttttgcattcggaatagggatagataggttggctatgttaaaatatggaattaacgatttaaggtccttttttgaaagtgattatagatggttaaactactacggttttgatccacttgatgttccaacaaattatcgaggtttaagtaaatga

SEQ ID NO: 302000 - DNA, 938 bp, Unknown
  Bacterial polypeptide expressing nucleotide sequence isolated from the Sargasso Sea
gcaaagtggatattggtacttcaattcgttacaaatagtttgtggtgctaataatgtacaagcaaatttacatgtttttgtagctcctattggtgttcatttaaaagcaatcaatttaactattaaaagaagtgaaataagaggagtttctagcgaaggaatgatatgttctttagaagagttaggaattgaagataatagtgatggcatcgctattgtaaatgatgaacttgcattaaaacataaactaggttcatcatgctcacttttactcgatctggacgattatatctatgatttagctattactgcaaatagacctgatggaatgtctgtagtaggaatctcaagagaaatatctgctcttttaggaacaaagttaacctttccagaattaaaaaatatatataaaattgatcttcataaaaaatttgacctctgtaatgaagccattacaactaattgtctttattcaattagtcttattgaatctgttagtggaaaggaattatcaccacaatggcttaaagatcgtttaaataaatcaggaattaaatcaattaaccttgtagtagacataacaaattatattcttttagaacaaggacagcctttacatgcatttgataaaggaaaattaacaaaattaattggtagagatgttcttcctgaggatttttcggtaagaaaagctaaggaaaatgagagtcttttatgtttaaatggggagaaatatgaattaaatgaaaatattacaatagtgacttgtgatggtataccagttgctattgctggtgtaataggtggtttagagactgcagtagatgatgaaacatcttcaatttatcttgaaggagcagtttttaaccctgttactattagaaaatcatcaaaggaactaggtatcagaacagaatcaagcagtagatttgaaaaag

SEQ ID NO: 302001 - DNA, 592 bp, Unknown
  Bacterial polypeptide expressing nucleotide sequence isolated from the Sargasso Sea
agtagagactgaaaagtacaactttgacatgcttaatattaagaaaactcatcctgctagacaaatgcatgatacattttatgttaatcacaaatcaggtgttctaaggacacatacttcgccagtacagataagagcaatgctcaaaaataaacctcctcttgcttacttttccggcggtaaagtttataggaaagatgatgattcaactcacttaccaatgttccatcaaatagaaggtcttttggtagataaagatgtttcgtttatacacttgaaagatttaatttatgagatcgttacttccctttttggcgcagatgttaaattaagatttagaccgtcttactttccatttacggaaccctctgcagaggtagatattctttttaaagatcaaaataaatggcttgaaatattaggttgcggtattgtaaatccaaaagtgcttgaaaattgtaatattaaccctaacgatttcagtggacttgcatttggcttgggaattgaaagaatagcaatgctcaggcacggtgtaagtgatattagggagttctataagtcaaacttagattttttagatcaattctaa

SEQ ID NO: 302002 - DNA, 763 bp, Unknown
  Bacterial polypeptide expressing nucleotide sequence isolated from the Sargasso Sea
agaggaaaagttcatccggtatcacaaaccattgatgaaatttcatctattttctctgaaataggatttagtgttgaggaaggccctgatgttgaaaatgaatataacaactttactgcattaaacacacctgacaatcatccagcaagagatatgcatgacaccttttacttagatgaaagcaaagaggttctgttacgtactcatacttcaccagttcaaatcagaactatgctaaaagacaaacctccatttaagatcattgctccaggtagaacttatagatctgatagtgatcaaacacacgcaccaatgtttcatcaagtagaaggtttgcatattgatacaaatattaatatgggacatttgaaaggatgtttgaattatttcattaaagaattttttgaggtcgaaaaaataaaaatgagattcagacctagtcattttccattcacagaaccatcagctgaagtagatatcggttatgaaataaaagatggcaaaataattattggagaaggaaataagtggcttgaaattttaggctgtgggatggtgcatccaaatgtattaagaaatgtaaaagtagatccttctaaatatcaaggatatgcctttggcataggtatagaccgattagcaatgcttaaatacggcattaatgatttaagagcgttttttgattgtgattacagatggctaaatcattttggttttgatccacttgacgttccttcaaattacagaggtttaagcagatgaa

SEQ ID NO: 302003 - DNA, 743 bp, Unknown
  Bacterial polypeptide expressing nucleotide sequence isolated from the Sargasso Sea
tatgtcagagataaaaaatattagagatcagttcatatcaaagcttgagaatgatttaagcattgatcaaataaacgacatcaaaactgaactctttggcaaaaatggtttaatttcatcaaaatttaaaataataggctcaattccagagaatgatagaaaaaaatttgcatcagatttaaataaagttaaagacgaacttcagaatttaataatttctaaaattaatgagatagaaggaaaaaaaataaacgaaaaattagaaaaagaaaaagttgatataactttacctgaaagaccattcgttagaggaaaggttcatccagtatcgcaaactattgatgaaatttcgtctattttctctgagataggatttagtgttgaagaaggccctgatgttgaaaatgaatataacaactttactgctttaaacacacctgacaatcatccagcaagagatatgcatgatacattttacttagatgaaaacaaagaaattttgttacgaactcatacttcaccagttcaaattagaactatgctaaaagacaaacctccatttaagattattgctcctgggagaacttatagatctgatagtgatcaaacacacgcaccaatgtttcatcaagttgaaggtttgcatattgacacaaatattaatatgggacatttgaaaggatgcttgaattattttattaaagaattttttgaagtcgaaaaaattaaaatgagattaagac

SEQ ID NO: 302004 - DNA, 499 bp, Unknown
  Bacterial polypeptide expressing nucleotide sequence isolated from the Sargasso Sea
tgcaccaggtagaacttatcggtctgatagtgatcaaacacatgcaccaatgtttcatcaggtagagggtcttcatatagataacaacataaatatgggccatctaaaaggatgcttaaattattttattaaagaattttttgaagtagataaaattaaaatgagatttagaccaagtcattttccttttactgaaccgtcagctgaagttgatattggttatgaattaaaagatggcaaaataattataggagagggtgacaagtggttagagattttaggatgtggaatggttcatccaaatgttcttaaaaatgttaaagtagatccattaaaatttcaaggttacgcttttggtataggtatagatagattggcaatgttaaagtatggcatcaatgatttaagatcattttttgaaacagattatagatggttaaatcattttgggtttgatcctttagatgtaccttcaagctatagaggtttaagtagatga

SEQ ID NO: 302005 - DNA, 555 bp, Unknown
  Bacterial polypeptide expressing nucleotide sequence isolated from the Sargasso Sea
cttcacctgtacaaattcgaacaatgcttaaaaataaaccaccgattaaaatcattgtcccaggaagaacatatcgttgtgatagcgacatgacccatacaccaatgtttcaccaacttgaaggtttatatgttgataaaaatataaacatgggtgatctgaaaggttgtttagaatattttttaaaaaaattttttgaagacaataaattaaaaatgagactaagacctagtcactttccatttacagaacctagtgctgaggtagatataagttataaaatagaaaatgaaaaaatagtagttggtgaaggagacaaatggctagaagtactaggatgcggcatggttcatcctaatgttcttaaaaatgtcaaaatagactcgagtaaatttcaaggatatgcttttggtgtaggtattgataggcttgcaatgttaaagtatggaattacagaccttagatcattttttgaaggtgacattagatggcttgatcattatggcttcgactctaatgatgttccgacaaattatagaggattaagtaaatgaa

SEQ ID NO: 302006 - DNA, 872 bp, Unknown
  Bacterial polypeptide expressing nucleotide sequence isolated from the Sargasso Sea
aaatggcttcataaactcagagtttaaaaaattaggatcattaactgaagaggaaaaaaaaaaggtagcttcagaaataaataaagcaaaacaagaattgacgaaattatttggtgagaaatctttaaagctaaaagatattgaaatagaggagcaaattaaaaaagaaaaagacgacgtaacgttgccagaaaaagattttagaattggaaagatacaccctgtgtcacaagtaattgatgaaatttcatctatattttctgaaattggatttagtgttgaagagggtccagacatagaaagtgaatattataattttactgcattaaacacacccgaaaatcatcctgcaaaggatatgcatgatactttttatattgaggaaaatatgaaaactttactaagaacacatacatctcctgttcaagtaagaacgatgttaaaaggaaaaccaccatttaaaatcattgcgcctggcagaacttatagaagtgatagtgaccaaacgcatacgcctatgtttcatcaattagagggactgcatattgataaaaatataaatatgggtcatttgaagggatgcttaaactattttgtaaaagagttttttgaagttgaaaaaattaaaatgaggtttcgtccaagccattttccatttacagaaccttcagcagaagtcgatattggttatagaattcaaaataataaaattgtaattggtgagggagataaatggttagaaatacttggctgtggaatggttcatcctaatgttttaaaaaattctaaagttgatccaaaaaaatatcaaggctttgcctttggaatagggatagatagattggctatgttaaaatatggaattaatgatt

SEQ ID NO: 302007 - DNA, 238 bp, Unknown
  Bacterial polypeptide expressing nucleotide sequence isolated from the Sargasso Sea
aaatggttagaaatattaggttgtggaatggttcatcccaatgttctaaaaaatgcaaaagttgatccaaaaaaatatcaaggatttgcatttgggatgggtattgatcgtttggccatgttaaaatatggaattaacgatttaagagctttttttgaaacagattatagatggttaagtcatttcggttttgaccctttagatgtgccaacaaactatagaggattaagcaaatgat

SEQ ID NO: 302008 - DNA, 900 bp, Unknown
  Bacterial polypeptide expressing nucleotide sequence isolated from the Sargasso Sea
aagtgaatgtaaagagcctgaactttatcctgcccaaatcaaacataaaactgagttgccgatagatatttttgctcaagatcagtgtccgcgctacttgggtaggatagtaaaaaacatagatctaaatcaaacctcaccattatggttgagggaaaaattacgtcgctcgggtttaagaagtattgatcccgttgttgatgtgaccaattatgtcctactggaactggggcaaccaatgcatgcttttgattatgaaaagttgcatggtggtatccgtgtgcgaatggccgagaagaatgaaaagttgacacttttagatggcaaagaagtcactttaaagccagatattcttgtaatttcagatcacgaaaaagcggtagccatggctggaatcatgggtggcttggctacatctgtttccgaaaagactaaaaatgtattcctcgaatgcgcctttttctcgccgctggctatagctggtaaagctcgggcctatggccttcatacggatgcctctcatcgctatgaaagaggggtcgattatgaattgcaacacttagccatggagagagctacggagattttaatctcgatagtaggaggcgaagcgggaccgataactgagacactgggaaatttgccagaagattcctctgtggatttattgtttgctaacgttaagtcgattctgggtattgaaatacccgcagttgaaattaaggatatcttaacccggctgggttttttaatagaaaaagaagatcaagacggcttgactgttggtgtaccaacctatcgatttgatattagtcttgaggcagatcttgtcgaggaacttgttcgtgtttatggttacgataatgtaccaaagacatcaggtttttttcacagacactg

SEQ ID NO: 302009 - DNA, 493 bp, Unknown
  Bacterial polypeptide expressing nucleotide sequence isolated from the Sargasso Sea
aatgttactcagaacacatacttctcctatgcaagcaagaatcatggaaaaaaatgatccacctattagagtagtaataccaggaaaatgttatagatatgaagcaactgattcaactcatgaatggcattttaatcaaatagaaggtttagcaatagatactaatttaaattttactgatcttaaaggaactttatatgactttgctagaaaaatatttggttcagaaagaaaaattagattcagatgtgattactttccatttgtggagcctggtgtagatatgtctatagactggaataatgattggattgaaattttaggcgcaggcatggttcaccctaaagttttagaaagcgtaggttatgatcccgaaaaatattcaggatttgcatttggagttggagtagaaagaatagctatgattcgtcatggaataaatgatataagacatttttatggaaacgatatgagatttctatctcaattttaa

SEQ ID NO: 302010 - DNA, 385 bp, Unknown
  Bacterial polypeptide expressing nucleotide sequence isolated from the Sargasso Sea
agttactgcctttttcatcaagttgagggtatatacatcaatgaaaaggtatcctttgccgaattaaaaggatgtctagagtattttgtaaaacagatgtttggtccaaaaaagaaaatgagatttaggccatcatattttccatttacagaaccaagtgctgaggtggatatatgggatgaaaaaaggaaccagtggatggaaatacttggttgcggtatggtagaccctgctgtacttaaaaacgttggttatgatccagaaaaatggcatggctatgcctttggtatgggagtggagaggatagcaatgttaaaatataaaattgatgacattagaaacttttatagtggtgacataagagttttagaacaatttatatgat

SEQ ID NO: 302011 - DNA, 835 bp, Unknown
  Bacterial polypeptide expressing nucleotide sequence isolated from the Sargasso Sea
actgggcaaagactcaatcattaatttagatatcactccaaatcgaggggattgttttagtattcttggtgtcgctcgagagttatctgtaataaataatttaaaattaagcttgccgaatatttcttccattgatggttctttcaaagacgagatgaaagtaaaggcctgtccagagggcccctcttattttggaaggactataagagatatttctgtcaattctaagactttacctataatagcggaaagactcaaattcagtgatcagaaacttattgatcctgttgtggacataacaaactatatcctgcttgaacttggacagcctttacacgcatttgatcgagataaactaaggggaaatataactgtaagaactgctttaaatgaagaaaagattaagctcttagatgatcaagaattagtacttgatgactcttgtctggttatatctgatcaagaaagtgcagtagcatttgcaggaatcatgggaggtaaagaatctgctgtatctgcttcaacaaattcaatatttctcgagagtgctttttttaaaccctctgtaataagaggtaaagctagacgctatggctttcaaacagacgcatctcttagatttgaaaggggagtggattataaaatacaggaaattgctatcgatagagcctctattttattgagagatactgttggtgggagatttagtgaaatcacttcatcaaccttaaagaatcaattaccaaaacaaaaaaaaataactttagatttagagagatcaaacgatcttttggggacaaagatttctaaacaagttgctttaagatatttttaa

SEQ ID NO: 302012 - DNA, 808 bp, Unknown
  Bacterial polypeptide expressing nucleotide sequence isolated from the Sargasso Sea
tgaagatacagttaatgatcaaaaaattataattgaaaacaaagatttagaaaaaaaattaaaacatgaaagtgttgatataactttacctcataatgaggaagtaattggaaaaattcaccctatctcacaaacaatatttagtattatagaaatttttggaaatttaaattattctgttcaagctggaccagatattgaaagtgattttaataatttttctgctttaaacattccacctcatcatccagcacgtgagatgcaagatactttttatgtaaataatagtaatggagaagataatgttttgaggacgcatactagtccagttcaagttagaacaatgcttaaatctaaacctccaataaaaattattgtaccaggaagaacatacagaagtgattcagactccacgcatacaccaatgtttcatcaggttgaaggattagtagtaaataaagatgcaacaatggcagatcttaaatcaacattaattttatttttgaaagaattctttgagattgataatttaaaatatagatttagaccaagttattttccttttaccgaaccaagcgctgaaatggacgttgcttatacaaaaaaaaataatgttttaaagattggcgaaggtgatgactggttagaaattttaggatgcggaatggtaaatccaaaagttttagaaaactgcaatatagactccacagtttaccaaggctttgcatttgggatgggaatagagcgactctcaatgttaaagtatggaataacagatatgcgtggtctttttgatttaaatgttaaa

SEQ ID NO: 302013 - DNA, 361 bp, Unknown
  Bacterial polypeptide expressing nucleotide sequence isolated from the Sargasso Sea
tttgaagtagataaaattaaaatgagatttagacctagtcactttccttttactgaaccatctgctgaagttgatattggatatgaaatgaaagatggaaaaataataattggagaaggtaatcaatggctagaaatcttaggatgtggaatggttcatccaaatgttttaaaaaatgtaaaaatagatccaacaaaatttcaaggttacgcatttggtattggaattgatagacttgcgatgttaaaatatgggatcaatgatttaagagcattttttgactgtgattatagatggttaaatcattttggatttgatcctttggatgtaccaacaaactatagaggccttagtagatgaa

SEQ ID NO: 302014 - DNA, 511 bp, Unknown
  Bacterial polypeptide expressing nucleotide sequence isolated from the Sargasso Sea
tttaaaataatagtacctggaagaacttacagatgtgacagtgaccagacccacgccccaatgtttcatcagcttgaaggtcttcatatagacaaagggattacaatgggacatttaaaaggttgtcttgattattttataaaagaattttttgaagtcaaaaatgtaaaaatgagatttagaccaagtcattttccttttacagaaccatcggcagaagttgacattggttataaaattgaaaaaggaaaaattgttattggagaagggaatcaatggttagaagttttaggatgcggaatggttcatcctaatgttttaaaaaatgtaaaagtcgattcaaagaaataccaaggatatgcttttgggataggaatcgatcgattagcaatgttaaaatatggaattaatgatctaagagctttctttgaggcagattataggtggttaagtcattttggatttgacccattagatgttccaacaaactatagagggctaagtaaatgat

SEQ ID NO: 302015 - DNA, 479 bp, Unknown
  Bacterial polypeptide expressing nucleotide sequence isolated from the Sargasso Sea
atctgatagtgatcaaacacactcaccaatgtttcatcaagttgaaggtctacatatagataaagatattaacatgggtcatttaaaaggttgtttaaattattttataaaggaattttttgaggtagatagtataaaaatgaggtttagaccaagtcactttccttttacagaaccctctgcagaagttgatataggatacaaaatcaaagatggaaaaattataataggtgaaggtgataagtggcttgagattttgggatgtggaatggttcatccaaatgtcttaaaaaatgtaaaagttgatccatcaaaatttcagggatatgcttttggcattggcattgataggctggctatgctgaaatatggtatcaatgaccttagatctttctttgattgtgattatagatggttaaatcattttggatttgaccctttagatgtaccaacaaattatagaggtttgagtagatgaa

SEQ ID NO: 302016 - DNA, 356 bp, Unknown
  Bacterial polypeptide expressing nucleotide sequence isolated from the Sargasso Sea
tcaggttgaggttttgtgtatcgatcaagatattaattttagtcatttaagaggaacagttcttacatttttaaagaccttttttggggatattcctgtaagatttagagctagttatttcccctttactgaaccttccgcagaagtagatgttcaatggaaaggtaaatggttggaagtaatgggatgcgggatggtagatcctaaggttttagaaaaattagaaatagattctgagaaatggacaggattcgcggctggattaggagttgaaagattttgtatggtaagacatcagattgacgatatcagaaaattttatacaaatgatcttagatttctagaacagttctaat

SEQ ID NO: 302017 - DNA, 872 bp, Unknown
  Bacterial polypeptide expressing nucleotide sequence isolated from the Sargasso Sea
aatgtccttagtggtaaaaatcaaatcggttaaaagcgattttttaactgatttagataccttccataaacaggatgcagacttacctgctttacgtcagaaatatttagctaggaatggattggttgcagatcttttcaaaatgcttggtcaggtatctagcgaagatcgacctcaatatggtcaattattaaatgagctgaagaataatattgcttcaaaaatagattctctttccacagatttagaagattcagaaagtttaggtaacattgatatagcccttcctgggagagactacgacatcggtactatccatattcttgagcaaaccttaaatgacataaaaagaatttttaatgatattggtttttgtgttgagtacggtccagaggttgatgatgattatcataattttggtgcactaaattttcctgagcatcaccctgcgagagatatgcaggatacatttttcatagataaggatattgtcctgcgcactcatacttcaaatgtgcaaattcatttaatggaagaaaatgaaccaccactaagatttattgttccaggaagagtttatcgaaatgaggcaataagttataagagttattgtttgtttcatcaggttgagggattgtatgtagataaaaatgttagttttggtcaattgaaaggttgcctcgagtactttgtaaaaaaaatgtttggtgaaaaatgtaaaatgagatggagacctagttatttccctttcactgaacctagtgctgaggttgacatatgggatgatcaacgtaagcagtggatggaaatactaggatgtgggatggtcgaccctgatgtatttaataatgttggatatgattcaaatatat

SEQ ID NO: 302018 - DNA, 774 bp, Unknown
  Bacterial polypeptide expressing nucleotide sequence isolated from the Sargasso Sea
ataacttctaaaattagcaaaatagaaggaaaaaaaataaacgaaaaattagaaaaggaaaaagttgatataactttgcccgaaagaccattcgttagaggaaaagttcatccagtatcacaaactattgatgagatttcatctattttctctgaaataggatttagtgttgaggaaggtcctgatgttgaaaatgaatataacaactttactgctctaaacacaccagacaatcatccagcaagagatatgcatgatacattttacttagatgaaaacaaagaggttttgttacgaactcatacttcaccagttcaaatcagaactatgcttaaagacaaacctccattcaagatcattgctcctggaagaacttatagatctgatagtgatcaaacacacgctccaatgtttcatcaagtagaaggtttgcatattgatacaaatattaatatggggcatttgaaaggatgcttgaattatttcattaaagaattttttgaagtcgaaaaaattaaaatgagatttagacccagtcattttccattcacagaaccatctgcagaagtagatattggttatgaaataaaagatggaaaaataataatcggagaaggagataagtggcttgaaattttaggctgtggtatggtgcatccaaatgtcttaagaaatgtaaaagtggatccttctaaatatcaaggatatgcctttggaataggtatagaccgattagcaatgcttaaatacggtattaatgatttaagagctttt

SEQ ID NO: 302019 - DNA, 885 bp, Unknown
  Bacterial polypeptide expressing nucleotide sequence isolated from the Sargasso Sea
gagctaagcttagatgaaattaattcaatcaaaacagagttatttggaaaaaatggtcaaatttcatctttattcaaaactgtaggatcaataccagagtctgatagaaaaacttttgcagcagacttgaataaaataaaagatgaactgcaatctttaattttggaaaagataaaagaaatagaaacaaaagaagttaatcaaaaacttgaaaaagaaaaagttgatataactttacctgaaagaccttttgttagaggaaaaattcatcctgtatctcaaacgatagatgaaatttcatctatattttcagaaataggttttagtgttgaagaaggaccagatgtagaaaatgaatataataattttactgcacttaatactccagataatcatccagctcgtgatatgcatgacactttttacttagatgaaaataaggaagttttgttaagaacgcatacttcaccagttcaaattagaactatgttaaaagacaagccaccgtttaaaattattgctccaggtagaacatatagatcagatagtgatcaaacacatgcaccaatgttccatcaggttgagggccttcatatagataaagatattaatatgggtcatttaaagggatgtttaaattattttattaaagagttctttgaagtggaaaaaatcaaaatgagatttagaccaagtcatttcccttttacagaaccatctgctgaagtagatattggttacgaaattaaagatggtaaaattgttataggagaaggggatcagtggcttgaaattttaggatgtggaatggttcatccaaatgttttaaaaaatgttaaagttgatcctaataaataccaaggatatgcatttggcataggtata

SEQ ID NO: 302020 - DNA, 599 bp, Unknown
  Bacterial polypeptide expressing nucleotide sequence isolated from the Sargasso Sea
tatgtctgatattaaaaaaattaaagatgaatttttagaaagattaaatgaggatttaaacattgaaagcgttaatgaaatcaaatcagaattatttggtaaaaatggtaaaatttcaacttcttttaaaaatcttggatctttaccagccgaagaacgaaaaaaatttgcatcagatttaaattttgtaaaagatgagctacaagagaaaattaataaaaaaattcaagaaatagagattaaagaaataaattctaagctagagaatgagaagatagacgtaacactgcctgaaagaaatattgtacaaggtaagatacaccctgtttctcaagttatagacgaattatcctcaatcttttctgaaattggttttagcgttgaagaaggaccagatgtagagaatgagcattataattttacagcattaaatacaccagataaccatccagcaagagacatgcacgatactttttatttagatgataaaaaggaattacttttaagaactcacacatctccagttcaagtacgaacaatgttaaaaggtaaacctccatttaaaatcattgctcctggtagaacatacaggtctgata

SEQ ID NO: 302021 - DNA, 432 bp, Unknown
  Bacterial polypeptide expressing nucleotide sequence isolated from the Sargasso Sea
ggcttcatattgataaaaatattacgatgggtcatttaaagggttgtttaaattattttgtaaaagagttctttgaattagaaaaaattaaaatgagatttcgtccaagtcatttcccatttactgaaccttctgctgaggttgacattggatatagaattgaaaataataaaatcattatcggtgaaggagataaatggcttgaaatacttggatgtggaatggttcatccaaatgttcttaaaaattcaaaagttgatccaaataaatatcaaggttttgcattcggaataggcatagatagattagctatgttaaaatatggaattaatgatctaagatcattctttgagtgtgattatagatggttaaattattacggttttgacccattggacgtgccaacaaattacagaggattaagcaaatgaa

SEQ ID NO: 302022 - DNA, 859 bp, Unknown
  Bacterial polypeptide expressing nucleotide sequence isolated from the Sargasso Sea
ggctggcgagtttagcggtgtggtagtcggctatgtggttgaatgtggtcgtcatccggaagccgataaattacaagtcaccaaagtggatattggcacaggtgagttattagatatcgtttgtggtgcagccaactgccgtcagggcttaaaagtcgcagtagccacagtaggcgctgtattaccgggcgattttaaaattaaagccgccaagttacgtggtcagccatcgaacggtatgctctgttctttatctgagcttggcatggccgaaagttcagagggtattattgaactgcctgctgatgcgccgctgggccagaatattcgtcagtacctgacgttagatgaccaggcgattgaagtagatttaacaccaaaccgtgctgattgtttgggcttaaaaggtttagcccgtgaagtgggagtgttgaataatctggatgtctgtcagccagacattgctgctgttgctgcaacgatcagcgatgtaaaaggtattcagttatctgcaccacaggcctgtccacgttatttaggccgtgtgattcggaatatcaacacagcggctgtaacgcctttgtggatggtagaaaagttacgccgctctggtatccgttctattgatgctgtggtggatgtcaccaacttcgtcttgttggagctgggtcatccgatgcacgcttttgatttagccaaaatcgaaggggatatcgatgtacgtatggccaaagaaggtgaaaagctaactctgttggacagcaacgaagtcaccttaaatgccaatactctgctgattgccgatagccaaaaagccttagctatggccggtatctttggtggactgcacagtggggtc

SEQ ID NO: 302023 - DNA, 363 bp, Unknown
  Bacterial polypeptide expressing nucleotide sequence isolated from the Sargasso Sea
aatggaaaaattaaagccacctctaagggtaatagtgcctggtaggacttacagaagtgatcacgatgctactcacagtcctatgttccatcaatgtgaaggattagttataggtgataaattaaatatgagtcatttgaaaggctgcttaatagatttttgtagaattttttttggtgttgatgatttgccagtaaggtttagacccagttactttccttttactgagccgtctgctgaggttgatattggctgctcaagaaaaagtggagaactgataattggagagggagacgaatggcttgaaattttaggtagtggaatggttaatcctagggttttacaaaactgtggacttgatcc

SEQ ID NO: 302024 - DNA, 566 bp, Unknown
  Bacterial polypeptide expressing nucleotide sequence isolated from the Sargasso Sea
cttcactgccctaaatattccaagtaatcatccagccagagctatgcacgacactttttactttaattctgaatttctattaagaactcatacatcaccaatccaaattcgcagcatggaaaaagaaggcgtcccgataagggtcattgcaccaggaaaagtttatcgaagagattctgacataacacacacgccaatgtttcatcaaattgagggcttggtaattgataaaggaataaatttcagtcaccttaaaggaatcctgcatcaatttattgatacattttttgaagaaaacactgaggtacgtttcagaccttcctattttccttttacagagccatcggcagaagtcgatatattatccaaagaaaaaaattggcttgaaatactaggctgtggaatggttcacccaaaagttcttgaaaaccttggcattaatactgaaatctacagtggttatgcttttggtatgggtgtagaaagattggcaatgctgaaatacggcatcaaagacattcgatctttttatgaaaatgattttaatttcttaaaccagttctaaa

SEQ ID NO: 302025 - DNA, 709 bp, Unknown
  Bacterial polypeptide expressing nucleotide sequence isolated from the Sargasso Sea
aagcttgatattagtctccctggatttagcagtagaaaaggatctatccatcctgtaacacgaactattcgtgatgtttgcgatttttttgaaagaatgggttttgatattgaagctggaccagaagctgaaatagattactataattttgaagctttaaatattcctgaagatcatcctgcaaaagacatgcatgatactttttaccttaaaaatgaaggattattaagaactcatacttctccagttcaaataaggaccatggaaaagagcgaggcgccacacaggataatttgtccgggaaaagtctatagaaaagactcagatttaactcatactcccatgtttcatcagatagaaggtcttgtagtggaagagggtgcatcatttgctcaattaaaaggtttattgaatgattttttaacggatttgtttggagaagaggttgagttgagatttaggccctcatatttcccttttacagaaccctccgctgaagtggatataagatggaaaaaaaattggctagaggtattaggatgcggtatggtccacccaaatgttctaaagagtgtcggtgttgatactaaacaatacagtggatttgcatttggattaggcgtagagagaatggctatgctgaaatatgacattccagacttaagagctttttttgaaaatgatattcgctttttaaatcaattttaat

SEQ ID NO: 302026 - DNA, 906 bp, Unknown
  Bacterial polypeptide expressing nucleotide sequence isolated from the Sargasso Sea
ccttgggcttaagaaacatttaaatacaaaaaactcacttgatcatatagttagtgctttaacaaatattggtttagaagttgaggaggttattaagccaaatacaaatttaaaactttttaaaattgcaaaaatattaaaaacagagaaacacccaaacgctgataggcttaaggtttgtgatgttgatattggcggcaaagttgagaaagtagtttgtggagcaccaaatgctagaaatggactttctacagtttatgcacctccgggcgctataattccaaagagtggtataaaattagttgtcgcacaaattagaggagttgagtcacgaggtatgctttgttctgaaagcgagctaggaatttcaaatgcgagtgaaggaatcatagaaattgatgaaaaaaaagtcggtgataactttttcaaaaaaagtgatgaggtaatagatatttctatcactccaaatcgatcagattgtttaggcgtaaaaggtattgcgagagatttgagtgcttatggatttggaaaattaattgaagcaaaaaaaattagcttaaaagagcaatcaaaaaaaaaagtaaaagttgaaataaaaaaaaattctggatgtaatacatttggttcattgtgtatcgaaggtattaaaaattgcgaaagtccaaaatggttaaaaaaagatttagagtcgctgggtttgaaaccaatttcagctgtagtagatgttacaaattatgtgatgtttgaccttaatcggccaatgcacgcttacgatacagataaaattaatggaaatataattgtcagacaatcaaagaatggcgaaagttttgaagctttagacgaaaagaaatataatgttccagagcaagcatgcttgattacagacgaaaagaaaatattggg

SEQ ID NO: 302027 - DNA, 832 bp, Unknown
  Bacterial polypeptide expressing nucleotide sequence isolated from the Sargasso Sea
tgtaggtgcagttgtcccggtagcgttacctaaaagtgaaattaaagatggatttaaaattgataaacgagatatacgtggcgttgaatctaatgggatgatatgttcagcttcagaactggatttgtgggatgaccatactgggattttaaaactatccaatgatacaaaattaggctctgatttttccaaaatatatagttcaacagatactttgtgggaagttggtgtaactccaaatagaggagactgtatgtcacatttaggaattgcaagggaactatctaattatttcaacctaacacttaaagaaaactcaagcgcacttaaatctaacattgaaaatataataaaagtaaatagtggcaaaataaaagcatgtaattcatatcaatcaattgaaattgaaaattttactctaggtgattcaaatttaaatataagatacagactttcatctattggtgtccgagttattaataatgttgtagattacaccaattacgtacttcacgatattggtcaacctttacatgcatttgatagagataaattatttggaactatttctgtaagattcgcaaaagataatgaaaatttgaaaacattagatgaatatgagagaaagttaacctcggaagatttaataattacagatgatgataagccaattgcacttgcaggagttatgggagggtatgatactgaggtcacagattcaactattaatcttctaatagagagcgcttattttgataaagtatcgattatgaaaacatctagaagattaaatctaatgtcagatgcatcaatcagatttgagagaggtatt

SEQ ID NO: 302028 - DNA, 789 bp, Unknown
  Bacterial polypeptide expressing nucleotide sequence isolated from the Sargasso Sea
taacattacctgagagagaatttagtcgaggaaaaatacatcctgtttcacaagtaattgacgagatatcgtcaatattttcagaaattgggtttagcgttgaagaagggccagatatagagaatgagcattataattttactgcattaaatacgccttacaatcatccagcgagagatatgcatgacactttttatctagacaataataaagaattattattaagaactcatacttctccagtacaagtaagaacaatgctaaatggaaaacctccgttcaaaattatagctccaggcagaacatatagatctgatagtgatcaaactcattctccgatgtttcaccaagtcgaaggtcttcatatagataaagacataaacatgggtcatctaaaaggatgcttgaattattttataaaatcattttttgaagtggataaaataaaaatgagactcagacctagtcactttcctttcactgaaccatctgcagaagtagatattggttacgagataaaagatggcaagatagtaattggcgaaggagataaatggttagaaattctaggttgtggcatggtacatccaaatgtacttaagaatgttaaagtaaatccagataagtaccaaggttacgcttttgggattggtatagatagacttggaatgcttaaatatggaataaatgatttaagagctttttttgagactgactatagatggcttaatcattttggttttgatccattggatgtaccatctaattacagaggtataagcagatgaa

SEQ ID NO: 302029 - DNA, 534 bp, Unknown
  Bacterial polypeptide expressing nucleotide sequence isolated from the Sargasso Sea
caatgcttaaaggtaaaccaccatttaaaattattgctccaggaagaacttacagaagtgatagtgatcaaactcatacaccaatgtttcaccaattagaaggtctacatatcgataaagatattaacatgggtcaccttaaaggttgccttaactattttattaaagaattttttgaggtggataaaattaaaatgagatttcggccaagtcactttccatttacggaaccatcagcagaagtagatataggatatagattagaaaataataaaattattattggtgagggagacaaatggcttgaaattcttggatgtggaatggttcatccaaatgttttaaaaaattgtaaagtcgatccaaataagtttcaaggttttgcttttggcattgggatagacagattagctatgcttaaatatggaatcaatgatttaagatctttttttgagtgtgattatagatggttaaatcattatggttttgatcccctagatgttccaactaattacagaggtttaagtagatgaa

SEQ ID NO: 302030 - DNA, 487 bp, Unknown
  Bacterial polypeptide expressing nucleotide sequence isolated from the Sargasso Sea
aacttacagatgtgatagtgatcaaactcacgcttcgatgtttcatcagcttgaaggtcttcacatagacaaaggtattacaatgggacatcttaaaggctgcctagattattttataaaggaattttttgaagttaaaaatgtaaagatgagattcagaccaagtcatttcccttttacggaaccatcggcagaagttgatattggctacaaaattgaaaaaggaaaaatcgttattggtgaaggggataaatggttagaagttttaggatgtggaatggttcatcctaatgtattaaaaaatgtaaaaatcgatacgaaaaaatatcaaggatttgctttcggaatagggatcgatcgtttagcaatgttgaaatatggaattaatgacttgagagctttcttcgaggcagattatagatggctaagtcattttggatttgacccgttagatgttccaacaaattataggggactaagtaaatga

SEQ ID NO: 302031 - DNA, 793 bp, Unknown
  Bacterial polypeptide expressing nucleotide sequence isolated from the Sargasso Sea
gactgtcttggtgtaagaggtatagcaagagatttggcctctgcaggatttggtgaattaaagccattaaatattaaaaacattaagggtacttttaaaagtactaaaagatttgtaatttctgatgaacttctagaaaaaaaattagtacctattgttactagtagatactttaaaaatttaaataactctaaaagtccaaaatggatgcaacaaaggctagaagctattggccaaagatccatttcagcattagttgatataactaattatattatgtttgatttaaacaggcctctgcatgcttatgatggatctaaaatagaaggcgataaacttgagattagatttgcaaaaaataatgaaaaaataagtactcttaacgagaaggattactttttatcaaatgaggatattataatttctgatgcaaaaggtgctgatgatttagcaggcattatgggaggtatgagaactggtgtatctgacgaaacaactgaaatgtttctagaaattgctgtgtttgacccaataagtgtttctaaaactggaagaaaaataaatctaatttctgatgcaagatacagatttgaaagaggtttagatcaagattgtccagaatgggtccataattatatttcagatcttgtgatcgatatttgtggaggggaagttagttttttagaaaaaactggaagtggccctaactggtctcgagaaattatatttgaaatacaacaggtttttaacttaacaggagttaatgttaaggaaaaaacaattgaaaaaattc

SEQ ID NO: 302032 - DNA, 511 bp, Unknown
  Bacterial polypeptide expressing nucleotide sequence isolated from the Sargasso Sea
tttaagattattgcccctggaagaacttatagatctgatagtgatcaaacccatgcaccaatgttccatcaagtagaaggtcttcatatagataaaaatataaatatgggtcaccttaaaggttgtttaaattattttataaaagaattttttgaagttgataaaattaaaatgagattcaggccaagtcattttccttttactgagccttcagcagaagttgatattggttataaactaaaagacggtaaaataattattggagaaggagacaagtggttagaaattttaggttgtggaatggttcatccaaacgtgcttaaaaatgttaaagtagatccatcaaaatttcaaggatatgcttttggaataggaatagatagattggcaatgcttaaatatggtattaatgatttaagagcattttttgagactgattatagatggttaaaccattttggctttgaccctttagatgtaccttcaagctatagaggattgagtagatgaa

SEQ ID NO: 302033 - DNA, 868 bp, Unknown
  Bacterial polypeptide expressing nucleotide sequence isolated from the Sargasso Sea
atgtccgatattaaaaaaatcaaagatgattatttgaataaattaaatagtgatttaaatattgaaagtttaaatcaaataaaaacagaattatttggtaaaaatggaaagatttctaattcttttaaaaaattaggatctttatcaactgatgagcgaaaaaaatttgcatcggatttaaattcaataaaaaacgaacttcaagataagatagattctaaacttcaggaaattgaaacaaaagagattaactctaaacttgaaaatgaaaaagtagatgtaacattacctgagagagaatttagtcgaggaaaaatacatcctgtttcacaagtaattgacgagatatcgtcaatattttcagaaattgggtttagcgttgaagaagggccagatatagagaatgagcattataattttactgcattaaatactcctgacaatcatccagcgagagatatgcatgacactttttatatagacaataataaagaattattattaagaactcatacttcaccagtacaagttagaacaatgctaaatggaaaacctccatttaaaattatagctccaggcagaacatatagatctgatagtgatcaaactcattctcctatgtttcaccaagttgaaggtcttcatatagataaagacataaacatgggtcatctaaaaggatgcttgaattatttcataaaatcattttttgaagtggataaaataaaaatgagattcagacctagtcactttcctttcactgaaccatctgcagaagtagatattggttatgagataaaagatggaaaaatagtaattggagaaggagataaatggttagaaattcttggttgtgggatggtgcatc

SEQ ID NO: 302034 - DNA, 519 bp, Unknown
  Bacterial polypeptide expressing nucleotide sequence isolated from the Sargasso Sea
ttttttatgtaaatgaaaaatcaaatgttcttaggacgcatacctctccagttcaaataagaggtatgttagatagaaaaccacccctagcttttatatctgggggcaaagtatacagaaaagatgatgattcaactcatcttccaatgttccatcaagttgagggaatatatgtagatacagaagtgagcttttcaaatctcaaggagcttatttacaaaattatttatgaactcttcggtgatgatgtaaaaataaggttcagaccatcatactttcctttcactgaaccatctgctgaagttgatatattatcagaagataacaagtggctagaggtacttggatgcggaatagtaaatcctgtagtcttagaaaattgtggtattgatgcaaacaagtatagtggattagcttttggaattggaattgaaagaattgcaatgcttaaatataacgtaaatgatattagagaattttataaatcaaatctagattttttaaatcagttcaaatgaa

SEQ ID NO: 302035 - DNA, 667 bp, Unknown
  Bacterial polypeptide expressing nucleotide sequence isolated from the Sargasso Sea
atgcctgacaatctttcagatctgtcaaaatcagcaacccaagaaataaacgaatgttcatcaacgactgaacttgattctctcagggtaaaatatctaggtaaaaagggagctattacaatagctctgaaatcagtatcctctgtcgacccgaaggatagacctgcatacggaaagaaaatcaatgaactcaaatctttgattcaagatacgctttctcaaaaaagagcatctttacaaaaaaaagaaatcaatcagagtatcgatgataagaaaatagatgtctcactgcctggaaggagcaactttgctggacataggcatcctgtaacaaaaactttacttgaaattgaagagatattttatggcgctggctttgcggttgaagacggtcccgaaattgaagatgagtatcataacttcactgccctaaatattccaagtaatcatccagccagagctatgcacgacactttttactttaattctgaatttctattaagaactcatacatcaccaatccaaattcgcagcatggaaaaagaaggcgtcccgataagggtcattgcaccaggaaaagtttatcgaagagattctgatataacgcacacgccaatgtttcatcaaattgagggcttggtaattgataaaggaataaatttcagcc

SEQ ID NO: 302036 - DNA, 826 bp, Unknown
  Bacterial polypeptide expressing nucleotide sequence isolated from the Sargasso Sea
tgattatttaggtaaaaagggtaaagtatctcaattattcaacaattttaaatcagtaccattaaataaaaaaaaagaatttggtcaacatttaaatattttaaagactaatactcaaaataagatcaaagctttaatacaaacagcctctgaaaaaaatcaaaatattaattctaatacagattttacaattccaggacagccaatagaaaatggatcaaggcatccaatttcaattataagagatagagtaataagtgttttttcaaacatagggttttcagtgtctgaaggtcctgagattgaagatgattggcataattttaccgctttaaactttcctgaggagcatcctgctcgtgatatgcaagatacttttttcatcaacaaagatatttctttaaggactcatacttcttctgttcaggttagagttatggaaaataacacgccaccaattagaacaatttcacctggtagagtatatagaaatgaaacaatatctgctagagctcattgcttttttcatcaagttgaaggattgtatattgacgatgatgtttcatttgcggatatgaaacagactcttctctattttacaaaatctatttttgggaacgatattgaaattagattacgcccatcttattttccttttactgaaccatcagctgaagtagatgtgtcatgttccatttgtaaacaaaaaggatgtaatgtttgtaaatattctggatggttagaaattatgggttgtggaatgatagatccgaatgttttagaaaattgtaatattgattcttcaaaatatagtggatatgctttt

SEQ ID NO: 302037 - DNA, 890 bp, Unknown
  Bacterial polypeptide expressing nucleotide sequence isolated from the Sargasso Sea
agagagattacgcatcacatacatgggcaggaaagaggggtccctgtccgtgttacttcgcgaattaagcactttggattcttcagaacgccccgcaattggtgccgaagtcaatcgtgttaaagatataattcaaaatgctctaaaagaaaaaaagagcgaactaactcctgcagaccttattgccgactctatagaagaccttactctgcctggacgttttaggtggatgggtggaattcacccagttaatcaggtaatcgatgagatctggcagatttttcgaggattaggttttacacgtgtccgtgggcctgaagttgacgatgaatggcataacttcgaagccttaaacacaccgcttgatcatccggcagctgatgaacaggatactatatacttaaataatgtttcagcagagtatcttacgtttccgttactccgaagtcacacttctccagtacagattagagttatggagagctatgaacctccgattaggatattggctccggggatggtttataggagggacacatcagatgctacacacacaccagcttttgctcaaattgaaggcttggtcattgatgagggcatcacgttcttagatttcaaagctaccttagctgaatttgcacgtagattttggggtccagatacaaaaatccgttttcggccatcattcttcccgtttactgaacccagtgctgaagtcgatgtaaaacgccagcttactatgcgagacggcactaaggtcgaatccgattggatagaaattatgggtgctggtatggtggatcccaatgtgcttgagaacgttggttacgatgccgagcgatatactggattcgcttttgggatgggacctagtcgaattgcacttctga

SEQ ID NO: 302038 - DNA, 767 bp, Unknown
  Bacterial polypeptide expressing nucleotide sequence isolated from the Sargasso Sea
atcttctcttaataatgaaaaacaaaaaattacagaaactattaatagtagatttaaagaattagaaaaatcagaaataaaccaaaaacttcaaaaaaataaagtcgatgttacgttgccggctagagaactaccaaatggaaaaatacatccagtttctcaggttattgatgagatctcatcgatattttctgaaataggtttttctgttgctgagggtccagatgtggaaactgaatacaataactttacagctttaaatactcccgaagatcatcccgctagagatatgcacgacactttttatttagataataacaaaaaaattctattaagaacccatacctcaccagttcaaataagagcaatgttaagtggcaaaccaccatttaaaattattgttccaggaagaacttatcgttgtgatagtgatcaaactcacgccccaatgtttcatcagcttgaaggattgcatattgataaaaatataactatgggtcacttaaaaggatgcctggattattttgtgaaagaattttttgaagttaaaaaacttcagatgagatttagacctagtcactttccatttacagaaccttcggccgaggttgatattggttacagattagaaaatggaagaatcattgttggtgaaggtgacaagtggcttgaaattttaggatgcggaatggtgcatcctaatgttttaaaaaacgccaaggttgattcaaaaaattttcaaggctttgcatttggtatgggaatag

SEQ ID NO: 302039 - DNA, 478 bp, Unknown
  Bacterial polypeptide expressing nucleotide sequence isolated from the Sargasso Sea
actcatacttctcctgttcagataagatacttagagaataatcctcctccagtaagaattattgctcctgggagagtatataggagagatgcagtagatgctactcattcccctgtatttaatcaggttgaggttttatgtatcgatcaagatattaattttagtcatttaagaggaacagttcttacatttttaaagaccttttttggagatattcctgtgagatttagagctagttatttcccatttactgaaccttcagcagaagtagacgtacagtggaaaggtaaatggttagaagtaatgggctgcggaatggttgatccaaaggtcttagaaaaattaggaatagattctgagaaatggactggttttgcagcaggattaggagttgagagattttgtatggtcagacatcagatcgacgacattagaaaattttatacaaatgatattagattcttagaacagttctaat

SEQ ID NO: 302040 - DNA, 651 bp, Unknown
  Bacterial polypeptide expressing nucleotide sequence isolated from the Sargasso Sea
ttacagctttaaacacacctgaagatcatcctgcgagagacatgcatgatacattttatttagaaaaaaataagaagttactccttagaactcatacttcacctgttcaaattagaacaatgctaggaagcaaacccccgtttaaaattattgttcctggaagaacttacagatgcgatagtgaccaaacccatgctccgatgtttcatcagctcgaagggcttcatatagataaaaatattacaatgggtcatttgaaaggttgcttagactatttcatcaaagaattttttgaagttaaaaacgtaaaaatgagatttagacctagtcattttccatttactgaaccatctgctgaagtagatattggctataaaattgaaaatgaaaaaattgtaatcggagatggagataagtggttagaaattctaggctgtggaatggtgcatccaaatgttttaaaaaatgcaaaagttgatccaaaaaaatatcaagggtttgcatttggtatgggtatagatcgattagctatgttaaaatacggcattaatgatttaagagctttttttgaaactgattatagatggttaaaccactttggctttgatcctttagatgtccctacaaattatagaggtcttagtaaatgat

SEQ ID NO: 302041 - DNA, 139 bp, Unknown
  Bacterial polypeptide expressing nucleotide sequence isolated from the Sargasso Sea
tctggaatcgatccggagcgttattccgggttcgccttcggtatgggtgtcgagcgtctcgctatgctgcgttacggtgtcaacgacttgcgcctgttcttcgataacgatctgcggtttcttgcgcaatttcgctagt

SEQ ID NO: 302042 - DNA, 596 bp, Unknown
  Bacterial polypeptide expressing nucleotide sequence isolated from the Sargasso Sea
gatgaaattcagtgaacaatggctgcggagctgggtaaatccgcaggtctcccgcgaggagctggttgctcggctgtccatggtcgggcttgaggtggatgctgttacccccgttgctggcagcttcagcggtgtggttgttggtgaggtcctcgaaaccgtgcagcatcctgatgccgacaagcttcgggtctgtcaggtcagcaatggaagtgaaacctttcaggtcgtctgcggagccccgaacgtgcggcctggcctgaagattccgtttgcaatgatcggtgctcaattgccgggcgacttcaagatcaagaaggccaagctccgcggtatcgaatccaatggcatgctttgctcggaaaccgagctgcaggtggggagtgacgatagcggactgatggagcttgccggcgatgcgccggtcggtactgattttcgtgagtatctcggtctcgacgatgcaagtatcgaaatcggtttgaccccaaaccgtggtgactgcctctccatcgctggcttggctcgtgaagttggtgcgatttatggctcactggtcagtccggtgcaattcaccgtggcgcctttgcatcatg

SEQ ID NO: 302043 - DNA, 724 bp, Unknown
  Bacterial polypeptide expressing nucleotide sequence isolated from the Sargasso Sea
gatgaactcccaagaaaagataaatactaaacttcaagaaattgaaataaaagaaataaactcaaaacttgaaaatgaaaaagtagatgtaactttacctgaaagagatattaatcaaggaaaaattcatcctgtttcacaagttatcgatgaaatatcatcaatattttctgaaattggttttagtgttgaagaagggccagatgttgagaatgagcattacaattttacagcactaaacacaccttatgatcatcctgcgagagatatgcatgatactttttatttagataataataaagaattgttattaagaacccacacttctccagtgcaggttagaactatgttgaaaggaaaacctccttttaaaattatagctcctggaagaacatatagatctgacagtgatcaaactcattctcccatgtttcatcaagtcgaaggacttcatattgataaagatataaatatgggacatttaaaaggctgtttgaactattttataaaatcattttttgaagtagataaaattaaaatgagattcagaccaagccatttcccttttactgaaccatctgcagaggtagatattggttatgagataaaagatggaaaaatagtaattggtgaaggcgataaatggttagaaattttaggatgtgggatggtacacccaaacgtgcttaaaaatgtaaacgtaaatccagataagtaccaaggc

SEQ ID NO: 302044 - DNA, 552 bp, Unknown
  Bacterial polypeptide expressing nucleotide sequence isolated from the Sargasso Sea
caccagtacaagtaagaacaatgttaaatgggaaacctccatttaaaattatagctccaggcagaacatatagatctgatagcgaccaaactcattctcccatgttccatcaagttgaaggacttcacattgataaagatattaatatgggccacctaaaaggatgcttaaactattttataaaatcattttttgaagtggacaaaatcaaaatgagatttagacctagccactttccttttactgagccatctgcagaagtagatattggttatgaaataaaaaatggaaaaatagttattggcgagggagataagtggttagaaattctaggttgtgggatggttcatccaaatgtacttaaaaatgtaaaagtaaatccagataaataccaaggctatgcctttggtatcggaatagatagacttggaatgctcaagtatggaataaatgatttaagagctttttttgagactgattatagatggcttaaacattttggttttgatccattagatgtaccatcaaattatagaggccttagcagatgaa

SEQ ID NO: 302045 - DNA, 730 bp, Unknown
  Bacterial polypeptide expressing nucleotide sequence isolated from the Sargasso Sea
atggataaatacaaagatatacactcttcagtttctttaaaaaaagaaaatgttaatgatttagaaagcttggaatcatttagacaagaattcttagggaagaaaggatcaatttctcttgctatgaaagaattggggaaacttgaacctgatgagcgtaaaaaacacgctgaagaactaaatataattaaagataccgttctaacttttgttaaagtaaaaacagaagaaataaataacaaaattttagataaacaaattaaaacggaatctcttgatgttacacttcctgtgagtagttcatcaggaaccatccatcctataacccaggtcattgatgaggtgatagcaatctttgcggatttagatttctgtgttgcagaaggaccagaaattgaaactgattataacaattttactgcgttaaatacatctgaacatcatccagcaaggcaaatgcacgatacattttatgtaaattctgaaacagatggtatgcaaaacgtaatgaggacgcatacttctcccgtccaaataagaagtatgttatctcaagaacctccaattcggcttatcgctccaggaaagacttttcgatgtgacaatgatcaaactcatactccaatgtttcatcaagttgagggtcttgtcatagataaagaaagtaatatgggtcacttaaaaggatgtcttgaaatatttttaaaatcattttttgaaacggaatagt

SEQ ID NO: 302046 - DNA, 505 bp, Unknown
  Bacterial polypeptide expressing nucleotide sequence isolated from the Sargasso Sea
aataatagcgccaggaaggacatacagatctgacagtgatcaaactcattctcctatgttccatcaagttgagggactgcatatagataaagagataaatatgggtcatttaaaaggctgtttaaattattttattaaagagttttttgaagttgataaaatacgaatgagatttagaccaagtcattttccttttacagaaccatctgcagaagtagatattggttacgagttaaaagatggaaaaatagttattggcgaaggtgataaatggttagaaattctaggatgtggaatggtacatccaaacgttcttcaaaatgttaatgtaaatccagataaatatcaaggatatgcatttggcataggtatcgataggcttggaatgcttaaatatggaataaatgatttaagagctttttttgagactgattatagatggcttaaccattttggatttgatccattggatgtaccatcaaactatagaggtcttagcagatga

SEQ ID NO: 302047 - DNA, 801 bp, Unknown
  Bacterial polypeptide expressing nucleotide sequence isolated from the Sargasso Sea
ttcaatttgccaagtcgatattggtaattcaaggaatttacaaattatctgtggtgcgcgcaatattaaaccaaatatttatgtttatgttgctactgtcggcgctaaattaaatgcagttgatttaactattaaacgaagtgaaattagaggtgttatgagtgaaggaatgatatgttcactccaagaactgggtttagaagactctagcgaaggtatagagatcattgatgaagagttcgccctaaaacatgaattgggcactccagggtctgacttgcttcaattaaatgattttatatatgatttggccattacagctaatagacctgatggaatgtctgttataggtatagcccgtgaaatttctgcacttttagaatccaccttaaattttccagaattaaaccataaatacaatattcatttacttaagggaattaaactttgtccagaggctatagaatctaattgcatttatacaataagctgcattgatggagtaaatggagagaaattatcgccaaattggcttaaagaccgtatagaaaaatcaggtataaaatctattaatcttctagttgatttgacaaattatatcctattagaacaaggtcaacctttgcatgcgtttgataaagataaattgtcaaacttaattggtaaggaagtttctccagaagatttctctgtgagaaaaggcaaggattacgaaagccttatttgcttagatggtaaagaatatgacttaaatgacaatataacagttattacttgttgtgataaaccggtagctattgc

SEQ ID NO: 302048 - DNA, 610 bp, Unknown
  Bacterial polypeptide expressing nucleotide sequence isolated from the Sargasso Sea
atgtccgatattaaaaaaataaaaaacgattatatccaaaagttagatgaaaagttatcttttgaaaatatcaataaaattagatctgaactatttggaaaaagtggaattatttctttagaatttaaaaaactaggttcagtttcagctattgagagaaaaaagtttgcttcagaactaaatactctaaaggatgaacttactgaaaaaattaataataaaattaaattaattgaaattgaagaaattaatttaaaacttaaaactgaaaaagttgatgtaactttgccagaaagaggttttgatagtggaaagatacatcctgtatcacaggtaatagatgaaatatcctcgattttttctgaaataggatttagtgtagaggaaggtcctgatattgaaaatgaatataataatttcacagcacttaatacgcccgataatcatcctgccagagacatgcatgatacgttttatttggataataaaaaagaatttttattaagaacccatacgtctccagttcaggtaagaacaatgttaaaagggaaacccccattcaaaataattgcaccaggaagaacctataggtctgacagtgaccaaaccc

SEQ ID NO: 302049 - DNA, 859 bp, Unknown
  Bacterial polypeptide expressing nucleotide sequence isolated from the Sargasso Sea
aaaaatttagatcaggagcttaaaaaagttgtaggctcactggggaataaaactagaatcgagttagaagagcaacttaaaacctcaaaaagtcgaattcttggaacaaaggattccaataaaccatctcatgattattcattgcctagcagggatatatcaattggaaagcttcatccagtaacgttaactttgagagaaattaaaaaggcatttgtgtctttaggatttcaggttgaagaaggtccagaaattgaattggataaatataattttgatatgctgaatattcctgaagatcatccagcgagagacatgtgggacacaatgtggattgatgaaaaaataaacaacaacggcgaaaaaatgcttctgaggacacacacttcaccagttcaagcaagaataatggaaaaccaagatccacctattagggtaattgtgcctggaaagtgttacagatatgaagcaacagattcaactcatgaatggcatttttatcaagtagaaggattagcagttgataaaaatttaactttttctgaccttaaaggaactttatatgaattcgcaaaaaaaatgtttggaagcgaaacaaagattaggtttagatgtgattattttcctttcgtggagcctggtgtagatatgtctatttattgggaaggtaaatggttagaaattcttggtgcaggtatggttcatcctaaggtttttgaaaaagtaggctatgaagataaagatttatctggatttgccttcggaatgggacctgaaaggattgctatgattaaacataatatagatgacatcagattattttattcaaatgatttgcggtttttagagcaattttagg

SEQ ID NO: 302050 - DNA, 328 bp, Unknown
  Bacterial polypeptide expressing nucleotide sequence isolated from the Sargasso Sea
actcatacttcaccagttcaaattagaactatgttaaaagacaaacctccatttaagatcattgctcctggtagaacttatagatctgatagtgatcaaacacacgcaccaatgtttcatcaagtagaaggtttgcatatagacacaaatattaatatgggacatttaaaaggatgcttgaattattttattaaagaattttttgaggtcgaaaaaattaaaatgagatttagacccagtcattttccatttaccgaaccatctgcagaagttgatattggttatgaaataaaagatggcaaaataattatcggagaaggagataagt

SEQ ID NO: 302051 - DNA, 619 bp, Unknown
  Bacterial polypeptide expressing nucleotide sequence isolated from the Sargasso Sea
atgtctttatcagttgatactgtagatattacagaaaagattaaaagttgtaaaactttgcaagatgtggaagttataagactagagtatcttggtaaaaaaggattaataccctctcaaatgaagcttttaggcgagctttcgattgaacaaaaaaaaattaaagggcaggaactaaataaccttaaaactttaattgaagaagtgattaatgatcaaaaaattttaattgaaaatacaaatatagaaaaaaaattaaaaactgagaatattgacgtaacactacctcacagtgaggaagtaaaaggaaaagtgcacccaatctcacaaactatatttaacatcatagaaatttttggaaatttaaattattcagttgaagcaggaccagatattgaaagtgattttaataatttttctgctttaaatatacccccgcaccatccagcgcgtgaaatgcaagatactttttatataaatagtaataacgaagaagataatgttttgcgaacacatactagtccagttcaagttaggacaatgcttaaatctaaacctccaattaaaattattgttccagggagaacatatagaagtgactcagattctactcacacac

SEQ ID NO: 302052 - DNA, 883 bp, Unknown
  Bacterial polypeptide expressing nucleotide sequence isolated from the Sargasso Sea
tatggctgaaaaattaaataagattaaagaatatgttttagaaataatagattcaaagacagaagagtttaataatgaggaattagaaaaaaaacttaattctgagactttagatattactctatctactccaaaatcatacggaactattcatccaattagtcaagttatagaggaagttataactatatttggtgacttagacttctttgtcgcagaaggacctgaagttgaaactgattataataattttactgctttaaacacttctgaacaccatcctgcacgacaaatgcatgatactttttatgtagaaactgagactgatggaatgccaaatgttctgcgaacccacacctcaccagttcaaataagaagtatgttaaagcaaaaaccaccaattcggttgattgctcctggaaaaacgtttagatgcgataatgatcaaacgcattctcctatgttccatcaagttgagggtttagtaatagatcaagaaagcaatatgagccatctcaaaggatgtttagaaatatttctaaagactttttttgagaccgataaattaaatatgagatttcgacctagtcatttcccgtttactgaaccatccgcagaagttgatattggatacactaagaaaggaaatcagttaattatcggagagggtgaggaatggttagaaattttaggatgcggaatggttcatccaaacgtacttgaaaatgtaaatattaattcaaatgaatatcaaggctatgcatttggtatgggtatagagagacttgcaatgctcaaatacggaattagtgatttaagaactttctttgatagtgatcttagatggaataagcattatggcttttcacctttgaacatacct

SEQ ID NO: 302053 - DNA, 607 bp, Unknown
  Bacterial polypeptide expressing nucleotide sequence isolated from the Sargasso Sea
gaaatgcaggatactttttatattgaggataatggagacaaaaatgttcttcgaacccatactagccctgttcaagtgagaactatgctcaacaaaaaaccacctattaaaattattgtgcctggcagaacttatagaagtgactcagatgctacacatgctcctatgtttcatcaggtagaaggtttagtcgttgatacaagttctactatggttgatttaaaatcaacactcgtttcattcttagaagaattttttgaagtaaaaaacttacaataccgttttcgccctagttactttccttttactgagcctagcgcagaaatggatgtagcttataccaaagtaaataataaaataaaaattggtgaaggagataaatggttagaaatattgggttgtggaatggtcaatcctgtagttttagataattgtaatattgactcaaaacagtatcagggttttgcttttggtatgggaattgagcgtttgtcgatgcttaaatatggtattacagatttaagaagtttttttgatccaaattatagatggttggatcattatggttttagtattttagataatcaaacacgatcagggctataaa

SEQ ID NO: 302054 - DNA, 903 bp, Unknown
  Bacterial polypeptide expressing nucleotide sequence isolated from the Sargasso Sea
acgcttcccaacttaattctctaaaaataaatgtaacagagattctgaaaaaaaaacttgctgattttaatcagctagaaattaacaaaaaaataaaaaatgaaaaaatcgatgtaaccttacccggcagatctttttttgaaggaaaaattcatcctgtttcacaagtaattgatgaagtaacttctattttttctgaaattggtttttctgttgaagaaggaccagatgttgaaaatgagtattataatttttctgcactaaatacacctgagaatcatccagcaagagacatgcatgatactttttatcttgatcattctaaaaatttacttttacgaacacacacatcgccagttcaaattcggacgatgcttaagagcaaaccaccattcaaaataattgctccaggcagaacttacagacacgatagtgatcaaactcactcgcccatgtttcaccaattggagggtttacatatagatacaaacattaatatgggacaccttaagggttgtttatattattttgttaagaaattttttgaagttgaaaaagtaaaaataagatttagaccaagccatttcccttttactgaaccatcagcagaagtagatattggatataagattcaagatggaaaaattaaaattggggaaggtgataagtggttagaaattcttggttgtggaatggtacatcccaatgttttaaaaaatgtgaaagtaaatccaaaacagtatcaaggttatgcttttggtgtaggtatagacagattggccatgcttaaatacggcataaatgaccttagagctttttttgaaagtgatattagatggttagagttttatggattcgatccacttgatgttccaacaaattacagaggtttaagcagatgat

SEQ ID NO: 302055 - DNA, 846 bp, Unknown
  Bacterial polypeptide expressing nucleotide sequence isolated from the Sargasso Sea
ttgctcagaaagtgagctcaatttatctgacgaaagcgaggggattattgaacttaaaaataacgagaaaaaaataggaaaaagctattttaagagtagctcacaaaacgttattgatatttccataactcctaaccgtgctgattgcttaggcgttagaggtatagcaagagatctttcatcggcaggagttggaaaattaatacaaacaaagagaaaaaaaattaaacaaaatacaaaacaccaaataaaaacatcaattacaaaagaaaaaaatcaaggatgtgatatcttcggaagctgctacataaaaaacattacaaacaaagaaagccctgaatggcttaaaaataaattaattgcattaggtttgaaaccaatctctgctgtggtggatatcactaactacgtaatgtttgatcttaatagaccattgcatgcctatgacgcagataaaattaacaaagaaattatagttagaaacgctaaagaaggtgagatgttcgaggcattagataataaaaaatataaactgagtaaagacatgtgcgtcatctctgataaatctggagttcttggtttgggcggaattattggaggaataactacctctactgaatttgatacaagaaatatacttttagaagcagcttatttcaaaccatcatcaataagacaaactgctaaaaaactaaatattaatactgacgcaaaatatagatttgaaagaggagtcgatcctaattcggttaaagatgggttagaacttgcgactgaactaatattaaaaatttgtggcggggaggctagtaagtttcaaatttcaggaaaaacgagtaaaaaaaa

SEQ ID NO: 302056 - DNA, 439 bp, Unknown
  Bacterial polypeptide expressing nucleotide sequence isolated from the Sargasso Sea
cttgaaggacttcatattgacaaagatataacattgggtcacctaaagggttgtttagattattttgtaaaagaattttttgaggttaaaaaaattcaaatgagatttagaccaagtcattttccatttacagagccctcagccgaagttgacattggatatagattagaaaatggaagaataattgtgggagaaggagataaatggctagagatactgggttgtggaatggtacatccaaatgttcttaaaaatgccaaagtggatccaaaaaaatttcaaggttttgcgtttggaatggggattgatagacttgcaatgttaaagtatggaataaatgatcttagatctttttttgaagcagacttcaggtggcttaattattttggctttgatcctttagacgttccaacaagttatagaggtctaagtagatgat

SEQ ID NO: 302057 - DNA, 722 bp, Unknown
  Bacterial polypeptide expressing nucleotide sequence isolated from the Sargasso Sea
aattaaatcttcaaaatcctttgaagatttagaaaagcttcgattatattatttaggtaaaaaaggattaattcctgaagctttaaagcgattaggttcattgtctattgaagaaaaaaaatcaaaagggcaggaattaaatatcattaaaaaagaaattgaagtagctattaaaaaccaaagaacagatattgaaaatattgaaatttcaaacaggattaatttagaatcaattgatgttactttacctcctaatatttctgaaaaaggaaaaatacacccaattagtcaaactatatttaatattatagaaatttttggaaacttaaattacggtgttgaaacaggtccagatatagaaacagatttcaataattttacagctttaaatataccagaacatcatccagcaagagaaatgcaggatactttttatgtacaggataatggagacaaaaatgttcttcgaacacatactagccctgcccaagtaagaactatgctcaacacaaaaccacctattaaaattattgtgccaggcaggacttatagaagtgactctgatgctacacatgctcccatgtttcatcaggtagaaggtttagttgttgataccagttctactatggtagatctaaaatcaaccctcgtttcatttttagaggaatttttcgaagtaaaaaacttacagtaccgttttcgtcctagttattttcctttta

SEQ ID NO: 302058 - DNA, 943 bp, Unknown
  Bacterial polypeptide expressing nucleotide sequence isolated from the Sargasso Sea
ggatgctatccgcgtaaattacttaggtaaaaaaggaagtatcacggctttactgaagtccttggggcagttacccgagcaagaaagaccagctgctggcgagtctatcaatcttgctaagcggaaggttcaggaagcgatagagctgcgaaaagcttcgcttctagacgaaaatttggcagagcagttggagtctgagagtctagacgtctccctgcctggtcgtaggcaaaatgctggtggtctccatccgataactaccactataaatcgcataactgatatcttttcgtcagcaggctatgaaattgctatcgggccggaaattgaggacgattatcataacttcgaagcacttaatatccctgcccatcatccagcaagagctatgcacgatacgttctatgtgaataacaatcatgtgctacggactcacacatctccggtacaaatccgtgttatggaagccggcacaccaccttttaaaatgatttgccccggcaaggtttaccgatgtgattcagatttgactcatactccaatgtttcatcaggtagaaggtctagttgttgaccccaatgttacgtttgcagatttaaaaggaacggttgaaggttttcttcacgcattctttgaagaggagatgcctgttcgatttagaccatcctactttccttttacggagccttccgctgaagctgatatgggatgtgtcgcatgtaaagggcaaggttgtcgtatttgtagtcatactggatggttagaagtcatggggtgtggaatggttcaccccaaggttcttgaaatgtcaggcgtagatacctcaaaatttaaagggtttgctttcggcatgggagtagaaagacttgcaatgctcaggtatgaagtcagtgatttacgaacatattttgagaacgatattagatttcttaaaccaatttaa

SEQ ID NO: 302059 - DNA, 841 bp, Unknown
  Bacterial polypeptide expressing nucleotide sequence isolated from the Sargasso Sea
tgctaggaaaggtctcattacaattaatgcaccccctggagctgtaataccaaaaactaagtttgaattaaaggtagctaaaataagaggtgtggagtcaagagggatgctttgttccgaaagtgaactaaatttatctaatgaaagtgagggaattattgaattaaaaaataaagagaaagaggtaggaaaaagctattttaaaagcagttcgcaaaaagttattgatatttccataacccctaatcgtgctgattgtttaggtgttaggggtattgcaagagatctttcatcaacaggggttggaaaattaatacaaacaaaaagaaaaaaaattaaacaaaatataaaacatcagataaaaacatcaattacaaaagaaaaaaatcaagggtgtgatatctttggaagctgttatattaaaaacatctctaacaaagaaagtcctgaatggcttaaaaataagttaattgcgttaggattaaaacctatctcagctgtagttgatattacaaactatgtaatgtttgacctaaatagaccattacacgcttatgatgcagataaaattaataaagaaattatagttagaaatgccaaagagggcgagattttccaagcattagacaataaaaaatataaattaaaaaaagatatgtgtgttatttctgataaatccggtgttcttggattaggtggaattattggagggatgactacctctaccgaattagatacaaaaaatatacttttagaagctgcttatttcagtccttcttcaataagaaaaacggctagggcacttaatataaatactgacgcaaaatatagatttgagaga

SEQ ID NO: 302060 - DNA, 613 bp, Unknown
  Bacterial polypeptide expressing nucleotide sequence isolated from the Sargasso Sea
cctggctcgtgaagaaaaagacagtttttatttaacaaatcaaaaatcaaaagttaaatatttaatgaggacacatacttctcccgtacaaataagaactatgctaaacaataaacctccgttagcaataatagtaccaggaaaagtttacagacctgattctgaccaaactcatagtcctatttttcatcaaatagaaggtttattcctagctccaaatatccatatggggcacttaaagtatactttactaaatttatgtaaacaatttttccaaataaaaaacctaaaacttagatttagaccttcttattttccatttacagaaccttcagcagaagtagatataggatataatactaaagaaaaaaaaattgaattaggaggaaataaaaattggctagaagtattaggttctggaatgatacaccaaaacattttaataaactgcaatattgatcctgaaaaatatcaaggtttcgcatttggaataggtgtggaaagatttgcaatgttaaaatatggcatatcggatttaagagaattttatgaatcaaacttaagatggatctataatcacggatttaatataataaattctatttcaaagtaa

SEQ ID NO: 302061 - DNA, 598 bp, Unknown
  Bacterial polypeptide expressing nucleotide sequence isolated from the Sargasso Sea
tttctatttagatgaaaaaaaacaaaagttattacgtactcatacttctcctgttcaaattagaacgatgcttaaagacaaacctccatttaaaattattgcaccaggaagagcctacagatcagatagtgatcaaactcacgcccctatgtttcatcaagtcgaaggtcttcatatagataaggatattaatatgggtcacctgaagggctgtctaaattactttattaaagaattttttgaagttgataaaattaaaatgagatttagaccaagtcacttccctttcacagaaccatctgctgaggttgatattggatatgaaataaaagatggaaaaataataataggtgaaggtgatcaatggctagagattttaggatgtggaatggttcatccgaatgttttaaaaaatgtaaaagttgatccaacaaagtttcaaggatacgcatttggtatcggaattgatagactcgctatgttaaaatatggaattaatgatttaagagctttctttgattgtgactatagatggttaaatcattttggatttgatcctttagatgtaccgacaaactataggggcttaagtagatga

SEQ ID NO: 302062 - DNA, 815 bp, Unknown
  Bacterial polypeptide expressing nucleotide sequence isolated from the Sargasso Sea
ttgcctgccagtgatagacctttatttggccaggaaataaataaagctaaaaatgtttttctaactaatctttcatctgcaaaaaatcaactagaaggaaaactattagtagactcgcttaatgttaaacctattgacgtatcacttgccggatctaattcgtctaaaggcagcagacatccaatatctttggttagaagtaaaatcgagcaaatttttaagaattctggatacaagattaaagagggccctgaaattgaagatgattatcataatttcactgcattaaatgttccagaaaatcaccctgcaagagcgatgcatgatacattctattttgagggcaaaaaactattgagaacgcatacttcgccagttcaaattcgttccatgatagcagacggtgcacccataagaattattgcacctggaaagtgctatagatgtgattctgatctaacacatacaccaatgtttcatcaagtcgaggggttagtaattgatgaaaatattagttttgcaaatttgaaagctgttcttcatgaatttgttgaaagcttttttgaaagagaggtaaaactgagatttcgtccgtcatatttcccatttacagagccatcggctgaagttgatattctctgggagaatgatgaatggttagaaatattgggatgcggtatggtgcatcctaatgtcctaactaattcggcgatagatccagagaaatatagtggttatgcatttggtatgggtgttgagagacttgcaatgctttattatggagtgagagatctcagaactttctatgataatga

SEQ ID NO: 302063 - DNA, 813 bp, Unknown
  Bacterial polypeptide expressing nucleotide sequence isolated from the Sargasso Sea
aaaggtgatttatcaattatcttgaaaacaatgggtcaattatctgctactgatagaccaattattggccagaaggcaaatttaataaagataaatttgcaagatctaataactgaaagaaaaaataaactaaacagcgaagccttagataaaaagattaaacaagaaaaaattgatgtaactatcccttcaattggaaccccccctgggaataaacatcctttgatttcaactcaagacgaaataatagatattttttgtggtttaggatactcagttgaaagtggccctgaaattgaaactgatttttataattttgagtctctcaacatacccaaaaatcatcccgcaagagatatgcaggatactttctacttagatgaaaatcgacttttaaggactcatacttctcctgttcagataagatatttagagaaaaatcctcctccagtaagaattattgctcccgggagagtatataggagagatgcagtagatgctactcattcccctgtatttaatcaggttgaggttttatgtatcgatcaagacattaattttagtcatttaagaggaacagttctcacatttttaaagaccttttttggagatattcctgtaagatttagagctagttatttcccatttactgaaccttcagcagaagtagacgtccagtggaaaggtaaatggctagaagtaatgggctgcggaatggtagatccaaaggtcttagaaaaattaggaatagattctgagaaatggactggttttgcagcaggattaggagttgagagattttgtatggtgaga

SEQ ID NO: 302064 - DNA, 819 bp, Unknown
  Bacterial polypeptide expressing nucleotide sequence isolated from the Sargasso Sea
ggacttgaagttgaaggaattaaagaaaattctggagagatggggaaattcaaaatcgctaaagttttaaaaacagaaaaacatcccaacgctgataaattgaaagtttgcgacgtaacaattggaggtaaagaaattttaaaagttgtttgcggggctccaaatgcaagagagggcttaataacaatctatgctccacccggcgctgttatacccaaaaataattttgaattaaaggtagccaaaataagaggtgtagagtctaaagggatgctttgttcagagagtgaactgaatttatcagatgaaagtgatgggataattgaacttaagaataaagaaagagagataggaaaaagttattttaaaaaaaattcgcaaaaagctattgatatttcaataacccctaaccgagctgattgtttaggtgtcagggggattgcaagagatcttgcttcagcaggagttggaaaattaatacaaactaaaagaaagaagattaaaacaaatacaaaacatcaaattaaaatatcaattacaaaagaaaagaatcaaggatgtgatacttttggaagctgctacattaaaaacattactaatagggaaagtcctgagtggcttaaagaaaaattaattgctttaggtttgaagcctatttctgctgtggttgatgtcactaactatgtaatgtttgatttaaatagacctttacatgcttatgatgcagataaaataaataaagagatcatagtgagaaatgctaaagagggtgaattatttaaagcacttgataataaagaatataaactccaaaaagat

SEQ ID NO: 302065 - DNA, 619 bp, Unknown
  Bacterial polypeptide expressing nucleotide sequence isolated from the Sargasso Sea
tctgggcctcggctacagcgtggctgagggccctgaggtggagcgggaccactacaacttcaccgccttgaacatccccgaggaccatccggcccgggacatgcaggacactttttatctcgggggtgacctgctgatgcggacccacacctcgccggtgcagatccgccacctcgaagagaaccctccgccggtgcggatcgttgcccctggacgggtgtatcgccgcgatgccgtcgatgccacccattcgcccgtgttccaccaggtagaggtgctggccattgatgaggggctcgacttcagccacctgcgcggcacggtgatggccttcctcaaggccttcttcggcgacctgccggtgcgctttcgggccagttatttccccttcaccgagccttcagccgaggtggatgtgcagtggcgcggccgctggcttgaggtgatgggctgcggcatggtggatcctgccgtgttggaagggctgggcctcgatcccgagcgctacagcggtttcgccgcgggtctgggggtggagcgcttctgcatggtgcgccatggcattgacgacatccgccggctgtacaccagcgatctgcgcttcctcgagcagttctga

SEQ ID NO: 302066 - DNA, 232 bp, Unknown
  Bacterial polypeptide expressing nucleotide sequence isolated from the Sargasso Sea
gctagaaattctaggatgtgggatggttcatccaaatgttcttaaaaatgtaaaagttaatccagacaaattccaaggatacgcttttggtataggaatagatagactagctatgcttaagtatggaatcaaggatttaagagcatttttcgaatgtgactacagatggttaaatcattttggttttgatccattagatgttccaactaattatagaggattaagtcgatga

SEQ ID NO: 302067 - DNA, 563 bp, Unknown
  Bacterial polypeptide expressing nucleotide sequence isolated from the Sargasso Sea
ttttgagtctctcaatatacccaaaaatcatcccgcaagagatatgcaggatactttctacttagatgaaagtcgacttttaaggacccatacttctcccgttcagataagatacttagaggaaaatcctcctcctgtaagaattattgctcccgggagagtatataggagagatgcagtagatgctactcattcccctgtatttaatcaggttgaggttttatgtatcgatcaagacattaattttagtcatttaagaggaacagttcttacatttttaaagaccttttttggagatatccctgtaagatttagagctagttatttcccatttactgaaccttcagcagaagtagacgtccagtggaaaggtaaatggctagaagtaatgggctgcggaatggttgatccaaaggtcttagaaaaattaggaatagattctgagaagtggactggttttgcagcaggattaggagttgagagattttgtatggtgagacatcaaatcgacgatatcagaaaattttatacaaatgatcttagattcttagaacagttctaag

SEQ ID NO: 302068 - DNA, 435 bp, Unknown
  Bacterial polypeptide expressing nucleotide sequence isolated from the Sargasso Sea
aaggtcttcatatagataaaaatattaatatgggacatttaaaaggatgtctaaattattttattaaagagttttttgaagtagataagattaagatgagattcagacctagtcattttccttttacagaaccatctgcggaagttgatataggatatgagataaaagatggaaaaataattataggagaaggcaatcaatggcttgaaattttgggatgtggaatggttcatccaaatgttttaaaaaatgtaaaagttgacccgataaagtatcaaggctacgcatttggtataggaattgacagattggcaatgttaaaatatggaatcaatgatttgagagcattttttgatactgattatagatggttaaatcattttggatttgatcctttagatgtgccaacaaactacagaggtcttagcagatgaa

SEQ ID NO: 302069 - DNA, 623 bp, Unknown
  Bacterial polypeptide expressing nucleotide sequence isolated from the Sargasso Sea
tccagcaagagatatgcatgacactttctatttagataataaaaaagaattacttttaagaactcatacttctccagttcaagttagaacaatgttaaaaggtaagccaccttttaaaattattgcaccaggaagaacatatagatcagacagtgatcaaactcattccccaatgttccatcaagtagagggacttcatatcgataaatacattaatatgggacatttaaaaggttgtttgaattattttataaaagaattttttgaaattgataaaattagaatgagatttagaccgagtcattttcctttcacagaaccatctgccgaggtagacattggctatgaattaaaagatggaaaaattattattggcgaaggtgacaaatggttagaagttttaggatgtggaatggtgcatccaaatgtgctcaaaaatgtaaatgttaacccagataaatatcaaggatatgcatttggtattggtattgatagacttgcaatgcttaagtacggtatcaatgatctgagagctttttttgaaacagattttagatggttgagccattttggatttgatcctctagatgttccatcaaattatagaggccttagcagatgaa

SEQ ID NO: 302070 - DNA, 631 bp, Unknown
  Bacterial polypeptide expressing nucleotide sequence isolated from the Sargasso Sea
aaaagattactataatttttcagctctgaatatacctgaaagtcatccagcacgagatatgcaagacaccttttttattaaggggtcaagtgatacagttcttcgaacgcacacttcaaatactcagatccatgccatgttaagtgaaaaacctccacttcgtttcgtagctccaggtcgagtgtaccgagttgatagtgacgcgactcacacgccgatgtttcatcaaattgaatgtgttgtcgttgatgaaggaataagttttgcagatcttaaaggtattatccaaactttcacgcgagaactttttggtggtgaaggtcgcactcgttttcgcccaagcttttttccttttgttgaaccaggtgccgaggtcgatgctgaatgctttttctgtaaaggctcaggttgtcgcgtgtgtaaaaaaacaggttggcttgaaattggtggttgcgggatgattcatccaaatgtttttgaagcttgtggtattgatagtgaaaaatatacaggttttgcttttggttttgggcttgatcgtatggctatgctctactatggagtacaggatttgcggatactgtttgaaggagactctgctttccaatcgcaattttcaattttttcttga

SEQ ID NO: 302071 - DNA, 556 bp, Unknown
  Bacterial polypeptide expressing nucleotide sequence isolated from the Sargasso Sea
cctaaatattccaagtaatcatccagccagagctatgcacgatactttttactttaattctgaatttctattaagaactcatacttcaccaatccaaattcgcagcatggaaaaagaaggcgtcccgataagggtcattgcaccaggaaaagtttatcgaagagattctgatataacacacacgccaatgtttcatcaaattgagggcttggtaattgataaaggaataaatttcagtcaccttaaaggaatcctgcatcaatttattgatacatttttcgaagaaaacactgaggtacgtttcagaccttcctattttccttttacagaaccatcggcggaagtcgatattttgtccaaagaaaaaaattggcttgaaatactaggctgtggaatggttcatccaaaagttcttgaaaaccttggcattaatactgaaatctacagtggttatgcttttggtatgggtgtagaaagattggcaatgctgaaatatggcatcaaagacattcgatctttttatgaaaatgattttaatttcttaaaccagttctaa

SEQ ID NO: 302072 - DNA, 709 bp, Unknown
  Bacterial polypeptide expressing nucleotide sequence isolated from the Sargasso Sea
agctgatggtcccgatatagaagacgattggcataattttactgcattaaatattccacccgagcaccctgctaggcagatgcatgatacattttacatagagaaacgtgacaataaaaaaacttctgattcaatcgatgtgctaaggacccatacttcgccagttcaggtaagaactatgattagttctatcccaccaataaatataattgttccgggaagaacatatcggtctgactccgatcagacacatactccaatgtttcatcaagtggagggtttagttatagatgaaaaaagtcatatgggtcatctaaagggttgtttagttgagtttgttaaaagattttttaatttagatgaggtaaattaccgctttaggcccagttattttccttttactgagccatctgcagagatggatattgggtgtattagagaaggaaataaaattgttctcaaaggggatcaagactggctagaaattcttggttgcgggatggttaatccaattgttttagagaactgtggtgtcgactctaataaatatcagggttttgcctttggtgtaggcattgatagaattgcaatgcttaagtatggcatgcctgatttaaggtcttttttcgagtcagacttaagatggcttagacattatggtttctctcaatttgactttcctccaaatgctagaaagggttctttttga

SEQ ID NO: 302073 - DNA, 721 bp, Unknown
  Bacterial polypeptide expressing nucleotide sequence isolated from the Sargasso Sea
aatggttgatttacgagaattaattcaaaaagtaacaaaagctcaagacaagttagagctacaaaatttaaaatctcaatttctaggaaaaaatagtcaaatcaatcaagagtttaaaaaaataggttctttacctgaggaagaaagaaaaactagagcagcatctcttaataacgaaaaacaaaaaattacagaggcaattagcaaccggttaaaggaattagaaaggtctgaaataagtaaaaaactccaaaaagacaaagtcgatgtaactttgccagcgagagaacgaccaaatggcaaaattcatccagtctcccaagttattgatgaaatcacttctatattttctgaaataggtttttcagttgctgaaggtccggatgtagaaactgaatataataactttacagctttgaatactcctgcagatcatccagcaagagatatgcacgatacattttatttagatggaaataaaaaagttcttttaagaactcatacttcaccagttcaaatcagagcaatgttaagtgataaacctccatttaaaattatagttccaggaagaacttatcgttgcgatagtgaccaaacccatgcaccaatgtttcatcagcttgaaggattacatatagacaaagatataactatgggccacctaaaaggttgtttagattattttattaaagaattctttgaagtcaaaaaaattcgtatg

SEQ ID NO: 302074 - DNA, 306 bp, Unknown
  Bacterial polypeptide expressing nucleotide sequence isolated from the Sargasso Sea
agccttcagccgaagttgatattggttatagattagaaaatggaagaattatagttggcgaaggtgacaagtggcttgaaatattaggttgtggaatggttcacccgaatgttttaataaatgctaaagttgacccaaaaaaatttcagggttttgcatttggaatgggaatagataggcttgcaatgttaaagtacggaataaacgatcttagatctttttttgaagccgactacagatggttaaattattttggttttgatcctttggatattccgacaaactatagagggttaagcagatgat

SEQ ID NO: 302075 - DNA, 899 bp, Unknown
  Bacterial polypeptide expressing nucleotide sequence isolated from the Sargasso Sea
agtagaattacttctactcctgaagatcttgctgagaaactatctattggtggatttgaggttgaatcattagaagattgttcccaaaatgtaaatggtgtcgtcttaggtaaggtattatctgttttaaaacacgaaggatctgaaaaactctcaatttgccaagttgatattggtacttcaaagaatttacaaattatatgtggtgcgcgcaacattaaaccaaatatttatgtttatgttgctactgtcggagcgaaattaaatgcagttgatttaactattaaaagaagcgaaattagaggtgtcatgagtgaaggtatgatatgttctttgcaggagcttggattagaagactctagcgaaggtatagagatcattgatgaagatttagccttaaaacatgaattgggtactcaagcgtccgacttgcttcaattaaatgattttatatatgatttagccattacagctaatagacctgacggaatgtctgtaataggtatagcccgcgaaatttctgcccttttagaatcaacattaaattttccagaattacaccacaaatacaaaattcatttacttaagggaatgaatttttgtccagaggctatagactctaattgcatatacacaataagcttcattgatggagtaaatggagataaattatctccaaaatggcttaaagaccgtatagaaaaatcaggtataaagtccattaatcttctagttgatttgacaaactatattcttttagaacaaggtcaacccttgcatgcgtttgacaaagaaaaactatctaacttaattggaaaggaagtttctccagaagacttttctgtacgaaaagcaaaggataacgaaagccttgtttgtttagatggtaaaaaatatga

SEQ ID NO: 302076 - DNA, 801 bp, Unknown
  Bacterial polypeptide expressing nucleotide sequence isolated from the Sargasso Sea
attgctttcttctgaaagaaagaatttatctaatttatctaatgatgacaaaaaaatctatggtgaaactttaaataatgtaaataattcaattatttcaaatataaaaaaagctaaagaagaatttataaataaaaaatatacttcactagagagtgaagaaaatgacgatataactatagattggtacgctaagactggaactcatagacatatcctttcacaagttatggatgaggttgtaaatatttttggttcaattggatacaaagtagcttatggaccagaagtagaaacatcatggcacaattttgacgcattaaatacaccagactggcatcctgcacgttatgaatctgatacgctttatatagataatgatttggaaactttattaagaacccaaacaagtacagtacagatcagacatatggaagaaaatgaaccacctgtttatattgttgcacctggtagagtctttagatcagaccaacttgatgcaactcattcaccagttttccatcaacttgaagggctcgcagttgataaaaacttaaaatttactgatctaaaaggtacattagagtactttgttaaacaattttttggtgaagatgttgaaactaaattcattccccatttttttcctttcactgaaccctctgctgaagttctagtcaaatggaataatggtgagtggttagaaatattaggttgtggaatggtagatccaaatgtattgaatcaagtcggttactcagatgaatatcaagggtttgcatggggtgttggtatagaaag

SEQ ID NO: 302077 - DNA, 806 bp, Unknown
  Bacterial polypeptide expressing nucleotide sequence isolated from the Sargasso Sea
aagtgagaagatagatgttactttgccaataagactttatcagcaaggaaaaattcatccagtttcacaagttatcgatgaaatttcatcaatattttcagaaattgggttttctgttgccgaaggaccagatgtagaaactgaatataataattttacagctttgaatactcctgatgatcatccagctagggatatgcatgatactttttatttagataaaaataaaaagctattacttagaacacatacatcaccagttcaaattcgcgcaatgcttgatggaaaagctccatttaaaataattgtccctggcagaacttataggtgtgatagtgatcaaactcatgccccaatgtttcatcagctcgagggacttcatatcgataaagatattacaatgggtcatcttaaagggtgtcttgattattttataaaagaattttttgaagttaaaaatgtaaaaatgagatttagacccagccattttccttttaccgaaccatctgctgaagtagatattgggtataaaattgtgaatgggaaaattgtaatcggcgagggagataaatggttagaaatacttggatgtggaatggttcatccaaatgttttaagaaatgcaaaggttgatccaaaaaaatatcaaggatttgcttttggaatgggtatcgatcgtttagcgatgttgaaatatggaataaacgatttaagagccttttttgaaacagattatcgttggttaagccatttcggatttgatccattagacgtacctacaaattatagaggtctgagcaaatgat

SEQ ID NO: 302078 - DNA, 713 bp, Unknown
  Bacterial polypeptide expressing nucleotide sequence isolated from the Sargasso Sea
aatgagtgatttagataaaataagttctgtatttaatgctaagatagatgccgttaaaacaaaagacgatcttcaaaatatcaaaacagaattttttggaaaaaatggtcaaattacccttcagttcaaatctctaggatctttggatccagaaaaaagaaaagaatttgcttcaaatttaaataaaattaaagatgacataactcatcaactagagcaaaaaaatatagagattgaaacaattgaaataaatgaaaaacttaaaaatgaaaaagttgatgttactttgccaattagacctgagcgccaaggaaaaattcatccagtttcacaagttatagatgaaatatcctctattttttcagaaataggtttttcagttgctgaaggacctgacgtagaaacagaatataataattttacagcattaaatacacctgaggaacatcccgctagagatatgcatgatactttttatttagaagaaaataaaaaattattgttaagaacacatacttctcccgttcaaattagaacaatgttatcaagtaaaccaccatttaaaataatagtaccaggtaggacatatagatgtgacagcgatcaaactcatgctccaatgtttcatcagcttgaaggtttacatatagataaaggcatcacaatgggacaccttaaaggttgcctagattattttataaaagagttttttg

SEQ ID NO: 302079 - DNA, 802 bp, Unknown
  Bacterial polypeptide expressing nucleotide sequence isolated from the Sargasso Sea
ttggaggagaaacttaagtcggttaaaaacgattttttagctgatgtagatgcttttcaaaagcaaggtattgatcatactagcttacatcagaaatatttagctaggaatggactggttgcggatttattcaagatgcttggtaaagagtcggttcaagatcgtcctcgatatggtcaacttctaaatgaactaaagaataatattacttcaaaaatagagtcattttctacggattttgaagatttagttagtttacaggattttgatatatcccttcctggtagggaatatagtattggttctatgcatattcttgagcagactctgaatgaaataaaaagaatttttaatgatatcggcttttgtgttgaatacggtccagaggtcgatgatgattatcataactttggtgcgctaaatttccccgaacatcatcctgcaagggatatgcaggatacatttttcataaataaggatattgttctgcgtactcacacatcgaatgtacagatacatttaatggaagaaaatgagcccccactaaggttcatcgtaccggggagagtttatagaaacgaagcaataagctacaaaagttactgtttgtttcatcaggttgaaggattatatgtagatgaaaaagttagttttggtcaattgaaaggttgccttgaatattttgtaaaaagaatgtttggtgaaaaatgtaaaatgagatggaggcctagttattttcctttcactgaacctagtgcagaggttgacatttgggatgatcagcgtgagcaatggatggaaa

SEQ ID NO: 302080 - DNA, 700 bp, Unknown
  Bacterial polypeptide expressing nucleotide sequence isolated from the Sargasso Sea
ctggaattaaaccaatcatcaggaagtttccatccaattacaacgacacttaaagaaatttctttgcttcttcaagatttaggcttcacacaggcttcaggcccagaaatagagtcagaaaagtttaacttcgatatgcttaatataaaagaatcccatccagctagacaaatgcatgacactttttatgttaataataagtcaggagtcctgagaacccatacatctccagtccaaatcagagcaatgttagaaaataaaccaccttttgcatttttctcaggagggaaggtttatagaaaagatgatgattcaacccatcttccaatgttccatcaaatagagggattatatgtaaatcaaaatgtttcatttgtagaattaaaggatttaatatttaagatagtacattctctttttggagaaaatgcttgcttgagattcagaccttcttttttcccttttacagaaccctctgcagaagttgatattctttttgaagatcaaaataaatggcttgaaatattgggctgcggtatcgtaaatccaaaagtattagaaaattgcaatattgaccccgataaatttcagggattagcttttgggcttggtatagaaaggattgcaatgttgaaatatggtgttaatgacataagagaattttataaatcaaatctagattttattagtcaattttaat

SEQ ID NO: 302081 - DNA, 544 bp, Unknown
  Bacterial polypeptide expressing nucleotide sequence isolated from the Sargasso Sea
atgtccgatataaaaaaaattaaagatgaatatttaaaaaaattagacaacaatctagacatagaaagtgtaaatcaaataaagactgaattgtttggtaaaaatgggcaaatttctaattcttttaaaacattaggctcattacccaatgatgagagaaaaaaatttgcatcggacttaaattcaataaaagatgaattacaagaaaaaataaattctaaacttcaagaaattgaaattaaagagattaattctaaacttgagaatgaaaaattagatgtaactttacctgagagagaaataaaacaaggaaaaatacatcctgtatcacaagttattgatgagatatcctcaatattttctgaaattggctttagcgttgaagagggtccagatgtagagaatgagtattataattttactgcactaaatactccagacaaccatccagcaagagatatgcatgatactttttatttaaataataataaagaaatactattaagaactcatacatctcccgtgcaagttagaacaatgtgaa

SEQ ID NO: 302082 - DNA, 801 bp, Unknown
  Bacterial polypeptide expressing nucleotide sequence isolated from the Sargasso Sea
aatgtctgatattaaaaaaattaaagatgaatacctagaaaaattaaatcaggatatagatttaaacaatattaatcaaattaaaacagagttattcggaaagaatggaaaaatttctaatgaatttaaaaaaatgggatctataccatctgatgaaagaaaaaaatttgcttctgatttaaatactattaaagaagaatttcaaaatattatttcaaataaaatccaaaatatagaaataaaagaaataaatttaaaacttcaaaatgaaaaggttgatgttactttgcctgaaagaagttttaatcaagggaaaatacatcctgtatctcaagtaatagatgaaatttcctctattttttctgaaattggttttagtgtagaagatggtcctgatgtagaaaatgaacataataattttacagccttaaacacaccagataaccatccagccagagatatgcatgatactttttatttagataaaaacaaaaaatatttgttgagaacacatacttctcccgttcaggtaaggacaatgttaaatggaaaaccaccttttaagatcatagctccaggaagaacttatagatctgacagtgatcaaacgcactcacctatgtttcatcaagtagaaggtcttcatatagataaaaatattaccatggcccatcttaagggatgtttaaactacttcataaaagaatactttgaagtaaaaaaaataaaaatgaggtttagaccaagtcattttccttttactgaaccatcagcagaggtcgatattggatatgagataag

SEQ ID NO: 302083 - DNA, 903 bp, Unknown
  Bacterial polypeptide expressing nucleotide sequence isolated from the Sargasso Sea
ttctggaaaaaaaggaattattaccgaactttttaaaaaaataggcaagttagatcagaaccagagaaaagattttgcttcaaaattaaattatttaaagacaaaagtaacggagttactggaaaatagacttgagagctttgaccaattggaaataaataaaaagcttaaaaacgaaaaaatagatgtaactttgcctggcagaacttattttacaggtaaaattcatccagtttcacaagttatagacgaggttacttctatattttcggaaattggattttcagttgaagaaggtcctgatgttgaaaatgagtattataatttttcagcacttaacacacctgaaaatcatccagcaagagatatgcacgatactttttatcttaacaaatctaaagatttacttttaaggacacatacatcgccagtgcaaattagaacaatgttaaaaagtaagcctccttttaaaataatagctccaggaaggacttatagacatgatagcgatcagactcattcacctatgtttcatcaactagaaggtttgcatattgatcaaaatattaacatgggtcaccttaaaggctgtttatattattttttaaaaaaattttttgaagttgaaaaagtgaaaataagatttaggccaagtcattttccttttactgaaccttcggccgaagttgatattggatataaaattcaagatggaaaaattaaaattggagaaggtgataaatggttagaaatacttggttgcggaatggtgcatcctcaagttttaaaaaatgcaaaagttaacccaaaacaatatcaggggtacgctttcggtgtaggaatagatcgattagcaatgttaaaatatggaatcaatgatcttagagctttttttgaaagcga

SEQ ID NO: 302084 - DNA, 814 bp, Unknown
  Bacterial polypeptide expressing nucleotide sequence isolated from the Sargasso Sea
taacacagaaaataatattgaaaaagtaaacaatatcaaatccgaactatttggaaaaaacggaattatatcaaacgaatttaaaaaattaggttcaatttctgtagaggaaagaaaaaaattagcctcagatttaaataatattaaagatgaacttcaaaataaaatatcaatcaaaattcaagaaattgaaactaaagaaattaatttaaagcttgagaaagaaaaaattgatgtaactcttccagaaagaaatattgaaattggtaaaattcatccagtctcccaggtaatagatgaaatttcatctatattttctgaaataggatttagtgttgaggaaggcccagatgtagaaaatgaatataataattttacagcattaaatacaccagataatcatccagctagagatatgcatgatactttttaccttgataataataaggaattacttttgagaactcacacatctccagttcaggtaagaactatgctaaaaggtaaacctccttttaaaattattgccccaggacgaacttacagatcagatagtgatcaaacccatgctccgatgtttcatcaagttgagggacttcatatagataagaatataaatatgggacatttaaagggatgtttaaattattttattaaggagttttttgaagttgataaaattaaaatgagattcagaccaagtcattttccatttacggaaccttcagcagaagtagatataggatatgaaattaacaatggaaagattgtaattggtgaaggtaataaatggttagaaattctaggttgcgga

SEQ ID NO: 302085 - DNA, 537 bp, Unknown
  Bacterial polypeptide expressing nucleotide sequence isolated from the Sargasso Sea
gagatatgcaggatacattttttatcaataaagatattgttttgcgtactcacacgtctaatgtgcaaatacatttaatggaagaaaatgatccgccactaagatttattgtccctggaagagtttatcggaatgaagcaataagttataagagctattgtctatttcatcaagtggagggtttgtatgtagataaaaatgttagtttcggtcaattgaaaggatgtctagaatattttgtaaaaaaaatgtttggtgaaaaatgcaagatgagatggcgacctagctattttccttttactgaaccgagtgctgaggttgatatatgggatgaacagcgcaaccaatggatggaaatactaggatgcggtatggttgaccctgaggtatttaataatgtcggatatgattcaaagatatggcatggttatgcatttggcatgggtgtagaaagaatcgctatgttgaagcacaatattgatgacataaggcttttttataacggtgatataagatttttaaggcagttcaaatgat

SEQ ID NO: 302086 - DNA, 610 bp, Unknown
  Bacterial polypeptide expressing nucleotide sequence isolated from the Sargasso Sea
tatgcacgatactttttatttagataataataaaaaaatattacttagaacacatacatcaccagttcaaattagaacgatgttaaatggtaagcctccatttaaaattattgtaccaggcagaacttatcgttgtgatagcgaccaaactcatgcaccaatgtttcatcagcttgaaggactacacatagacaaagatatcaccatgggtcatttaaaaggatgtttagactacttcattaaagaattttttgaggttaaaaagattaaaatgcgatttagacctagccattttccatttactgaaccttcagcagaagttgatattggctatagattagaaaatggaagaattattgttggtgagggtgataagtggcttgagatattaggctgcgggatggttcatccaaatgttttaaaaaatgtcaaagttgatacaaaaaaatttcagggttatgcatttggaatgggaatagatagacttgcaatgttaaaatacggaataaacgatcttagatctttttttgaagctgattttcgatggttaaattattttggatttgaccctttagacgttccaacaaactatagaggtctgagcagatga

SEQ ID NO: 302087 - DNA, 245 bp, Unknown
  Bacterial polypeptide expressing nucleotide sequence isolated from the Sargasso Sea
aaaggagataaatgttggagatttaggttgcggaatggttcatcctaacgttttaaaaaatactaaagttgaccctagtaaataccagggctttgcttttggaatgggcattgatcgtctagcaatgcttaaatatggtataaatgatctaagagctttttttgaaactgattacagatggctcaatcattttggtttcgatccattagatgttccaacaaattatagaggattgagcagatgat

SEQ ID NO: 302088 - DNA, 240 bp, Unknown
  Bacterial polypeptide expressing nucleotide sequence isolated from the Sargasso Sea
atcaatggcttgagattttaggatgtggaatggttcatcctaatgttctcaaaaatgtcaaagtcaatccatccaagtatcaaggttatgcttttggaataggtattgatagactagcaatgcttaaatatggaattaatgatttaagagccttttttgaaactgattatagatggttaagtcattttggatttgatcctttagatgttccgtctagttatagaggtttaagccgatgaa

SEQ ID NO: 302089 - DNA, 871 bp, Unknown
  Bacterial polypeptide expressing nucleotide sequence isolated from the Sargasso Sea
atgtcagatattataaaaattaaagaagaatacttagtaaagcttaaaggcaatttagatctcaatacggtaaatcaattaaaatcagaattatttggaaagaacggaaaaatttcaaacgaatttaaaaaaatgagctccatttcagctaatgaaagaaaaaaatttgcatcagatctgaattcaataaaagatgagttgcaaagcttaattgaaaaaaaaattcaagatatagaaattaatgaaataaatttaaaacttaaaaatgaaaaagtagatgtaactttacctgaaagaagctttaatttaggtaagatacatcctgtatctcaggtaatagatgaaatatcctcaatattttctgaaattgggtttagcgttgaagaaggtccagatgttgaaaatgaatataataattttactgcattaaatacaccagattatcatcctgctagagatatgcatgatacattttatttagataataataaagaatatttactgagaacacatacttcccctgttcaagttagaacaatgttaaaaggcaaacctccatttaaaattattgctccaggaagaacttatagatctgacagtgatcaaacacatgcaccaatgtttcatcaagttgaaggtctccacatcgataaaaaaataaatatgggacatcttaaaggatgtctaaattattttataaaagaattttttgaaattgataaaattaaaatgagatttagaccaagccattttccttttacagaaccgtctgcagaagttgatattggttatgaaatcaaggagggtaaaataattataggagaaggagataagtggttagaaattttaggctgtggaatggtcacccaaa

SEQ ID NO: 302090 - DNA, 751 bp, Unknown
  Bacterial polypeptide expressing nucleotide sequence isolated from the Sargasso Sea
cacccggtctcacaagtgatagatgagatttcatctatattttctgagataggtttttcagtcgcagaggggcctgacgttgaaacagaatataataatttcacagctttgaatactcctgaagatcatcctgcaagagatatgcatgatactttttatttagataaaaataaaaaaattttactaagaactcatacttcaccagttcaaattaggactatgttaagcggcaaacctccatttaaaattattgttccaggtagaacttatcgttgtgatagcgaccaaacacatgcacccatgtttcatcagctagaaggtttacatatcgataaagatattactatgggacacctaaagggatgtttagattattttataaaagaattttttgaggtcaaaaaaattcaaatgagatttaggcctagtcattttccatttaccgagccatcagctgaggtcgatataggatatagacttgaaaatggaagaattattgttggtgagggagataagtggctcgaaatattaggttgcggaatggtacacccaaatgttttaaaaaattcaaaagttgactcaaaaaaatttcaaggttttgcttttggaatgggtatagatagattagcgatgcttaagtatggaataaatgatttaagatctttctttgaagccgactataggtggataaattattttggctttgatcctttagatgtcccaacgagctatagaggtttgagcagatgat

SEQ ID NO: 302091 - DNA, 604 bp, Unknown
  Bacterial polypeptide expressing nucleotide sequence isolated from the Sargasso Sea
aatgaaatttagtgagaaatggttaagggaaattgttgatccagcaattgattctaaaaaattatcacatcaattaacaatggcaggtcttgaggttgatagcgtgacaaaagcttgtcctgaatttgatggtttatttgttgctgaggttaggtctgtaaaaaaacatcctaatgcagataaattacaaatttgtgaggttgattgttcagataaagatctttatacaattgtttgtggggcgccaaacgtaaaagaaggtatgcgcacgattttggctaaagttggcgcacaattatcaggtaaaccaaaattaaagagtataaagcttaagggcgttgagtcatttggaatgctttgttctgcgagtgaaattggacttggtgatgatagcgatggaattattgaattatctctaactgagccaattggcactcccttgaaaaatattattgatattatggataatattatcgatctatcgttaaccccaaatcgtggcgattgtttgagtatctatgggattgcaagagaagtgatggccttaaataagatagataaaggtaatttcaatacaactcagactaatttaccaaagattact

SEQ ID NO: 302092 - DNA, 851 bp, Unknown
  Bacterial polypeptide expressing nucleotide sequence isolated from the Sargasso Sea
taaactccaagaaattgaaacaaaagagatcaattctaaacttgaaaatgaaaaagtagatgtaactttacctgaacgagaatttagtagaggaaaaatacatcctgtttcacaagtaattgatgagatatcgtcaatattttcagaaattgggtttagcgttgaagaagggccagatatagagaatcagcataataattttactgcattaaatactcctgataaccatccagcgagagatatgcatgacactttttatttagataataataaagaattattattaagaacccatacctccccagtacaggttagaactatgttaaatggaaagcctccatttaagattatagcaccaggtagaacatacagatctgatagtgatcaaacccattcccctatgtttcatcaagtcgaaggtcttcatattgataaagatataaatatgggtcatttaaaaggctgcttaaattattttataaaatcatttttcgaagtggacaaaattaaaatgaggtttagaccaagtcactttcctttcactgaaccatctgcagaagtagatattggttataagatgaaagatggaaaaatagtaattggtgaaggagataagtggttggaaattctaggttgtggcatggtacatccaaatgtacttaaaaatgttaaagtaaatcctgacatataccaaggctatgcttttgggataggtatagatagacttggaatgctaaagtacggaataaacgatttaagagctttttttgagactgattatagatggctcaatcatttcggttttgatccattagatgtgccatcaaattatagaggtcttagcagatgaa

SEQ ID NO: 302093 - DNA, 803 bp, Unknown
  Bacterial polypeptide expressing nucleotide sequence isolated from the Sargasso Sea
tatgatttgctctgctggagagcttggcttaggtgagggattggacccagcgggtggaattttggagttgccagcggatgctcctgtggggaaagattttcgtgagtattatgaccttgatgatcatgtggttgacgtagagctcacgcctaatcgtggtgattgtgcgtgcttattagggattgctcgtgagctggcggtggcgaatgaattatcgatttctagtccgcgtggtaaaggggtgtcagagacgacagaggatgttgtctcggtaacggtgaaggcggagcaagcgtgcccacgttatgccttgcgtgtaatgaaaaacgttaatttatctgctctcactcccctatggatggcggagcgtttgcgtcgcagcggattacgcgcaattaatccggtagtggatgtgttgaattacgtgatgttggaattgggtcagccgatgcatgcttttgatcgaagtaaggtccatggcgcggtgatggttcgtttagcggatccaaaagagcgtttaaaactgctcgatgagcatattgctgatctggatgaggaaacgctcgtaatcgcggatctgaaaggccctctggccgttgcgggaattatgggggggttggactcaggtgtgaccacggatacacgtgacattgtgcttgaggctgcgttttttgacccgatagggattcgacgttcagcagcatcattggggattcagtctgactcgagttatcgttttgagcgcggtgttgatcctgagctgcccttggttgcgatggcgcgagcgtctgagttgttgcagc

SEQ ID NO: 302094 - DNA, 634 bp, Unknown
  Bacterial polypeptide expressing nucleotide sequence isolated from the Sargasso Sea
cgtgttattaataatgtagtagattatacaaattatgttcttcatgatattggtcaaccgctacatgcattcgatagggataaattatatggaactatatcagtcagatttgcaaaagataatgaaattttaaaaacattagatgagcaagaaagaaatttgagttctaatgatttaattattacagatgatgacaaaccaatagctcttgctggcgttatgggaggttatgatacagaagtcactaattcaacaaaaaaccttcttatagagagtgcatatttcgataaagtatcaattatgaaaacttcacgaagattaaatttgatatctgatgcttcaattagatttgaaagaggtatagattttaatcttcaacaacaaggtctacaaagattcgttaatctttttgaaagtgatcaagatataaactattcatctattgcagatagcagtaaaaatggaatttcttatgataaaatttcatttcaaaaaagtgaaatagaacaaatattaggagtagaattagacgatgaatttattaagaatacactcttaaaacttaatattgattcacaaatttctgaaaacaaaatatcatttacatcgccttcatggagatatgatttagaga

SEQ ID NO: 302095 - DNA, 901 bp, Unknown
  Bacterial polypeptide expressing nucleotide sequence isolated from the Sargasso Sea
aaaagaagaattacaaagctccttagtgaattaggaaaattagatcaggatgaaagaaaaaaattaggacctgagataaatgacctcaaaaacaaagttctcgaaaaaatacaagaaaagaaagagttttttttagaccaagtattaaataaaaaactcctagaagaaaaaattgatgtaactttgcctgtaaaatcgagccaaaatacgaatggaagaatacatccagtttctcaagttttagatgaaataacggaaatttttggttcactaggctatgagatagctgatggaccagatattgaaacagagtattacaattttaatgctctcaatattcctgaatcacatccagcaaggcagatgcatgataccttttattttgatgaatttgacaaagaccaaggacaatcagtattaagaacacatactagtccagttcaagttagaactatggaagaaggagagcctccttttagatttatatcccctggaaggacttatagatgtgactcagatcaaacacatacaccaatgtttcatcaaattgaaggtttgtcagttgataaagaaactaacctcggtcaccttaagtggacattagaaacttttttatcctccttctttgagattaaaaatacaaaaattcagatgagaccaagttattttccctttactgaaccatcattagaaatagatgttttgtgtgacagaagtggacctgttttaaaaattggcgaaggatcagactggttagaagttgctggcgcaggtatggttcaccctaatgtcttaaaatcagcaaatatagattctgatatttatcagggatttgcttttggttttggtttagaccgtttagcacaattaaaatacggcattccggatttaagaactttct

SEQ ID NO: 302096 - DNA, 763 bp, Unknown
  Bacterial polypeptide expressing nucleotide sequence isolated from the Sargasso Sea
tatagaggaaaaacatcctgtttcacaagtaattgacgagatatcatcaatattttcagaaattggatttagcgttgaagaagggccagatatagagaatgagcattataattttactgcattaaatacacctgataatcatccagcaagagatatgcatgatactttttatttagataacaataaggaattattactaagaactcatacatcaccagtacaagtaagaacaatgttaaatgggaagcctccatttaaaattatagctccaggcagaacatatagatctgatagtgaccaaactcattctcccatgtttcatcaagtcgaaggacttcacattgataaagatattaatatgggccatttaaaaggatgcttaaactattttataaaatcattttttgaggtggacaaaatcaaaatgagatttagaccaagccactttccttttactgagccatctgcagaggtagacattggttatgaattaaaaaatggaaaaatagttattggtgagggagataagtggttagaaattctaggttgtggcatggtacatccaaatgtgcttaaaaatgtaaaagtaaatccagataaataccaaggatatgcttttggtattgggatagatagacttggaatgctcaagtatggaataaatgatttaagagctttttttgagactgactacaggtggcttaaccattttggttttgacccattagatgtgccgtcaaactatagaggcctcagtagatga

SEQ ID NO: 302097 - DNA, 859 bp, Unknown
  Bacterial polypeptide expressing nucleotide sequence isolated from the Sargasso Sea
aaaaaatggtttgctaaattcagagtttaaaaagcttggatcactatctccagaggataaaaaaaaagtagcttcagaaataaataatacaaaacaagaactattaaaattatttcacaacaaagttttaaagctagcaaattctgaaatagacgaacaggttaaaaaagaaaaagatgatgtaactctgccagaaaaagattttagaattggtaaaatacatccagtgtcacaagtaattgatgaaatttcatctatattctcagagattggttttagtgttgaagaaggtcctgatgtagaaagtgaatattataattttacatctcttaatacacctgaaaatcatcctgcgaaagatatgcacgatactttttatcttgatgaaaatatgaaaacattattaagaactcatacttctccagtacaagtaagaacaatgttgaaaggaaaaccaccttttaaaattatagcaccaggaaggacatacagaagtgacagcgaccaaacccatactcctatgtttcatcaattagaaggtcttcatattgataaaaatataaatatgggtcatttaaaaggttgtttaaattattttgtaaaagagttttttgaagtagataaaattaaaatgagatttcgtcccagtcattttccatttacagagccttcagccgaagttgatattggataccgcatagaaaaaaacaaaattgtaattggagaaggagatagatggttagaaatccttggctgcggaatggttcatcctaatgttttaataaattcaaaagttgatccaaaaaaataccaaggatttgcatttggaataggcatagatagattagcgatgcttaaa

SEQ ID NO: 302098 - DNA, 653 bp, Unknown
  Bacterial polypeptide expressing nucleotide sequence isolated from the Sargasso Sea
aaatgatagaaaaattcgagcatcatctttaaataatgaaaaacaaaaaattactgaagccatttataacaaattaaaagagctcgaaattttagaaataaataaaaaattacaaaaaaataaagttgatgtaactttaccagctagagagaggccaaatggaaaaattcatcctgtctcacaagtaattgatgagatttcttctatattttctgaaataggcttttctgtagcagaaggaccagatgtagaaagtgaatataataattttacagctttaaatacaccagaggatcatccagccagggatatgcatgatactttttatttagacaaaaataaaaaaatactacttagaacacatacatcaccagttcaaattagaacaatgttaagtggtaaagccccatttaaaataatagtacctggcagaacttatcgatgtgatagcgaccaaacacatgcaccaatgtttcatcaactggaaggattgcatattgataaagatataactatgggtcatttaaaaggatgcttagattattttgttaaagaattttttgaggtaaaaaaaatccgaatgagatttagaccgagccactttccattcacagaaccttcagcagaagttgatattggatacagacattgaa

SEQ ID NO: 302099 - DNA, 455 bp, Unknown
  Bacterial polypeptide expressing nucleotide sequence isolated from the Sargasso Sea
accaatgtttcatcaactggaaggcttacacatagacaaagatataaccatgggacacttgaaaggttgtttagattattttgtaaaagaattttttgaggttaaaaaaatcagaatgagatttagaccaagtcactttcctttcactgaaccatcagctgaagtagatattggttacaaactagagaatggaagaataattgtgggtgagggagataagtggttagaaatcttgggctgtggaatggttcaccccaatgttttaaaaaatgcaaaagttgatcctaataagttccaaggttttgcatttggcatgggtatagatagacttgctatgttaaaatatggaattaacgatcttagatctttttttgaaagtgattatagatggttaaattattttggttttgatccattagatgttccaactaactacagaggtttgagtagatgat

SEQ ID NO: 302100 - DNA, 841 bp, Unknown
  Bacterial polypeptide expressing nucleotide sequence isolated from the Sargasso Sea
agaaatcgatactaacgagattaatgaaaaacttaaaaatgaaaaagttgacgttactttaccaataagacctaaacggcaaggaaaaattcatccagtctcccaagttattgatgagatatcttcaatcttttcagaaattggattctcagtagcagaagggcctgatgttgagtccgaatataataactttacagcattaaatactccagaggagcatcctgcaagagatatgcacgatactttttatttagaggaaaataaaaaattattgttaagaacacatacatcaccagttcaaataagaacgatgttatcaagcaagcctccatttaaaataattgtgcccggaagaacttatagatgtgatagtgatcaaacacatgcaccgatgtttcatcaacttgaaggtctccatatagacaaaggtattacaatgggacatcttaaaggttgtctggattattttattaaagagtttttcgaggttaaaaatgtaaaaatgaggtttagaccaagtcatttcccttttacagagccatcagctgaagttgatattggttataaaattgaaaaaggaaaaattgttattggagaaggtgataaatggttagaggttttagggtgtggaatggttcatccaaatgttttaaaaaatgtaaaaatagacttaaaaaaatatcagggatttgcattcggaattggaattgatcgtctagcaatgttaaaatatggaattaatgatttaagagctttctttgaggcggattatagatggctaagtcattttggatttgacccattagatgttccaacaaattatagagggctaagtaaatga

SEQ ID NO: 302101 - DNA, 510 bp, Unknown
  Bacterial polypeptide expressing nucleotide sequence isolated from the Sargasso Sea
ttaaaattatagcaccaggaagaacgtatagaagtgatagtgatcaaacacatactcctatgtttcatcaactagaaggactccatattgataaaaatataaccatgagtcatttaaaaggttgtctaaattattttgtaaaagagttttttgaagtagaaaaaattaaaatgagatttcgtccaagccattttccatttacagagccttcagcagaggtagatattggatatagaattgaaaataataaaattgtaattggtgaaggagacaagtggctagaaatactaggttgtggaatggttcatccaaatgttttaaaaaattcaaaagttgatccaaataaatatcaaggttttgcatttggtataggtatagataggctagctatgttaaaatatggaattaatgatctaagatccttctttgagtgtgattatagatggttaaattattatggctttgatcctcttgatgttccaacaaattatagaggtttaagcaaatgaa

SEQ ID NO: 302102 - DNA, 769 bp, Unknown
  Bacterial polypeptide expressing nucleotide sequence isolated from the Sargasso Sea
atgattatcactataccttggcttaaagaacatctcaaaacatcagctaaagaaaatgaaattattgatcagctaaccaacatcggacttgaagttgaaagtgtaaaagaaaactcgggagagatgagtaaatttaaaattgcgaaagttttaaaagcagaaaagcatcctaatgcagataagttaaaagtttgtgaagttaatatcggcgggaaagagattttaaaagttgtttgtggagctccaaatgccagagaaggtctaatcacaatctatgcacctcctggagctataatacctaaaactaattttgaattaaaggtagctaaaataagaggcgttgagtcgaaagggatgctttgctctgagagtgaactcaatttatctgaggaaagtgaggggattatagagcttaaaaataaagagaaagagataggaaaaagctattttaaaagtagctcacaaaaagctatcgatatttctataacccctaaccgtgctgattgtttaggcgttagagggatagcaagagacctatcatctacaggagttggaaaattaatatctataaatagaaagaaaattaaacaaaatacaaaacagcaaattaaaacatccattactaaagaaaagaaccaagggtgcgatatctttggaagctgttacattaaaaacattaccaacaaagaaagtcctaaatggcttaaaaataaattaatcgctttaggtttaaaacccatttctgctgtagtggatgttactaactgat

SEQ ID NO: 302103 - DNA, 482 bp, Unknown
  Bacterial polypeptide expressing nucleotide sequence isolated from the Sargasso Sea
tagatgtgatagtgatcaaactcatgcaccaatgtttcatcagcttgaaggccttcatatagataaaaatataacgatgggccacttaaaaggttgcttagattattttataaaggaattttttgaagtcaaaaatgtaaaaatgagatttagacctagtcattttccatttaccgaaccttctgctgaagtagatattggctacaaaattgaaaatgaaaaaattgtaattggtgatggagataaatggttagaaattttgggttgtggaatggtacatcctaatgttctcagaaatgcaaaagttgactcaaaaaaataccaaggatttgcatttggtatgggtattgatcggttagccatgttaaaatatggtattaatgatttaagagccttttttgaaacagattacagatggttaagtcattttggtttcgatcccttagatgttcctacaaattataggggcttaagtaaatgat

SEQ ID NO: 302104 - DNA, 568 bp, Unknown
  Bacterial polypeptide expressing nucleotide sequence isolated from the Sargasso Sea
tttgagaactcacacatctccagttcaggtaagaactatgctaaaaggtaaacctccttttaaaattattgctccgggacgaacttacagatcagatagtgatcaaacccatgctccgatgtttcatcaagttgaagggttacatatagataaaaatataaacatgggacatctaaaaggatgtttaaattattttattaaggagttttttgaagttgataaaattaaaatgagatttagaccaagtcattttccatttactgaaccttcggcagaagtagatataggatatgaaattaaaaatggaaagatagtaattggtgaaggtgataaatggctagaaattttaggttgtggaatggttcatccaaatgttttaaaaaatgtaaaagttaatccaagtaaatatcaaggatatgcctttggaattggcatagacagactgggaatgttgaaatatggaattaacgatttaagagctttttttgagactgattatagatggttaagtcactttggttttgatccattagatgtcccatcaaattatagaggactgagtagatga

SEQ ID NO: 302105 - DNA, 791 bp, Unknown
  Bacterial polypeptide expressing nucleotide sequence isolated from the Sargasso Sea
gcggttttgcgcatttgctttcatatatggacttgcgagggaaacagcagccattacccggatgcggctcaaatctgaaaaattgccggatctttcaaaactcaatttaccaaaacaatctagttctcctgctgagacttctgaagtggattttctgaagttgagaattgagaatccgaacctctgtcctcgatacagtgctctcctggtgcgcgggatcaccatcggcccctctcccttctggatgcagcaaaggcttcaacggtccgggatgagaccgatcaacaacattgttgatattaccaattacgtgatgctcgaacttggacagcctctgcatgcttttgattaccaggcgcttagccagcgtgcagcaggagaaactccagaaattttcgtcaggtgtgctgtcaatggggaggtcatgaccactcttgatggagaagaaaggaagttggacgatcagatgctgatgattaccgacgaagcgggtttgattgccattgccggggtgatgggaggagaagaaaccgaggtcggcaatgaaacgaaagatgttttgcttgaatccgcaaatttcgattttctcaacaatcgccgaacgtcccaattactcaaattgaaaaccgaagccagtgaacgtttcgggaaacggttgaatgccgatggaaccatgacggcggcgttaagagctgcagaattgtgcgtgtcgattgcaggagggactttggaactccaggcagcagatctttatccaggaaagctcccagatgaatcggtggaacttgatt

SEQ ID NO: 302106 - DNA, 578 bp, Unknown
  Bacterial polypeptide expressing nucleotide sequence isolated from the Sargasso Sea
tttgagcactgatcaaataaatgaaatcaaaactgagctgtttggtaaaaatggtttaatttcttcaaaatttaaaataataggctcaattccagagactgatagaaaaaaatttgcatcatatttaaatcaagttaaagacgaacttcagaatttgataacttctaaaatcaatgagatagatggaaaaaaaataaacgaaaaattagaaaaagaaaaagtagacataactttacctgaaagaccatttgttagaggaaaagttcatccagtatcacaaactattgatgaaatttcatgtattttttctgaaataggatttagtgttgaagaaggccctgatattgaaaatgaatataacaactttactgctttaaacacacccgacaatcatccagcaagagatatgcacgatacgttttacttagatgaaaacaaagaggttttattacgaactcatacttcaccagttcaaatcagaactatgctgaaagataaacccccatttaagatcattgctcctgggagaacttatagatctgatagcgaccaaacacacgcaccaatgtttcatcaag

SEQ ID NO: 302107 - DNA, 532 bp, Unknown
  Bacterial polypeptide expressing nucleotide sequence isolated from the Sargasso Sea
tatgaaaaaaggaaaaccaccatttaaaataatcgcaccaggaagaacttataggtcagatagtgatcaaacacatgcccctatgtttcatcaagttgaaggtttgcatatagataaaaatataaatatgggacatttaaaaggttgtttaaattattttataaaagagttttttgaagtaaaaaaaataaatatgagatttaggcccagtcattttccgttcactgaaccatcagctgaagttgatattggatatgaaataaaagatggaaaaattgtaattggtgatggagataaatggttagaaattttaggttgtggaatggtgcacccaaatgttttaagaaatgtaaaagttgatcccagaaaatatcaaggttatgcgtttggaattggtatagatcgtttggcaatgttaaagtatggaattaatgatttaagagctttttttgaaactgattataggtggctaaatcattttggtttcgatcctttagatgtgccatcaagctatagagggttgagtagatga

SEQ ID NO: 302108 - DNA, 820 bp, Unknown
  Bacterial polypeptide expressing nucleotide sequence isolated from the Sargasso Sea
attgtggaaaaaagaattagtaaaagttgtttgtggaggtccaaatgcaaaagataatttattaactatttatgctccaccaggatcagtaattccaaaaaataatatgaaattagaaatttcaaaaataagaggagaaacttcttatggtatgctttgttcagaatcagagcttaatttatcggatgaaagtgagggtattattgaattaaatcaaaattataaaaaaaaaataggcaaaagctattttgagagtaattcagataatgtaattgagctatctataactccaaatagaccagattgtttagggattagaggtatagcaagagatctttccgcaagtggattcgggaaattaattgaaaacaaatatattaagataaaaaaaaacggcaaacaaaatttaaaagtcaaaatagaaaaaagtaaaaaccaggcatgtaccttgtttggtagttgtttaattaaaaatataaaaaacaaagaaagtccagagtggctaaaaaaaagaattatttcattaggtttaagacctatatcagcagtggttgatgtaacaaactatgtgatgtttgatttaaataggcctatgcacgcttatgatgctgataaaatcaataaaggaataattgtaagaaattctaaaaaaggagaaaagtttaaagctttagacaataaagattataatttagatgatggaatgtgtgttatttctgaccatgaaggagttttgggtttgggagggataatcggaggtacaaggtctgggactgaattaaatacaaaaaatattttgctagaatcagcattttttgat

SEQ ID NO: 302109 - DNA, 1093 bp, Unknown
  Bacterial polypeptide expressing nucleotide sequence isolated from the Sargasso Sea
cgcgaggttgcggcgctcacgggagcaccgctctccttgccatccctgcaacttcaaccaccccatcagcccctcgactgtgatcaggacagcgctgcagcgttcctcagaggtgggctgtacagcctcaccttgatcaaaggcgtggatggttcgcggtcgtcatccagctggttgaaacaacgccttgatcgggccggcatcaacagcatcaatgccattgttgatgtcaccaaccacgtgatggttgagcaggggcaaccgctgcatgctttcgatgccgatgctcttgaggcgctgaccggcaagccggttacagcagccagctttggactgcgtcaggcacgctcgggtgaagccttcaccggccttgatgagcggcagctgatcctcgactcaaaggcacaggtggtcacatgtcacgacctgccgattgcccttgccggcgtgatggggagcaaagacagtggcgtcagcgcgtcgacaaaccgaatctggcttgagtcggcgatgttctctgcgtccgcggtgcgaaccaccgcccgggctgtcggactgcgaaccgatgcgagcagtcgatttgagaagggtctgccggtcgatctcacccttgcctgttcggttagagcggttgagatgctttcgcaagccttcgatctggaggtgtgtggtcgctgggtcagcggtgatgtgccagaggtcggggaagccgtgttgctgcgtcgtgaggcgttgcagagattgcttgggcccctgcataccagcgagggacctgccgatctcgatgatgcgtccatcgagcgctgcctgacagcactcggttgttccctgacagccactgctgctggctggcaagtggtggcaccaccgtcacgtcggcaggacctgcatcgtgaggtcgatctgatcgaagaggttgcccgactcaccggatttgatcgtttcggagctcatctgcccgacccacttgttccgggtgctttgaccccaagacaacaggccgatcgacgcctccgtcacctgttctcagccgcaggcctccaggagatcaccaccctttccttggtcggtgcctcggagcaggaaccagagc

SEQ ID NO: 302110 - DNA, 633 bp, Unknown
  Bacterial polypeptide expressing nucleotide sequence isolated from the Sargasso Sea
ctgaaaaccatccagctagagatatgcatgatactttctatctagatgaaaaaaaacaaaaactattacgcacacatacttctccagttcaaattagaaccatgctgaaagacaaaccaccatttaaaattattgcacctggaagaacttacagatcagatagtgaccaaactcattctccaatgttccatcaagttgaaggacttcatattgataagaatattaatatgggtcacttaaaagggtgtttgaattattttatcaaagagttttttgaagtagataaaattcaaatgagatttagaccaagccattttccttttacagaaccatctgctgaagttgatattgggtatgagatgaaggatggaaaaattgaaataggagaaggcaatcaatggttagagattttaggatgtggaatggttcatccgaacgtcttaaagaacgttaaagtagacccaacaaagtttcaggggtacgcatttggtattgggattgatagacttgctatgctgaaatatgggataaacgatttaagagctttttttgattgtgattacagatggttaaatcattttggatttgaccctttagacgtacctacgaattatagaggtcttagtcgatgaa

SEQ ID NO: 302111 - DNA, 997 bp, Unknown
  Bacterial polypeptide expressing nucleotide sequence isolated from the Sargasso Sea
aaaatattaaatcacagttttttaggtaaaaatagccaaatcaatcaagaatttaaaaaacttggctctttatctgaagaggaaaaaaaaattaaagcttcatcattaaataatgaaaaacaaaaaattactgaagcgattaataataggtttaaagaattagaaaaattagaaatcagtaaaaaattacaaaaagataaagttgatgttactttacctgctagagagagacctaatggtaaaatacacccagtctctcaggttatagatgaaatctcatcaatattttctgagatcggtttttctattgcagaaggtcccgatgttgagaccgaatataataatttcacagcattgaatactccagaagatcatcctgcaagagatatgcacgataccttttatctagataatgacaaaaaaattttattgagaactcacacttctccagttcaagtaagaacaatgctaaatagcaaacctccttttaaaattattgtccctggtagaacttatcgttgtgatagtgatcaaactcatgcaccaatgttccatcaacttgagggcttacatatagataaagatataaccatgggacatttgaaaggttgcttagattattttgtaaaagaattttttgaagtaaaaaaaatcagaatgagatttagaccaagtcactttccttttaccgaaccatccgctgaagtagatattggttacaaacttgaaaacggaagaataattgtgggtgagggagataagtggttagaaattttgggctgtggaatggttcaccctaatgttttaaaaaatgcaaaagttgatcctaataagttccaaggttttgcatttggcatgggtatagatagacttgctatgctaaaatatggaatcaatgatcttagatctttttttgaaagtgattatagatggttgaattattttggttttgatccattggatgttccaactaactatagaggtttgagtagatgat

SEQ ID NO: 302112 - DNA, 1069 bp, Unknown
  Bacterial polypeptide expressing nucleotide sequence isolated from the Sargasso Sea
atgtcagatcttaaaaaattaaaagaagaatttctttcaaagttaaatagtcaattaaatctttcagaaattaatcaaataaaatctgatttgttcggtaaaaatggattagtttcatcacaattcaaaaaaattggaacaatggctgagtccgagagaaaaaaattcgcctcagatctaaatattgttaaagatgaacttcaaaatttaattgatgtaaaaattaacaaaatacaaaatgctgaaataaatgaaaagttacagagggaaaaagtagacattactttacctgaaagaccatttgtaagaggtaaaattcatccagtgtcacaaactattgatgaaatatcatctattttttctgaaataggtttcagtgttgaagaaggtccagatgttgaaaatgaatacaataattttacagcattgaatacaccagataaccatcctgcaagagatatgcatgacacattttatcttgatgaaaaaaaagaaaaactattacgtacacatacttcacctgttcaaattagaacaatgttgaaagacaaacctccgtttaagattattgcacctggaagaacttatagatcagatagtgatcaaacgcactcacctatgtttcatcaagttgaaggtcttcatatagataaaaatattaatatgggtcatttaaaaggatgtcttaattattttatcaaagaattttttgaagtagaaaaaattaaaatgaggtttagaccaagtcactttccttttacagaaccatccgcagaagttgatataggatatgaaattaaagacggaaaaataataataggagaaggtgatcaatggcttgaaattttaggatgtggaatggttcatccaaatgttttaaaaaatgtgaaagttgatccaaataagtttcagggatatgcgtttggtatagggattgatagattggctatgttaaaatatgggattaatgatctacgatctttttttgattgtgattatagatggttaaatcattttggattcgatccattggatgtgccaacaaattatagaggcttgagtagatgaa

SEQ ID NO: 302113 - DNA, 987 bp, Unknown
  Bacterial polypeptide expressing nucleotide sequence isolated from the Sargasso Sea
catgtctttatcagttgattctgtagatattaaaaaaaagatcgaaagttgcaaaacttttcaagatgtagagataattcgattagaatatctgggtaaaaaaggattaataccatctgaaatgaaacttttgggtaaacttcctattgatcaaaaaaaaatcaaaggtcaggaactaaataaacttaaaacattcattgaagaagcaattaatgaccaaaaaactctaattgaaaataatgaattagaaaaaaaattaaaaaatgagagtattgatgttaccctacctcataatgaggaaacaaaaggaaagattcatccaatctctcaaacaatttttagtataatagaaatttttggaaacttaaattattctgttgaagctggaccagatattgaaactgattttaataatttttctgcattaaatataccgccccatcaccctgctcgtgagatgcaagacactttttatgtaaatgatattaatggtgaagacaatgttttaagaacacatactagtccagttcaagttaggactatgcttaaatcaaaacctccaataaagattattgttccaggaagaacatacagaagtgactcagactctactcatacaccaatgttccatcaggttgaaggactagtagtaaataaaaatgccacaatggcagaccttaaatcaacactaattttatttttgaaagaattttttgagattgatgacttaaaatatagatttagaccaagttattttcctttcactgaaccaagtgctgaaatggacgttgcttatacaaaaaaaaataatgttctaaaaattggtgaaggagaagattggttagaaattttaggttgtggaatggtgaatccaaaagttttagaaaactgcaatatagactctactgtttatcaaggttttgcttttggtatgggaattgagcgactttctatgttaaaatatggaataacagaatatgcgcggtt

SEQ ID NO: 302114 - DNA, 745 bp, Unknown
  Bacterial polypeptide expressing nucleotide sequence isolated from the Sargasso Sea
aatggaacaatctgccttggatgaacaattatctaaagaagcaattgatgttactttgccattaagtccagacgtaggaagttaccatcctgtatctttgatagctcaagaaatctcaaattattttaaaaacaaaggttacgttctccgagaggggcctgaaattgaatcagagtatttcaatttttctgcattgaatattcctgaaaatcatcctgctagagacatgcacgacaccttttatttcgaagatggtaaccttttgagaactcatacttcgcccgttcaaatcaggtcgatggaattagaatctcccccattaaaaatattatgtccgggtaaagtattcagatgtgattcagatcagacgcatactcctatgtttcaccaagtggaaggtcttgttgtagataaagatataaattttgcacatctgaaaaatgaaatcttggagtttgtcgaatctttttttaatgacaacccaaaggtacggtttcgaccttcatactttccattcacagaaccttcagtagaagtagatatattgggaaagaatggctggttagaaataatgggatgtggaatggtccacccaaatgtattgaaaaacgtcgggctgaatccagaagtttactcaggttttgcttttggtatgggaatagaaagaatgaccatgctcagatatcaaatatctgatatcagaatgttatttgagaatgacttaagatttgtcacaaaaggataa

SEQ ID NO: 302115 - DNA, 1179 bp, Unknown
  Bacterial polypeptide expressing nucleotide sequence isolated from the Sargasso Sea
gttggggctagaagttgatcaatcaaaaaaagaaaaaaatgatttactaatcaaactagatttaactcctaacagaggagactgctttagcctgatagggatagccagagatgtttgtgcagttaataatttaaaattaaaacttccaaagtttaaaaagcaacaacaaagtctcgattctaaaaaaactgtttctgtagataagagcgcttgttcaagctatctaagtcaaatcatcaaattaaagaataaaggcaaaactccgcaatacatcaaaaaaactttaaaggctgctgatattggtcaagttaatccaatagttgatattacaaactatgtaatgctccacaccggacaacctttgcatgcttttgataataaaaagattggcaaaaaaatttatgtcgaatttccttccaaaaaaacaaggttgaaacttttggatggtgcttcctatgagataaataaagatttcctgacaatatccgatgaaaaagaagtaatagctctggctggaattatggggtgtgctaattctgaagtggatgaaacaactcaagaaatttttttagagtcagcttgctttgaacctgcaagcatcagaggaaatgcaagaaagttaggctttcaatctgatgcatcattaagattcgaaagaggagttgataaagaaatccaagagtatgcacttaattttgcagcacaactttatgctgaaatctttggaggagacttttcaaagatttttaaagaatctaaaaatcataaagcaaagaaaatatcgataagtaaggaattcattgattcaaggctcggcacagagattcctgctgccaagattataaaacttttaaaggcgttggaatttaaagttgaatcaaaaagaaatgtaatggaattaacctgtccttctcatcgatacgatattgaaattaaagaggacattattgaagagatagcgagaataattggatacgataatttacttaataaaagattgaaattgctagcttcctctcctgaagataaatcaattgaaaaggagaaactaagtaaagatatttttgttaatgctggatttaatgaagtgattaattacgcttttgttgattcatcttttgttcaaatgctcggtttaaataatgattcaattgagttagccaatcctatgtcgagcaa

SEQ ID NO: 302116 - DNA, 934 bp, Unknown
  Bacterial polypeptide expressing nucleotide sequence isolated from the Sargasso Sea
gcacaagatgcagccacattagaccaagttagggtcgaattcatgggtaagaaaggtaaacttaccgacttacttaaagggcttggaaagttatctaacgaagaacgtcctgccgcaggccaaaagattaaccaagctaagcaggttattcagcaagctatttctgcaaaaggtgagtttttacgcactgaagagcttaacaaaaagctagcagatgaagcgattgatgttactttgcctggtcgcactgaaaagcctggtaacttgcacccggttagccgcactattgcgcgcattgaatctttcttcggtgagcttggtttctcggtaaagaccggccctgaaattgaagatggttttcacaatttcgacgcactgaatattcctgcgaatcacccagcgcgtgccgatcacgacaccttttacttcaacccagacatgatgcttcgtacgcaaacctctggtgttcaaattcgtactatggaagcggaaaagccgccactgcgtattatctcgccagggcgcgtgtatcgtaacgactacgaccaaacacacacgccgatgttccaccaagtggaaggtttaatggttgataagaacgttagctttaccgaccttaaaggtattttgcacgacttcttacatcacttctttgaagagtcactagaaattcgcttccgtccgtcttacttcccgtttactgagccttcagctgaagtagacgttatgggtaaaaacggtcagtggctagaagtactaggctgcggcatggtgcacccaaatgtacttaaagcggtaggtatcgaccctgaagagtacacaggttttgcctttggtatgggcgtagagcgcttaactatgcttcgttacggtgttaacgacttgcgcgcgttctttgaaaacgatcttcgtttccttaagcagttcaactaag

SEQ ID NO: 302117 - DNA, 1880 bp, Unknown
  Bacterial polypeptide expressing nucleotide sequence isolated from the Sargasso Sea
accaaatagaggagactgtatgtcatatttgggtattgcaagggagctttcaggatatttcaataaaaaactaaaaaacaaaaaaacaaatctgaaaccaacaattgcaaatattttgaatgcagacagtggaaaaattaaagaatgtaactcttatggttcagtagaaatagaaaactttaatgttactagctcttcttttgaaatgagatacaggctcacacaggttggaacaagaataattaataatgtggtcgacattaccaattacattttatatgatatcggtcaaccattacatgcttttgatagagataaattatttggaacaatttctgtaagaaaagctaaaaacaatgagaaaattacaacacttgactcacaagttagaaaattagattcaaatgatcttgttattactgataatgataaaccgattgctctagctggagtaatggggggattagaaactgaagtatctgagaccaccacaaatcttcttattgaaagtgcgtattttgacaaagtatcaattatgaaaagttcaaggaaattgaacttgatatctgacgcatccataagatttgaaagaggtattgattataaaattcaaagatatggtttagaacgttttttaatggaattaaaagataatcaatctattaattattcagaaataaatgtagatgataaaggtaacttggataacaagaaggtaattctgaaatattctgaaataaaaaaactacttggtattgatttaaaagaatcatttattaagaaagttctaaaatttttaatgatcgattctgaagttagcaaagagagtgtaaaattcacaccaccctcatggcgatatgatctagatagaccagtggaccttatagaagaatttgcaaaacattatggttttaataattttgaatcaactctacctcaaggaattcacaaaaataataaaggaagttattgggatcttaagagttacttatcaagtgttctaacttccaataattttcaagaagtccaaacattaagctttgtaaataatgacaagaattttttattcaatccagaaaaaaaatatgttgagatatttaatgcaatcgatcaatcaagtaaatttatgagatcaaacctaatgtctagtttgatagatgtttataaattaaattacgatcaaaataatttatcaaatagttatttcgaaataaatactgtttttgatacttctaaaaataaaatttacgaggatgtacctaatcagaatattgttttaggatttctgacatcttctaccttatcaaatacggatactaggttaaaagatcaagaattagatctttactatgtaaaaaacatattaactcaattattaagctcatatgatctagaaccgattacgaaacctggatttcatcaaaattattcattttcaattattaaaaatggtcaaattataggacattttggacaacttgctacagagacacaaatgacgcttgaatttaataatgaaatatatttgggtgaaatttatattaataaactaaatttaaataaccttaaagaaattaattatgtaccactttcacaatatccatttgtaaaatttgatttgtctttttctgtgccaattgatttatctgctcatcttctagttgatgaaattaatgaattacttagagagaatgaaaattcaatcgaaatttttgatgattttcaacaagagaattcaagaaatttaggaattagaataattacaagaagctatgacaaaacatacgacgataatgagacaagagagattctgatgaatatatcacaaactttggaatctaaatttaacataacactcaactcaagtaaaaatgactgat

SEQ ID NO: 302118 - DNA, 1069 bp, Unknown
  Bacterial polypeptide expressing nucleotide sequence isolated from the Sargasso Sea
atgtcggatattaaaaaaattaaagatgaatacttagttaaaataaacaataatcataatttagataatctcaatcaaataaaatcagagttgtttggaaaaaatggaattattgcattagagtttaaaaagattagttctatttctgcaaatgaaaaaaaacagtttgcgtctaatctaaatttaataaaagatgaacttcaaaatgcactaaataaaggattcaaaacaatagaagcaaaagaaataaattcaaaacttcaaaacgaaaaattggatattactctacctgaaagaaattttaatcaaggaaaagtccatccggtttctcaagttattgacgaaatttcctcaattttttcagaaataggttttagtgttgaggaagggccagatgttgaaaatgaatataataattttactgcattaaatacaccagataatcaccccgcaagagatatgcatgatactttttatcttgataaaaaaaaagagtatcttttaagaactcatacttcacctgttcaagtaagaactatgaagaaaggcaaacccccatttaaaataattgcaccgggaagaacctatagatcagatagtgatcaaacgcatgcacctatgtttcaccaagttgaaggcttacatatagataaaaatataaatatggggcatttaaaaggttgtctaaactattttattaaagaattttttgaagtaaaaaaaattaagatgagatttagaccaagtcattttccattcaccgaaccatctgctgaagtagatattggatatgaaataaaagatggaaatattgtaattggagaaggagataagtggttagaaattttaggttgcgggatggttcatcccaatgttttaaaaaatgtaaaagtggatccaaaaaaatatcagggttatgcatttggtataggtatagatcgattgggtatgttaaaatatggaattaatgatttaagagctttttttgagactgattatagatggttaaatcattttggctttgatcctttagacgtaccttcaaactatagaggtttaagtagatgaa

SEQ ID NO: 302119 - DNA, 559 bp, Unknown
  Bacterial polypeptide expressing nucleotide sequence isolated from the Sargasso Sea
atgtcaaatcaaaaagaattcgaactgccaaaaataaataaaaatctcggtacttttcatccaataaatcaaatgatggaatatattatgaatcttttgatagattttggatttgaaattgttatgggtccagagatagaaagtgaggagtttaattttaatatgttaaatattaaagaatcacatcccgctagacagatgcatgacacgttttatgtaaataacaaaaaaaaacttttgagaactcatacatcacctgttcaagtaagaggcatgattaaaaaaaaacctcctttagcatttatttcaggtggaaaagttttcagaaaagacgatgattcaacccatctcccaatgtttcatcaagttgaaggaatttatgtcgataagaatgttagtttttcaaatctcaaagaccttatattcaaaattgtttactctctttttggcaaagatgttcaaataagatttagaccatcatattttccttttacggaaccatcagcagaggttgacattctttatgatggtaaaaaatggttagaaattcttgggtgtg

SEQ ID NO: 302120 - DNA, 1021 bp, Unknown
  Bacterial polypeptide expressing nucleotide sequence isolated from the Sargasso Sea
atgagtgatttagataaaataagttctgtatttaatgcaaagatagataccgttaaaacaaaagacgatcttcaaaatattaaaacagaattttttggaaaaaatggtcaaattaccctacagttcaaatctctaggatctttagatccagaaaaaagaaaagaatttgcttcaaatttaaataaaattaaagacgatctaacacatcaattagagcaaaaaaatttagagatcgaaacaagtgaaataaatgaaaaacttaaaaatgaaaaagttgatgttactttgccaataagacctgaacgccaaggtaaaattcatccagtttcacaagttatagatgaaatatcatcaatcttttcagaaataggtttttcagttgctgaaggacctgacgttgaaacagaatataataattttacagcgctaaatacacctaaagaacatcctgctagagatatgcatgacactttttatttagaagaaaataaaaaattgttgttaagaacgcatacttcaccagttcaaataagaacaatgctatcaagtaaaccaccatttaaaataatagtaccgggaagaacttatagatgtgacagtgatcaaactcatgctccaatgtttcatcagcttgagggcttacatatagataaaggtatcacaatgggacaccttaaaggttgcctagattattttataaaagagttttttgaagttaaaaatgtaaaaatgagatttagaccaagtcatttcccttttaccgagccatcagcagaagttgatattggttacaaaattgaaaaaggaaaaattgttattggtgaaggggataaatggttagaagttttaggatgtggaatggttcatcctaatgttttaaaaaatgtaaaaatagatacaaaaaaatatcaaggatttgcatttggaataggtatcgatcgtttagcaatgttaaaatatggaataaatgatttaagagctttctttgaagcagattatagatggttaagccattttggat

SEQ ID NO: 302121 - DNA, 724 bp, Unknown
  Bacterial polypeptide expressing nucleotide sequence isolated from the Sargasso Sea
aatgacagcaccaaaagatatatttttaccatctttagatagagagttaggctctatccatcccattaatcaagtaaaagatcaattaacagacttacttaaatcttttggctttgaagtggctgaagggcctgaagttgaaactgaagagtataactttgatttgctcaatatccctgcatctcatccagcaagggagatgcatgatacattctatgttgataataagaaaaaactcttaagaacacacacttctcctgtacaagtaagatgcatgcttaaagataagcctccactagcatttatatctccaggcaaagtctatagaaaagatgacgattcaacgcatctgcctatgtttcatcagattgaaggattatatgtcgatgaagatgtaagttttgctcaattaaaggacttaatgtataaaatttgtcattctttatttggtcaagccacaaaattacgttttcgcccttcatattttccatttacagaaccttcagctgaagttgatgttctgtttggcgataaatggttagaaattctcggatgtggagtggtgaatcctaaagttctagaaaattgcaaaatagactcttcaaaatattcaggattagcttttggtctaggaatagagcgtatagcgatgctcaaatatggcgtaaatgatattagagatttttataaatcaaatctagatttcttgaggcagtttaaatga

SEQ ID NO: 302122 - DNA, 988 bp, Unknown
  Bacterial polypeptide expressing nucleotide sequence isolated from the Sargasso Sea
aatgaccttagaggtaaaaatcaaatcggttaaaagcgattttttaactgatttagataccttccatgaggggaatatagatttacctagtctacgtcaaaaatatatagctagaaatggattggttgcagatctttttaaaatgcttagtcaggtatctagcgaagatcgacctaaatatggtcaattattaaatgagctgaagaataatattgcttcaaaaatagattctctttccacaattttagaagattcagacagtttaggtaacgttgatatagcccttcccgggaaagactacgacatcggtactatccatattcttgagcaaaccctaaatgacataaaaagaatttttaatgatattggtttttgtgttgaatatggccctgaggttgatgatgactaccataattttggtgcactaaattttcctgagcatcaccctgcgagagatatgcaggatacatttttcatagataaggatattgtcctgcgcactcatacttcaaacgtgcaaattcatttaatggaagaaaatgaaccaccactaagatttattgttccaggaagagtttatcgaaatgaggcaattagttataagagctattgtttatttcatcaggttgagggattgtatgtagataaaaatgttagttttggtcaattgaaaggttgtctcgagtattttgtaaaaaaaatgtttggtgaaaaatgtaaaatgagatggaggcctagttattttcctttcactgaacctagtgctgaggttgacatatgggatgatcaacgtaagcaatggatggaaatactaggatgtggaatggttgaccccgaggtatttaataatgttggatatgattcaaaggtatggcatggttatgcatttggtatgggtgtagagagaattgctatgttgaagcataacattgatgatataaggcttttttataatggtgatataagatttttaaggcagtttaaatga

SEQ ID NO: 302123 - DNA, 997 bp, Unknown
  Bacterial polypeptide expressing nucleotide sequence isolated from the Sargasso Sea
atgagtgatttagaaaaaataaattctatttttaatgcaaagatagactctgtaaaatcaaaagatgaattacagcatttaaaaacagagttttttggtaaaaatggtcaaattacaactcaatttaaaaatttaggatctttatctgctgaagataaaaaagaatttgcctctcgcttaaataaattaaaagatagtttatctcaacagattgaggaaaagaatttagaacttgaaacacaagaaattaatgaaaaattaaaaagtgaaaaaattgatgtaactttacctataagatcttacagaaaaggaaaaattcatccagtgtcacaagtgattgatgaaatttcttctatattttcagagattggattttcagtagcagaaggtcctgatgttgaaacagagtataataattttaccgcacttaatacacccgaagatcatcctgcaagagacatgcatgatactttttatttggataaaaataaaaaacttttattaagaacacatacttctccagttcaaattagaactatgttaaatgaaaaaccaccttttaagattatagttcctggaagaacttatcgatctgacagtgatcaaactcatgctccaatgtttcatcaattagaaggtcttcacatagataagaatataacaatgggtcatttaaaaggatgtttgaattattttataaaggaattttttgaagtcaaaaatgttaggatgagatttagaccaagtcatttcccgtttactgagccttcggcagaggtagatattggttacaggttagaaaacggaaaaatagttattggagaaggagataaatggctagaagttttgggttgtggaatggtgcaccctaatgttttaaaaaatgtcaaagtagatacaaaaaaatatcaaggttatgcctttggtataggaattgatagacttgcaatgcttaaatatggaattaatgatctgagggcattttttgaaatctgat

SEQ ID NO: 302124 - DNA, 1057 bp, Unknown
  Bacterial polypeptide expressing nucleotide sequence isolated from the Sargasso Sea
atggtagatataagagaactaattcataaagtagcacaagctaaagataaacaggaattgcaaaatctaaaatctcagcttttaggtaaaagcagtcaaattagtcaagaatttaaaaaattgggatctttacctgaggatgaaagaaaaaaaagagcagttgcgcttaataatgaaaaaaaaaaaataacagagtcaataaataatagattacagcaaattgaaaaaatagaagtaaataaaaaactaaagcaaggcacaattgatataactctaccaggtagaactagaccaaacggaaagatacatccagtttcacaagtcatagatgagatttcatctatattctctgaaataggtttttctgttgttgaggggccagatgttgaaactgaatataataattttacagcactaaataccccagaggatcatccggctagagatatgcacgatactttttacctccaagaagacaaaaaaattttactcagaacacatacatccccagttcaaataagagcaatgttaaatggaaaacctccatttaaaattattgttcctggtagaacctatcgttgtgatagcgaccaaacgcattcacctatgtttcaccaactagagggattacatattgataaaaatattacaatgggtcatttgaaaggttgtttagattattttgtcaaagaattttttgaggttaaaaaaattaaaatgagatttagaccaagtcattttccatttaccgaaccatcagctgaagttgacatcggatataggttagagaatgatagaattatagttggagaaggagataagtggcttgaaatacttggttgtgggatggtccatcctaacgttttaaaaaatgctaaagtagataataaaaaatttcaaggttttgcatttggaatgggaatagatagacttgcaatgctgaaatatggaattaatgatttaagagctttttttgaggcagattatagatggctaaattattttggctttgatcctttggacgttcctacaaattatagaggattgagcagatgat

SEQ ID NO: 302125 - DNA, 988 bp, Unknown
  Bacterial polypeptide expressing nucleotide sequence isolated from the Sargasso Sea
atgattaatcagctcatacctaagattaaaaaagagatttcaataattaagtctgaaaatgaacttatgaatttaaagtccaagtatttaggcaagaagggagaacttacttcttatactaattctattaaagatttatctatcgaagaaaaaaaaatacagggaccaattattaactcaataaaaaaagaagttgagttactcattgcaactaaactgaatagtttaaaaagatccctgatagataaaaaacttgcagaagaaaaaattgatataactcttcctcctaagggtgccagttatggttctactcatccaatttcccaagtttcttctgagattgttgagatatttactcaatttggttttgagacttttgagggtcctgagattgaatcagattactataattttgaggcattaaatattcctaaggatcatcctgcaagagatatgcaagatactttttatttgaatgatggtagtttgcttagaacgcatacgtctcctatgcaagttagaataatggaagctaatagaccaccaataaaaataatatctccaggaaaggtttacagatgtgatagtgatgttacacataccccaatgtttcatcaaatagagggattgttagtagataaatcagttacctttgcaaatcttaaagggatattgaatgagtttatatctcgtttctttggaagtgatattaaaactagatttagacctagttactttccatttacggaacctagcgccgagcttgatattgaatggaaagataagtctggtaaaaaaacatggatggaagtgctaggatgcggaatggtaaatccaaaagtatttgcttcagttggctatgatgctaaagaatttaatggcctagcctttggaatgggggtcgagagattatcaatgattaaatttggaattactgatattagatatttctatcaaaatgatttaaagtttttgaaacaattttaat

SEQ ID NO: 302126 - DNA, 1902 bp, Unknown
  Bacterial polypeptide expressing nucleotide sequence isolated from the Sargasso Sea
ggtgttgtcattggcaaagttgaatcagcagaaaaacaccctgatgcggataaattaaaattatgtaccgttaatgatggcaaacagattcatcaagttgtctgtggtgcgccgaatgttgatgcagggcagacaatcgcctttgcaactgttggatcagtgctcccaggaaatttaaagattaaaaaagccaaaataagaggtgtagaatcttcaggaatgatatgctcagaacgtgaattgaatctgtcagatgaacatgaagggatcatggtattaccagacgatcttgaggctggtactgattttgtatcctcttatggatataagtacatatcagtagagcttgatatcacgcctaatcgtccggatgctttttcacatcaaggagttgcacgagatattgcatgtaagaccaatagagaattcactcaactatcagttactgaggtggtatcaaaaggaaatgatacgatagatatctctatggaagaccctggagattgtccacgatatataggaggaattgtaaaaaatgttaaagttggaccaagtccagaatggttagttgaaagattgagatccagtggccaacgtagtatcaataatattgtagatatatcaaattttgtcctaatggaaatgggccatcctacccatatttttgatcacgaatctttgaaaaataaatctatccatgttcgaagggcaaaaaaaggtgagacacttactacccttgatgaccaaaaacataaattagatgagacccacttactgatcacagatgggaaagaaccattggcactagctggcgtgatgggtggagcgagtacttccgtatcagataaaacaaccacattgctagttgaaagtgcttactttaatcctgttacaataagaaaaggcgcaaaaagtctttccatgtctacagatgcatcaaaacgatatgaaagaggtgcagatcctaatggatgtgaaaccgccttttggagagttgtaggtctattagaagaaatcacggggggggaactttgctctgatatgatagatgaatatccaaatcctatcacagagtataaagttgaactaagacgcagcgaactagatctagtactaggaatcaatatcgatggtaagacagtagagaggatacttaatggactaggaatcctatctgtgaagaatggtgatgactggcattgtcaggtccctacatacaggcctgatatatttcgcgagatagatctaattgaagaggtggcgcgtatatacggatttgatgatatccctgcagatgaatcgttatatggatcatttaggtatgatcatccagaccccgaacaatatcttgacactataaggaatacactttcagggtgtggatttcatcagatatatgctaattcacttcaaaatgagaatgaggccactctatctggtcaaccaccagtaaaaatgctaaatcctctcaatgttgagatggggttcttacgaacatcattacttcctggactacttaaagcagcggattataatttgaaacatagtgtatatgacctacgattatttgagcttggacacattcatgtacaaaaagacaaggggctagagaatattgttgagaaaaaatatatctcaggtgtcgtattcggtagggccagaggccattctgtccattcagtttcttcagaggaagatcttttcactcttaaaggatatttgaatacccttttcgtaaaaaaactaggtatgagaatggacctagttaagggtgaagatccagggtttgaccattctaggaccattatggtcaataggcaaaaagtaggttcaatgggtagaatttcaagtagttggatagactcaatggacctggaccttgaaacggtctatggattgaag

SEQ ID NO: 302127 - DNA, 1069 bp, Unknown
  Bacterial polypeptide expressing nucleotide sequence isolated from the Sargasso Sea
aatgtctgatattaaaaaaataaaagacgaatatcttaataaacttgataaagaccaaaatatagaatctataaatcaaataaaaactgaattatttggtaaaaatggaatagtctctaacgagtttaaaaagttaggatcagtctctcaagaagagcgaaaaaaatttgcatcagacttaaattttataaaagaagagctacaaaataaaattacaagcaaaattgaggaaatcgaaacaaaagagataaacctaaagttagaaaatgaaaaagtagatgtcactttacctgaaagagattttaaacaaggaaagattcatccagtttcacaagtaatagatgaaatttcatctattttttctgaaataggttttagcgttgaagagggtccagatgtagaaaatgaatataataatttttcagcacttaatacgcctgacaatcatccagcaagagatatgcatgacacattttacttagatgaaaaaaaagaattgttattacggacacatacctctcctgtacaagttcggactatgttaaaaggcaaacctccatttaaaataattgcacccgggagaacttacagatctgacagtgaccaaacacatgcacctatgtttcatcaagtagaaggactacatatagataaagatataaatatgggacatcttaaaggttgtctaaattattttattaaggagttttttgaagtggataaattgaagatgagatttagaccaagtcatttcccatttacagagccatcagctgaggttgatataggttatgaaattaaagatggaaaaataatcataggtgaaggagataaatggttagaaattttaggatgtggaatggttcatccaaacgtcctaaaaaatgtaaatgttgatccatcgaaatttcagggctacgcctttggaatcggaatagatagattaggtatgctaaaatatggaattaatgatttaagagctttttttgaaacagattatagatggctaagccattttgggttcgatcctttagatgtaccatcaagctacagaggattgagtagatga

SEQ ID NO: 302128 - DNA, 766 bp, Unknown
  Bacterial polypeptide expressing nucleotide sequence isolated from the Sargasso Sea
aatggtagatttacgagaattaattcaaaaagttttgcaagctaaagataagttagaattgcaaaatttaaaaagtcagtttttaggaaaaaatagtcaaatcaatcaagaatttaaaaaacttggatccttagctgaagatgaaagaaaaataagagcagcttctctaaatgatgaaaaacaaaaaattgcagaagcaatcaatagcagatttaaagaattagaaaaatctgaaattaaccaaaagctacaaaaagataaagtcgatgtgacattgccagccagagaaaggcctaatggaaaaatacatccagtctctcaggttattgacgagatctcctcaatattttctgaaataggtttttcagttgccgaaggaccagatgtagaaagtgagtataataattttacagcgttaaatactccagaagatcatccggctagagatatgcatgatactttttatctagatgataataaaaaaattttattaagaacccatacttcgccagttcaaattaggacgatgttaagtggaaaagctccatttaaaattattgtacctggtagaacttatcgttgtgatagtgaccaaactcatgcgccaatgtttcatcaacttgaaggattgcacatagataaagacatcactatgggacatctaaaaggatgtttagattattttgttaaagaattttttgaagttaaaaaaattcagatgagatttagaccaaagtcattttccatttacagaaccatcagcaga

SEQ ID NO: 302129 - DNA, 608 bp, Unknown
  Bacterial polypeptide expressing nucleotide sequence isolated from the Sargasso Sea
gcacgatactttttatttagatgataaaaaggaattacttttaagaactcacacatctccagttcaagtacgaacaatgttaaaaggtaaacctccatttaaaatcattgctcctggtagaacatacaggtctgatagtgatcaaactcacgccccaatgtttcatcaagtagaaggacttcatattgataaaaatataaacatgggacatttaaaaggctgcttagattattttataaaatctttttttgaagtagataaaatcaaaatgagatttagaccaagtcactttccttttacagagccgtcagcagaggttgatattggttatgaattaaaggacggtaaaatagttatcggagaaggagataaatggttagaaattttgggttgtgggatggtgcacccaaatgtacttaaaaatgtaaaaataaatccagataagtatcaaggctatgcatttgggattggtatagataggttggcaatgcttaagtatggaataaacgatctaagagcttttttcgagactgactataggtggctaaatcattttggttttgatccattagatgtaccttcaaattatagaggtctcagtagatgaa

SEQ ID NO: 302130 - DNA, 1012 bp, Unknown
  Bacterial polypeptide expressing nucleotide sequence isolated from the Sargasso Sea
aatgattgaaatcatcaacaaactccgtaaagatttcgattaccggatagggtctgtttctaaccctaaacaactcgaacaaattcgaatagaatttctagggaaaaagggacaactccaggggttgatgaaagagttgcgcaatgcttcaccccaagaaaagcccaaaattggtaaagacataaacgttcttaagcaacatgttgaacaggcaataaacgaaaaggatgtaattcttggttcaaaatcatttaaaaagtctagtgaaaatttcgacacaactcttccaggtagaaaagaattaacaggaacgttacatcctatcactcaggtgatggaagaaatcacttccattttttttgggttggggttccaggtagaagagggtcctgaaattgaaacagattattataattttgaagcactaaatatcccgaaagaccacccagcaagagatatgcaggacaccttctacatagaagatgaaactgttttgcgaacgcatacctccccggttcaaattcacgtcatggaaaatcggaaaccacctttacgcattattgcgccaggaaaagtttatcgctgcgattcagatgtttcgcatacaccgatgttccaccaaattgaaggtttgatggttgacgaaggcgtgtccttcagtcatttgaagggaatcatgaatattttccttcaagaggtttttggtaaaaatacacaaatccggtttcggcccagctttttcccattcacttgtcctagcgcggaagttgatattcaatgtgtaatgtgcaatggcaaaggttgtcgagtctgttcgcagacagggtggttagaaatcctcggtgcaggaatggtagaccccgccgttttccaatccgtggattacgatcctgaaaaatggacaggatttgcattcggtctcggtatcgaacgtattgcaatgctcaaatttggtatcaatgatatacgcttgtttttcgaaaatgatcttcgcttccttaaacaattctag

SEQ ID NO: 302131 - DNA, 655 bp, Unknown
  Bacterial polypeptide expressing nucleotide sequence isolated from the Sargasso Sea
tatgaaagattcaataatgaatcttcttgtttcatttggctttgaaataatagatggacctgagattgaaacagaagagtttaattttgatatgttaaacattaaaaagactcatcctgccagacaaatgcatgatactttttatgttgataataaatcaaatttgctaagaactcatacttcgcctgtacaaataagaggaatgctcgaaaaaagtccaccttttgcttttatatctggtggaaaagtttatagaaaagacgatgatgcaacgcatttaccaatgtttcatcagatagaaggaatattggttgacgaaaatgttagttttgcacaacttaaggatctaatttataaaattgttcattctctatttgataaagatattaaattaagatttaggccttcatattttccatttactgaaccttcagctgaagttgatattttatcgactgatggtaattggatagaaattcttggttgcggtttagttaatccaattgtattggaaaattgtaatatagattcaaacaaacatagtggacttgcatttggtttaggtattgaaagaatagctatgttaaaacataacatgaatgatataagagagttttataagtctaacttagattttttgggtcaatttaaatga

SEQ ID NO: 302132 - DNA, 1930 bp, Unknown
  Bacterial polypeptide expressing nucleotide sequence isolated from the Sargasso Sea
aatgaagatattgaaatcttggcttaatgattggatagacattgaaaatatatctaattctgatatttctgaagctttagagagtttaggtttcgaaatagaaaacaaaaaggaactaaaccctaattatgaaaacatcgttgtaggtaaagtacttgaggtatatgaacatcctaatgctgacaaagttcgtattactaaaactgatgttggtaataatatttatgaaattgtttgtggagcttggaattttgacgtaggagcagtcgttcccgttgcgttaccaaattcaaagataaaagataattttaaaatcgacaaacgtgacattagaggaattcaatcaaatgggatgatttgttcagcttcagaacttgatctttgggatgatcacgatggaatacttctattggatgacaagctacttccaggaactgatttttctacaatctattcaagcaatgatttcatatgggaagttggtgttacaccaaatagaggagactgtatgtcttatttgggtattgcaagggaactttcgggatatttcaataaaaaactaaaaactaaaaaatcaaatctgaaaccaacgatttcaaatattttgaatgctggcagtggaaaaattaaagaatgtaactcttatggttcagtagaaatagaaaactttaatgtaactaactcttcttttgaaatgagatacaggctcacacaggttggaacaaggattattaataatgtggtcgatataaccaattacattttatatgacatcggtcaaccattacatgcttttgatagagataaattatttggaacaatatctgtaagaaaagctaaaaacaacgagaaaattacaacacttgactctcaagtgagaaaattagattcaaatgatcttgttattactgacaatgataagccaattgctttagccggagtaatggggggattagaaactgaagtatcagaggccaccacaaatcttcttattgaaagtgcgtattttgacaaagtatccattatgaaaacttcaaggaaattaaacttgatatctgatgcatccatacggtttgaaagaggtattgattataaaattcaaaaatatggtttagagcgttttttaatggaattaaaagataatcaaactattaattattcagaaataaatgtagatgataaaggcaacttgaaaaacaagaaggtaattcttaaatattctgaaataaaaaaactgcttggtattgatttaaaagaatcatttattaagaaagttctaaaatttttaatgatcgattctgaagttaacaaagagagtgtgaaattcacaccaccctcatggcgatatgatctagatagaccagtggaccttatagaagaatttgcaaaacattatggttttaataattttgaatcaactctacctcagggagttcacaaaaataataaaggaagttattgggatcttaagagttacttatcaagtgtttttacttccaataattttcaagaagtccaaacattaagctttgtaaataatgacaagaattttttatttaatccagaaaaaaaatatgttgaggtatttaatgcaatcgatcaatcaagtaaatttatgagatcaaacctaatgtctagtttgatagatgtttacaaattaaattacgatcaaaataatttatcaaatagttattttgaaataaatactgtttttgatacttctaaaaataaaatcttcgaggatgtacctaatcagaatattgttttagggtttctgacatcttctaacttatcaaatacggatactaggttaaaagatcaagaattagatctttactatgtaaaaaacatattaaatcaattactaagctcatatgacctagaaccgattacgaaacctggatttcatcaaaaattattcattttcaat

SEQ ID NO: 302133 - DNA, 820 bp, Unknown
  Bacterial polypeptide expressing nucleotide sequence isolated from the Sargasso Sea
aaagaagctggcaagcttcttaatcaattaaaatcagatatcgataattcttataaggataagacttccgaactttctaaagctgaaaatgaatcgcgattaggcaatcaaaagattgatataagtttaccttctacttctaaaacagatgggtctgttcatccagtaactcaaacaatcaatgagattagtgacttctttgaatcaatgggatttggaattgaatcagggcctgaaatagaaacggactattataattttgaagctttaaatgtgcctgaagatcatcctgcaaaagatatgcacgatactttttatctaaaggaatctggtcttttaaggacacatacttctccagtacaaattagaaccatggagaataaaaatcctcctcataggataatttgtcctggaaaggtatttagaaaagactctgacttaactcatacgcctatgtttcatcaaatagaaggactagtggttgaggaaggtgcttcgtttgcccaactaaagggtttgttaaatgactttttagaagatttttttggtagagaagtagaacttagatttaggccatcttactttccttttacagaaccatctgccgaggcagatataaagtgggacaaaagttggcttgaagtacttggctgcggaatagttcatcctaatgtactagaaatggtcggagttgatgctaaaaaatatagtggttttgcttttggactaggggttgaaagaatggcgatgcttaagtatggcattcccgatttacgccttttctttgaaaatgactatagattcttaaaacaattttaat

SEQ ID NO: 302134 - DNA, 873 bp, Unknown
  Bacterial polypeptide expressing nucleotide sequence isolated from the Sargasso Sea
aatgtcagatattataaaaattaaagaagaatatctaaataagctaaaagataatttagaccttaatactgttaatcaattaaaatctgagttgtttggaaaaaatggaataatttcaaatgaatttaaaaaaatgggttctgtttctgcaaaagatagaaaaaaattcgcctcagatttaaattcaataaaaaatgaattacaaagtctaatcgagaaaagaattcaagatattgaaattaatgagataaatctaaaacttcaaaatgaacaagtagatgttactttgccagaaagaacttttaatcaaggtaaaattcatcctgtatcgcaagtcatagacgaaatatcctctatattttctgaaataggatttagtgttcaagaaggtcctgatgtagaaaatgaatacaataattttactgctctaaacacacctgataaccacccagcaagagatatgcatgacacattctatttggataataataaagaatttttacttagaactcatacatcacctgtacaagttagaacaatgctaagtggcaaacctccatttaagattattgcgcctgggagaacttacagatctgatagcgatcaaacacatgcaccaatgttccaccaagtagaaggtctccatattgataaaaatataaatatgggacatctcaaaggatgcttaaattattttattaaagagttttttgaggttgataaaattaaaatgagatttagacctagtcattttccttttactgaaccatctgctgaagttgatattggttatgagttaaaggatggcaagataattataggagaaggtaataagtggttagagattttaggatgtgggatggttcatccaaa

SEQ ID NO: 302135 - DNA, 1069 bp, Unknown
  Bacterial polypeptide expressing nucleotide sequence isolated from the Sargasso Sea
aatgtcagatattaaaaaaattaaagacgaatatcttcttaagctaagcaaagacttagatgtaaatcaaattaatgaaattaaaacagatttatttggcaaaaatggattagtaagttctcaatttaaacaacttggtaaaattacagaggatgaaagaaaaaaatttgcgtccgaactaaattatgtaaaagatgaattacaaaatttaattgtttcaaaaatagaagaaattgaaattagagaaataaatcaaaagctggaaaaagaaaaagtagacataacattgcccgaaagaccatttgtagagggtaaaatccacccagtatctcaagtgattgatgaaatctcttctatcttctcagaaattggttttagtgttgaggaaggacctgatgttgaaaatgaatataataattttacagctttaaatactccagataatcatccagcaagagatatgcatgatactttttatcttgatgaaaaaaaagaattacttttaagaacacatacttcccctgttcaaattagaactatgttaaatgacaagccaccttttagaattattgcacctggacggacttatagatctgatagtgatcaaactcacgcacctatgtttcatcaagtagaaggattacatattgataaagatattaatatgggtcatttaaaaggctgtttaaattattttattaaagaattttttgaagttgataaaataaagatgaggtttagaccaagccactttccattcacagagccttcagctgaagtagatataggttatgagattaaagatggaaaaatcataattggtgaggggaacaaatggcttgaaattttaggctgtggaatggttcatccaaatgttcttaaaaatgtaaatgtggatccaggtgaattccaaggatatgcttttggaattggaatagatagattggcaatgcttaagtatggaattaatgacttaagagcattctttgattgtgattacagatggttaaatcaatttggatttgatccaattgatgttccttcaagttatagaggcttgagtagatga

SEQ ID NO: 302136 - DNA, 955 bp, Unknown
  Bacterial polypeptide expressing nucleotide sequence isolated from the Sargasso Sea
cctggccgacctcgagaatgttagtgaagatttaaatcaaatagagaagtttcgttctatatatctaggaagaaagggtaaggttgcatccctattttcattaatgggaaaagcatccaatcaagatcgtcctgctctaggaaattcactcaaccaattaaaaactgaactgaccaccttatttgaaaataaagtagcagaaatagattcgtctaggcaaaaggcgcaagacgattctatcgatctatctcttcccagtaagcagcaacgcttgggctccattcatatcctagaacaaactctatcggagataaaggaaatttatcagtcgataggtttccatgttgcctacggacctgaggtagatgacaatcatcataatttcacagcattgaatattcccgaacatcacccggctagagatatgcaagatacattttttatcgatcctgagaccgttttaaggacccacacatcaaatgtgcaggtacaccttatggaagaacaggatccacctttaagatatattgttcctggtagggtatatcggaacgaagcaattgcctataaaagctactgtctctttcatcaagtagaaggtatttatatcaatgaaaaagtttcctttggcgaactgaaaggttgtttagaattttttgtaaaacaaatgtttggtccaaagaagaagatgagatttagaccatcatatttcccatttacagagccaagtgctgaagtagatatatgggatgaagagagaaaacagtggatggagatacttgggtgtggtatggttgacccagctgtccttgagaacgtaggatacaatccaagtcgatttcatgggtatgcatttggtatgggagtagagagaatagccatgctcaaatataaaataaatgatattagacacttttacagtggtgatgtgagatttttggaacagtttgtatga

SEQ ID NO: 302137 - DNA, 1015 bp, Unknown
  Bacterial polypeptide expressing nucleotide sequence isolated from the Sargasso Sea
ttggatcttaacacagttaatcaattaaaatctgaattatttggtaagaatggaaaaatttcaattgaatttaaaaagatgggttcagttcccgctgaagatagaaaaaaatttgcatcagatctaaattcaataaaaaatgaattacaaagtttaattgaaaaaaaaattcaggaaattgaaattagtgatatcaattcaaaacttcaaaatgaaaaagtagatgtgactttgccagaaagaagttttaatagtggtaaaatacatcctgtatctcaagtaatagatgaaatatcatcaatattttctgaaataggcttcagtgttgaggaaggacctgatattgaaaatgaatataataattttactgcattaaatacaccagataatcatccagctagagatatgcatgatacattttatttagatagtaaaaaagaatttttacttagaactcatacatcccctgtacaagttagaacaatgttaaataggaaacccccatttaagattattgctccaggaagaacctatagatccgacagtgatcaaacccatgctccaatgttccaccaagtagagggccttcatattgataaaaacataaacatgggacatctgaaaggatgcttaaattattttattaaagaattttttgaagttaataaaattaaaatgaggtttagaccaagtcattttccttttacagaaccctcagcagaagttgatattggttatgaacttaaagatggaaaaataattataggagaaggaaataaatggttggaaattttaggatgtggaatggttcatccaaatgtacttaaaaatgttaaagtagatccttcaaagttccaaggttatgcttttggaataggcatagatcgattagcaatgcttaaatatggcatcaatgatttaagagcattttttgaaactgattatagatggttaaatcattttggttttgatcctttagatgtgccttcaagctatagaggattgagtagatgaa

SEQ ID NO: 302138 - DNA, 2437 bp, Unknown
  Bacterial polypeptide expressing nucleotide sequence isolated from the Sargasso Sea
atgcaattcccggaatcctggctgagaacctttgtcgatccgcaactgacgaccgatgaactgtcgcacgctttgacgatggcgggtctcgaagtcgaagacctgcggccggccgcgccgccgacctcgaagatcgtcgtcggccaggtgctggaagtcgtcaagcatccggatgcggataagctcaacgtgtgtcaggtcgacgccggcaccggcgcgacgctgaacatcgtgtgcggtgcgccgaatgtcgcgccgggcatcaaggtgccggtcgctttggtaggcgcgcaactgccgccggccgaagagggcggggcgcctttcgcgatcaagctctcgaagctgcgcggcgtggaaagtcagggcatgctttgctcggcacgcgagttgaagctctcggaagatcatagcggcctgatgatcctgccggaagctacgccgatcggccaggacattcgcgaaacgctcaatctcgacgacacgattttcgaaatcaagctgacgccgaacaaggcggactgcctgtcggtgtttggcgtggcgcgcgaaacctcggcgattaccggcgcgccgctgcgtccgctcgagatcaagccggccgaagtgaagctcaacgaaacattgccggtcaagatatcggctcccgatctgtgcggccgtttttcgggtcgcgtgattcgtggcgtgaatgcgcgcgcgaaatcgccgcaatggatggtgcagcgtctcgagcgctcgggccagcgcagcatttccgcgctcgtcgacatctcgaactatgtgatgctcgaactcggccgtccgtcgcacgtgttcgatctggacaagatccatggcggcatggacgtgcgctggggccgcaagggcgaaacgctcaagctgttgaacggcagtaccgtcgaactcgatgaaaccgtcggcgtgattgccgatgaacagcacatcgaaagccttgccggcatcatgggcggcgacagcaccgccgtgacgctcgacaccaccaacatctatctcgaagccgcgttctggtggcccgatagcattcgtggccgctcgcgcaagtacaacttctcgaccgatgccggacatcgcttcgagcgcggcgtggattacgcgaccaccgtcgagcacatcgaacgcattacgcaactgattctcgatatctgcggcggcgaagccggtccggttgacgatcagatcgtcaacgtgccgaagcgcgagccggtgaagatgcgtgtctcgcgtgcgaaccgcattatcggcgtcaagattgatgcggacgaaatcgcgcagatcttcacgcgcctcggcctgacgttcgaacgcgacggcgataccttcgcggtgaacccgccgtcataccgcttcgatatcgaaattgaagaagacctgatcgaagaagtcgcgcgtatctacggcttcgaaaagatccccgcgcgtccgccggtcgccaccagcgaaatgctgccgaccaacgaaacgaagcgctcgattcacgtgatccgtcacgcgctcgccgcacgcgactacgcggaaacggtcaacttcagtttcgtggacgccgagtgggagcaggatttcgccggcaacgacaagccggtacgtctgctcaatccgattgcaagccagttgtcggtgatgcgtaccacgctgttcggcagcctgatcaatgtattgcgcaccaacctgaaccgtcgcgcggccgaccgcgtgcgcgtgttcgaagccggccgcgtgttcctgcacgatccgtcgatcaaggcgggtgaactgacggtggaaggttttgctcagccgaagatgatcggcgccctcgcctatggtcccgctctcgaagagcaatggggtgcgcaaacgcgcccggtcgactacttcgacgtgaagggcgatctggaagcggtgcttgcgccggccgtggcgagcttcgtgaaagcggagcatccggcattgcatccgggccgcagtgcgcgtattgaactgaatggccgcgcagtgggctggattggcgaattgcatccgcgctggatgcaaaagtatgatttgccgcatgcgccaattctgtttgaaatcgaagcggaagcattaatgcagcgggtattgcccacgccggcggaggtgtcgaaattcccaccggtacggcgtgatattgcggtagtcgtcgatcagaaaatcgaggtgcaggcgctgctggacgagcttcagaaggctcaatccgaaccggcctgcaaggctgtccagaaggttgcgctttttgacgaattccgtccaaaatcaaacacttccggtggtctggccgcgcatgagaaaagccttgcgttccgtgtgaccttgcaagatactggcgggacccttcaggatgaaacggtcgatctggccattcaaactctggtggaacgtctggctcgagtatatggcgcacggttgcgtggataac

SEQ ID NO: 302139 - DNA, 2005 bp, Unknown
  Bacterial polypeptide expressing nucleotide sequence isolated from the Sargasso Sea
tttgcgatggttaaaagaatttatacctaatcttaaaattaatgataaggttgctgaatccttaacttcgcttggattagaagtttcgtcaataacaaaaaaacagagagacttaatcattgatattgacttaacacctaatcgaggagactgtctatctgtgcatggaattgcaagagacttaaattcattattcaataagaaaattaaatatcctagagtcaaaaaattatcaaaaattaataagaaaaaatatattaaatcattagattcaaaaatttgcccttcttactcatgcttaagtattacaggcttgaacaacagtattaagacaccagatttgataaaatcaagactcaagagtagcggtattaagaatattaattttttagtagatattattaattatgtgatgttagagataggtcaaccaatgcatgtttttgacctaaataaacttaaactcccgctttccgttgaatttgcaaataagactgaattatttgaaggactagatgatagtgaatataaactgactaaaaaaatacctgtcataagtgaccagtcaggaccaatagctctagcgggtgttttaggtggcaaaaaaacttctactacacaaaaaacacaaaacgtattaattgaatcagcttttttcgagccaaatcagattagacagtcgtcaaaatcatttagacttcaaaccgactcatcttatcgatatgagagaggcgttgatccaaaacttccaatggtagctctttcaagggtactcgaacttttaagcgaatatactacttatgattctgtatttattgattcaaaaatatcaaagaaatcagaaaagagaaatgataaaaaaattaccatcgagcataatctaattacaaagtctctaggtcaagatatcgagaaggttttcatattaaaaatatttaaatcgctaggttttgaaataaaagttaaaaatactgcatataccctaatatcaccttcacacagattcgatattcgaaatcaacaagatataattgaagagattgccagagtatatggttataataattttaaatcaaacattccaactaattacatcaaaacacttgatagcaatcttaatacatcagacatattatccgaatctttatcatcaagaggatacaacgaaattatttcttatactatgctaccgaaaaattctcaaaatcaactacataataactcagaaataattagaatattaaatccaatttcagaagataaatcagatttacgtgcttcgatggtattcaatatgctgcaaatttataaatacaataaaagccgacaagcaactagtttacggttttatgagtcaggtaaaatatattcttataatcgaggtaaaaaaattattgagaccaatgtacttgctgggataattggagggattaactttaataacaacttgagaaattcgcgtaaaaaattaaatttttttgatttaaaaggtgaccttatcagcgtaataagcaatcttagttttaaaaaaacgaacaaattaaattatctcgtttctaatactcaaatgtctttgtttcaggataatacattcataggtacatttggtgcacttataccttctctccgtgatgattatggtatatccgatgaagttttttactttgaattgatgatagactccataaaagttagaaatgttgtaaaatatgtggacttttctagattccccaaaattaaaagagacattactttaaaaataaacaataaaatatctatagaagaagtaataaaatgtattagtaaaagttcacttaaatatatgataaatagcagaataagtgatatattttatagtatgaatcatgagaattctcataaaagcttaaccatagaactgatttttcaaggaaatgaatctacgctctcagatcaggaagttaatgaacagatgacaatcttaataaagagattaaaagataaattgaacatcgatattaaataa

SEQ ID NO: 302140 - DNA, 1015 bp, Unknown
  Bacterial polypeptide expressing nucleotide sequence isolated from the Sargasso Sea
tttggatcttaactctgttaatcaattaaaatcagagttatttggcaaaaatggaataatttcaaatgaatttaaaaagatgggttctatttctccagaagacagaaaaaaatttgcttcagatttaaattcaacaaaaaatgaacttcaaagtctaatcgaaaaaaaaattcaggatattgaaattaattatataaatataaaacttcaaaatgaacaggtggatgttactttgccagaaagaagttttaatcgaggtaaaattcatccagtatctcaagtaatagatgaaatatcttcaatattttctgaaataggatttagtgttcaggaagggccagatgttgaaaatgagtacaataattttaccgctctaaatacacctgaaaatcacccagctagagatatgcatgacacattctatttggataacaaaaaagaatttttacttagaacgcatacttctcctgtacaagttagaacaatgttaagtggaaaacctccatttaaaattattgcaccaggaagaacttatagatctgatagtgatcaaacacatgcaccaatgtttcatcaagtagaaggccttcatattgataaaaatataaatatgggacatctaaaaggatgtttaaattattttattaaagaattttttgaggttgataaaattaaaatgagatttagacctagtcattttccttttacagaaccatcggccgaagtagatattggttatgagttaaaggatggtaaaataattataggagaaggtgataagtggttagagattttagggtgtggcatggttcatccaaatgtacttaaaaatgttaaagtagatccatcaaagtttcaaggatacgcttttggtataggcatagatagattagcaatgcttaaatatggtattaatgacctaagagcattttttgaatcagattatagatggttaaatcattttgggtttgatcctttagatgtaccttcaagctatagagggttgagtagatga

SEQ ID NO: 302141 - DNA, 811 bp, Unknown
  Bacterial polypeptide expressing nucleotide sequence isolated from the Sargasso Sea
tatgtccgatataaaaaaaattaaagatgaatatttaaaaaaattagacaacaatctagacatagaaagtgtaaatcaaataaagactgaattgtttggtaaaaatgggcaaatttctaattcttttaaaacattaggctcattacccaatgatgagagaaaaaaatttgcatcggacttaaattcaataaaagatgaattacaagaaaaaataaattctaaacttcaagaaattgaaattaaagagattaattctaaacttgagaatgaaaaattagatgtaactttacctgagagagaaataaaacaaggaaaaatacatcctgtatcacaagttattgatgagatatcctcaatattttctgaaattggctttagcgttgaagagggtccagatgtagagaatgagtattataattttactgcactaaatactccagacaaccatccagcaagagatatgcatgatactttttatttaaataataataaagaaatactattaagaactcatacatctcccgtgcaagttagaacaatgttgaatggaaagcctccatttaaaattatagctcctggaagaacatatagatctgatagtgatcaaactcattccccaatgtttcatcaagtcgaaggacttcatattgataaagatataaatatgggtcatttaaaaggctgtttgaactattttataaaatcttttttcgaaattgataaaataaaaatgagatttagacctagccatttttcttttactgaaccatcagcagaagttgacattggttacgagttaaaggacggaaaa

SEQ ID NO: 302142 - DNA, 451 bp, Unknown
  Bacterial polypeptide expressing nucleotide sequence isolated from the Sargasso Sea
actgcctggaaaatgctatcgattcgagcaaatcacgccacgttctgaacaccagttttaccaggtgaggggtttggcaataggtaaaaacatgaggctcactgacctgatcggcgtgatgggtgaattcgcgcacaagatgtatggtgaagaacgcagaatcagaataagaggaagctactttcctttcacagaaccaagcatcgaaatagatatgaactgcagttgcgaaaacaaagggtgccgtctctgtaaaaacacaggctggctggaagtagctggagcgggtatggtgcatcctgttgttctgagcaacggcggttatgaccctgaagagtggactgggtttgctttcgggatgggagtggagcgacctgctcttctgaaacacaacatagatgatattcgttacttctacaataacgacctgagatttctgcaccaattctga

SEQ ID NO: 302143 - DNA, 973 bp, Unknown
  Bacterial polypeptide expressing nucleotide sequence isolated from the Sargasso Sea
atgtctgatattaaaaaaatcaaagaagattatttaggtaagctaagtggtaaattaaatctagaagaagtaaatcaaattaaaacagaattatttggaaaaaatggtttagtttctaattcatttaagaaacttggttcaatgcagtcagaagatagaaaaaaatttgcatcagacttaaattttgttaaagatgaattacaagaaaagataaataataaacttcaagaaattgaaacaatcgaaatcaattcaaaactaaaaaatgaaaaggtagacgtaactttacctgagagagatattaatcaaggaaaaattcacccagtctcccaagtaatcgatgagatatcatcaatcttttcagaaattggatttagcgttgaagaaggacctgatgttgaaaatcaacattataattttacagctttaaatacaccagataatcatcctgcaagagatatgcatgatactttttatttagatgataaaaaagaattacttttacgaactcatacttctccagttcaagtacgcactatgttaaaaggtaagccaccttttaaaataatagctccagggaggacatatagatctgacagcgatcaaactcattccccgatgtttcatcaagttgagggacttcatatagataaagatataaatatgggtcatttaaaaggttgtttgaattattttatcaaagagttttttgaagttgataaaatacaaatgagatttagaccaagtcattttccttttactgaaccgtccgcagaagttgatattgggtacgagttaaaagatggaaaaatagttattggtgaaggtgataaatggttagaaattctgggatgtggaatggtacatccaaacgttcttaaaaatgtaaatgttaatccagataaatatcaaggttatgcttttggcattggtattgatagacttggaatgctccaatacgggaataaatgat

SEQ ID NO: 302144 - DNA, 982 bp, Unknown
  Bacterial polypeptide expressing nucleotide sequence isolated from the Sargasso Sea
atgaacattaaggacacaattgaatcagttcgaaaacaatttcggactgattctgatccgtttcctgatgataatgataaaatagattctttaaaaattaaatatttgggaagaaaaggtttaattgcgaatctttttactcaaatgaataaagttgaagccgaagatcgtccgttatttggtaaatatttaaatcaacttaaaaatgaaatcaattctgtttttgattcatctcaacaaaaagattcaaacagtaaaactgatcaaattgactattcattacctggtttaaatttcaatattggctatcaacatcctcttcaaactacattaaatgaaattaaatcgatctttcagaatttaggtttttcagttgcgtatggtcctgaggtcgatgatgactttcataattttagtgcattaaacttccctccagaacatccagctcgcgatatgcaagatacattttttattgaaaaagatatagttttacgaacccacacatcgaatgttcaagttcatttgatgaaagaaaaagaacctccattgagatacatcgtccctggtcgagtatacagaaatgaatctataagctttaaaagctattgcctttttcatcaaatagaagggctgtatgtagataaaaatgtttcctttgctgatcataaaggaatattagaatattttgtaaaacaaatgtttggagcaaaaactaaaatgcgttttaggccaagcttttttccatttactgagccaagcgctgaggttgatatatggagtgaaaaaagaggtcaatggcttgaaatattaggatctggcatggttgatccagaagtgttcaaatccgtagatattgatcccgatgtatggcatggatatgcttttggtcttggcattgaaagaatctgtatgttgaaatatgatattgatgatatacgcttattgtatcagggtgatttaagatttttggagcaattttaat

SEQ ID NO: 302145 - DNA, 967 bp, Unknown
  Bacterial polypeptide expressing nucleotide sequence isolated from the Sargasso Sea
aatggtcaaaatttcatctttattcaaaactgtaggatcaataccagagtctgatagaaaaagttttgcagctgatttaaataaaataaaagatgaacttcaattattgatttcggaaaagattaaagaaattgagacaaaagaaattaatcaaaaacttgaaaaagagagagttgatataactttaccaggaagatcttttgttataggaaaaattcatcctgtatctcaaacgatagatgagatttcatctatattttcagaaataggttttagtgttgaagaaggaccagatgtagaaaatgaatataataattttactgcactaaatactccagataatcatccagctagagacatgcacgatactttttatttggacgaaaataaggaagttttgttaagaacgcacacttcaccagttcaaattagaactatgttaaaggataaaccaccgtttaaaattattgctccaggtagaacatatagatcagatagtgatcaaacacatgcgccaatgttccatcaggttgagggccttcatatagataaaaatattaatatgggtcatttaaagggatgtttaaattatttcattaaagagttctttgaagtggaaaaaatcaaaatgagatttagaccaagtcattttccttttacagaaccatctgcagaagtagatattggttacgagattaaagatggtaaaattgttataggagatggggatcagtggcttgaaattttaggatgtggaatggttcatccgaatgttttaaaaaatgttaaagttgatcctgctaaataccaaggatatgcatttggcataggcatagacaggttagctatgctaaaatacggtattaatgatttaagagctttctttgactgtgattatagatggttaaatcactttggatttgatccacttgatgtacccacaaattatagaggtctaagtcgatga

SEQ ID NO: 302146 - DNA, 524 bp, Unknown
  Bacterial polypeptide expressing nucleotide sequence isolated from the Sargasso Sea
agacaaacctccattcaagattattgctcctggaagaacttatagatctgatagtgatcaaacacacgcaccaatgtttcatcaagtagaaggtttgcatattgatacaaatattaatatggggcatttgaaaggatgcttgaattattttattaaagaattttttgaagtagaaaaaattaaaatgagatttagacttagtcattttccattcacagaaccatctgctgaagtagacattggttatgaaataaaagatggaaaaataattattggagaaggagataagtggcttgaaattttaggttgtggtatggtgcaccctaatgtcttaagaaatgtaaaagtagatccttcaaaatatcaaggttatgcctttggcataggcatagaccgattagcgatgcttaaatatggcattaatgatttaagagcgttttttgattgtgactacagatggttaaatcattttggctttgatccacttgatgttccttcaaattatagaggtttaagcagatgaa

SEQ ID NO: 302147 - DNA, 797 bp, Unknown
  Bacterial polypeptide expressing nucleotide sequence isolated from the Sargasso Sea
aatcgatgttactcttcctgaaagaagtttttttcaaggtaaaattcatccagtttctcaggtaattgatgagatatcatcaattttttcagaaataggttttaacgttgaagaaggacctgatgtagaaaatgaatataataattttacagctttaaatacccccgacaatcatcccgccagagatatgcatgacactttttatttagatgctaataaagaatatttattaagaactcatacatctcctgttcaagtcagaacaatgttgaaaggaaaaccaccttttaaaataatagctccaggcaggacttacagatcggatagtgatcaaacacatgcaccaatgtttcaccaagttgaaggtcttcatatagataaaaatataaatatgggccatttaaagggttgtttaaattattttataaaggaattttttgaagttgataaaataaaaatgagatttagaccaagccattttccttttactgaaccatcagccgaagtagacataggatataaaatcaaagatgaaaaaataattattggtgaaggtgataaatggttagaaattttgggctgtgggatggtccatccaaatgttttaagaaatgtaaaggtagatccatcaaaatatcaaggttatgcattcggaattggaatagatagattagctatgctcaagtatggaattaatgacctaagatctttttttgaaacagattatagatggttaaatcattttggatttgatccattggatgttccttcaagttacagaggtttaagcagatgaa

SEQ ID NO: 302148 - DNA, 1294 bp, Unknown
  Bacterial polypeptide expressing nucleotide sequence isolated from the Sargasso Sea
atgaagtttacaatagactggcttaaagaacatttagatactaattacaatgacaataaaattgttaataaattaactgatattggccttgaagtagagagttttcaaagtcaattgtcagaattagataattttattgtagcaaaaatattaaatgcagaaaaacatccaaatgcggacaggcttaaagtatgcgatgtagatattggaaagaatgaagtagttaaagttgtttgtggagctacaaacgcaaaaaaaaatcttttaacaatatatgctccaccaggatctattattccaaaaaatcaaataaaactatctattactaaaataaggggagttacttcttatggaatgctttgttctgaatctgaattaaatttatctgatgaaagtgaaggtatcacagaactttcttcaaaaaaatataataatcaagttggtaaaaaatattttaagaacaatacatcaaaagtaatagatctttcaattactccaaatagagcagattgtcttggagttagaggaattgctagagatttagctgcggcaggcacaggaaaattaaagaaattaactttaaaaaacataaaaaattctggtcctcaaaaaataaatataaaaattactaaagaaaaaaatcaaggatgtttagcttttggaagctgcctaattaagggagtaaaaaatacagaaagtcctaagtggctaaaagataaaattataacattggggcaaaaaccaatttcagcaatagttgatattacaaattatgtaatgatagatttaaatagaccactccatgcatatgatgcagataaaatagataaaggaataatagttagaaattcaaaaaaaggagaaacttttaaagctttagataataaaaattacttacttaaagaggatatgtgtgtgatatctgataattctggcgttttgggtttgggaggaataattggaggaattagatcgggtacagaatttaatacaaaaaatatattattagaatcagcatattttgatccgagatcaataagaaaaacttcaaaactattaaatatcgacactgacgcaaaatatagatttgaaagaggaatagatccagagtcaattcaattgggattattaaaagcagcagaattaataaagaaaatttgtggtggagaaattagtaaaattgatattaaaaaaaatgaaaattttaaaaaaaataaaattaagttttacattcctttttttgaaaaaattactggatttaaagtaaatgataaagatattgttaaaattttat

SEQ ID NO: 302149 - DNA, 1087 bp, Unknown
  Bacterial polypeptide expressing nucleotide sequence isolated from the Sargasso Sea
tatggaaaatttaaattctattaaagaagaaatacttcaaaaaattgaatcagcagaaagtgatgatacagttgaagaaatccgtattagcgaattaggtaaaaagggaaggatttcaaaactccttggagaattaggaaaattaaatcaagatgaaagaaggaaattaggccctgaaataaatggcctcaagaatactgtccttgaaaagatacaagaaaagaaagagtttttcttagaccaaatacttagtaaaaaacttttagaagaaaaaattgatgtaacattacctgtaaaatctagccaaaatacaaatggaaggatacatccagtttctcaagtcttagacgaaataacggaaatttttggttcacttggttatgaaatcgccgatggtccagatattgaaacagagtattacaattttaatgccctcaatattcctgaatcacatccagcaaggcagatgcatgatactttttattttgatgaatttgataaagatcaaggtcagtctgttctaagaacgcatactagcccagttcaagttagaactatggaaaaaggagagcccccttttagattcatttctcctggaagaacttatagatgtgattctgatcaaactcatacaccaatgtttcatcaaattgaaggcttatcagttgataaagaaactaaccttggtcatcttaagtggactctagaaacttttttgtcctctttctttgagattgagaatacaaaaattcagatgagaccaagttactttccttttactgaaccatcattagaaattgatgtgttatgtgatagaagcggacctgttttgaaaattggtgaaggatcagattggctagaggtcgcaggagcaggcatggttcaccctaatgtcttaaaatcagccaatatagatcctgacaaatatcagggatttgcttttggttttggtttagaccgtttagctcagttaaaatatggtattccagatttgcgaactttctttagtggagatattagatggctaaggcattacggtttctcagccttagatatcccgacgctatcaagaggattaaagaaatga

SEQ ID NO: 302150 - DNA, 1069 bp, Unknown
  Bacterial polypeptide expressing nucleotide sequence isolated from the Sargasso Sea
aatgagtgatttggataaaataaattctattttcaacgctaaaattgactctgttaaaacaaaggaagatttacaaaatataaaaacagagttttttggtaaaaatggtcaaattacaaaacaatttaaaactctgggttcattagaccctgacaaaagaaaagagtttgcttcatgtttaaataaaataaaagatgacttgaccaatcaaattaatcaaaaagattttgaaattagcaatttagaaataaatgaaaaattaaaaaatgaaaaagttgatgtcactttaccgattcgaccataccaacaaggaaaaatacaccctgtatcacaagtcattgatgaaatctcttcaattttttctgagataggtttttcagttgcagagggccctgatgttgagacggagtataataattttacagcattaaatactcctgaagaccatcctgcaagagacatgcatgatactttttatttagaaaaaaataagaaattacttttgagaactcatacatctccagttcagattagaacaatgcttaatgggaaaccgccatttaaaattattgttcctggaagaacttatagatgtgatagtgatcaaactcatgctccaatgtttcatcaacttgaaggtttacatatagataaaaatattacaatgggccatttgaaaggatgcttagattatttcataaaagaattttttgaagtcaaaaatgtgaaaatgagatttagaccaagtcattttccattcaccgagccttctgccgaagtagatattggttatagaatcgaaaatgaaaaaattgtcattggagaaggagataaatggttagaaattttagggtgtgggatggtacatcctaatgtactcaaaaatgcaaaagtcgatccaaaaaaatatcagggatttgcatttggtatgggtatagatcgattagctatgttaaaatatggaattaatgatttaagagctttttttgaaactgattttcgatggttaagccattttggctttgatcccttagacgtacctacaaattatagaggtttaagcaaatga

SEQ ID NO: 302151 - DNA, 1069 bp, Unknown
  Bacterial polypeptide expressing nucleotide sequence isolated from the Sargasso Sea
atgtcagatattataaaaattaaagaagaatatataagtaagcttaaagaaaacttggatctaaccaatgttaatcaattaaaatctgaattgtttggaaagaatggaaaaatttcaaatgaatttaaaaagatgggctctatcccatcagaggaaagaaagaaattcgcttcagatctaaattcgataaaagatgagctccaaaatttaattgaaaaaaaaattcaggatattgaaattaatgaaataaattcaaaacttaaaaatgaaaaagttgatgttaccttgccagaaagaagtttcaatagaggcaaaatacatcctgtatctcaagttatcgatgaaatatcttcaatattttctgaaataggcttcagtgttatggagggcccagatgttgaaaatgagtacaataatttcactgctttaaatacacctgatgatcacccagcaagagatatgcatgacacattttatttagataataaaaaagaatttttactcagaacacatacttctccagtccaagttagaacaatgattgatagtaagcctccatttaaaattattgctcctggaaggacttacagatctgacagtgatcaaactcatgcaccaatgtttcatcaagtggaaggtcttcacattgataaaaatataaatatgggtcatctaaaaggatgcttaaattattttataaaagaattttttgaagtagataaaataaaaatgagatttagaccaagtcattttccattcacagaaccatccgctgaagtcgatattggttatgaactaagagatggaaagataattataggagaaggagataaatggttagaaattttaggatgtggaatggttcatccaaatgtgcttaaaaatgttaaagtagatcctgcaaaatttcaaggctatgcttttggaataggtatagatagattggcaatgctcaaatatggcattaatgacttaagggcattttttgaaacagattatagatggttaaatcatttcggatttgatcctctagatgttccttcaagctatagaggattgagtagatgaa

SEQ ID NO: 302152 - DNA, 1290 bp, Unknown
  Bacterial polypeptide expressing nucleotide sequence isolated from the Sargasso Sea
aatgcgtatttctattgaatggttaaaagaatttgttgaggtcaaagagaaccctagtgctcttgccgatatgttatccatgcttggtttagaatcggaagttgtccatgatttctcattgttatcaaacgtagtcgttggaaaggttgttacagcaaaaaaacacccaaacgctgatcgattaaagctttgtacggtaaatgatggagctcataccttaaatgttgtatgtggggctccaaatgtagatgcagggcaaacgattgcctttgcgcaggtaggagcagtgctgcctggtgattttgttatttccaaggcgaagatacgcggacaagagagccgtggtatgatatgttccgagcgtgaattaaatatttcagaagaacatgatggcattatggttctaccaaatacattgaaagttggtagaccaatctatccatatctggataaaatgtattctgcattagagttggatttaacaccgaatcgtcccgatggcttttcacattatggcgttgctagagaagttgccttaaaaactggtagaaagcttaaaaatatttctgtaaaaaagtcgcaagttaaaagcaaagatgtgcataagattgcaaaagtgactattgaagataaagtagattgtccacgatatatgggtgcagtgttgcataatgttaccgtaggtccttctccagcatggatggtagatagattaaaagcagcaggtcaacgaagtattaataatttagtcgatatatcaaactatgttttattagaaatgggtcatcctacacatatttttgattacgatatgattccctctaatacgattgctattcgaagggtaaaaaatgataaaaccatcacaactctcgatgaagaaaaaagaaaactttccaagcagcaattattaattacagatggtaagaagcccattgctttggctggaattatgggagggttagaatctgcagttcaagataatacaaagaatgtttttgttgaaagtgcctattttgatcctgtaactattcgaaaagggtcaaaagaattgggattacttactgaggcttccagacggtttgagcgcggagcggatgtgcaagctgctgaaacagcgttatggagagttataaatttacttcaagaatttgcaggtggagaattagtcccaggaattattgatgaatatccgggaaaattcaaatccaagaatataacactccgacgaaatgaactggatttatttgcaggttgtactattacggataaagaagtatcaacaatatt

SEQ ID NO: 302153 - DNA, 724 bp, Unknown
  Bacterial polypeptide expressing nucleotide sequence isolated from the Sargasso Sea
atgacagcaccaaaagatatattccttccatccttagatagagagttaggctctgttcatcctattaatcaagtaaaagaccaattaacagaattacttaaatctttcggcttcgaagtagctgaagggcctgaagtagaaactgaggaatataactttgatatgttgaatatacctgcgtctcatccagctagagaaatgcatgatacattctatgtcgataataaaaataaactcttaagaacacatacttctcctgtgcaagtgagatgtatgcttaaagataaacctccactagcattcatatctccaggtaaagtctatagaaaggatgatgattccactcatttacctatgtttcatcaaattgaaggattgtatgtcgatgaaaatgtaaattttgctcaattaaaggacttaatgtataaaatttgccactctttatttggtaaagccacaaaattacgtttccgcccttcatatttcccatttacagaaccttcagctgaagttgacgttctatttggtgataaatggttggaaattctcggatgtggtgtggtgaatcctaaagttctagaaaactgcaaaatagactcttcaaaatattcaggattagcttttggtctaggaattgagcgtatagcaatgctcaaatacggcgtaaatgatattagagatttctataaatcaaatctagatttcttgaggcaatttaaatgaa

SEQ ID NO: 302154 - DNA, 1045 bp, Unknown
  Bacterial polypeptide expressing nucleotide sequence isolated from the Sargasso Sea
atgtctgattttgaaaaattaaaagataaattaaaagataaacttactaaagttcaaagctcacaagaagtagaaacagtaagatctgagatttttggtaaaaatggtttgataaatttagaatttaaaaaaattggatcattacctccagaagataaaaaaaaaatagcttcagaaataaataatgcaaaacaagaactaacaaaattatttaatgataaagctatcaagctagccgattccgaaatagatgagcaagttaaaaaagaaaagaatgacgtaacacttccagaaaaagattttagaattggtaaaatacatccagtatcacaagtaatcgatgaaatttcatccatattttcagaaattggttttagcgttgaagagggcccagatgttgaaagtgaatattataactttacagcactaaatacacctgaaaatcatcccgcaaaagatatgcatgatactttttacattgaagaaaatatgaaaacattattaagaacacatacttctccagtacaggtaagaacaatgataaaaggaaaacctccatttaaaattatagcaccaggaagaacatatagaagtgatagcgatcaaacgcacactcctatgtttcatcaattagagggacttcatatcgataaaaatataactatgggtcatttaaagggttgtttaaattattttattaaagagttttttgaagtagataaaattaaaatgagatttcgtccgagtcactttccatttacagaaccttcagcagaagttgacataggatatagagttgaaaataataaaattataattggtgaaggagataaatggttagaaatactaggctgtggaatggtgcatcctaatgttttaaaaaattcaaaagttgatccaaataaatttcaagggtttgcctttggtataggtatagataggttggcgatgttaaaatatggaattaatgatttaagatccttctttgaatgtgattatagatggttaaattactacggttttgatcctcttgatgttccaacaa

SEQ ID NO: 302155 - DNA, 718 bp, Unknown
  Bacterial polypeptide expressing nucleotide sequence isolated from the Sargasso Sea
ggaagtcaaaaaattgatataacattaccatcgttttctacaacagatggatccgttcatccagtaactaaaacaatcagtgaaattagtaatttcttcgaatccataggattcggaatagaatctgggcctgaaactgaaacagattattataatttcgaagcattaaatgtgcctgaagatcatcccgcaaaagatatgcatgatactttctatctaaagggttcaggacttttaagaactcatacttcgccagtacaaattagaaccatggagaaaaataaaccacctcataggataatttgtccagggaaagtttacagaaaagattctgatttaacccatacacctatgtttcatcaaattgaaggactggtggttgaagaaggtgcttcttttgcccaattaaaaggtttactgaatgattttctagaagacttttttggaagagaggtggagttaaggtttaggccttcctatttcccgtttacggaaccatctgcagaggtagacataagatgggataaaagctggctagaagtattaggctgtggaatggttcatccaaatgtattagaaatggtcggggtggatactaaaaaatacagtggcttcgcttttgggttaggtgttgaaagaatggcaatgttgaaatatgacattcctgatttgcgcctcttcttcgaaaatgattatagattcttgaaacaattttagt

SEQ ID NO: 302156 - DNA, 637 bp, Unknown
  Bacterial polypeptide expressing nucleotide sequence isolated from the Sargasso Sea
tatggaaaatttacgcaataaatatattgaggcaatcgccacttcaagtgatgaaaatgcattggaagccgttagactggccgcacttggcaaaaaaggtgaagtcagtctcaaaatgcgtgaattaggtcaaatgtcaccagaagaaagacaagtggctgggcctgcacttaatgaactgaaaaacgaaattataagtgctatttctgcaaaaaaagaagctctggaagattcagtgcttaatgaacgactgaaatcagaatggttagatgttactttaccgtctcgggaaaggcccagtggttcgattcatccaatatctcaggtgactgaagaggtaataagtatatttgctagtatggatttctctgtggctgaaggccctaggatagaaacagattggtataattttgatgcattgaatattccaagtcatcaccccgcaagagctgagatggatacattttatatgtatcgttcagaaaatgatgatagagcccctcatgttttaagaactcacacatctccagtacaaattagaactatggagaatacgggcgctccggtgcgagtgatatgtccaggaggtgtttatagagcggattatgatcagacccatacaccaatgtttcatcag

SEQ ID NO: 302157 - DNA, 1069 bp, Unknown
  Bacterial polypeptide expressing nucleotide sequence isolated from the Sargasso Sea
atgtccgattttgaaaaattaaaagatcaattaaaagacaaacttattaaagcccaaagctctgaagaagtagaaataataagaggtgagatttttggtaaaaatggtttagtaaatttagaatttaaaaaacttggatcgttaccaccagaagataaaaaaaaagtagcttcagaattaaatgatgcaaaacaagaactaacaaaattatttaatgataaaaatatcaagctagccgattctgaaatagaagagaaaattaaaaaagaaaagaatgatgtaacacttccagagaaagattttagaattggtaaaatacatccagtatcacaggtaatcgacgaaatttcatctatattttccgaaattggttttagcgttgaagagggtcctgatattgaaagtgaatattataactttactgcactaaatacgcctaaaaatcatcctgcaaaagacatgcacgatactttctatattgaagaaaatatgaaaacattgttaagaacacatacgtccccagtacaagtaagaacaatgttgaagggcaaaccaccatttaaaattatagcaccaggaagaacttatagaagtgatagcgatcaaacacatactcccatgtttcatcaattagagggacttcatattgataaaaatattaatatgggtcacttaaagggttgtttaaattattttataaaagagttttttgaagtagataaaatcaaaatgagatttcgtccaagtcactttccatttacagaaccttcagcggaagttgatataggatatagaattgaaaataataaaattattattggtgaaggagataagtggctagaaatattaggatgtggaatggttcatcccaatgttttaaaatattcaaaggttgatccaaataaatttcaaggttttgcgtttggtataggcatagatagactagcgatgcttaaatatggaattaatgatttaagatctttctttgaatgcgattatagatggttaaatcactacggttttgatcctcttgatgttccaacaaactacagaggtttaagcaaatgaa

SEQ ID NO: 302158 - DNA, 1069 bp, Unknown
  Bacterial polypeptide expressing nucleotide sequence isolated from the Sargasso Sea
tatgtccgatataaaaaaaattaaagatgattatttaagtaaattagacaatgatttaaatattgaaattttaaatcaaataaagacagaattattcggtaaaaatggaaagatttctaactcttttaaatcattagggtctttgccaaatgatgaaagaaaaaagtttgcatcagacttaaatacaataaaagacgagctacaaggtaaaatagattctaaacttcaagaaatcgaaacaaaagagattaactctaaacttaaaaatgaaaaagtagatgtaacattacccgaaagagaatttagtaaaggaaaaatacatcctgtttcacaagtaattgacgagatatcatcaatattttcagaaattggattcagcgttgaagaaggtccagatatagagaatgagcattataattttactgcattaaatacgcctgacaatcatccagcaagagatatgcatgacactttttatttagataataataaagaattattattaagaacccacacttctccagtgcaagttagaacaatgttaaatggaaaacctccattcaagattatagcaccaggcagaacatatagatctgatagtgatcaaactcattctcctatgtttcatcaagttgaaggccttcatattgataaagatataaatatgggccatctcaaaggatgtttgaattatttcataaagtcattttttgaagtagataaaattaaaatgagatttagacctagtcactttcctttcactgaaccgtctgcagaagtagacattggttatgaaatgaaagatggaaagatagtgattggtgaaggagacaagtggttagaaattctaggttgtggtatggtgcatccaaatgtacttaaaaatgttaaagtaaatccagataaattccaaggttatgcttttgggattggtatagatagacttggaatgctcaagtacggcataaacgatttaagagctttttttgagactgattatagatggcttaatcattttggttttgatccattagatgtgccgtcaaattatagaggccttagtagatga

SEQ ID NO: 302159 - DNA, 552 bp, Unknown
  Bacterial polypeptide expressing nucleotide sequence isolated from the Sargasso Sea
caagagatatgtgggacacaatgtggattgatgaaaaaatgaatagcaatggcgaaaagatgttgttgaggacacatacctcgcctgtacaagcaagaataatggagagtcaagacccaccaataagagttatagttcctggtaaatgttatagatatgaagctacagacgctactcatgagtggcatttttatcaagttgaaggtttggcagtagataagaatcttacttttgcagatttgaaaggcactctttatgaatttgcaaagaaaatattcggtaatgacacaaagattaggttcagatgtgattattttccattcgtagagcctggcgtagatatgtcaattttttgggaaggcaaatggttagaaattcttggagcgggaatggttcatccgaaagtttttgaaaaagctggatatacagatcctaatatatctggatttgcttttggtatggggcctgaaagaatagcaatgataaaacataatatagacgatattcgtttattttattcaaatgatcttagatttttaaatcaattttaaa

SEQ ID NO: 302160 - DNA, 532 bp, Unknown
  Bacterial polypeptide expressing nucleotide sequence isolated from the Sargasso Sea
catggaaaacctggatgcgctggtctcccaagccctagaggccgtggaacgcgctgaagacatcaacgccctggaacagatccgggttaattatctcggcaagaagggcgagctgacccaggtgatgaagaccctgggcaacctgccagccgaagagcggccgaaagtcggcgcgctgatcaacgacgccaaagagcgcgtcaccgttgtgctcaatgcccgcaaggctgcctttgaagaagccgagctcagcgctcgcctggctgccgaatgcattgacgtcaccctgccaggccgcggccaggccaccggtggcctgcacccgatcacccgtacactcgagcgcatcgagcagttcttcacccacattggctacggcattgccgaaggcccagaggtggaagacgactaccacaacttcgaagcgctcaacatccctggccaccacccggcgcgggcgatgcacgacaccttctacttcaatgccaacatgctgctgcgtacccacacctcgccggtgcaggtgcggacc

SEQ ID NO: 302161 - DNA, 544 bp, Unknown
  Bacterial polypeptide expressing nucleotide sequence isolated from the Sargasso Sea
acaaattagaactatggaaaatactggcgctccggtgagagtgatatgtccaggtggtgtttatagagcagattatgatcagacccatacaccaatgtttcatcaggttgaaggtttggcaattgatcaatcgctatcgatggctaatttaaaatgggttttagaagaatttgtaaaagcatattttgaagtgagtgatgttgaacttcgatttagagcttcccattttccgtttacggagccatctgctgaagtcgatattcggtgctcctgggaaaaaggacaacttaaagtaggcgaaggtgatgattggcttgaaattcttggctctgggatggtgcatccaaaagttttgcaggcaggtaatatcgatcctaatctttggcagggttttgctttcggtatggggatagatagaatagcaatgcttaagtatggagttcctgatttgcgagctttttttgatagtgatttgagatggcttcgccattatggttttacagcccttgaccaaccaaaccttcatgcaggtctttccagataa

SEQ ID NO: 302162 - DNA, 982 bp, Unknown
  Bacterial polypeptide expressing nucleotide sequence isolated from the Sargasso Sea
aatgaacattaaggacacaattgaatcagttcgaaaacaatttcggactgattctgatccgtttcctgatgataatgataaaatagattctttaaaaattaaatatttgggaagaaaaggtttaattgcgaatctttttactcaaatgaatcaagttgaagccgaagatcgtccgttatttggtaagtatttaaatcaacttaaaaatgaaatcaattctgtttttgattcatctcaacaaaaagattcagatagtaaaactgatcaaattgactattcattacctggtttgaatttcaatattggctatcaacatcctttacaaactacattaaatgaaattaaatcgatatttcagaatttaggtttttcagttgcgtatggtcctgaggttgatgatgacttccataatttcagtgcattgaacttccctccagagcacccagctcgcgatatgcaagatacgttttttattgaaaaagatatagttttacgaacccacacatctaatgttcaagttcatttaatgaaagaaaaagaacctccattgagatacatcgttcctggtcgcgtatacagaaatgaatctataagctttaaaagctattgcctttttcatcaaatcgaagggctgtatgtagataaaaatgtttcctttgctgatcataaaggaatattagaatattttgtaaaacaaatgtttggagcaaaaactaaaatgcgttttaggccaagcttttttccttttactgaaccaagtgctgaggttgatatatggagcgaaaaaagaggtcaatggcttgaaatattagggtctggcatggttgatccagaagtgttcaaatccgtagatattgatcccgatgtatggcatggatatgcttttggtcttggtattgaaagaatctgtatgttgaaatatgatattgatgatatacgcttattgtatcagggtgatttaagatttttggagcaattttaa

SEQ ID NO: 302163 - DNA, 1069 bp, Unknown
  Bacterial polypeptide expressing nucleotide sequence isolated from the Sargasso Sea
atgtcagattttgaaaaattaaaagaagaatatcaaaataaacttacaaaagctcaaaattctaaagaattagatattataagaacggagattttcggtaaaaatggtttaataaatatagaatttaaaaagcttggatcgttgtctccagaagataagaaaaaagtagcttcagaaataaataatgcaaaacaagaattaacaaatttatttaatgaaaaagcaacaaagttagaaaatgttgaaatagacgaaagagttaaaaaagaaaaagacgatgtaacattaccagaaaaagattttaaaattggcaagatacatcctgtatcacaagtaattgatgaaatttcatctatattttcagaaattggttttactgttgaagaagggcctgatgttgaaagcgagtattataattttactgcacttaatacacctgaaaatcatccagcaaaagatatgcacgatactttttatattgaagaaaatatgaaaacattgttaagaacacatacttctccggttcaagtaagaacaatgttaaaaggaaaaccgccatttaaaattatagcaccaggaagaacatatagaagtgatagtgatcaaacacatactcctatgtttcatcaattagaaggacttcatatcgataaaaatataactatgggtcatttaaagggatgtttaaattattttataaaagagttttttgaagtagataaaattagaatgagatttcgtccaagtcactttccatttacagaaccttcggcagaagttgatataggatatagaattgaaaataataaaattgtaattggagaaggagataagtggttagaaatattaggctgtggaatggttcatcctaatgttttaaaaaattcgaaagttgatccaaataaatttcaaggcttcgcatttggtataggtatagatagattagcgatgctaaaatacggaattaatgatctaagatccttctttgagtgcgattatagatggttaaactactacggttttgatcctcttgatgttccaacaaattatagaggtttgagtaaatgaa

SEQ ID NO: 302164 - DNA, 749 bp, Unknown
  Bacterial polypeptide expressing nucleotide sequence isolated from the Sargasso Sea
aatgtctgaaattgaaaaaattaaatcagaatacttagataaattaaatagatgcacatcctcggataacttaattcaaattaaaactgaattgtttgggaaaagtggagtaattactaatcaatttaaattaattagctctaaatcagaaaatgataaaaaaatctttgcatctcaaattaatgatcttaaaaatttacttcaagaaacattaaacaaggtatcaaaaaaaatagaaatagatgaagtaaataaaaagcttacgtccgagaaagtagatgtaacattgccagaacgtaatttcaaaaaaggtaaaattcatccagtgtcccaagtaattgatgaaatatgttcaatattttcagaaattggttttagtgtagctgaggggcctgatgtagaaaatgaatataataattttactgcacttaacacaccatcaaaccatccagcacgagatatgcatgatacattttatttaagcgaagataaaaacttactacttagaactcatacatctccagttcaaataagaactatgctaaacggaaaacctccatttaaaataattgcccctggaagaacttatagatgtgatagcgatcaaacgcacaccccaatgtttcaccagttagagggtttgcacattgataaagatataaacatgggtcatttaaaaggatgtttaaattatttcattaaagaattttttgaggtgaaaaaattaaaaatgaggttcgaccaagcca

SEQ ID NO: 302165 - DNA, 538 bp, Unknown
  Bacterial polypeptide expressing nucleotide sequence isolated from the Sargasso Sea
atgtccgatctaaaaaaaataaaagatgaatttttttcaaaacttaaaggtaagttaaatctttcagagataaatcaaataaaatcagacctatttggtaaaagtggattaatttcttcacaatttaaaaagatagcttccattcctgaaaaagagagaaaaaaatttgcttcagatttaaatataatcaaagatgaattacaacagttgataaattacaaaattaatgaaattcaaaatttagaaatcaacgaaaaattgggaaaagaaaaaattgatgtaactcttcctgaaagagattttgtaagaggaaaaattcatcccgtatcacaaactattgatcaaatatcatctatattttctgaaataggatttagtattgaagaaggtccagatgttgagaatgagtataataattttacagcattaaacactcctgataatcatccagcaagagatatgcatgacacattttatttagatgaaaaaaaagaaaaattattacgaactcatacttcaccagttcaaattagaacta

SEQ ID NO: 302166 - DNA, 883 bp, Unknown
  Bacterial polypeptide expressing nucleotide sequence isolated from the Sargasso Sea
atgtccgatattaaaaaaatcaaagatgattatttgaataaattaaataatgatttgaatattgaaagtttaaatcaaataaaaacagaattgtttggtaaaaatggaaagatttctaattcttttaaaaaattaggtcttttaccaactgatgagcgaaaaaaatttgcatcagatttaaattcaattaaaaacgaacttcaagataagatagactctaaacttcaagaaattgaaacaaaagagattaactctaaacttgaaaatgaaaaagtagatgtaacattacctgagagagaatttagtcgaggaaaaatacaccctgtctcgcaagtaattgacgagatatcatcaatattttcagaaattgggtttagtgttgaagaagggccagatatagagaatgagcattataattttactgcattaaatacgcctgacaatcatccagcgagagatatgcatgacactttttatttagataataataaagaattactattaagaacccatacttctccggtacaggttagaactatgttaaatggaaaacctccatttaaaattatagctccaggcagaacatatagatctgatagtgatcaaactcattctcctatgtttcaccaagtcgaaggccttcatatagataaagatataaacatgggtcatctaaaaggatgcttgaattatttcataaaatcatttttcgaagtagataaaataaaaatgagattcagacccagtcactttccattcactgaaccatctgcagaagtagatattggttatgagataaaagatggaaaaatagtaattggtgaaggagataaatggttagaaattcttggttgtgggatggttcatcccaaatgtgcttaag

SEQ ID NO: 302167 - DNA, 1057 bp, Unknown
  Bacterial polypeptide expressing nucleotide sequence isolated from the Sargasso Sea
aatggtagatttacgagaattaattcagaaaatatcacaagcaaaagacaagttagaattgcaaaatcttaaatctcaatttttaggaaaaaacagtcaaattaatcaggaatttaaaaaacttggttcgcttgatgaaaatgaaagaaaagttcgagcttcttcattaaataatgaaaaacaaaaaattaccgaagccattaataacaaatttaaagaattagaaaatttagaaataaaccaaaaacttcaaaaaaataaagttgatgtaactttaccagctcgggaaagaccaaatggtaaaatacaccctgtttcacaagtaattgacgagatctcatcaatattttcagaaataggtttctctgttgctgaagggccagatgtcgaaagtgaatataataattttacagctttaaatactccagaagatcatccagctagagatatgcatgatactttttatttagataataataaaaaaatattacttagaacacatacatcaccagttcaaattagaacgatgttaaatggcaagcctccatttaaaattattgtgccaggcagaacttatcgttgtgatagcgaccaaactcatgcaccaatgtttcatcagcttgaaggactacacatagacaaagatatcacaatgggtcatttaaagggatgtttagactacttcgttaaagaattttttgaggttaaaaagattaaaatccgatttagacctagccattttccatttactgaaccttcagcagaagttgatattggttatagattagaaaatggaagaattattgttggtgagggtgataagtggcttgagatattaggctgcgggatggttcatccaaatgttttaaaaaatgccaaagttgatttaaaaaaatttcagggttatgcatttggaatgggaatagatagacttgcaatgttaaaatatggaataaacgatcttagatctttttttgaagctgattttcgatggttaaattattttggatttgaccctttggacgttccaacaaactatagaggtctgagcagatga

SEQ ID NO: 302168 - DNA, 1203 bp, Unknown
  Bacterial polypeptide expressing nucleotide sequence isolated from the Sargasso Sea
catgaaggtatctgtttcttggctaaaagatcttgtcgaatttaacaatgatattgacgagctttctgaaaagctgtcaatgacaggctttgaggttgaatctttagaagacttatcagaacaagctaagaatgttgttattggttttgttgaggaaatcacgccgcatccaaatgctgaaaagctaaaagtttgttctgtagatgttggtttacccaaaaagttgagcattgtttgtggtgcaccaaatgtaaaagcaggatttcatgtcctagtggcgaaggtcggtgcttatttatcttcaaagtcactaaaaataaaattatctaatttacgtggcgttgaaagcgagggaatgatttgttcgctggaagaattaggtattgaaagtagtaatgaaggcattgaaattcttgaagaaaatgaagaaaatatcccaccaattggtacaaatgctgttgattacctttgtttgaatgacaccatcattgaattagctattactgctaatagacctgatggtatgtcaatggtaggtatagcacgagaaatatctacaataacaaattcaaaattaacattaccaactttaaattacaatgaagactttaatatatttgaaccgaaaataagtgatcaagaaacgattggagtagactgcatatactcaattacgtatatagacagtatagacaatactggaaacacaaataaaaatatttttaataaattaaattcattaaaacaaaattgtataaatcctgttgtagacataacaaattatttaatgcttgaacagggacaaccattacatgcttttgatgcagatctattagataatataattggtagaaaggttataccaaatgattttggtattagaaatggtaaggaaggtgaattatttgtcgcacttgataaaaaagaatataagataaatccaacgataaagttgattacctgtgacgatattccaatagcaatagcaggagttataggtggaaataatagttctgtaagtgataaaacaacaaggatttggttagaagctgctgtatttacccctacttcaattagaaatagtagtagagaaataggtcttaggacagatgcaagtagtaggtacgaaaaaggaatatcctcaaacatgactactgctgtttctaaaagagctagtgaactaatttcagttcagttaggggg

SEQ ID NO: 302169 - DNA, 1069 bp, Unknown
  Bacterial polypeptide expressing nucleotide sequence isolated from the Sargasso Sea
atgtctgatctaaaaaaaataagagacgaatttatatcaaaattaaaaggtaaattagatctagcagaacttaatcaaattaaatctgatctatttggtaaaaatgggcttgtctcatctcaatttaaaaaaataggtactattgatgtttcagaaaaaaaaaaatttgcagctgatttgaatataattaaggatgaacttcatgatcttataaattttaaaattaacgaaatagaaaaagcaaatattaatgaaaaattggaaaaagaaaaaattgatgttactttaccagagcgatcatttgtaaggggtaaaatccatcctgtatcacaaacaattgatgaaatatcttctatattttctgaaataggctttagtgtagaggaaggaccagatgttgaaaatgaatataacaattttactgctttaaatactccagataatcatccggcaagagatatgcatgatacgttttatcttgatgaaaaaaaagaaagattgctgcgcactcatacgtctcctgttcaaattagaacaatgttaaaagacaaaccaccttttaaaataattgcacctggcagaacatacagatcggatagtgaccaaacacattcaccaatgtttcaccaagttgaaggtcttcatatagacaaaaatataaatatgggtcacttaaaaggttgtttgaattattttatcaaagaattttttgaagttaaaaaaataaagatgagatttaggccaagtcattttcctttcacagaaccatctgccgaagttgatattggatatgaaatcaaagatggaaaaattattataggggagggtgatcagtggctagaaatactaggttgtgggatggttcatccaaatgttttaaaaaatgttaaggtcgatccagctaagtttcaaggttatgcgttcggaataggaattgatagattagcgatgttgaaatatggaattaatgatcttagagctttctttgattgtgattatagatggttaaaccattttggatttgatcctttagacgtacccacgaactatagaggcctaagtagatgaa

SEQ ID NO: 302170 - DNA, 470 bp, Unknown
  Bacterial polypeptide expressing nucleotide sequence isolated from the Sargasso Sea
tgaccaaacacattcaccaatgtttcaccaagttgaaggtcttcatatagataaaaatataaatatgggccatttaaaaggctgtttaaattattttataaaagaattttttgaagttgataaaataaaaatgagatttagaccaagccattttccttttactgaaccgtcagctgaagtagacataggatataaaatcaaagatgaaaaaatagttattggagaaggtgacaaatggttagaaattttaggttgtgggatggtccatccaaatgttcttagaaatgtaaaggtagatccatcaaaatatcaaggttatgcatttggaattggaatagatagattggctatgctcaagtatggaattaatgacctaagatctttttttgaaacagattataggtggttaagtcattttggatttgatccattggatgttccttcaagttacagaggtttaagcagatgaa

SEQ ID NO: 302171 - DNA, 724 bp, Unknown
  Bacterial polypeptide expressing nucleotide sequence isolated from the Sargasso Sea
atgtcaaatacaagagactttgagcctccaaaaataactaagagtcttgggtcatcacatccaataaatcagattaaagatagcataatgaactatcttgtaagtcttggttttgagattcttgatggaccagaaattgagaccgaggaatttaacttcgatatgttaaatataaaagagtcacatcctgctcgacaaatgcatgacacattttatgtaaataaaaaatcaaatgttttaagaactcatacttcaccagtacagataagaggtatgttagataaaaaacctccggttgcttttatttcaggaggaaaagtatacagaaaagatgatgactctactcacctgccaatgtttcatcaaattgaaggaatatatgtagacaaaaatgtaagttttgcaaacctcaaagatgttatctatcaaataattacttacctattcggaaaggatgtgaagattagatttagaccatcatattttcctttcactgagccttcagctgaggtagatattctttctgaggatggaaagtggcttgaaattcttggatgcggcatagtaaatccaatagtgcttcaaaactgtaaaattgatagcaatttatattctggttttgcatttggattgggaatcgagagaatagcaatgttgaaatatggagtttcagatattagagatttttataaatcacaatttagattttctgagacaatttaaa

SEQ ID NO: 302172 - DNA, 616 bp, Unknown
  Bacterial polypeptide expressing nucleotide sequence isolated from the Sargasso Sea
tatgcagtttagtaaaaattggcttaaagactttatcgatctaaatatctcaactgaagatatttgctcccaacttactatggctggtatcgaggtagatggatatgattcttttcattccaaaataactggtaaagattcaattattaagttagatataaccccaaatcgtggcgactgttttagtattcttggtgtagctagagagttggccgttattaataatctaaagttaaagaatcctacttttaaaccgattgaaaattctttcaaagaagatataaaaattaaagtatgtaaagaaaccccaagatatattggaagatcggtaaaaaatgtagacattaatgcaaaaacacttcctttaatttcagaaaggttgattttaagtgatcaaaaacttatcgatcctgtagtagatattacaaattatgttcttctagaactaggtcagcctcttcatgcttttgatagagacaggttagaaggtaatattaatgtaaggaaagctgaaaaagacgaaaatctcactttacttgatgatcaagaagttaagttaagtccagattacgtagttatttctgatgcaaagcaagcaatagctcttgctggaata

SEQ ID NO: 302173 - DNA, 1069 bp, Unknown
  Bacterial polypeptide expressing nucleotide sequence isolated from the Sargasso Sea
aatgagtgatttagataaaataaattctatttttaacgctaagatagactctataaaatcaaaagatgaattacagaacttaaaaactgaattttttggtaaaaatggacaaattacaaatcaatttaaaaatttagcatctctatcagatgaacagaaaaaagagtttgcttctagtttaaataaactaaaatctagtttatctaatcaaattgaagtaaaaaatttagaaattgaaactcaagaaattaatgaaaaattaaaaaatgaaaaaattgatgtaactttacccataagatcttatagacaaggaaaaattcatccagtatctcaagttatagatgaaatttcttctatattttcagagattggattttcagttgcagaaggcccagatgtagaaacagaatataataattttactgctcttaatacacccgaagatcatccagctagagatatgcatgacactttttatctagataaaaacaaaaaacttttattaagaacacacacttcaccagttcaaattaggagcatgttgaatgaaaaaccaccttttaagattatcgtgcccggaagaacttatcgatcagatagcgatcaaactcatgctcctatgtttcatcaattagaaggtcttcacatagataagaatataacaatggggcatttaaaaggatgtttagattatttcataaaagaattttttgaagtcagaaatgttaaaatgagatttaggccaagtcatttcccatttactgaaccttcggctgaagtagatattggttatagattagagaacggaaaaatagttattggagagggtgataagtggctagaagttttgggttgcggaatggtccaccctaatgttttaaaaaatgtcaaagtcaatacaaaaaaatatcaaggttatgcgtttggaatcggaatagataggcttgcgatgctaaaatatggaattaatgacctaagagcactctttgaaacagattatcgatggttaagtcattttggttttgatcctttggatgttccaacaaattatagaggtttaagtaaatga

SEQ ID NO: 302174 - DNA, 2389 bp, Unknown
  Bacterial polypeptide expressing nucleotide sequence isolated from the Sargasso Sea
atgaaatttagcgaatcttggcttcgtgagtgggtcaatcctgccgttagccgtgaagcattatcccaccagatcactatggctggcctcgaagtcgatggcgttgatgccgtggctgccgagtttaacggcgttgtggttggtgaagtggtcgaatgtggccagcaccccgatgcagacaaactgcgcgtgactaaagtcagtgttggcagtggcgagcttattgatatcgtctgtggcgcaccaaactgccgtcaaggcttaaaagtggccgtagcaatggtcggtgccgtactgccaggcgattttaaaattaaaaaggctaagctgcgtggtatgccttcagaaggcatgctgtgttcatacagcgagctgggtattgatatcgatagcgatggcattatcgaactgccattagatgcgccattaggcacggatttacgtgagtatctccagcttgatgatgctgtgattgaagtggatttaaccgctaaccgtgccgattgcttaggcatggtaggtttggcccgtgaagttggcgtgttaaaccgtcaagcggtaaccgagccacaatggcaaaccgtgacgccaacgattgatgccaaagtggctatcaatgtgaaggaaaccgcagcttgcccacgctacttaggtcgtgtggtgaagaatgtgaacgtgaaagcggctacgccattatggatgcaggaaaaactgcgtcgcagtggtatccgctcaatcgatcctatcgtcgatatcactaactttgtgttggttgaattcggtcaacctatgcacgccttcgaccttgccaaactgactggcgacatccaagtgcgtttaggtaatggcgaagagaaaatcaccctgctcgatggcagcgaagtgactattccaaacgacactctagtgattgccgacgatgcgcgtccattagcgcttgctggcgtgtttggcggtgaatattcgggtgtgagcgacactacccaagacatactgcttgaatgtgcgttcttcgcgccgttagcgattatgggtaaatcacgccgtttaggtttgcataccgattcatcacaccgcttcgagcgtggtgttgacccagagatgcaacacaaagtcatggaccgtgcgactcgcttagtactggatatttgtggcggtgaagctggccctgtggttgaagctaaatctgacgctgacttaccaaaacctgtgcaaatcttattgcgtcgcagcaagttagataaaattctcggtcaccatgttcccgatagcgacgtggttgaaatcctcgagcgtttaggttttagcgtagtcgcaggtgaggggtgctggcaggttacgaccgccacttaccgcttcgatatggcgattgaggaagacttaatcgaagaagtggcccgtatctacggttacaacaacattccaaacgttgcgcccgtggcgtcactgcggatgtcagaccataaagaaaccgacttaagcctcaagcgcgtacgttcgctgttagtggcccgtggtttccaagaagctgtgacttacagtttcgtcgatcctaagctgcaaaatctggttcacccaggtgagcaagccatggtgttaccgaacccgatttctagcgaaatgtcggccatgcggttgtcgatgttcactggattattgactgcggttggctacaaccaaagtcgtcaacagggtcgcgtgagactttttgaaactggcctgcgctttgttcctgatattcatgcagaatccggtgtaagacagcaagcaatgctcggttgcgtcattacagggcttcaaaatgacgaacattggtcaatggaatcgaaaaccgttgattttttcgaccttaaaggtgatttagaagcaattatcggcttgacagtttccgcatcagaatttagctttagagtagcgacgcattctgctcttcatccagggcaatgtgctgaaatattgagaaatgatcgagtgatcggtcatataggtgctatccatcctagtttggagaagccttttggactcaatggtaaaaccatcgtttttgagttggaattggatgctttattgcataccagtttaccgctagcccaagctgtatctaagttcccggctaatcgtcgtgacatcgcagtagtcgtagatgaaagtgtatctgcaggcgatgtaatgaaattgataagaaaagttggcgaaaatcagttggttggcataaacttgttcgatgtatacttaggtaaaggtgttgagcccggcaagaagagcttggcgatagcacttacattacaagacactactcgtacacttgaggaaaaagagatcgctgaaactgtagattcagttgtttctgccctgaagaccgagttcaacgcatcgttgagggattaaa

SEQ ID NO: 302175 - DNA, 985 bp, Unknown
  Bacterial polypeptide expressing nucleotide sequence isolated from the Sargasso Sea
atgcagcagttaactgagatcgtagaacaagccttagtcattattgaccaggccagtgatctaaaagcactggatgatatccgtgtcgattacctaggtaagaaaggtaagatcaccgacatgatgaaaatgatgggcagcttaagtcctgaagaaaaacccgcttttggtcaggcggtcaatgatgcgaaacaggccattcaacagaaattaactgagcgcatcgacgtcctgagaagtgcagagctagaagctaaattaattgccgaaaagattgatgtgacgctacctggccgcactatcgaaatcggcggtttacacccagtgacgcgcaccattgaacgtatcgaaaccttttttggggaattagggttttcggtaaaacaaggccctgaaatcgaagatgatttccataacttcgacgccttgaatatctctgagcaccacccagcgcgtgccgaccacgatacgttttattttaatcctaaactgatgctgcgtacccaaacctcgggcgtgcaaattcgtactatggaaacggaaaagccgccactacggattatttcaccgggtcgtgtgtatcgtaacgattacgaccaaactcacacaccaatgttccaccaagtggaaggtttgctggtcgatgaaaacgttaacttcgccgaattaaaaggcgtgttgcatgatttcctgcgtaacttctttgaggaagatttgcaggtgcgtttccgtccttcttacttcccattcactgagccttcagccgaagtggacgtaatgggtaaaaacggcaaatggttagaagtgttaggctgcggtatggtgcacccaaatgtgctgcgtagcgtgggcatcgatccagaaaaatactctggttttgcttttggtatgggcgttgagcgtttaactatgctgcgttacggcgtaaacgatctacgtgcgtttttcgaaaacgacctgcgtttcctgaagcaatttaaataac

SEQ ID NO: 302176 - DNA, 829 bp, Unknown
  Bacterial polypeptide expressing nucleotide sequence isolated from the Sargasso Sea
atgagtgatctaaaaaatattttgagcatttttgaagataaattttcatctatcaaaaacaaagacgatctacaaaatttgaaatcagaattttttggaaaaaatggatctatatcccttcaatttaaaaaaatgggttcaattaatcctgaagaaagaaaaaattttgccaaagaattaaatacaataaaagatcagttaacatccaagatagaaaaaaaatttaaggattttgaaagtcttgagataaaccagaaacttaaagatgaaaaaatagatattaccttacccattagatctatccaacatggtaaaattcatcccgtctcacaagttattgacgaaatatcttctattttttctgaggtagggttttcagtagctgagggcccagatgtagaatctgaacataataattttacagctttaaatacacccgcaaatcatcccgcgcgagatatgcacgacacattttatcttgataaagataaaaaaacattattaagaacacatacttctcctgttcaaataagaactatgcttaatggtaaaccgccatttaaaattattgtgcctggcagaacctatagatgtgacagtgaccaaacgcacgcacctatgtttcaccaactagagggtttacacgtagataaaaatataaccatgggccatcttaaggggtgcctaaattattttataagagagttctttgaggtcaagacaattaaaatgagatttagaccaagccatttcccatttacagaaccatctgccgaagtggatattggatacaaaattgagaatggtaaaattgtgattggagaaggag

SEQ ID NO: 302177 - DNA, 388 bp, Unknown
  Bacterial polypeptide expressing nucleotide sequence isolated from the Sargasso Sea
tgccgtagatgcaactcattcccctgtatttaatcaggttgaagttttatgtatcgatcaagatattaattttagtcatttaagaggaacagttttgacctttttaaaggccttttttggagatattcctgtaagattcagagctagttatttcccatttactgaaccttcagcagaagtagacgttcagtggaaaggtaaatggttagaagtaatgggttgcggaatggttgatccaaaggtcttagaaaaattaggaatagattctgagaaatggactggttttgcagcaggattaggcgttgagagattttgtatggtgagacatcagatcgacgacatcagaaaattttatacaaacgatattagattcttagaacagttctaa

SEQ ID NO: 302178 - DNA, 1069 bp, Unknown
  Bacterial polypeptide expressing nucleotide sequence isolated from the Sargasso Sea
tatgtctgatattaaaaaaattaaagatgaatttttagagagattaaatgaggatttaaatattgaaagagttaatgaaatcaaatctgaattatttggtaaaaatggtaaaatttcaacttcttttaaaaatcttggatctttaccagctgaagaacgaaaaaaatttgcatcagatttaaattttgtaaaagatgagttacaagaaaaaattaacaaaaaaattcaacaaatagagattaaggaaataaattctaagctagagaatgagaagatagacgtaacactgcctgaaagaaatattgtacaaggtaagatacaccctgtttctcaagttatagacgaattatcctcaatcttttctgaaattggttttagcgttgaagagggaccagatgtagagaatgagcattataattttacagcattaaatacaccagataaccatccagcaagagatatgcatgacactttttatttagatgataaaaaggaatttcttttaagaactcacacatctccagttcaagtacgaacaatgttaaaaggtaaacctccatttaaaatcattgctcctggtagaacatacaggtctgatagtgatcaaactcacgccccaatgtttcatcaagtggaaggacttcatattgataaaaatataaacatgggacatttaaaaggctgcttagattattttataaaatctttttttgaagtagataaaattaaaatgagatttagaccaagtcactttccttttacagagccgtcagcagaggttgatattggttatgaattaaaggacggtaaaatagttatcggagaaggagataaatggttagaaattttgggttgtgggatggtgcacccaaatgtacttaaaaatgtaaaaataaatccagataagtatcaaggctatgcatttgggattggtatagataggttggcaatgcttaagtatggaataaacgatctaagagcttttttcgagactgactataggtggctaaatcattttggttttgatccattagatgtaccttcaaattatagaggtctcagtagatga

SEQ ID NO: 302179 - DNA, 501 bp, Unknown
  Bacterial polypeptide expressing nucleotide sequence isolated from the Sargasso Sea
atgctgtactcagaacacatacatccaatgttcaaattcatttaatggaaaatcaagatccgcctttaagacatatatgttgtggtagagtgtttagaaatgagtcagtgagttataaaagtttttgtttatttaatcaagtagagggactagtcattaatgaaacttcctcatttgctgagatgaaaggaaccttagagtattttgttcaggaaatgtttggaaaagatacaaaaatgcgttttagaccaagttattttccatttactgaacccagtgcagaagtagatatctggaatagtaagttaaatcaatggatggaaattttaggttgtggtatggtcaatccgaatgttttaactaatgttgggtatgataatgaaaaatatcaaggattcgcatttggtatgggaattgaaagaattgccatgataaaatttggcataaaagatattagacttttttatcagaatgacaaacgtttcttggagcagttttaat

SEQ ID NO: 302180 - DNA, 2389 bp, Unknown
  Bacterial polypeptide expressing nucleotide sequence isolated from the Sargasso Sea
atgaaatttagcgaatcttggcttcgtgagtgggtcaatcctgccgttagccgtgaagcattatcccaccagatcactatggctggcctcgaagtcgatggcgttgatgccgtagctgccgagttcagcggcgttgtgattggtgaagtggtcgaatgtggccagcacccagatgcagacaaactgcgcgtgactaaagtcagtgtaggcagtggtgaacttatcgatatcgtctgtggcgcacctaactgccgccaaggtctacgcgttgccgttgccatggttggcgctgtattaccgggcgattttaaaattaaaaaggctaagctgcgtggtatgccttcagaaggcatgctgtgttcatacagcgagctgggtatcgacatcgacagcgatggcattatcgaactgccattagatgcgccattaggcacggatttacgtgagtatcttcagcttgatgatgctgtgattgaagtggatttaaccgctaaccgtgctgactgtttaggcatggtgggtctggcccgtgaagtaggcgtgttaaaccgtgcggctgtgactgagccacaatggcaagctgttacgccaacgattgatgccaaagtggctatcaatgtgaaggaaagcgcagcgtgcccacgctacttaggccgtgtggtgaagaatgtaaacgtgaaagcggctacgccattatggatgcaggaaaaactgcgccgcagcggtatccgttctatcgatcctatcgtcgatatcactaacttcgtgttagttgaattcggccaacctatgcacgccttcgaccttgccaagctgactggcgacatccaagtgcgtttggggaatggcgaagagaaaatcactctgctcgatggcagcgaagtgaccattccaagcgacaccttagtgattgccgacgatgcccgcccattagcgcttgctggcgtatttggtggcgaatactcgggtgtgagtgacaccacgcaagacattctgctggaatgtgccttcttcgccccgttagcgattatgggtaaatcacgccgtttaggtctgcataccgattcatcacaccgttttgaacgtggtgttgaccctgagatgcagcacaaggttatggaccgtgcgactcgcttagtgcttgatatttgcggcggtgaagcgggtcctgtggttgaagcgaaatctgacgctgacttaccaaagcctgcgcaaatcctattgcgtcgcagcaagttagataaaattttgggtcaccatgttcccgatagcgatgtggttgaaatcctcgaacgtttaggtttcggcgtggtagcaggtgagggtagctggcaggtcacgaccgccacttaccgcttcgatatggcgattgaagaagacttaatcgaagaagtggcccgtatctacggttacaacaacattccaaacgttgcgcctgtggcgtcactacggatgtcagaccataaagaaactgatttaagcctcaagcgcgtacgttcgctgttagtggcccgtggtttccaagaagccgtgacttacagttttgtcgatcctaagctgcaaaatctggttcacccaggcgagcaagccatggtgttgccgaacccaatttctagcgaaatgtcggccatgcgtttgtcgatgttcacaggattattgactgcggttggctacaaccaaagtcgtcaacagggtcgtgtgagactttttgaaactggcctgcgctttgttcctgatattaatgcagaatcaggtgtaagacagcaagctatgctcggttgcgtcatcactggcctccaaaatgacgaacattgggctatggaatcgaaaactgttgattttttcgaccttaaaggcgatttagaagcaattatcggcttgacagtttccgcatcagaatttagctttagagtagcgacgcattctgctcttcatccagggcaatgtgctgaaatattgagaaatgatcgagtgatcggtcatataggtgctatccatcctagtttggagaagccttttggactcaatggtaaaaccatcgtttttgagttggaattggatgctttattgcataccagtttgccgctagcccaagctgtatctaagttcccggctaatcgtcgtgacatcgcagtagtcgtagatgaaagtgtatctgcaggcgatgtaatgaaattgataagaaaagttggcgaaaatcagttggttggcataaacttgttcgatgtatacttaggtaaaggtgttgagcccggcaagaagagcttggcgatagcacttacattacaagacactactcgtacacttgaggaaaaagagatcgctgagacagtagaatcagttgtttctgccctgaagaccgagttcaacgcatcgttgagggattaaa

SEQ ID NO: 302181 - DNA, 985 bp, Unknown
  Bacterial polypeptide expressing nucleotide sequence isolated from the Sargasso Sea
atgcagcagttaactgagatcgtagaacaagccttagtcattattgaccaggccagtgatctaaaagcactggatgatatccgtgtcgattacctgggtaagaagggtaagatcaccgacatgatgaaaatgatgggcagcttaagtcctgaagaaaaacccgcttttggtcaggcggtcaatgatgcgaagcaggccattcaacagaaattaactgagcgcatcgacggcctgaaaagtgccgaactggaagccaagttaatcgccgaaaagattgatgtgacgctaccaggccgcactatcgatatcggtggtttacacccagtgacgcgcaccattgaacgtatcgaaaccttttttggggaattagggtttacggtaaaacaagggccagaaatcgaagatgacttccataacttcgacgccttgaatatctctgagcaccacccagcgcgtgccgaccacgatacgttttactttaatcctaagctgatgctgcgtacccaaacctcgggcgtgcagatccgtactatggaaactgaaaagccgccattgcggattatttcaccgggtcgtgtgtatcgtaacgactacgaccaaactcacacgccaatgttccaccaagtggaaggtttgctggtggatgaaaacgtaaacttcgccgaattaaaaggcgtgttgcatgacttcctacgtaacttcttcgaggaagatttacaggtgcgtttccgtccttcttatttcccattcactgaaccttcagccgaagtggacgtaatgggtaaaaacggcaaatggttagaagtgttaggctgcggtatggtgcacccgaacgtgctacgcagcgtgggcatcgatccagaaaaatactctggttttgcttttggtatgggcgttgagcgtttaactatgctgcgttacggcgtaaacgatctacgtgcgtttttcgaaaacgacctgcgtttcctgaagcaatttaaataac

SEQ ID NO: 302182 - DNA, 1015 bp, Unknown
  Bacterial polypeptide expressing nucleotide sequence isolated from the Sargasso Sea
aagtaaaatcaacgacatcgatcgtcaaattgaaaagttcaaaattcaagataaggaaagtctagaaaaatttagaattcaatttttaggatcaaaaaatatactgaaagatttatttgccgaaattaaaaatgttacgcctgaaaaaagaaaggctataggacaatccattaactccttaaaaaccaaagcacaagctaaattagagtcttttactgaaaagataaatgaggaggatgaggaaaatgtaaaaattgatttgactttacctggcgataacctcaaattaggaagtagacatcccttaagtattgttaatgaaaagatcatagatatttttggaaaaattggattctcagtttcagaaggacctgaagtagaagatgattggcataatttcacaggccttaatcttccagaggagcaccccgcaagagatatgcaagacacattctttattgagaaaaatccagattggctattacgaactcacacttcgtctgttcaaatgagagtgatggaatctaacgaattacccataagaacaataacacctggaagagtttatagaaacgaagcaattagcgctagagctcactgtttcttccatcaagtagaaggattatatattgatgagaatgtatcctttgcagatttaaaacaaactattcaatattttgcaaaggaaatgtttggtgaacgttccaaaataagattacgcccatcctattttccctttactgagccaagtgctgaagttgatgtatcatgctcattatgtgaaacaaaaggctgtaatgtatgcaaatatacaggctggttagaaattatgggatgtggaatgatagatccaaatgtcttatccaatgctggtattgatcctgaaaagtattctggatttgcatttggaatgggagttgaaagaatggctatgctaaaatatgaagtgaaagacctaagaatgtggagtgaaaatgatactcgatttttagagcaattcaaatcagcttggtaa

SEQ ID NO: 302183 - DNA, 694 bp, Unknown
  Bacterial polypeptide expressing nucleotide sequence isolated from the Sargasso Sea
gaaggtccagacatagaagaagattggtacaattttacggcattaaacattccacctgaccaccctgcccgtcaagaacatgataccttctacttggaggcaaaatcaaagggcgaacggatggttctaagaactcatacaagtccagttcaggtacgtactatggaatctacttctcctcccataaggattattgttccaggcaggacgtataggtgtgaccatgattctacgcactcgcctatgtttcatcaggtggagggtttggttgttgatgaatctacaaatatgagccatttgaagggctgtttaattgaattttgtagggcatttttttccatagaagacttaccagtcagatttagaccaagttattttccgtttactgagccgtcagctgaggtggatattggctgttccattacaggaggcactcttaaaattggccacggtgataaatggatggagattcttggttcgggtatggtgaatcccagggttttggaaaattgcggtattgattctaaaaaatatcagggttttgcctttggaatgggaattgagcgcatttcaatgttgaagtacggtattcctgaccttagaactttttatgattctgatataaggtggatgcgtcactatggtttcaggtgtctagatgtacctacaatggtagggaaggcctcaagatgaa

SEQ ID NO: 302184 - DNA, 2023 bp, Unknown
  Bacterial polypeptide expressing nucleotide sequence isolated from the Sargasso Sea
atgaaagtttctcaaaattggttgaaaaatttagtagaaattacttctactcctgaagatctctctgagaaattgtctattggtggatttgaggttgaatcattagaagattgttcaaaaaatgtaaatggtgttgttttaggtaaggtattatctgttttaaaacacgaaggatctgacaaactttcaatttgccaagtcgatattggtaattcaaagaatttacaaattatctgtggtgcgcggaatattaaaccaaatatttacgtttatgttgctactgtgggcacgaatttaaatgcagttgatttaaatattaaaagaagtgaaattagaggtgtcatgagtgaaggaatgatatgttcactgcaggaacttggtttagaggaatctagcgaaggtatagagatcattgatgaagctttggccctaaaacatgaattgggcacgccagggtctgatttgcttcaattaaatgattttatatatgatttagccatcacagctaatagacctgatggaatgtctgttataggtatagcccgtgaaatttctgcccttttagaatcccccttaaattttccagaattaaaccataaatacgatattcatttacttaaaggaattaaactttgtccagaggctatagaatctaattgcatttatacaataagctgcattgatggagtaaatggagagaaattatcgccaaattggcttaaagaccgtatagaaaaatcaggtataaaatctattaatcttctagttgatttgacaaattatattcttttagaacaaggtcaacctttgcatgcttttgataaagataaactgtcatacttaattggtaaggaagtttctccagaagatttctctgtaagaaaaggcaaggataacgaaagacttatttgcttagatggtaaagaatatgatctaaatgacaatatcacagttattacatgttgtgataaaccggttgctattgctggggttataggcggtttagagacttctgtaagtaatactacttcatctatttaccttgaaggtgcagtttttaatccagctactataagaaaatcttccaaggccgcaggcataagaacagaatctagcagcaggtatgaaaaagggatttcatcaaaaaatacaataagtgcagtaactagggcaattaatcttttagaagaatatttttctattaattcacccatcattaatacttcaaatttaataagtaatgagaatatatacattaaactacggagaaatcgaatacataaaattcttggtccattaataattaacgatcaattagaaaaaagaaatttatctgataatgaagtagttgataaattaacactcataggttgtactttaaagaataaagaatatggctgggatgtagcagtaattcctaatagatcacatgatttaacaagagaaatagatttaattgaagaaatagctagattaataggctatgacagattcgacttaaaacttcctaatccaattaagcctggaaaattgtcatcagaacagttggcattgagaaaagtaaaaaatggttttatagaaaatggttttaacgaggtattaagctattctcttgttcctgaagatgatgaaaaacttataaagatttctaatcctttgttattagaaacaagctgtcttagagataatatctggaaagaacatttggagatagttaaccgtaatataaaagctggacaagaaagttgttatatatttgaaattggaaatgtttttcaaaagaaaactgagttcattcaagaagaagttctgaatggtgcgatatatggaaataaaaaatttggaaaatggatagattcgggtaaggataacgatcttaattattaccaggccagaggaaagttaaaggaggctttatcatctttgaacataaaaattgatgataaacctactgattcaattgattttcttcatccaggaagaacagcgaaattagttattgaagggaaagatgcaggttatt

SEQ ID NO: 302185 - DNA, 1012 bp, Unknown
  Bacterial polypeptide expressing nucleotide sequence isolated from the Sargasso Sea
atgaagaaagaacttcaaaaccatttagattctattaaaaaattcaattctgataaagttgataagttagatgactttaaaataaaatatctaggaagaaaaggtattgtcaacgatctattttcaaagtttaaagaagttccagatacagaaaaaaaagaagtggggctaaagataaatgaattaaagaatttagttcaggataaatatgatgaattattaaataaaattggtagtaatcaagataatttatcaagtgaagatatatctaagccaggattccctattaaatcaggctcactccatccaatcacaattattaaaaataaagtcatagatatattttctcaagtaggatttaatttatctgatggacctgaaatagaagatgactggcacaactttactgccttgaatcttcctaaagatcatcctgctcgagatatgcaagatacattctttattcaaacaaaccctgatattcttttaagaacccacacctcatcagttcaagtaagatatatggaaaataattcacctcctattaatataatctctcctggtagagtttatagaaatgaggctatatctgcaagatcgcattgtctctttcatcaagtagaaggaatagtggttgatgagaatatttcctttgctgatcttaagcaaatggtcttatattttacaaaagcaatgtttggaaagtctaaattgagatttagaccatcctttttcccttttactgaacctagtgcagaagtagatatatactgggggttagagtcagagagtgattatagactaactaaaggaactggttggttagaaattatgggttgtggaatggtagatccaaaagttctagagaattgtaatatagatccagaaaaatactcaggttatgcttttggacttgggatagaaagaattgcaatgttaatctatgagataccggatataagattattttttgaaaatgatgtcaggtttttagaacaatttaaatcttagt

SEQ ID NO: 302186 - DNA, 976 bp, Unknown
  Bacterial polypeptide expressing nucleotide sequence isolated from the Sargasso Sea
actagataaaaccattaaaggattaaagacatcgttttctcaagaattatccaaatctaagacttctcaagatctagaaaatttccgaattaaatacttaggtagaaatggtcagcttgcatcattatttgaagagtttaacaagttgcctgtttccgaaaaacctcgatttgggaaagaattaaatattctaaaaaatcaattaacaaatttatatcaaaatgctctgggtggtaataatgaaaattctgtttcaagcgatatagatttttcattaccagggtataatttacctgacggcaaaatacacccgttggaacagattacttcagagataaaatctatttttcaatctataggattttctgttgcttacggacctgaaattgatgatgattatcataattttgaagcacttaatgtgcctaagcatcatccggcaagagatatgcaagatacattctttatcaacccaaatgctgtactcagaacacatacctctaatgttcagattcatttaatggaaaatcaagatccaccactaagacatatctgttgtggtagagtatttagaaacgaggcagtaagctacaaaagtttttgtttatttaatcaagtagaaggcttggttattaatgaaacttcatcatttgccgagatgaaaggaaccttagaatattttgttcaagaaatgtttggaaaagatacaaaaatgcgttttaggccaagttattttccttttactgagcctagcgcagaagttgatatttggaacagtaaattaaatcaatggatggaaattttaggctgtggaatggtcaatccaaatgttttatcaaacgtaggatatgacaatgaaaaatatcaagggtttgcttttggtatgggaattgaaagaattgccatgattaaatacggtattaaagatattaggttattttaccaaaatgataaacgtttcttggagcagttttaa

SEQ ID NO: 302187 - DNA, 1000 bp, Unknown
  Bacterial polypeptide expressing nucleotide sequence isolated from the Sargasso Sea
agagagttaggaaaaaaaggaaggattacaaagctccttagtgaattaggaaaattaaatcaggaagaaagaaaaaaattaggacctgaaataaatgaccttaaaaataaagtcctcgaagagatagaagaaaagaaagagttttttttagaccaaacgctaaacaaaaaactcttagaagaaaaagttgatgtaactttgcctgtaaaatcgagtcaaaatacaaatggaagaatacatccagtttctcaagttttagatgaaataactgaaatttttggttcacttggttatgagattgctgatggaccagatattgaaacagagtattacaattttaatgctctcaatattcctgaatctcatccagcaaggcaaatgcatgataccttttattttgacgaatttgataaagatcaaggacaatcagtcttaagaacacatactagtccagttcaagttagaaccatggaagaaggagagcctccttttagatttatatcccctggaagaacctatagatgtgactctgatcaaacacatacaccaatgtttcatcaaattgagggtttgtcagttgataaagaaactaacctcggtcacctgaagtggacactagaaacttttttatcctccttttttgagattaaaaacacaaaaattcagatgagaccgagttattttccctttaccgaaccatcattagaaatagatgttttgtgtgacagaagtggacctgttttaaaaattggcgaagggtcagactggctagaagttgctggcgcaggtatggttcaccctaatgtcttaaaatcagcaaatatagatcctgacatttatcaaggatttgcttttggttttggtttagaccgtttagcacaattaaaatatggtattccggatttaagaactttctttagtggagatattagatggcttaggcattacggtttctcagccttagatattccaacattatctagaggattaaagaaatgaa

SEQ ID NO: 302188 - DNA, 637 bp, Unknown
  Bacterial polypeptide expressing nucleotide sequence isolated from the Sargasso Sea
tgaacatcatccagcaaggcaaatgcacgatacattttatgtaaattctgaaacagatggtatgcaaaacgtaatgaggacgcacacttctcccgtccaaataagaagtatgttatgtcaagatcctccaattaggcttattgctccaggaaagacttttcgatgtgacaatgatcaaactcatactccaatgtttcatcaagttgagggtcttgtcatagataaagaaagtaatatgggtcacttaaaaggatgtcttgaaatatttttaaaatcattttttgaaacggatactttaaatatgcgatttagaccaagtcattttcctttcactgaaccctcagcagaagtagatattggttataaaaagaaaggtaatcaacttatcattggcgaaggttcagattggttagagattcttggatgtggaatggttcatccaaatgtattaagaaacgtcaatattgatccagatgtatatcaaggttatgcctttggtatgggcattgaaagacttgcaatgttaaaatatggaataagtgacttaagaaccttttttgaaaatgacattgactggaaccaacactacgggttttctcctctcaatatacctacaatttttggagatctaagttaa

SEQ ID NO: 302189 - DNA, 1060 bp, Unknown
  Bacterial polypeptide expressing nucleotide sequence isolated from the Sargasso Sea
atggcatttgctgaaaataaaattgatgttctaaaaaaaattaaagcttcaaaatccttcgaagatttagaaaaacttcgactatattatctaggtaaaaaaggattaatacctgaagctttaaaaggattaggctctttgtcgattgaagaaaaaaaatcgaaaggacaggaattaaatattattaaaaaagaaattgaagaaggtattaaaaaccaaagaacagaaattgaaaatattgaaatttcaaacaagattaatttagaatcaattgatgttactctaccacctaatatttctgaaaaaggaaaaatacacccaattagtcaaacaatatttaatattatagaaatttttggaaatttaaattatgcagtggaaacaggtccagatatagaaacagattttaataattttacagctttaaatatcccagaacatcatccagcaagagaaatgcaggatactttttatgttcaggataatggagacaaaaatgttcttcgaacccatactagtcctgttcaagtgagaactatgcttaacacaaaaccacctattaaaattattgtgcctggcagaacttatagaagtgactcagatgctacacatgctccaatgtttcatcaggtagaaggtttagtcgttgatacaagttctactatggttgatttaaaatcaacactcgtttcattcttagaagaatttttcgaagtaaaaaacttacaataccgttttcgccctagttattttccttttaccgagcctagtgcagaaatggatgtagcttataccaaagtaaataataaaataaaaattggtgaaggagataaatggttagaaatattgggttgtggaatggtcaatcctgtagttttagataattgtaatattgattcaaaacagtatcagggttttgcttttggtatgggaattgagcgtttgtcgatgcttaaatatggtattacagatttaagaagtttttttgatccaaattatagatggttggaccattatggttttagtattttagataatcaaacacgatcagggctataaa

SEQ ID NO: 302190 - DNA, 1675 bp, Unknown
  Bacterial polypeptide expressing nucleotide sequence isolated from the Sargasso Sea
acttaaacctctcgatacatctccagttaaaaccactttcaagagccctattgattggagagtagacttaccagatatggatccccccttagcaccgctagtggttggtcgatatttcaaaggagtaaaaaatggacctagccccaattggcttaaggagcggttacaagcagtgggtcttcgtccaatctctgcactcgtggatataactaactatgttatgatggacgttggtcgcccactccatgcctacgatgcagataaagtggaaggtgatatttttatccggctagcaaaaaatggagaaaaatatatagcattagatggaaaagaatatgtctttgatgaagagatgatcgtgattggagacgataaaggagttgatgacttagcaggtataatgggtggtgagagatctggctgcggcgatggaacggttaatatgtttcttgaagctgctattttcgatccaattcggaccgcgaccacaggacggaagctcaatataatatcggatgcaagatatagatttgagcgaggacttgattccacctccccgttttgggggtcagaattggcagctcgactagttcttgatatttgtggaggagaagctagtgagctggttgttcatggtgcagaaccagattggaaaaaggtcttcactttgagatatagccggatagaaaatttaacaggtgtgaaggttcctgagccagattgtttaagaattctgaaaactttaggttttgaagtttctggcaagggtgaacgaattgaatgtgccgttccaccatggcgtgctgatatcataggggaagccgatcttgttgaggagatagtacgagtatggggatttgatgaaattcccatgatttctatgcttaatgataatgtcatccctcaacctgcccttagtatcagacagattagagaggggcttgcaaaacgtagtttggccgttagaggtatggcagaagcggttacatactcgttcctctcatcgcgggatgcaattttgtttggcggtggagcagaggagcttcgtttaaataatcctatcagtgcagaattagatgcgatgcgtccatccgttttacctaatttgatatcggcagtcgggcgtaattcaaatatgggttcaaacgatttagctatttttgaagttggacctcagtactcagatgcaacaccagctggacaacaaatggtcgcaggtgcaattagatcgggtaatacaggggcaagggattgggccaaatcaacacggccggtagacctttttgacataaaagccgacgctctatttgttttggaaagcctaagcgctccaactaataatcttcaagtggacccatctggtgcgcctggttggtaccaccctggacgttcaggtgcttttcaattagggccgaaagttttgggctattttggggatattcacccaaaagtacttgcaactatgaatgttgacggccctaccgtgggttttgaagtgttcatagaaaatataccgaccactcggtctaagggcccgtctcgatctcttttaaaactagatgctttacaatcggttaaccgggactttgcctttatagtagaccaggagttgcaggcagaaaaattaattagagcagcgcaaggagcggataaagccttggtaactgccgttcag

SEQ ID NO: 302191 - DNA, 601 bp, Unknown
  Bacterial polypeptide expressing nucleotide sequence isolated from the Sargasso Sea
tatgtctttatcagttgattctgtagatattaaaaaaagaattgagggttgcaaaaaccttcaagaggttgaggctatacgtctagagtatcttggtaaaaaaggattaataccattagaaatgaagcttctagctaagctgccaatcgaccaaaaaaaaattaaaggtcaggaattaaataaactaaaaacgtttattgaagattctattaatcatcacaaaatcttaattgaaaataagaagttagaagaaaaactaaaaaacgagggtgttgatgttactttgcctcataatgaagaagtaagaggaaaaattcatcctatttcacaaacaatttttagcattatagagatttttggcaatttaaattattcagttgaggctggaccagatattgaaagtgactttaataatttttctgcattaaatataccaccccatcatcctgctcgcgagatgcaagatactttttatgtaaataatcctaatggtgaagacaatgttttgagaacacatacaagtcctgttcaagttagaacaatgctaaaatcaaaacctccaataaaaattattgtaccaggacgaacctaccgaagtgat

SEQ ID NO: 302192 - DNA, 1069 bp, Unknown
  Bacterial polypeptide expressing nucleotide sequence isolated from the Sargasso Sea
atgtctgatctaaaaaaaataagagacgaatttatcttaaaactaaagagtaaattagatctctcggaaataaatcaaataaaatcagatctatttggtaaaaatggattggtttcttctcaatttaaaaaaattggaacaatagttgagtctgaaagaaaaaaatttgcatctgatttaaatgttattaaggatgagctacaaaatctaattaatttgaaaatagatgaagttgaaaatgcagaaataaataagaaattggataaagaaaaaattgatataactttaccagaaagaccttttgttagaggaaaaattcacccagtttcacaaacaattgatgaaatatcatctatattttctgaaataggttttagtgtagaagaaggtcctgatgtcgaaaatgaatataataattttactgcactaaatactcctgataaccatccagcaagagatatgcatgatactttttatttagatgaaaaaaaacaaaaactattacgtactcatacttctccagttcaaattagaactatgttaaaagacaaaccaccatttaagattattgctccaggcagaacttatagatcggacagcgatcaaacacatgctcccatgtttcatcaagttgaaggtcttcatatagataaaaatataaatatgggtcatttaaaaggatgtttgaattatttaattaaagagttttttgaagtagataaaattaaaatgagatttagacctagccattttccttttactgagccatctgctgaagttgatattggatatgaaataaaagatggaaaaataataattggagaaggtaatcaatggctagaaattttaggatgtggaatggttcatccaaatgttctgaaaaatgtgaaagttgatccagcaaagttccaagggtacgcatttggtattggaattgacagactggcaatgttgaaatatggaatcaatgacttaagagcattttttgattgtgattatagatggttgaatcattttggatttgatcctttggatgtgccaacaaactatagaggccttagtagatgaa

SEQ ID NO: 302193 - DNA, 1018 bp, Unknown
  Bacterial polypeptide expressing nucleotide sequence isolated from the Sargasso Sea
tatgtctgatattaaaaaaatcaaagatgaatatttagataagttgcaaggtgatttaaatctagaaaaagtaaataaaattaaaacagaattatttggtaaaaatggtgcaatttctaattcattcaagaaacttggttcgattccatcagaagatagaaaaaaatttgcatcagacttaaattttataaaagatgagttacaagaaaaaattaataacaaacttcaagaaattgaaactaaagaaatcaattctaagcttaaagatgaaaaagtagatgtaactttgccagagagagatattgatcaaggaaaaatacaccctgtctcacaagtaatcgacgaaatatcatcaattttttcagaaattggatttagtgttgaagaaggaccagatgtagaaaatgaacattataattttactgcattaaatactcctgacaatcatccagcaagagatatgcatgatactttttacttagataataataaaaagttacttttaagaacacacacttctcccgttcaagtaagaacaatgcttaaaggaaaaccaccttttaaaataatagcacctggcagaacatacagatcggatagtgatcaaactcactctccaatgtttcaccaggttgagggacttcacattgataaagatatcaatatgggtcacttaaaaggttgcttaaattactttataaaagagttttttgaagttgataaaatacaaatgagatttagaccaagtcattttccttttaccgaaccatctgcagaagtagatattggttacgaattaaaagatggaaaaatagttattggtgagggtgataaatggttagaaattttaggatgtggaatggtccatccaaatgtacttaaaaatgtaaatgttaatccagataaatatcaaggttatgcttttggtattggtattgatagacttggaatgcttaaatatggaataaatgatttaagagctttttttgagactgactatagatggcttaaacatttt

SEQ ID NO: 302194 - DNA, 610 bp, Unknown
  Bacterial polypeptide expressing nucleotide sequence isolated from the Sargasso Sea
aatgattgaagaaataaataaacatatagctgatttagaaaaaattaaacttaaggacagtgatgaacttgagaagtttagaataaaatatatttctaaaaaaggaattgtaccctttttattttcaaaattaaaggaaataccagatgctcaaaaaagggaagttggtttaaaaattaactctattaaagagaaggttaatgaaattttatccaaacaaaagaaaaagtttgcgaaaacaagctcggatcaaagttctgacgatttaactaaaccagcaaattttataaagttagggtctagacatccaatatcaattgtcaaaaataaaatcatcgatatatttttaaaaataggatttgatatttcagaaggtcctgaaattgaagatgattggcataattttactgctcttaatttaccagagcatcatcctgctagggatatgcaggataccttttatattaataaaaaccctgattggctcctaagaactcatacctcatcagttcaaataagacatatggaaaacaatgatccgccaataagaaccatatcaccaggaagggtttacagaaatgaagatatttctgctaggtcacattgtttt

SEQ ID NO: 302195 - DNA, 1276 bp, Unknown
  Bacterial polypeptide expressing nucleotide sequence isolated from the Sargasso Sea
tccccggaatggctacaggcacgacttcgtggagctggagcacgaccggtcaataatatcgtggatgcgaccaactatgtattgctagagctgggtcagccgatgcatgcgttcgacctaaatgaactaagagggcaatcggtcattgtgcgcggagcatctcaaaaggaaacagaattcgtaacgttggacggagaaacccgcccaatcagcacagaaatgctcatgatctgtgacgaggaggctccagtcgcgattgcgggggtgatgggtggcaataactctgaagtcagtgatagaacggtagacatttttcttgagtgcgcactgttcgacccgaaagctactcggacaaccagacgtaagcttggaatgtctactgatgcatcttaccgctacgagcggggtgtagatccagaaggtttgaggagtgcgatggagcgctgcatccacctggttctctctaccgcaggtggtgagttggagtggccgatactggattgtaatccagttccgtttgaaagcagtacagttgagcttagggtttcgcgcatcgaaaaactgctggggattcccttcgaggcaggttatgtgggggaactcctcgcaccgctcggcttcgtcgtagaaaatgaaatagatggggtgctacatgttcgtgtgcctggtttccgatcttacgatgtcacccgagaggttgatctcatcgaagaggtcgcgaggacccatgggtttgacaacttcccagacactttaggaccacagcgagcgtcctcggtggctgatcatccactgtttcagctcgaggaccggcttagggcggttttagtagggcacggtatgtttgaggtccaaacgcccgcgttttgtccggagggagagggggacgtcgaggtctcaaatcccttgacaacgattgagcctttcttgcgaagctcgctgatgccctccctgctgagacgggttgagtacaacatggcaagagggaaccgggatgtccgtctatttgaacttggaacttcttttcataagcgaggttcgggagagccaccactagaagaaccccatctcgcagggattctagctgggcgacgtgagcctccgcactggtcccgggaagatgaggagttctcaatgtgggacctaaaagctctcgtagtggatatagtcggtcgggtatacggggaagaggtgacgattgagtcgggtggtgttacatgcccgactctcctagacgatgatatgtgcatctatgtgcgcgaaggctcaggagata

SEQ ID NO: 302196 - DNA, 1495 bp, Unknown
  Bacterial polypeptide expressing nucleotide sequence isolated from the Sargasso Sea
atgaaattcagtaaatcctgggtgatggagtgggtccgcaccgagttgagtgacaacgcactggccgagcagatcaccatggccggtctggaagtggacgccgtggaagcggtggctggccagttcaacaacgtggtggtgggcgaagtggtcgagtgcgcccagcatccggacgccgacaagctgcgggtgaccaaggtcaacgtgggcgaatccgaactgctggacatcgtctgcggtgcgccgaactgccgcgccggcctgaaagtgtgcgtggccaaagtaggggcgaccctgccgggtgatttcaccatcaagaaagccaagctgcgcggccagccgtctcacggcatgctctgctccttcagcgagctgggtatcgacgtcgaagccgatggcatcatcgagctgccgctggatgcgcccatcgggaccgatatccgcgaatacctcgcgctcaatgacgtcagcatcgacgtggatctgaccccgaaccgtgccgattgcctcggcatcgcgggtctggcccgtgaaatcggcgtgctcaacagcgtcgacgtagtcgagccgacctgggcgccggctgttgctaccatcgacgctaccttcccaatccgggttgaagcgccggccgattgcccccgttatctgggccgcgtcatcaaggggctgaacctgcacgcccagagcccgctctggatgcaggagaagctgcgccgtggcggcattcgttccatcgacgccatcgtcgacatcaccaactacctgctgctggaatacggtcagccgatgcacgccttcgatctggcgacgcttgaaggggaactggtggtgcgccgcgctcgtagcgatgagccgatgaccctgctcgatggcaacgaagtgaagctcaaagagacgactctggtgattgccgatgccaaaggtcctgcctgcatggccggcatcttcggcggcgatcgcacaggtgtctccgagaccactaccgacatcctgctggagtgcgccttcttcgcgccgctctccatcaccggtcgtgcccgtgcctacggtctgcacaccgactcctcccatcgcttcgagcgcggggtggatccgcagttgcaagccaaggtgatggacagagccacccgtctgctgctggacatttgtggcggagagtgcggcggtgaagcgggcccggtcatcgaggtcaaatccgatgcccatctgcccaaggctgcccccatcaagctgcgtcgcaccaagctcgacaaggtgatcggcatcagcgtggcagatgcgcaggtggtcgagatcctgactcgtctcggcatgcaggtcactgtggatgccgacggctggaccgcgctggccccctcctggcgtttcgatatcgccatcgaagaagacctcatcgaggaagtggctcgcatctacggctacaacaacatcccgaacctcaaacccgctgcctctctggcgatggtggagcaggcagaagggcaggtgacct

SEQ ID NO: 302197 - DNA, 423 bp, Unknown
  Bacterial polypeptide expressing nucleotide sequence isolated from the Sargasso Sea
cgcaccggggccgtgtctatcgtaacgactacgacatgacccacaccccgatgttccaccaggtcgaaggcctgctggttgacgagcatgccagcttcaccgagctgaaagggatcctgcacgacttcctgcgcaactacttcgaggaagacttgaccattcgcttccgtccttcctacttcccgttcaccgagccgagcgccgaagtggacgtgatgggcaagaacggcaagtggctggaagtgctgggctgcggcatggtgcacccgaacgtgctgcgttcggtcggcatcgatccggaaaaatactccggctttgccttcggcatgggcgttgagcgcctgaccatgctgcgttacggggtcaacgacctgcgtgccttcttcgaaaacgacctgcgcttcctcaagcagttcaagtaag

SEQ ID NO: 302198 - DNA, 724 bp, Unknown
  Bacterial polypeptide expressing nucleotide sequence isolated from the Sargasso Sea
atgacagcaccaaaagatatatttttaccatctttagatagagagttaggctctatccatcccattaatcaagtaaaagatcaattaacagacttacttaaatcttttggctttgaagtggctgaagggcctgaagttgaaactgaagagtataactttgatatgctcaatatccctgcatctcatccagcaagggaaatgcatgatacattctatgttgataataagaaaaaactcttaagaactcatacttctcctgtacaagtaagatgcatgcttaaagacaagcctccactagcattcatatctccaggcaaagtctatagaaaagatgatgattcaacgcatctacctatgtttcatcagattgaaggattatatgtcgatgaagatgtaagtttcgctcaattaaaggacttaatgtataaaatttgccattctttatttggcgaagccacaaaattacgttttcgtccttcatattttccatttacagaaccttcagctgaagttgacgttctgtttggcgataaatggttagaaattctcggatgtggagtggtaaatcctaaagtcctagaaaattgcaaaatagactcttcaaaatattcaggattagcttttggtctaggaatagagcgtatagcgatgctcaaatatggcgtaaatgatattagagatttttataaatcaaatctagatttcttgaggcagtttaaatgaa

SEQ ID NO: 302199 - DNA, 1015 bp, Unknown
  Bacterial polypeptide expressing nucleotide sequence isolated from the Sargasso Sea
tttgagcattgatcaaataaatgaaattaaaaccgagctctttggcaaaaatggtttaatttcatcaaaatttaaaaaaataggatcaattccagagactgatagaaaaaaatttgcatcagatttaaatcaggttaaagacgaacttcagaatttaataacttctaaaattagccagatagaaggaaaaaaaataaacgaaaaattagaaaaggaaaaagttgacataactttgcccgaaagaccattcgtaagaggaaaagttcatccagtatcacaaactattgatgaaatttcatctattttctctgaaataggatttagtgttgaggaaggccctgatgttgaatatgaatataacaactttactgctttaaacacacctgacaatcatccagcaagagatatgcatgatacattttacttagatgaaaacaaagaggttttgttacggacccatacttcaccagttcaaatcagaactatgcaaaaagacaaacctccatttaagataatagctcctggaagaacttataggtctgatagcgatcaaacacacgcaccaatgtttcatcaagtagaaggtttgcacattgacacaaatattaatatggggcatttgaaaggatgtttgaattatttcattaaagaattttttgaagttgaaaaaattaaaatgagatttagacctagtcattttccattcacagaaccatctgctgaagtagatattggttatgaaataaaagatggtaaaataattatcggagaaggagataagtggcttgaaattttaggctgtggcatggtgcatcctaatgttttaaaaaatgtaaaagtagatccttctaaatatcaaggatatgcttttggcattggcatagaccgattagcaatgcttaaatacggcattaatgatttaagagcgttttttgattgtgactatagatggctaaatcattttggttttgatccacttgatgttccttcaaattatagaggtttaagcagatga

SEQ ID NO: 302200 - DNA, 832 bp, Unknown
  Bacterial polypeptide expressing nucleotide sequence isolated from the Sargasso Sea
aatgcagaaattagcgataaattaaaaaatgaaaaagttgatgtaactttgccgatccgaccgtatcaacaaggaaaaatacatccggtatctcaagtcatagatgaaatttcctcaattttttctgaaattggtttctctgttgcagaaggcccagatgttgaaactgagtataataattttacagcacttaatacgccagaagatcatccagcaagagatatgcatgatacattttatttagaaaaaaataaaaaacttcttttaagaacacacacttctccggtacaaattagggcgatgcttgatggcaaaccaccatttaaaataattgtacctggtaggacctacagatgtgatagtgatcaaacgcacgctccaatgtttcatcaattagagggtcttcatatagataagaatattactatgggtcatctaaagggatgtttagattattttattaaagaatttttcgaagttaaaaatgttaaaatgagatttagaccaagtcatttcccatttaccgaaccatctgctgaagtagacattggatacagaattgagaatgaaaaaattgtcattggtgaaggcaataaatggttagaaatattaggttgcgggatggttcatcccaacgttctaaaaaatgcaaaagttgatccaaaaaaatatcaaggatttgcattcgggatgggtattgatcgtttagccatgttaaaatatggaattaacgatttaagagctttttttgaaacagattatagatggttaagtcattttggttttgaccctttagatgtaccaacaaactatagaggattaagtaaatgat

SEQ ID NO: 302201 - DNA, 997 bp, Unknown
  Bacterial polypeptide expressing nucleotide sequence isolated from the Sargasso Sea
atgtcagatcttaaaaaaataaaaaatgaacttcttttgaaactgaaaagtaaattaaacttgtcagaggtaaatcaaatgaaatctgatttatttggtaagaatggattagtttcatcacaatttaaaaagataggaaccatcgcagaaaccgagagaaaaaaatttgcctcagaactgaatgttattaaagatgaattacaagatttaattaatttgaaaataaaggaaattgaaaaagaggaaattagagagaagttacaaaaagaaaaaattgatattactctgcctgagagaccatttgtaagaggcaaaattcatcctgtatcacaaacaatagatgaaatatcctcgattttttctgaaattggtttcagcgttgaagaaggtccagatgttgagagtgaatataataattttaccgcactcaacacgccgaaaaaccatccagctagagatatgcatgacacattttatcttgatgaaaaaaaagaaagattattacgcactcatacttctccggttcaaattagaacaatgttaaaagacaaaccaccgtttaaaataattgctcctggcagaacatacaggtcagatagcgatcagacacacgcacctatgtttcatcaggttgaaggtcttcatatagacaaagatattaatatgggacatttaaaaggatgtctaaattattttattaaggaattttttgaattggataaaattaaaatgagatttagaccaagtcattttcctttcacagaaccgtctgctgaagttgacataggatacgagatgaaggatggcaaaatagtaattggtgaaggcgatcaatggctagagattttggggtgtgggatggtacatccaaatgttttaagaaatgttaaagtagatccaataaagtttcaaggatatgcatttgggatgggtattgataggttggctatgttaaagtatggaattaacgatttaagagcttttttcgatttgtgac

SEQ ID NO: 302202 - DNA, 2362 bp, Unknown
  Bacterial polypeptide expressing nucleotide sequence isolated from the Sargasso Sea
atgataattttaaaatcatggctcaatgattggattaatatatcaaatattgatgacaacaaaatttcagaagcacttgaatctttgggtttcgaaattgaatctacaaataatattgtacctaattataaaaatatagtagtaggtaaagtagtagatatttacccacataataatgctgacaaactaagaattactcaagtagatgttggaagtaacacttacgaaatagtttgtggtgcatggaattttgatgttggtgctattgttcctgtcgcgttaccaaaatcatatatagtagataattttttaatagaaaaaagagaaattagaggggttgtttcaaatggaatgatatgttctgctaaggaacttggtctttgggatgaacatgaaggaattttattacttgaagattcattagctccaggtacagatttcagttctacatatgattcacaagatacttcctgggaaattggtattactccgaatagaggagattgcatgtcacacctaggtgttgcgagagaattatctaactattttgatttaaaaatttcagaaaatgattataaacttaaatctaaaatagagaatgttctaaagacgaacagtggaaaaatttcagagtgtaattcctatgtgtctattgagattgaaaattttaatataacagattctcctttctatataagatatagactttcacaggtaggaacaaggattattaataacgttgttgatttaactaattatgttttatatgatatcggacaaccattacatgcgttcgatagagataaaatatttggaacagtgtctgttagaaaagcaaaagacaatgaaaaaatattaactctagataatcaaaaaaggtctttgaacaaaaatgatttagttattactgataatgataatccaattgccttagctggagtaatgggtggtttggatacagaagtaactgaaaatacgaaaaacttattaattgaaagtgcatactttgataaagtttcaataatgaacacatctagaaaacttaatttaatttctgatgcatcaataagatttgaaagaggtattgactttaatcttcaattaaaagcaataaatagatttataaatatttttagtacaaatcaggatataaattattcatctccattagttgatgataaaaaaaatattaaaaacaagtctgtttcttttagtagtaatgatatttataaaatactaggtacaaaaatcgataacaaatttattacaaaaacattaaacaatttagatattgatcatactattaaaaatgaagatattaaatttgtttctccttcatggagatatgatttagaaagaccgattgatataattgaagaaattgctaaacactatggttttaataattttgatagtactttaccaattggtaataatagaaataatttaggagactattggaattctaagtctttttttagccagcaacttagaggtaaggattatcaagaaatacaatccctatcttttgtagatgaaataagtaatcaaagatttaatccagaaaaaaaatacgtagaagtatacaatcctattgattcaacaaatatgtacttgaggtcaaatcttttcacatcattattgaatatttatcaatccaatttagagaaaaactctgtttctactaaatatttcgaaattaacactgtatttgataaaggtaaacatgagaaatacgaaaacatacccaatcaactttatacgttaggcgtactaacaccctcaagagttacaaatgttgatttaagaggtgaagataaaacttttgatatttattatgtcaaaaacttaatttctactttaattggtgaatttgatgttaaatatttgcaaaaaccaggatttcataaacgattatcatttttaatactaaaagatggcaaacaagtaggtttttttggtcagctttcttatgaattaatggatgatttaaacttagaagatcctatatatttaatggaacttaatattgaaaacatcgacagtacctttaaagaaactaacaattttatacctttagctcaatatccttttataaaatttgatttatcttttactgtaccaatagattttatagcttctgatctaatttcttttgtagttacaaaacttgataagaacgaaaataatattgatatttttgatgattatgtaactgagaaatctcgaaatttaggaattagaataagtactagaaattacgatcaaacttatagcgaagaagaagctagaggaatattagatatgttagtaaaagaaattcaagataaatttaagataaagttaaatgagagccagtaat

SEQ ID NO: 302203 - DNA, 523 bp, Unknown
  Bacterial polypeptide expressing nucleotide sequence isolated from the Sargasso Sea
gacacattatatatagacaaaaaacttgataatttattaagaacacaaacaagtactgtccaagtaagacacatgcaagaaaacaaacctcctatatatattgtttctcctggacgtgtgtatagatctgatcaattagattcaacacactcaccagtgtttcatcaaattgaaggattagcggtagatgatgcaatcacatttacagacttaaaaggtacgttagagttttttgtaaaagagttttttggtaacaatgttaagacaaaatttatacctcatttctttcctttcacagaaccatcagctgaagtattagtgagttggaaagatggtgattggttagaaatattagggtgtggaatggtagatcctaatgtatttgaaaatgttggtttcaagaaggggactcaaggttttgcttttggagtgggtgttgaacgacttgcaatgttaaggcacaatattgaccatattaagaacttttatgacaacgacttaagatttcttaggcagttctaat

SEQ ID NO: 302204 - DNA, 940 bp, Unknown
  Bacterial polypeptide expressing nucleotide sequence isolated from the Sargasso Sea
aatggtagatttacgagaattaattcagaaggtatcacaagcaaaagacaagttggaattgcaaaatctaaaatctcaatttttaggaaaaaatagtcaaattaatcaagaatttaaaaaactcggttcacttaatgaagatgagagaaaaattagagcatcatctctaaataatgaaaaacaaaaaattactgaagccataaataataagcttatagaattagaaaatttagaaataaataaaaaactagaaaaaaataaagtcgatgtgactttaccagccagagaaagaccaaatggaaaaatacatcctgtctcacaagttatcgatgaaatttcatcaatattttctgaaataggtttttctgtagccgaagggccagatgtggaaagtgaatataataattttacagctttaaatactcccgaagatcatccggctagggatatgcatgatactttttacctagataacaataaaaaaatattattaagaacacatacgtcaccagttcaaattagaacgatgctgaacggtaagcctccatttaaaattattgtacctggccgaacatatcgttgtgatagtgatcaaacacatgcaccaatgtttcatcagcttgaaggattacatatagataaagcaatcacaatggggcatttaaaaggatgtctagattattttgtaaaagaattttttgaagtaaaaaagattcgaatgagatttagaccaagtcactttccattcactgagccctcagcagaagttgatattggttatagattagaaaatggaagaatcattgttggcgagggtgacaagtggctcgagatattaggctgcgggatggttcatccaaatgttttaaaaaatgccaaggtcgatccaaaaaaatttcaaggctatgcttttggtatgggaatagacaggcttgcaatg

SEQ ID NO: 302205 - DNA, 506 bp, Unknown
  Bacterial polypeptide expressing nucleotide sequence isolated from the Sargasso Sea
aataatagcaccgggaagaacttatagatcagatagtgatcaaactcattcaccgatgtttcatcaggttgaaggacttcatattgataaaaatataaatatgggacacttaaaaggttgcttgagttactttataaaagaattttttgaagttgataaactacaaatgaggtttagaccaagtcattttcctttcactgaaccatcagcagaggttgacataggttatgaattgaaagatggaaaaattattataggagagggaaataaatggctagaaatattaggatgtggaatggtccatccaaatgtactcaaaaatgtaaaaataaacccagataaatatcagggatatgcatttggtataggtattgataggctaggaatgcttaaatatggaataaatgatttaagagctttttttgagacagattatagatggttaaatcattttggatttgatcctcttgatgttccgtcaaattatagaggccttagcagatgat

SEQ ID NO: 302206 - DNA, 775 bp, Unknown
  Bacterial polypeptide expressing nucleotide sequence isolated from the Sargasso Sea
gagagaatttagtcgaggaaaaatacatcctgtttcacaagtaattgacgagatatcgtcaatattttcagaaattgggtttagcgttgaagaaggaccagatatagaaaatgagcattataattttactgcattaaataccccttacaatcatccagcgagagatatgcatgacactttttatctagacaataataaagaattattattaagaactcatacttctccagtacaagtaagaacaatgttaaatggaaaacctccattcaaaattatagccccaggcagaacttatagatctgatagtgatcaaactcattctccgatgtttcaccaggtcgaaggtcttcatatagataaagacataaacatgggtcatctaaaaggatgcttgaattattttataaaatcattttttgaagtggataaaataaaaatgagattcagacctagtcactttcctttcactgaaccatctgcggaagtagatattggttacgagataaaagatggcaagatagtaattggcgaaggtgataaatggttagaaattctaggttgtggcatggtacatccaaatgtacttaagaatgttaaagtaaatccagataagtaccaaggttacgcttttgggattggtatagatagacttggaatgcttaaatatggaataaatgatttaagagctttttttgagactgactatagatggcttaatcattttggttttgatccattggatgtaccatctaattacagaggtcttagcagatga

SEQ ID NO: 302207 - DNA, 549 bp, Unknown
  Bacterial polypeptide expressing nucleotide sequence isolated from the Sargasso Sea
caagggctatgcatgatactttttattttacaaataataaattattaaggacacatacatcatcggtacagactagggtaatgaaagataggcagccaccaataagaataatagctcctggaaaagtttatcgtaaagactctgatatgactcatactccaatgtttcatcaacttgaaggattatttatttctaaaaatgtaaattttggtcatttaaaaaatactttaaatattttcttaaaaaatttctttgaagacgactcattgcaaatacgttttaggccctcttatttcccatttacagaaccctcggcagaggtagacataggttacagtttttccaaaaataaattttcttggttagagattttgggctgtggaatggtgcatccaaatgttttaaaaacagcaggcataaatccaaaagtatactctggatatgcattcggacttggaattgagcgattagctatgttaaaacttgaaatcaatgatttaagattattttttcaaaatgatttaagatttttaacgcaatttagataaa

SEQ ID NO: 302208 - DNA, 991 bp, Unknown
  Bacterial polypeptide expressing nucleotide sequence isolated from the Sargasso Sea
ttgggtataactccaaatagggcagactgtcttggtgtaagaggtattgcaagagatctggcctctgcaggatttggtaaattaaagtcactaaatattaaaaatgttaaaggaacttttaaaagtccaaaaaaatttgtgatttcggatgagctactagaaaaaaaattagtacctgttgttactagtagatactttaaaaatttaaacaactctaaaagtccaaaatggatgcaacaaaggctagaagctattggccaaagatccatatcagcattagttgatataactaattatattatgtttgatttaaacaggcctctgcatgcttatgacggatctaaaatagaaggcaataaacttgagattagatttgctaaaaacaatgaaaaaattagcactcttaatgagaaggattactttttgtcaaacgaggatattataatttctgatgcaaaaggtgctgatgatttagcgggtattatgggtggcatgagaacaggtgtatccgacgaaacaactgaaatgtttctagaaattgctgtgtttgacccaataagtgtttctaaaactggaagaaaaataaatctaatttctgacgcaagatatagatttgaaagaggtttagatcaagattgcccaaaatgggtccataattatatttcagatttagtgattgatatttgtggaggggaagttagttttttagaaaaaactggaagtggcccttactggtctcgagaaattacatttgaaacaaaacaggtttttaacttaacaggagttaatgttaatgaaataacaattgaaaaaattctttctgatttaggttttaaattaaataaaaataaaggaaaatggtctgttttacctccaccgtggagaaatgatattgatggctcagcagatctggttgaagaaataatcagaatttacggttatgaaaacattcctgaagcaaaattatttagcaaggatgttataccaaaac

SEQ ID NO: 302209 - DNA, 727 bp, Unknown
  Bacterial polypeptide expressing nucleotide sequence isolated from the Sargasso Sea
atgtctaaattaggcaacatagatcctccgattattgaccaaaagtttggttcttatcacccaataaatgaaacgaaacttttcttaataaacttctttaaggaaattggttttcaagaagtatatgggccagaaattgaaacggagagatttaatttcgatatgttaaatataaaagaaactcatcctgctagacaaatgcatgataccttttatgttcaaaatatgcagagcgtcttaaggacacatacatctccagtccaaataagaacaatgctagaaaaagaaccaccttttgcttttacttcggcggggaaagtctacaggaaagatgatgatgcaactcatcttcccatgtttcatcaagttgaaggtatgtatgttgataaaaatgtaacatttgcaaatttaaaagcgctcattcatgatcttgtctattctctattcggaaaagatacccaaataagatttagaccgtcctattttccatttacagagccttcagctgaagtagatatactatcagagtctggaaaatggcttgaaatacttggttgtgggatagtaaatccagtcgtactagaaaattgtaaaataaaatctgatagatttagtggtcttgcttttggccttggtgttgagcgaatagcaatgctgaaatatggagtaaatgatatccgtgacttttataaatctaatctagacttcttagaaaaatttaaatgaa

SEQ ID NO: 302210 - DNA, 616 bp, Unknown
  Bacterial polypeptide expressing nucleotide sequence isolated from the Sargasso Sea
aatgattgaaattataaaaaaacatattaaagaagtagaaaatttcagttcagaaagcaaagaaaattctgaaccgtttagaataaaatatcttggcaagaaaggaatccttaatgagctttttaaaaaatttaaagatattgatgcaaatgaaaggaaagtaattgggaaggagataaatatcctcaaatcaaaagtaaagaaaaaaatacttgaatttcaatcagaaaaaaatgaggagggaaataatttaaacgaagacttatacaaaccaggttaccctctagagtttggctccgaacaccctttaaatatagtaagaaaaaacattattgaaatttttgagaaaatcggatactgtatttcagaaggaccggaaatagaggatgattggcataattttaccgcattaaatttacctaaacatcatcccgcaagagatatgcaggatactttttttataaaaagagatccagatattttattacgcacccatacatcatctgttcagattaggtatatggaaaaaaatcctccacctataaaaaccatatctcctggcagggtttacagaaatgaggacatatctgcacgttcacatttcttttcatcaggt

SEQ ID NO: 302211 - DNA, 596 bp, Unknown
  Bacterial polypeptide expressing nucleotide sequence isolated from the Sargasso Sea
catgcgggtctccctctcttggctcaagcaactggttcaggtgacggactcggtcgacgcgttggcccatcgtctgtcgatggcgggattcgaggaggaagagattgaggatctcagcgcccgggccaagggcgtcgtcgtgggtttcgtcaaagatcgggagaaacatcccaacgccgacaagctcagcgtctgtcaagtagatatcggttccgaggaatcgattcagatcgtctgcggcgccaagaatgtccgggcgggtctgcatgtgccggtcgccatggtgggcgcggagttgccggctgtgaatctcacgatcaaagcgggggaactccggggggtgagcagcaacgggatgatctgctccctgtctgaactggggctggcgacggagtccgatggcatcgctgaactcgatgcactgaccgacgagcttccggcccttggtgcgccggttgctccgatgctcggccttgatgacacggttctcgagctggcgatcaccgccaaccgtccggatggtctgtcgatggtcgggatcgcccgggaggtggccgccctgacgggtgctgcgctcacgcttccggttctgaccc

SEQ ID NO: 302212 - DNA, 955 bp, Unknown
  Bacterial polypeptide expressing nucleotide sequence isolated from the Sargasso Sea
cctggccgaactcgaggacgttaacgaagacttaaaagaaatagagtcccttcggtctaaatatttaggaagaaaaggtaaagtagctgctcttttctccttgatgggagaagcttcaaatgaagagcgtcctgcattaggtgaatcccttaatcaattaaaaaaagaattgaccactttatttgaggataaagtttcagagtttgatcgttccagacaaaaagcagaagatgattccattgatctatctcttcctggaaaagaacatcgtttaggatctattcatatcttagagcagacactatcagagattaaggatatttatcgctccattgggtttcacgtagcatatggacctgaggtagatgatgattatcataattttactgcattgaatattcctgaacatcaccctgcaagagatatgcaagatactttcttcatcgatcctggaacagttcttagaacccatacatcaaacgtacaggtacatctaatggaagagcaaggcccacctattaggtatatcgttccaggcagggtctataggaacgaggctattggctataagagctattgtctctttcatcaagtagaagggatatatataaatgaaagggtttcctttggtgaattaaaaggctgtctggaatattttgtgaaacagatgtttggtccaaagaaaaaaatgaggtttaggccatcatttttcccatttacagagccaagtgcagaagttgatatatgggatgaagagagacagcaatggatggagatacttggttgcggtatggtagatccagctgttttagacaatgttggatatgactcaagtcgatttcatgggtatgcatttggaatgggggtagaacgaattgccatgcttaaatataaaataagcgatattcgtcatttttatagtggggatgtaagattcatggagcaattcgtatga

SEQ ID NO: 302213 - DNA, 1060 bp, Unknown
  Bacterial polypeptide expressing nucleotide sequence isolated from the Sargasso Sea
atggctttggctgaagacaaaaacaatatactaaataagattaagagcgccgtctctcttgatgatttagaaaaaattagactttattatttaggaaaaaaaggtcttatacctgaatcattaaaaggactgggttctttatctattgaagaaaaaaaatctaaagggcaagaattaaatataataaaaaaactaattgaagagacgattaaagatcaaaaaataaatattgaaaataaagaaatagaaaaaaaacttaattcagaaactattgatgttacattacctcctaatataagtgaacagggtaagatacaccctattagtcaaacaattttcagtataatagagatttttggtaattttaattatgtagttgaaacaggaccagacatagaaactgattttaataattttaccgcattaaacattcctgatcatcatccggcaagagagatgcaagatacattttatattaatggagatgagaataataatgttttgagaacacatactagtcctgtgcaagttagaacaatgttaaatacgaaacctccaattaaaattattgttccaggtagaacatatagaagtgactctgatgctactcatgctcctatgtttcatcaggtagaggggttagttttagacgaaagttctactatggtagaattaaaatcaacattagtcacttttttagaagaattctttgaggttaaaaacttacaataccgttttcgtccaagttactttccttttactgaaccaagcgcagaaatggatgtagcatatacaaaagtaaataataaaattaaaataggtgaaggtgacaactggttagaaattttaggttgtggtatggtaaaccctatcgtacttgaaaattgtaatattgactcaaaaaaatatcaaggttttgcttttggcatgggtattgaaagattgtctatgcttaaatatggcattagtgatctaagaagtttttttgatccaaattataggtggttagagcactatggttttagtgttttagatagtcaaacaagatcaggcttgtaaa

SEQ ID NO: 302214 - DNA, 1069 bp, Unknown
  Bacterial polypeptide expressing nucleotide sequence isolated from the Sargasso Sea
atgtctgattttgaaaaaaaaattctcgagtttaaaaatagattaaacagcacccaggattcaaaagaaattgaagctataagaacagatatttttagtaaaaatggatttataaattctcagtttaaaaaacttggttctttatctgaagatgagaaaaaaacttttgcatccaatataaacaaagcaaaacaagaattacttgaaatatttagatcaaaagcaacagaagtttcagataaagatcttaatgaaaaaataaaaaaagaaaaaattgacgtcactttacctgagaaagaattcaaaataggaaagatacaccctgtatctcaagttattgatgaaatatcgtgtattttttcagagataggattttgcgtagaagaagggcctgatgttgaaaatgattataataattttactgccttaaacactcccgaggatcatccagcaaaagatatgcatgacacgttttatttagatgagaatatgaaaaccttgcttaggacccacacttctccagttcaagttcgcacaatgttaaaaggcaaacctcctttcaaaataattgcaccgggaagaacttatcgtagtgatagtgatcaaactcatacaccaatgtttcatcaactggaaggtcttcacatagataaaaatattaatatgggacatttaaaaggatgtttaaattattttattaaagaattttttgaagtggataaaattaagatgagatttagacctagtcactttccattcacagaaccttcagctgaggtagatattgggtataggattgaaaataacaaaattattattggtgaaggtgataaatggcttgagattcttggatgtggaatggtacatccaaatgttttaaaaaactgtaaggttgacccaaaaatttatcagggtttcgcatttggtattggtattgatagattggcaatgcttaaatacggaattaatgatctaagatctttttttgaatgtgattatagatggttaaattattatggttttgatcctttagatgttccaacaaactatagaggtttaagtaaatgaa

SEQ ID NO: 302215 - DNA, 1069 bp, Unknown
  Bacterial polypeptide expressing nucleotide sequence isolated from the Sargasso Sea
atgtcagattttgaaaaaaaagttttagaattcaaaaataaattagaccaaacccaagatgttaaattggttgaaactattcgttcagaaatttttgggaaaaatgggtttattaatcaagaatttaaaaggataggaaccttatcagctgataagaaaaagaattttgcttcatctataaataaagcaaagcaagagctacaaaatattattagatctaaagaaaacgaagttttaaataaacagcttaatgaaaaactagaaaaggaaaaaatagatgtaacattacctgaaaaagaatttaaaattggtaaaattcaccctgtttcacaagtaatagacgaaatttcttgtatattttcagaaattggtttttccgttgaagaaggtcctgatgttgaaaatgactataataattttacagcattaaatacacctgaaaatcatcctgcaaaagatatgcacgatacattttatcttgataaaaatatgaaaatattattaagaactcacacttctccagttcaagttagaactatgttaaaaggcaaacctccttttaaaattattgctccaggaagaacatacagaagtgatagcgaccaaacccatactccaatgtttcatcaattagagggattacacattgataaaaatataaatatgggtcatttaaaaggatgcttaaattattttataaaggaatttttcgaaatcaaaaaaattaaaatgaggtttagaccaagccatttcccatttactgaaccctctgcagaagttgacattggttatagaattgaaaacaataaaataataataggtgaaggagataaatggcttgaaattttaggttgcggaatggtccacccaaatgttttaaaaaattgtaaagttgactcaaaaatatatcaaggtttcgcttttggaataggaattgatagattggcaatgttaaagtatggaattaatgatcttcgatctttttttgagtgtgattacagatggttgaattactatggttttgatccactggatgttcctacaaactatagaggtttaagtagatgaa

SEQ ID NO: 302216 - DNA, 1069 bp, Unknown
  Bacterial polypeptide expressing nucleotide sequence isolated from the Sargasso Sea
tatgtccgatattaaaaaaatcaaagaagaatatttaaataaattagataacgatttagactcagaaagtgtaaatcaaataaaaacagaattgtttggtaaaaatggacagatttctaattcttttaaaacattaggttcattacccaatgatgaaagaaaaaaatttgcttcagatttaaattcaataaaagaagaacttcaagaaaaaataaatttcaaacttcaagaaattgaaattaaagagattaattctaaacttgagaatgaaaaattagatgtaactttacctgagagagaaataaaacaaggaaaaatacatcctgtttcacaagttattgatgagatatcttcaatattttctgaaataggctttagtgtagaagaagggccagatgtagagaatgagcattataattttactgcattaaatactcctgataatcatccagcaagagatatgcatgacactttttatttagataataataaagaaatattattaagaactcatacgtctccagtacaagtcaggacaatgttgaatggaaaacctccatttaagattatagctcctggaagaacatatagatctgatagtgatcaaacacattcaccaatgtttcaccaagttgagggacttcatattgataaagatataaatatgggtcatttaaaaggctgtttgaattacttcataaaatctttttttgaagtcgacaaaattaaaatgagatttagacctagtcattttccttttactgaaccatctgcagaagttgatattggttacgagttaaaggatggaaaaatagttattggtgagggagataaatggttagaaattcttggttgtggaatggtacatccaaatgtcctgaaaaatgtaaatgttaatccagataaataccaaggttatgcttttggtattggaattgatagacttggaatgttgaaatacggcataaatgatttaagagctttttttgagactgactacagatggctcaatcattttgggtttgatccattagacgttccatcaaattatagaggtctaagcagatga

SEQ ID NO: 302217 - DNA, 1072 bp, Unknown
  Bacterial polypeptide expressing nucleotide sequence isolated from the Sargasso Sea
atgaaagattttagagagttagaaactgaaattaaaaaagcttcagataaatttacaaatatcgaaagcataaatgaatttaggataaaatttcttggtaagaaaggtattatttctctcgaaatgaaagagctagccagtctttctggtgatgaaagaaagcagcatgctgaaaaattaaataaaattaaagactctgttctagaaataatagcttcaaagactgaagagttaaatagcgaggaattagaaaaaaaacttaactctgaaactttagatatcactctatctacttcaaagtcatacggaactattcacccaatcagtcaggttatagaggaagttataactatatttggcgacttagatttttttgttgctgaaggacctgaagttgaaactgattacaataattttactgctttaaatacttctgaacaccaccctgcacgacaaatgcatgatactttttatgttgaaactgagactgatggaatgccaaatgttctgcgaactcatacctcgccagttcaaataagaagtatgttaaagcaaaaaccaccaattcgattaattgctcctggaaaaacgtttagatgtgataatgatcaaacgcactctcctatgttccatcaagttgagggtttagtaatagatcaagaaagcaacatgagccacctcaaaggatgtttagaaatattcctcaagactttttttgagactgataaattaaatatgagatttcgacctagtcatttcccctttactgaaccatctgcagaagttgatattggatacactaagaaaggaaatcaattaattattggagagggtgaggattggttggaaattttaggatgcggaatggttcatccaaacgtgcttgaaaatgtaaatatcaattcaaatgaatatcaaggttatgcatttggtatgggtatagagaggcttgcaatgctcaaatacggaattagtgatttaagaactttctttgatagtgatcttagatggaataagcattatggcttttcacctttgaacataccttcgatcataggagacttaagctaga

SEQ ID NO: 302218 - DNA, 727 bp, Unknown
  Bacterial polypeptide expressing nucleotide sequence isolated from the Sargasso Sea
aatgtcttctttagacaaaatacatcctccaagtattgaattagaaaaaggctcaattcatccagttaatcaaacaaaagatttcttagttgccttcctgagagatttaggttttcaagaagtaaagggtccagaagttgaaacagaagaatttaattttgatttactaaatataaagaaatctcatcccgcgagacagatgcatgatactttttacatcgaaaataaatccagactacttagaactcatacatcaccagttcaaataagaaccatgttaaatgaaaagcctcctttagcaattacttctgcaggtaaagtttatcgaaaagatgatgatgctactcatcttcctatgtttcatcaagttgaaggtatgctggtagatgaaaatgttacatttggtaatctaaaagatctaattcataaaataatatatgtattatttggtaccgacactgagataaggttcagaccgtcctattttccttttacagaaccatctgctgaagttgatattctcgcagaaaatggtaaatggcttgaaatacttggttgcgggatcattaatcctatcgttttagaaaactgtaatattgattcaaaaaaatatagtggtttagcttttggccttggtgttgagaggattgcaatgctcaaatatggcataaaagacataagagatttttataaatctaatttagattttttgagtcaatttaaatga

SEQ ID NO: 302219 - DNA, 832 bp, Unknown
  Bacterial polypeptide expressing nucleotide sequence isolated from the Sargasso Sea
ggaaaaaaaataaacgaaaaattagaaaaagaaaaagttgatataactttacctgaaagaccattcgttagaggaaaagtccatccagtatcacaaactattgatgaaatttcatctattttctctgaaataggatttagtgttgaagaaggccctgatgttgaaaatgaatataacaactttagtgctttaaacacacctgaaaatcatccagcaagagatatgcatgatacattttacttagatgaaaacaaagaggttttgttacgaactcatacttcaccagttcaaattagaactatgctaaaagacaaacctccatttaagatcatagctcctgggagaacttatagatctgatagtgatcaaacacacgcaccaatgtttcatcaagtagaaggtttgcatatcgacacaaatattaatatggggcatttgaaaggatgcttgaattattttattaaagaattttttgaagtcgaaaaaattaaaatgagatttagacctagtcattttccattcacagaaccatctgcagaagttgatattggttatgaaataaaagatggcaaaataattattggagaaggagataagtggcttgaaattttaggctgtggcatggtgcatcctaatgttttaaaaaatgtaaaagtagatccttctaaatatcaaggatatgcttttggcataggtatagaccgattagcaatgcttaaatacggcattaatgatttaagggcgttttttgattgtgattacagatggctaaatcattttggttttgatccgcttgatgtcccctcaaattacagaggtttaagcagatgaa

SEQ ID NO: 302220 - DNA, 853 bp, Unknown
  Bacterial polypeptide expressing nucleotide sequence isolated from the Sargasso Sea
tatggctttatcagttgatgctgtagatataaaaaaaagaattgaaagttgtaaaaaccttcaagaggttgaaggcatacgtcttgaataccttggtaaaaaaggattaattccatctgaaatgaagcttttaggcaaactctctattgatgagagaaaacttaaaggtcaggaattaaataaacttaagtcagttattgaagaagccattgataatcaaaaatcttttattgaaaatcaggaaatagaaaaaaaactacaaaatgaaaatattgatgttactttacctcaactagaaatctctaatggaaaaattcatcctatttctcaaacaatttttagtattatagaaatttttggtaatttaaattattcggttgaagcgggaccagatattgagagtgattttaataatttttctgctttgaatattcctcctcatcatcccgctcgtgaaatgcaagatactttttatgtacaaaatagtgatggcgaagataatgtattgagaacgcatacaagtcctgttcaagtaagaacaatgctgaaaacaaaaccacctataaaaataatcgttcctggaagaacatataggagtgactcagactcaactcatacaccaatgtttcatcaagtagagggtttagtagtaaataaagatgcgaccatggcagatttaaaatctaccctgattacttttttaaaagagttttttgaaattgaaaatttaaagtaccgttttagaccgagttattttccatttactgaaccaagcgcagaaatggatgttgcgtttactaaaaaaaataatgttttaaaaattggtgagggtgatgaatggttagaaatttag

SEQ ID NO: 302221 - DNA, 1084 bp, Unknown
  Bacterial polypeptide expressing nucleotide sequence isolated from the Sargasso Sea
atggaccatatatcaaagttaaaagatcgttaccttttgcgaattggcagctctggctctgagttagagcttgaacaggttaggttggatgcacttgggaaaaaaggtgaaataacgcaaaaaatgcgagagttggggaccatgccaagtgataaaaggcagatcatgggaccgctacttaacaacctcaaagagtctgtaaaccaagctttaaggttgcgtaaagacgagcttgctgaaattaaccttgagagtaggttgaagtctgagtggatcgacattagcaggcccgctcgagagagttgtgaaggatcaattcatcctgtaagtcaagttacggaggaagtaatcacaatttttggagacttagggtttgaagttgctgatggtccacagatagaaagtgattattataactttgatgcactaaatataccgccagatcatcctgcaagacaagagtttgatacgttttatctctctgaggagggtgaagatgttggaccactaaatgttttgagaacccataccagcccggtgcaaatacgacatatggagcaagtcaaagggccatgtcggattattgcaccggggagggtctttagatcggactatgatcagactcacactccaatgttccaccaagtcgaagggcttgcggttggccaaaatgtttcaatgggaaatttaaaatgggtcttagaagagttttgcaaagctttttttgaggtaaactctattcaattgagattcagaagcagtcatttccctttcactgagccttcagctgaagtggatatcaaatgctgctggaaagagaaccaactaaagatcggggagggagaagattggatggaaattctaggaagtggtatggttcacccgaacgtcttgagagctgtggatattgatccagaagtttatcaaggatttgcttttggtcttggaatcgatcgaatagctatgctgaaatacggtattccagatcttcgaactttttttgacagcgatataaggtggctgagacattttggtttttctgctagagattttccttctattcatgctggtataagccgttgag

SEQ ID NO: 302222 - DNA, 985 bp, Unknown
  Bacterial polypeptide expressing nucleotide sequence isolated from the Sargasso Sea
gatgcctgacaatctttcagatctgtcaaaatcagcaacccaagaaataaacgaatgttcatcaacgactgagcttgattctctcagggtaaaatatcttggcaaaaagggagttattacaatagctctgaaatctgtatcctctgtcgacccaaaggatagacctggatacggaaagaaaatcaatgaactcaaatctttgattcaaggtacgctttctcaaaaaagagcatctttacaaaaaaaagaaattaatcagagtatcgatgaaaagaaaatagatgtctcactgcctggaagaagcaactttggaggacataggcatcctgtaacaaaaactttacttgaaattgaagagatattttatggcgctggctttgcggttgaagacggtcccgaaattgaagatgagtatcataacttcactgctctaaatattccaagtaatcatccagccagagctatgcacgacactttttactttaattctgaatttctattaagaactcatacatcaccaatccaaattcgcagcatggaaaaagaaggcgtcccgataagggttattgcgccagggaaagtttatcgaagagattctgacataacacatacgccaatgtttcatcaaattgagggcttggtaattgataaaggaataaattttagtcatcttaaaggaatcctgcatcagtttattgatacatttttcgaagaaaacactgaggtacgtttcagaccttcctattttccttttacagaaccatcagcggaagtcgatatattgtccaaggaaaataaatggcttgaaatacttggctgcggaatggttcatccaaaagttcttgaaaaccttggcattaatactgaaatctatagtggttatgcttttggtatgggtgtagaaagattggcaatgctgaaatacggcatcaaagacattcgatctttttatgaaaatgattttaatttcttaaaccagttctaa

SEQ ID NO: 302223 - DNA, 524 bp, Unknown
  Bacterial polypeptide expressing nucleotide sequence isolated from the Sargasso Sea
aatgtctgatctaaaaaaaataagagacgaatttatacgaaaattaaaaggtaaattagatctagcagaattaaatcaaattaaatcagatctgtttggtaaaaatgggttggtttcatctcaatttaaaaagatagggactattgatgcctcagaaagaaaaaaatttgcatctgatttgaatgtaattaaggatgagcttcaagatcttattaatttgaaaataaatgaaatacaaaaagcaaatatcaacgaaaaattggaaaaagaaaaaattgatgttactttaccagagcgatcatttgttagaggtaaaattcatcctgtatcacaaacaattgatgaaatatcttctatattttctgaaataggttttagtgtagaggaaggaccagatgttgaaaatgaatataacaattttactgctttaaatactccagacaatcacccagcaagagatatgcatgatacattttatcttgatgataaaaaagaaagattgttacgtactcacacgtcccctg

SEQ ID NO: 302224 - DNA, 2392 bp, Unknown
  Bacterial polypeptide expressing nucleotide sequence isolated from the Sargasso Sea
atgcgcatatctattgactggtttaaagaatttgtaaaaaccaacgattccacagaagatattgcaaatacactaactatgcttggcctagaggcagaaaatcctgttgatattacccaattagaagatattataattggagaagtagtagaatgcaaaaaacatcctaacgctgatcgattaaagcaatgcaaagtgtcagatggaaaattggaaattccaatcatttgcggtgcacctaatgttgacaaaggtcaaaaaatagcattagctccagtaggagcgagccttcctggcggaataaatattaaaaaggcaaaaattagaggcgaagaaagtcaaggaatgatatgctcagaaaaagaactggggatttctgatgagcatgaaggaataatggttttacctagcgatgcaaaaataggtcaaaaatttaaagatttttatttaagtagctattctactattgacttagacataacaccaaatagggctgattgtttttctcattttggtgtagctagagattatgcagctaaaaaagggctaaaaattaaatcacctcaatacgaccctagatcatttaaatcaaatttagcacttaaaaaaattaatgtttctatagaaaatcctgatgaatgtccaaggtatatagctggaatagttaaaaatataaaagttaaggattctccaaaatggctaaggcaaagacttgaatctattgggcagagaagtattaataatattgtggatatttcaaattatgttatgatggaaataggtcaacctacacatatttttgattatgaaaaatttggctcaaaagaaattttaattcgacgtggaaaaaagaatgaaaaactaactactcttgatgaaattgaaagagaagtctcacctaatgagctattaataactaatggaaagaatcctgtggcaattgccggtgtgatgggggggctaaatagcgcggttaccagctctactactactgtaataattgaaagcgcatattttgacccaccaactatacgaaaaagtgcaaaatcggttaatatgtcaactgatgcatctaagcggtttgaaagaggtgcagatccaaatgctgctgaacatgccttttggagaataatatccctcttagaagaatatgcagagggggaatgggtacctggtttggttgatgcgtatcctaaggctattaaaccagcttcgatattacttagaaaagagaaattagatcttatttccggattatcgatcaaagacaattatgttcatagttcattaaaaatgcttggctgtatagttgaaaaagaaggtgataattggaaatgtaatgccccaacatggaggccagacttagaaagagaaattgatcttattgaagaaataatcagactatacggatatgataagatagaatcaacttatcattaccaaagtcttatggagaacaatatcatagatccacatctttgtatagataaaatatgtaatacattgcatggattaggatttactcaaatatttagcaatacgcttttatctgaaaaagaaacctcaatcaatggtattaaaacaatcaatgtaatgaatccattatcagataaaatgacccatttacgtagtagtttaattccagggcttcttaataccgcagattttaatcataataacggcagaaaagatctaatgctttttgagattggcaatgtttttaataaaactggaaaaggtttaaagggaattaatgagaattttcaattatctggtataatcttaggagatttgttgcatccatctgtacatcaaagcaatgccattaaatctgatttttttgctataaaaggactggtttcaactcttttgaatcatttgcaaattggaaaagttgaaatagatactttaaatacagatttacctcaatatgaaaaatcatttttaatcaatattgataagacttctcttggccattatggtaaaataaactctaaaatattacatatattgaacttagatatttctaacatatatgcttttgaaattaatttagatcatcttatcggaatgattaatcaatccagtttaagctttaatcctattatttattatccaacagttgaaagagatattaattttgtactggatgagaaagtagttgttggtgacgtcttaaaatctattttaaataagaataatcagattattaaaaatgttaaccctcaaaatatttttcgacactcatccattggaaagaataaaaagtcagttacatttaaattaattttccaacaccctcttaaaacgcttgaagataaagatgtaaaccttgttattgatgaaattataaaggtggtttctaaggatttcggtgctaaattaagataat

SEQ ID NO: 302225 - DNA, 997 bp, Unknown
  Bacterial polypeptide expressing nucleotide sequence isolated from the Sargasso Sea
atgaacttagactctctcaaaaagaaaatatccgatttagaatcaaatgctaagacagaatttggttcagctaatgataagttagaactcgataatatttatcgttcttatttaggaaaaaaaggtgaagtcaatattcttttaaagtcactaggatcactgcctcaagagaaacgaaaggaggccggaaaactccttaataatttaaaaggtgatttagagaaaaactatgctctcactagttcttcgcttaacgataaagccaatctatcaagattagaaaaggataagcttgatattagtcttcctggatttagcagtagaaaaggatctatccaccctgtcacgcgaactatccgtgatgtttgtgatttttttgaacaaatgggttttgatgttgaggctggacctgaagctgaaatagattactataattttgaagctttaaatgttcctgaagatcatcctgcaaaagacatgcatgatactttttacctcaacaatgaaggattattaagaactcatacttctccagttcaaataaggactatggaaaatagcgaggctccccacaggataatttgtccaggtaaagtctatagaaaagactcagatttaacccatactcccatgttccatcagattgaaggtcttgtagtggaagagggggcatcatttgctcaattaaaaggcttattgaatgattttttaactgatttctttggagaagaggtcgagttgagatttaggccctcatatttccctttcacagaaccctccgctgaagtggatataagatggaaaaaaaattggttagaggttttaggatgcggtatggtccacccaaatgttctaaagagtgtcggtgttgataataaaaaatacagtggatttgcatttggattaggcgttgaaagaatggctatgctgaaatataacatcccagatctaagagctttttttgaaaatgatattcgctttttagatcaattttagt

SEQ ID NO: 302226 - DNA, 895 bp, Unknown
  Bacterial polypeptide expressing nucleotide sequence isolated from the Sargasso Sea
atgtcagagataaaaaatattagagatcagtttatatcaaagctagaaaatgatttaagcattgatcaaataaatgaaatcaaaaccgatctctttggtaaaaatggtttaatttcatcaaaatttaaaacaatagggtcaattccagagactgatagaaaaaaatttgcatcagatttaaatcaagttaaagatgagcttcagaatttgataacttctaaaattaacgagatagaaggaaaaaagataaacgaaaaattagaaaaggaaaaagttgatataactttacctgaaagaccattcgttagaggaaaagttcatccagtatcacaaactattgatgaaatttcatctattttctctgaaataggatttagtgttgaggagggccctgatgttgaaaatgaatataacaactttactgctttaaacacaccggacaatcatccagcaagagatatgcatgatacattttacttagatgaaaacaaagaagttttgttacgaactcatacttcaccagttcaaattagaactatgctaaaagacaaacctccatttaagatcattgctcctggtagaacttatagatctgatagtgatcaaacacacgcaccaatgtttcatcaagtagaaggtttgcatattgatacaaatattaatatgggacatttaaaaggatgcttgaattattttattaaagaattttttgaagtcgaaaaaattaaaatgagatttagacctagtcattttccattcacagaaccatctgcagaagttgatattggttatgaaataaaagatgacaaaataattatcggagaaggagataagtggcttgaaattttgggctgtggcatggtgcatcctaatgttttaagaaatgtaaaagtag

SEQ ID NO: 302227 - DNA, 994 bp, Unknown
  Bacterial polypeptide expressing nucleotide sequence isolated from the Sargasso Sea
aatgcctgaggttaataccgataaaatatttgctgcttttttactaagacttgaagaagttgctcaaatcgaagatttcgatgacattgagaaagaatttcttggtaaaaattccttattgtcagaagaaagaaaatcattatcttcattaaatgaagtatctagaaaaaaatatggaaaattacttcaagatctttcaaataatatcacctctaaattagaagaagagaaaactaaattcaaatctaaattttttattcaaagtgaactaaacgataataatgatatttccatagattggtataaaaacttaggtagcaaaaatcatgttttaacaaatgtaatgaatgaagtagttgatatctttgcagctattggttatacagtttcaactggacctgaagctgaaacatcttggcacaattttgatgcattaaatacaccagactggcatcctgcgagatatgaatcagacacattatatttagacaacaaacttgaaaaattactaaggacacaaactagtactgttcaagtaaggcatatgcaaaacaacaaaccacctgtttatattgttgctccaggaagggtttacagatcagaccaacttgatgctactcactcaccagtatttcatcagattgaaggtttagcagtagatgaaaacttaacgttttctgatttaaaaggaacattggaatattttgttaaggaattttttggaaaagacttaaagacaaagtttattcctcatttttttccattcactgaaccatcagctgaagttctagttagttggaaagatggagaatggcttgaaattctgggatgtggaatggtagatccaaacgttttcaagcatgttggatatgacacagattctcagggattcgcatttggtgtaggggttgagagattagctatgattagatacggaatagatcatattaaaaacttttatgaaaatgacttaaggtttttaaggcagttttaa

SEQ ID NO: 302228 - DNA, 724 bp, Unknown
  Bacterial polypeptide expressing nucleotide sequence isolated from the Sargasso Sea
aatgtcagagccaaaagatattttcataccaactttagatagagaattaggctctatccaccccataaatcaagtaaagttcgaacttataaaattacttacctcatttggctttgaagttgctgaaggacctgaaatagagagtgaaaaaaacaactttgatatgcttaatataccagctacacatcctgctagagaaatgcatgataccttttatgtaggtggtaagaaaaatgttttaagaactcatacttctcctgtgcaagtgaggtgtatgttaagaaacaaacctccaatatcattcatatcgcctggcaaagtatatagaaaagatgatgactctacacatttaccaatgtttcatcaaattgagggtatttatatcgaccaaggtgtgagttttgcacatttaaaagacctgatttataaaatttgctcatccttatttggagaaaaaataaaaatacgatttaggccctcttactttccatttacagaaccatcggctgaagtggatatactttttggaaaaaaatggcttgagattttaggttgtggggttgtaaatccaaaagttcttagtaattgtaaaatagacccaaaaaaattctctggtttggcatttggtttgggcattgaaaggattgctatgctcaaatatggtgttaaagatatccgagaattttataaatcaaacttagattttttaaggcaatttaaatga

SEQ ID NO: 302229 - DNA, 619 bp, Unknown
  Bacterial polypeptide expressing nucleotide sequence isolated from the Sargasso Sea
aatgacagcaccaaaagatatatttttaccatctttagatagagagttaggctctatccatcctattaatcaagtaaaagatcaattaacagacttacttaaatcttttggctttgaagtggctgaagggcctgaagttgaaactgaagagtataactttgatatgcttaatatccctgcatctcatccagcaagggagatgcatgatacattctatgttgataataagaaaaaactcttaagaacacacacttctcctgtacaagtaagatgtatgcttaaagataagcctccattagcatttatatctccgggtaaagtctatagaaaagatgacgattcaacgcatctacctatgtttcatcagattgaaggattatatgtcgatgaagatgtaagtttcgctcaattaaaggacttaatgtataaaatttgtcattctttatttggcgaagccacaaaattacgttttcgtccttcgtattttccatttacagaaccctcagctgaagttgacgttctgtttggtaataaatggttagaaattctcggatgtggagtggtaaatcctaaagttctagaaaattgcaaaatagactcttcaaaatattcaggatta

SEQ ID NO: 302230 - DNA, 1041 bp, Unknown
  Bacterial polypeptide expressing nucleotide sequence isolated from the Sargasso Sea
gatgaaggaaaagattcaagaactgagaaattcgggcctggggaaactggaaaaactggttactaccgatcagctctctgattggcatcgtgattttttaggaagaaaaggagaactgactctgcttctcaaacagctgggggaactgcctgctgaggaacgtcctgcggccgggaaggaagtgaaccggctcaagcttgaacttcaggaagccttcgacacaaaccaggaccgggtcaggcagcagcagcttcagcaggaactggattcggatgatcttgacgtcaccctgccgggaaggccttgttcgccgggccatcttcatctgacaacgcaaaccctgcgaaagatctaccggattttccaggaaatgggatttcaggtttatgaagctccggatgttgaaaccgacgaatataattttcagctgctcaacattcccgagtaccatccggcaagagacatgtgggacaccttctgggtgaatgatgaagtggtcctcagaacccatacctcaccgggacagatccgtgcaatgcgggagtatcatccgaacccgattcgtgtcatcctgcccgggaaatgctatcgttacgagcagatcaccccgcgttcggaacatcagttttttcaggtcgaagggctggcggtcggaaggaacataaggctcaccgacctgattggagtgatgaccgaatttgcgaagaagatgtacggacagcagcggcagatccgcatccgagggagttatttcccattcaccgaaccgagcatcgaaatcgacatgagctgtacctgtgaaggagcaggctgcaggctctgcaaaaaaaccggctggcttgaaattgcaggtgcaggaatggttcatcccgtcgttttatccaacggcggttacgatcctgaagaatggaacgggttcgctttcgggatgggagttgaacgacccgcaatgctaaaacacggaatcgatgacatccgttatttctacagcaacgaccttcgatttttaaggccagttttgaagattgtttcctgtaattg

SEQ ID NO: 302231 - DNA, 915 bp, Unknown
  Bacterial polypeptide expressing nucleotide sequence isolated from the Sargasso Sea
tatgcaatttcctgaatcctggttgcgcgagttctgcaaccctcccttgacgacggccgagctggctgaaacgctgaccatggcgggcctcgaagtagaggagctgcgtcccgtggccccaccgttcaccaagatcgttgtgggcgagatcaaagaagccgtccagcaccctgatgccgaccgcctgcgcgtgtgccaggtggatgtggggcagggcgccctgctgaacatcgtgtgtggcgcacccaatgcccgcgtgggcatcaaggtgccatgcgccctggtgggtgccgaactgccgccgggtgatgacggcaagccgtttctcatcaaggtgggcaaactgcgcggcgtggaaagccagggcatgttgtgctcggcgcgtgagctcaagctgtcagaagaccacggcggcctcctggagctggatgccgcagcgccggtgggtcaggacatccgtgcgtacctgaatctggatgacacgctgttcacgctcaagctcacgcccaatctagcgcattgcttgagcgtctatggcattgcacgcgaggtgtccgcgctgaccggcgtgccgctgcagcagccatcgtttcctgcagtggctgcgaagctgtccgacaagctgtcggtcaaggtgagcgcgcccgacctttgtgggcgtttctccggccgcatcgtgcgcaatgtgaacacgcgggccgccacgccccagtggatgctggaccgcctggcgcgctgcggtcagcgtggtgtgtctccgctggtggatatctccaactacgtgatgttcgagctggggcgtccgtcgcacatttttgatctggacaagatccatggcgggctggatgtgcgctggggcaagccgggcgagcagctcaagctgctcaatggcaacaccatcaccgtggacgacaa

SEQ ID NO: 302232 - DNA, 403 bp, Unknown
  Bacterial polypeptide expressing nucleotide sequence isolated from the Sargasso Sea
cgccacgcactcgcccatgttccaccagtgcgaaggcctctggatcggcgagaacgtgagcttcaaggacctgaaggtcatcttcacggatttctgccgcacgttcttcgaaagcgacgacctcgtgttgcgcttccgtcccagcttctttccgttcacggagcccagcgccgagatcgatatccagttccagacgggcccgctggcgggtcgttggctggaggtcgcgggttcgggccaggtgcatcccaacgtggtgcgcaacatgggcctcgaccccgagaagtacatcggctttgcattcggcatggggccagaccgactgaccatgctgcgctacggcgtcaacgatctgcgcctgttctttgacggcgacatccgtttcctgtcgcagttccagtaa

SEQ ID NO: 302233 - DNA, 1069 bp, Unknown
  Bacterial polypeptide expressing nucleotide sequence isolated from the Sargasso Sea
aatgtcggattttgaaaaattaaaagaagacttcaaaaacaaattagctagagctcaaaattctaaagaagttgatcttataagagctgaaatttttagtaaaaatggttttataaattcagagtttaaaaaattaggatctttaactgaagaagacaaaaaaaaaatagctacaaaaataaattctgcaaaacaagaactaacaaaattatttaatgaaaaatctttaaatctagtaggttctgaaatagatgagagaattaaaaaagaaaaggatgatgtaacacttccagaaaaagattttagaattggaaaaatacatccagtctcacaagtcattgatgaaatctcatctatattttcagaaataggttttagcgttgaagaaggtcctgatgtagaaagtgaatattataattttactgcacttaatacacctgaaaatcatcccgcaaaagatatgcatgatactttttatgtagaagaaaatatgaaaacactattgagaacacatacttctccagttcaagtaagaacaatgttaaaaggaaagccaccgtttaaaattatagcgccaggaagaacatacagaagtgacagtgatcagacacatactccgatgtttcatcaactagaaggacttcacattgataaaaatataaccatgggtcatttaaagggatgtttaaattattttgtgaaagaattttttgaagtagataaaattaaaatgagatttcgtccaagtcattttccttttactgaaccatctgcagaagttgatattggatatagaattgaaaaaaataaaattgttattggtgaaggagataaatggttagaaatactcggatgtggaatggttcaccctaatgttctaaaaaactcaaagattgattcaaataaatatcaaggttttgcttttggaataggcatagatagactagctatgttaaaatatggaattaatgatttaagatctttttttgagtgtgattatagatggttaaattattatggtttcgatcctcttgatgttccaacaaattatcgaggtttaagtaaatga

SEQ ID NO: 302234 - DNA, 985 bp, Unknown
  Bacterial polypeptide expressing nucleotide sequence isolated from the Sargasso Sea
gatgggcgacaatctttcagatctgtcaaactcagcaatccaagaaataaatgaatgttcatcatcgaatgatcttgaatctatcagagtcaaatatctcggaaagaaaggtaccgtaacagcggctcttaaatccttatcagaaatagatccaagggatcgtccagctcatgggaaaagaatcaatgagatcaaaacattgattcaagaaaagctttcagaaagaaaagcatcaatacagaaacaagagatcaatcaaaacattgaaaacaaaatgattgatgtcactcttcctggaagagtaaattttcaaggtcatagacatcctgtaacaaagacgctattagaaattgaagaaatattctatggtgcaggctttgttgttgaagatggcccagagatagaagatgagtatcacaatttcactgctttaaatattcctcataaccaccctgcaagggcaatgcatgatactttttactttaactctgagtatttactaagaacacatacatctcccattcagattcgaagcatggaaaaagatggagtgccgattagggttattgcaccaggtaaagtttatcgaagagattctgatataactcatacgcccatgtttcatcaaattgaagggcttgtaattgataagggaatcaacttcagtcaccttaaaggaatattacatcaatttatcaacaccttttttgaagaaaatactgatgtgcgttttagaccatcttattttccttttaccgagccatctgcagaagtggatatactatctaaagataataagtggttggaaatactaggatgtggaatggtgcacccaaaagttcttgaaaatcttggtattaatactgaaatatacagtggatatgcttttggtatgggagtggaaagattggcaatgctcaaatatggcattaaagacatacgatctttttatgaaaatgatcttaatttcttaaatcaattctag

SEQ ID NO: 302235 - DNA, 1158 bp, Unknown
  Bacterial polypeptide expressing nucleotide sequence isolated from the Sargasso Sea
aagaatttacaaattatctgtggtgctcgtaatattaaatcagatatttatgtctatgttgctactgttggggcaaaattaaaggctgttgatttaactattaaaagaagcgaaattagaggtgtgatgagtgaaggaatgatatgttccctacaagaacttggattagaagactctagcgatgggatagagatcatagatgaagatttagccttaaaacatgaattaggtactccaggggctgacttgcttcaattaaatgattttatatatgatttagccattacagctaatagacctgacggaatgtcggttattggtatagctcgtgaaacttctgcccttttagaatccacattaaattttccagaattaaaccataaatacaatattcaattgctcaagggaattaaactttgtccagaggccataacatctaattgcatttatacaataagctgcattgatggagtagatggagataaattatcgccaaaatggcttaaagaccgtatagaaaaatcaggtataaagtcgattaatcttctagttgatttgacaaactatattctcttagagcaagggcaacccttgcatgcgtttgacaaagaaaaactatctaacttaattggaaaggaagttagtccggaagacttctctttacgaaaagccaatgataacgaaagccttatttgtttagatggtaaaaaatatgaattaaatgaaaatattactgtagttacttgttgcgataaacctgttgctattgctggggtgataggtggtttagagacctctgtaagcaatactacctcatctatttaccttgaaggtgccgtttttagtccagttactataagaaaatcttcaaaggcggttggcataagaacagaatctagcagcaggtatgaaaaagggatttcatcaaaaaatacaataagtgcagttaccagggcaattaatcttttagaagaatatttttccattaattcaccaatcatcaatacctctaatttaaaaaataatgaagatatttttattaaactaaggagaattcgaatacataaaattcttggtccattaataattaatgatcaatttgaaaaaagaaatatatctgatactgaaataattgataaattaacacttataggttgt

SEQ ID NO: 302236 - DNA, 712 bp, Unknown
  Bacterial polypeptide expressing nucleotide sequence isolated from the Sargasso Sea
ttttcagaaaattggtttttctgtagaggaaggtccagatgttgaggatgactataataactttaccgccctaaatactccagaaaatcaccctgcaaaagatatgcatgatacattctacctagataaagatatgaaaactttattgaggactcatacttctcctgttcaagtaagaacaatgataaaaggcaaacccccgtttaaaataatagcaccaggaagaacatatagaagtgatagcgatcaaacacatacaccaatgttccatcaactggagggactacatatcgataaaaatattaatatgggtcatttaaaaggctgtctaaattattttataaaagagttttttgaagtagacaaaattaaaatgagattccgaccaagtcattttccatttacagaaccttccgctgaggttgatattggttatagattagaaaataacaaaatcataattggcgagggagataaatggttagagatacttgggtgtggaatggttcacccaaatgttttaaaaaattgtaaagttgatccaaaaaaatatcaaggctttgcctttggtattggcatagatagattagctatgctcaaatatggtatcaaagatttaagatctttttttgattgtgactttagatggttaaatcattatggcttcgaccctttagatgttccaactaattatagagggctaagtagatga

SEQ ID NO: 302237 - DNA, 850 bp, Unknown
  Bacterial polypeptide expressing nucleotide sequence isolated from the Sargasso Sea
aaaattcaagaaatagaaactaaagaaattaatctaaagcttgagaaagaaaaaattgatgtaactcttccagaaagagatattgaaattggtaaaattcatcctgtctcacaggtaatagatgaaatttcatctatattttctgagattggatttagcgtcgaggaaggtccagacgtagaaaatgaatataataattttacagcattaaatacaccagataatcatccagcaagagatatgcatgatactttttatcttgataataataaggaattacttttgagaacacacacatctccagttcaggtaagaacaatgctaaaaggtaaacctccttttaaaattattgcaccaggaagaacttacagatcagatagtgatcaaacccatgccccaatgtttcatcaagttgaaggtttacatatagataagaatatacatatgggtcatttaaaaggatgtttaaattattttattaaggagttttttgaagttgataaaattaaaatgagatttagaccaagtcattttccatttactgaaccttcagcagaagtagatataggatatgaaattaaaaatggaaagatagtaattggtgaaggtgataaatggctagaaattttaggttgcggaatggttcatccaaatgttttaaaaaacgtaaaagttaattcaagtaaatatcaaggatatgcctttggaattggcatagacagactgggaatgttgaaatatggaattaatgatttaagagccttttttgagacagattatagatggttaactcactttggttttgatccattagatgtcccatcaaattatagaggactgagtagatgaa

SEQ ID NO: 302238 - DNA, 445 bp, Unknown
  Bacterial polypeptide expressing nucleotide sequence isolated from the Sargasso Sea
atgtcgggtattgaggttgatggctatgattcttttaattcaaaaataactggaaaagattcaattataaaattagatataacccctaatcgaggagattgtttcagtgtttatggagttgcaagggaactagcagttatcaataatctaaagctaaagcatcctaaatttaaatctattgaaaattctttcaaagaagacttaagaattaaagtatgtaaggaagctcctatatacgttggaagatctataaaaaatataaatcttaaaacaaaaacactccctttagtcgctgaaaggttagctttaagtgatcaaaagctgattgacccagtggtagacattactaattatattcttttagagctaggtcagcctcttcatgcgtttgatcgagataagttagagggaaacatcaacgtaaggaaggctaaaaaaagatgag

SEQ ID NO: 302239 - DNA, 518 bp, Unknown
  Bacterial polypeptide expressing nucleotide sequence isolated from the Sargasso Sea
cgatactttttactttaattctgaatttctattaagaactcatacatcaccaatccaaattcgcagcatggaaaaagaaggcgtcccgataagggttattgcaccaggaaaagtttatcgaagagattctgacataacacacacgccaatgtttcatcaaattgagggcttggtaattgataaaggaataaatttcagtcaccttaaaggaatcctgcatcaatttattgatacattttttgaagaaaacactgaggtacgtttcagaccttcctattttccttttacagagccatcggcagaagttgatatattgtctaaagaaaataaatggcttgaaatactaggctgtggaatggttcacccaaaagttcttgaaaaccttgacattaatactgaaatctacagtggttatgcttttggtatgggtgtagaaagattggcaatgctgaaatacggcatcaaagacattcgatctttttatgaaaatgattttaatttcttaaaccagttctaaa

SEQ ID NO: 302240 - DNA, 994 bp, Unknown
  Bacterial polypeptide expressing nucleotide sequence isolated from the Sargasso Sea
aatggctgaaataaatctagataaaatatattcttcttttttattagcccttgaagaatctcacgattctgaatcattatctgatcttcagaaagaatacttaggtaagaactctgtaatttctgagcaaagaaaaaatatttctaatctaagtgatctagataaaaaaaaatttggaaagataatcaaagacgttagtgaaaaaattaatacggatatagaaaataaaaaaattgttataaaaaaagataaatatgaaaataaagaaaatagtgaaaatgtagacatctctatagattggttagaaagtactggcactaaagaacacgtaatatcttcagtaatgaatgaagttgttcaaatattttcatcaataggttataccgtagcgcatggtcctgaagcagaaacatcatggcataattttgatgcactcaatactcctgtatggcatccagcaagatatgaatctgacacattatatatagacaaaaaacttgataatttattaagaacacaaacaagtactgtccaagtaagacatatgcaagaaaacaaacctcctatatatattgtttctcctggacgtgtgtatagatctgaccagttagactcaacgcactcaccagtatttcatcaaattgaagggttggcggtagatgatgcaatcacatttacagacttaaaaggtacgttagagttttttgtaaaagagttttttggtaataacgttaagacaaaatttatacctcatttctttcctttcacagaaccatcagctgaagtattagtaagttggaaagatggtgattggttagaaatattagggtgtggaatggtagatcctaatgtatttgaaaatgtaggattcaagaaagggactcaaggttttgcttttggtgttggtgttgaacgacttgcaatgttgaggcataatatagaccatattaagaacttttatgacaatgacttaagatttcttaggcagttctaa

SEQ ID NO: 302241 - DNA, 1006 bp, Unknown
  Bacterial polypeptide expressing nucleotide sequence isolated from the Sargasso Sea
ttgcatatagtggatttaaaatctttaaaacagaaaatctcagaactcaaatccgattcgtctgagtccataacactttgtagagataaagaatcgttagacaaaacctataagtcttatttaggcaagagcggtcaagtaaattcattacttaaatctttaggagatttacctaatgaaaatagaagagaagcaggcaaacttcttaacgatttaaaatcagatatagaaaatttatataagattaaaatttcagaaatttctaaagcggcaaatgaattaaagctagctaatcaaaagattgatgtcggcttgccttctgtttatcaggaagatggatctgttcatccggttacaaaaacgatagatgagattagtagtttttttgagtcaataggatttgagattgaatctggacctgaaatagaaacggattactataattttgaggccttaaatgttcctgaagatcatccagcaaaagatatgcatgatactttttatctaaaggattctggacttttaagaacacatacttctccggttcaaattagaacaatggagaacaagagtcctcctcacagaataatatgccctggaaaggtatatagaaaggattcagatttaactcatacgcctatgtttcatcaaatagaaggattggtggtagaagaaggtgcttcgttcgctcagctgaaaggcttattaaatgatttcttacaagatttttttgggagggaggttgagcttagatttagaccatcttatttcccatttactgaaccatctgctgaagccgatataaggtgggagcaaaactggcttgaagttttaggctgtggcatggttcatccaaatgtattagaaatggttggtgtggacactaaaaagtatagcggcttcgcttttggattaggtgttgaaagaatggcaatgctgaaatatgacattcctgatttgcgtcttttctttgaaaatgactacagattcttaaaacaattctgat

SEQ ID NO: 302242 - DNA, 1060 bp, Unknown
  Bacterial polypeptide expressing nucleotide sequence isolated from the Sargasso Sea
tatgcagtttagtagaaattggcttaaagacttcattgatttaaatttatctactgaagatatttgttctcaactgacaatggcaggtattgaagtagatggatatgatgtctttaattcaaaattaacaggaaaagactctgttataaaattagatataacccctaatcgaggagattgcttcagtgtttatggtgtagcaagagagttggctgtaattaatgatttaaagttaaagaaaccagcttcaagtggaattgaaagctctttcaaagaagacataaaaattaaagtatgccctgaagctccaagatacgttggaagatcattaaaaaatatagaccttaaagcggaaacccttccattgatagctgaaagattaattttaagtgaccagaagctaattgatccagttgtagacgttactaactatattcttttagagctaggtcagcctcttcatgcatttgacagagagaagttagaaggaaatattagtgtcagaaaagccaaaaaggatgaaaggttgaccttattggatgatcaaaaaataaatttaagtgaggactgtctagttatttccgatgatctgaaagcaatagccctcgcaggcatcatgggcggaaaaaatacttgcgtaactcacagcagtaaatctattttcctagaaagtgctttttttcagccatcagcagtaagaggaagagctagaaggtttggttttcaaacggatgcttctataaggtttgaaagaggagtggattacgaaatacaggaactagctattgaaagagcaagcgcaattctgcatgaaacattaggaggagagtttggacaaataacagagagtaaattaacaaatgcattacctaaaccaaaaaaggtttcattagatctaaataaagcgaatcgacttcttggcaccaatatcaccagtaagaccgcaaagaaatattttactggtctaggtatgaatcctaataataaatcaagaaagttagatatttcttctccatcatggagatacgatattgaaatagaagctgatttagttgaggaa

SEQ ID NO: 302243 - DNA, 391 bp, Unknown
  Bacterial polypeptide expressing nucleotide sequence isolated from the Sargasso Sea
aggctgcttagattattttgtaaaggaattttttgaagtaaaaaatattcgaatgagatttagaccaagccattttcctttcacagaaccttcagcagaagttgatattggttatagattagaaaatggaagaattattgttggtgaaggagataaatggctcgagatattaggttgtgggatggttcatccaaatgttttaaaaaatgcaaaagttgatacaaaaaattttcaaggttttgcatttggaatgggaatagatagacttgcgatgcttaaatatggaataaatgatcttagatctttttttgaagctgattatagatggttaaattattttggatttgatccattagatgttcctacaaattatagaggcctaagcagatga

SEQ ID NO: 302244 - DNA, 1069 bp, Unknown
  Bacterial polypeptide expressing nucleotide sequence isolated from the Sargasso Sea
aatgtcagatcttaaaaaaataaaagatgaatttctctcaaaacttaagggaaaattagatatttcagaaataaaccaaattaaatctgatctatttggtaaaagcggattaatttcaaagcaatttaaaaagattggatcaattgcagagtcagaaagaaaaaaatttgcttctgacttaaatataataaaagatgaactccaggatttaattagttcaaaattaaatgaacttgaaagtgctgaaattaataagaaattagaaaaagaaaaaattgatattactttacctgaaagatcatttgtgcgaggaaaaattcatccagtttcacaaacgatcgatgaaatatcatcaattttttctgaaataggttttagtgttgaggaaggtccagacgtagaaaatgaatataataattttacagcgctaaatacacctgaaaatcatccagctagagatatgcatgatactttttatttagatgaaaaaaaacagaaactattgcgaacacatacttctccagttcaaattaggaccatgttgaaagataagccaccatttaaaattattgcgcccggaagaacttatagatcagatagtgaccaaactcactcaccaatgtttcatcaagttgagggacttcatatagataaaaatataaacatgggtcatttaaaaggatgtttaaattattttatcaaagagttttttgagatagataaaatcaagatgagatttagaccaagccattttccttttactgaaccatctgctgaggttgatattggatacgagatgaaagatggaaaaattataataggagaaggcgatcaatggttagagattttagggtgtggaatggttcatcctaatgttttaaaaaatgttaaagtagacccatcaaagtttcagggatacgcatttggtattgggatagatagacttgctatgcttaaatatggaataaatgacttaagagctttttttgattgcgattatagatggttaaatcattttggatttgacccattagatgtacctacgaattatagaggtctcagtcgatga

SEQ ID NO: 302245 - DNA, 970 bp, Unknown
  Bacterial polypeptide expressing nucleotide sequence isolated from the Sargasso Sea
cttggaaaaaaaggaattatccctgaggctcttaaaggtttgggatctttatcaattgacgaaaaaaaatctaaaggtcagcaaataaatataataaaaaaatttgttgaagaaaatataagagagcataaaatattacttgataattcagaaatttcaaaaaaaattaaccaagaatcaattgatgtaactttaccaccaaatattaaaactactggtaaaatacatccaataagccaaacgatattcaatgttatagaaatatttgggaatctaaattattctgttgaaacaggcccagacatagaaacggattttaataattttacagctctaaatattcctgaacatcatcctgctagagagatgcaagacactttctatcttgaaggtgatcaggaaaataatgttcttcgtacacataccagcccagttcaggtaagaactatgattaacaataaaccaccaattaaaataattgttcctggcagaacctatcgaagtgattcagatgcaacacacgctccaatgtttcatcaagttgaaggtcttgttgtcgataaaaattctacaatggtagatttaaaatctacattagtatcatttcttgaggaattttttgaaattaaaaatttacaatatcgttttcgccctagctattttccttttactgaaccaagcgcagaaatggatgttgcttacaccaaagttaataataaaattaaaattggagaaggaaatgattggttagaaattttaggttgtggaatgattaatcctatagtcttagaaaactgtaaaattgattcaaagatctatcaaggttttgcatttggtatgggaattgagcgtctttcaatgttaaaatatggtattacggatttaagaagtttctttgatttaaattatagatggctagaccattatggttttaatattttagataatcagacaaggtcaggaatttaaa

SEQ ID NO: 302246 - DNA, 727 bp, Unknown
  Bacterial polypeptide expressing nucleotide sequence isolated from the Sargasso Sea
aatgtcaaataaaaaagacatttcacctcctgaaataataaatgataagggtgcactccatccaataaatcatatgaaagactcaatcctaactttattgagctcatttggttttgaaatcattgatggtcctgaggttgaaacagaagagttcaattttgatatgctaaacataaaaaaaactcatccagcccggcaaatgcatgatactttttatattgaaaataaatctaatctcttaagaactcatacttctccagttcagattagaggaatgctagacaacaaacctcctttagcttttatttctggtggtaaagtttatagaaaagatgatgatgcaactcatctaccaatgtttcatcagattgaaggaatcttagtagatcaaaatataagttttgcacatttgaaagatttaatttataaaataatattttcattattcggtgaaggagtaaagttgagatttagaccatcttattttccttttacagaaccctctgccgaggttgatattctttcaaaagaaggtaattggttagaaattcttggctgcggaatagttaatccggttgtattagaaaattgcaaaatagactctaatgaatatagcggcctggcatttggattaggtattgaaagaattgctatgttaaagcatggagttgatgacatcagagaattttataagtctaatttagattttttaagtcaattcaaatga

SEQ ID NO: 302247 - DNA, 1069 bp, Unknown
  Bacterial polypeptide expressing nucleotide sequence isolated from the Sargasso Sea
tatgtctgatattaaaaaaattaaagatgaatatttaaataaattagatagtgatttaaatcttgaaagtgtaaatcagattaaaacagaattatttggtaaaaatggtcagatttctaattcttttaaatcattaggatctttgccgactgatgaaagaaaaaaatttgcatcggacttaaattcaataaaagacgaattacaagataaaataaattctaaacttcatgaaattgaaacaagagagataaattctaaactcgaaaatgaaaaagtagatgtaactttgccagaaagagaatttaatcaaggaaaaatacatcctgtttcgcaagtaatagatgaaatatcttcaatattttcagaaattggcttcagtgttgaagagggtccagatgtagaaaacgagcattataattttacagctttaaatacaccagataatcatccagcaagagatatgcatgacactttttatttaaataataataaagaattattgctaaggactcatacttctccagtacaaattagaacaatgttaaatggaaaaccgccatttaaaattatagctccaggcagaacatacagatcagatagcgatcaaactcattctccaatgttccatcaagttgaaggacttcacattgataaagaaactaatatgggccatctaaaaggatgcttaaactatttcataaaatcattttttgaagtcgacaaaatcaaaatgagatttagaccaagccactttccttttactgagccatctgcagaggtagatattggttatgaaatagaaaatggaaaaatagttgttggcgagggagataagtggttagaaattctaggttgtggaatggtacatccaaatgtgctgaaaaatgtaaaagtaaatccagataagtatcaaggttatgcttttggtattggaatagatagactgggaatgctcaagtatggaatcaatgatttaagagctttttttgagactgactatagatggcttaaccattttggttttgatccattagatgttccatcaaattatagaggtcttagtagatga

SEQ ID NO: 302248 - DNA, 976 bp, Unknown
  Bacterial polypeptide expressing nucleotide sequence isolated from the Sargasso Sea
ctgagactaattgctctgagtgatttagataaattgcatgctgatgatgatcaattggaaaattggagaatcagctatctgggaagaaatgggaaattatcttcactaatgaaaatactggcaactattcctaatgaagataaaagattagttggcccaaaaataaatgatctaaaagtccaacttaataaaacctttgtagctcacaagaataatattaataaaactgaagatggatctgactattttgataactcattaccaggattaaatctttcagcagggaactatcatccaacaactttaattattcgtgaaatttgtgaagcatttggttctatgggctttgaaattttagaaggtaaagaaattgaaacagagaaatataattttgatttactaaacataccatctgatcacccagctagagatcaatgggatactatctggctaaatgcgtcgacagagggtgaaaagcatttacttagaacccatacttcacctatgcaggcaagaataatggaaaataaaaaacctccaattagggttgttgttcctggaaaatgctatagatatgaggctactgatgctacacatgaatgggaattccatcaaatagaaggtttagctgttgataaagatatttctttttccgaattaaaaggaactttatttgaaatggctagaaaaatctttggttcagatcaaaaagtaagatttagatgtgatttttttccttttgtagaaccaggtgttgacatgtctattttatgggatggaaagtggatagaaattttaggagctggaatggtccaccctaaagtattgagtggagtaggatatgacccttctgaggttagtggatttgcatttggaataggcccagaaagagtatcaatgttaaaaaataaaataaaagatataagaaattttcacataaatgaccttagattcttaagtcaatttgtaagataaa

SEQ ID NO: 302249 - DNA, 712 bp, Unknown
  Bacterial polypeptide expressing nucleotide sequence isolated from the Sargasso Sea
ttgcataaagtggatttaaaatcattaaaacaaaaaatatctactctcaagtctgagtctactgatctcataaactcttctaatgataaagagtctttagagaaagcgtataaatcttatttgggtaagagtggcgaggtaaatctgctactcaaatctctaggaagcttgcctcaagagaaaagaaaagaagctggtatgctactgaaccaattaaaatcaggtattgataattcctacaaggaaaagctctccatactttctaaggcagaaaatgaattacgattagggaatcaaaaaattgatataactttaccatccgtatcttcagcagatgggtctcttcatccagtaacacaaacaataagtgaaattagcaatttctttgaatcgatgggatttggaatagaatctggtcctgaaactgaaactgattattataattttgaagcattaaatgtccctgaagatcacccagccaaagacatgcatgacaccttttatctaaaggattcaggacttttaagaactcatacttcgcctgttcaaattaggactatggaagataacgaacctcctcataggataatatgccccggaaaagtatttagaaaagattccgatttaacccacacgccaatgtttcatcagattgaaggacttgtggtagaagaagatgcttcgtttgctcaactaaagggtttattgaatg

SEQ ID NO: 302250 - DNA, 1018 bp, Unknown
  Bacterial polypeptide expressing nucleotide sequence isolated from the Sargasso Sea
atgattaaagaaataaaaaaacatcttaccgacttagagaaaatcaagctcacaaatttagatgaacttgagaagtttagaattaaatatatttcaaaaaaaggtatagttccctatatgttttctcaattaaaggatgttcctaataaggacaaaagagaagttggtctacaaataaactctgtaaaacagaaggttaatgaaataatttcattacataaagaaaagtttacaacaaaaaaatcaaatgatagttatgaggacttaacaaaaccagctgagtttctcaaattaggttcaagacatccaatatcaattgtaaaaaataaaataattgatatttttctaaaaataggttttgacatctcagaaggtccggaaattgaggatgattggcataactttactgctttgaatcttcctgagcaccatccagcaagagacatgcaagacacattctatctgaacaaaaatcctgattggctattaagaactcacacatcctcagttcaaatcagacatatggaaaataatgaacctcctatcaggaccatttcaccaggacgtgtttatagaaatgaagatatttctgcaagatcacattgtttttttcatcaagtagaaggtttatatattgatgaaggggtctcttttgttgatcttaaacaaactttattacattttacaaaagaattattcggaaaaagtaaaattagattaagaccatcttattttccatttactgaaccaagtgcagaattagatatttattggggattggaatctgaggcagattatagaattactaaaggtactggttggttagaaattttaggatgcggtatggtcgaccctaatgttttaaaaaattgcaaaatagattctgaaaaattttctggatttgcatttggattaggaattgaacgaattgcgatgttattatatcaaattgaagatattaggactctatatgaaaatgatttaagatttttaaatcagtttaataactcaatctaat

SEQ ID NO: 302251 - DNA, 792 bp, Unknown
  Bacterial polypeptide expressing nucleotide sequence isolated from the Sargasso Sea
acgttactttacctattcgcccgtatcaacaaggcaaaatacatccagtctctcaagtgattgatgaaatttcttcaatattttcagaaattggtttttcagttgctgaaggtcctgatgttgaaacagaatataataattttactgcattaaatacaccagaagaccatccagcaagagatatgcatgatactttttatttggaaaaaaataaaaaattattattaagaactcatacttcaccagttcaaataagagcgatgcttaatgggaaaccgccattcaaaattattgttccaggtagaacatatcgttgtgatagtgaccaaacacatgccccaatgtttcatcagttagagggtcttcatatagataaaaacattaccatgggtcacttaaaaggatgtttagattattttattaaagaattttttgaagtcaaaaatgttaaaatgagattcaggccaagtcactttccatttaccgaaccatcagctgaagtagacattggatacagaattgaaaatgaaaaaattgtaatcggagaaggcgacaaatggctggaaatattagggtgtggaatggtccatcccaatgttcttaaaaatgcaaaggttgacccaaaaaaatatcagggatttgcatttggaatggggatagatcgattagccatgttaaaatatggaatcaatgatttaagagctttttttgaaacagactaccgatggttaagtcattttggttttgaccctttagatgttcccacaaactatagaggtttaagcaaatgat

SEQ ID NO: 302252 - DNA, 2431 bp, Unknown
  Bacterial polypeptide expressing nucleotide sequence isolated from the Sargasso Sea
atgcaattccctgaatcctggttgagaacctttgtcgacccgcagctgacgaccgacgaactgtcgcacgcgctgacgatggcggggctcgaagtcgaatcgctgagcaaggctgcgccgccgacgtcgaagatcgtcgtcggtcgcgtgctcgaagtcgtcaagcatccggatgcggacaagctcaatgtctgccaggtcgacgccggcaccggcgcgacgctgaatatcgtctgcggcgcaccgaacgtcgcgcccggcatcaaggtaccggtcgcgctggtcggcgcggaactgccgccggcggaagagggcggcaagccgttcgcgatcaagctgtcgaagctgcgcggcgtggagagccaggggatgctgtgctcggcgcgcgagctgaagctgtccgaggatcacagcggcctgctggtgctgccggaagacacgccggtcggccaggacatccgcgagacgctgaacctcgacgacacgatcttcgaaatcaagctgacgccgaacaaggccgactgcctgtccgtgttcggcatcgcccgcgagacggctgcgatcaccggcgcaccgctgacgccggtcgacatccgcccggtgcgcgtcgagctcgacgaaacgctgccggtgcgcattgccgcgcccgatctgtgcggccgcttctcggggcgtgtgatccgcggtgtgaacgcgcgtgcgaagaccccgcagtggatggtcgagcgcctcgagcgttccggccagcgcagcgtatcggcgctcgtcgacatctcgaactacgtgatgttcgagcttggccgcccgtcgcacgtgttcgatctcgacaagatccacggcggcatcgaagtgcgctggggcaagcgcggcgaatcgctgaagctgctcaacggcagcacggtcgaactcgacgaaacggtcggcgtgatttcggacgaccggcaggtcgaaagcctggccggcatcatgggcggtgacagcacggccgtcacgctcgatacgaccaatatctacctggaagccgcgttctggtggccggacagcatccgcggccgcgcgcgcaagtacaacttctcgaccgatgcggcccatcgcttcgagcgcggcgtcgactacgcgacgaccgtcgagcacgtcgagcgcatcacgcaactgattctcgagatctgcggcggcaaggccggcccggtcgacgatcaggcggtgaacctgccgcagcgcgcgccggtgaagatgcgcgtatcgcgcgcgaaccgcatcatcggcgtgcagatcggtgccgacgagatcgccagcatcttcacgcgcctcggcctgccgttcgaacgtgaagacgacgcgttcctcgtcacgccgccgtcgcatcgcttcgacatcgagatcgaggaagacctgatcgaggaagtggcgcgcatctacggctttgaaaagatcccggcgcgtccgccggtcgcgacgagcgaaatgcgcgcgaccaacgagacgcgtcgctcgatccacgacattcgtcacgcgctggccgcgcgcgactacgcggaaaccgtcaacttcagcttcgtcgatgcggagtgggagcaggatttcgcgggcaacgaccacccgatccgcctgctgaacccgatcgcgagccagctgtcggtgatgcgcacgacgctgttcggcagcctgatttccgtgctgcgccacaacctgaaccgccgcgcggatcgcgtgcgcgtgttcgaggctggccgcgtgttcctcaccgatacggcggcgaaggccggcgagctgacggtcgagggctacgtgcagccgaagcgcgtcggtgcgcttgcctacggtccggccctcgacgagcaatggggcacggcgacccgcgcggtcgatttcttcgacgtgaagggtgatctcgaggcactgctcgcacccgcgaccgcacgcttcgtgaaggcagagcatccggcccttcatccgggccgcagcgcgcgcattgaagtcgatggccgtgcggtcggctggatcggcgaactgcacccgcgcctgatgcagaagtacgaactgccgcacgcgccggtgatgttcgaggtcgacgcggacgcgctgattgcacgtgcgttgcccacgccgaccgacgtatcgaaattcccgccggttcgtcgcgatatcgccgttgtcgtcgatcaggcggtcgaggttcaggcacttttcgacgaaatgaagaaggcgcttgccgaagaggcctgccgattcgttcagaaggttgtactcttcgacgaatttcgtgcaaaatcaaatacttccggtggtcttgccgcgtacgagaagagccttgccttccgcgtgacgctgcaggacgcggctggcacgctacaggacgaggtcgtcgatcaggctatccagacgctggtcgagcggatggctcgtaccggtgcgcgcctgcgcggctaag

SEQ ID NO: 302253 - DNA, 1024 bp, Unknown
  Bacterial polypeptide expressing nucleotide sequence isolated from the Sargasso Sea
atgggatctatggatctggaccagattgtcgccgacgcgcagcagtccttcgaacaggctgccgacatcaccacgctcgaaaacgagaaagcacgatttctcggcaagtcgggtgcgctgaccgagttgctgaagggcctcggcaagctcgatcccgaagcacgcaagaccgaaggcgcacgcatcaacgtcgcgaagcagcaggttgaagccgcgctgaccgcccgtcgccaggcactggccgacgcgctgctgaatcagcgactcactgccgaagcgatcgacgtgacgttgccgggccgcggcgccggtgcaggcagcctgcaccccgtgatgcgcacgtgggagcgtgtcgaacagattttcggctcgatcggcttcgatgtggccgacggccccgaaatcgagaccgactggtacaacttcacgtcgctgaacagccctgagaaccacccggcgcgttcgatgcaggacaccttctacgtcgaaggcaaggatgccgacggccgccagctgctgctgcgcacgcacacgagcccgatgcaggtgcgttacgcgcgcatgaaccgtccgccgatcaaggtgatcgcgccgggccgcacgtatcgcgtcgacagcgatgcgacccactcgccgatgttcaatcaggtcgaggggctgtggatcgacgaaaacatcagcttcgccgacctcaagggcgtctataccgacttcctgaaaaaattcttcgagcgcgacgacatcctcgtgcgcttccgtccgtcgtatttcccgttcacggaaccgtcggccgagatcgacatgatgttcgagcaaggcaagaacgccggcaagtggctcgagatctccggttcggggcaggtgcatccgaccgtgattcgcaacatgggcctcgatcccgagcgctacatcggctttgcgttcggcagcggcctcgagcgcctgacgatgctgcgctacggcgtccaggatctccggctgttcttcgagaacgacctgcgtttcctgcgccagttcgcgtaac

SEQ ID NO: 302254 - DNA, 951 bp, Unknown
  Bacterial polypeptide expressing nucleotide sequence isolated from the Sargasso Sea
cttgacgatcaaagccggtgaattgcggggtttagccagcaacggaatgatctgctccctgacggagctgggcctgacggagcaatccgacggcatcgccatcctggatgaactgggtgaatccttgccgcccaacgggtcgcctgtggcccctctgctgggactggacgacaccgttcttgagctggccattaccgccaatcgccccgacggcctctcgatggtgggtatcgcccgcgaggtggcggccctgaccggtggccgcttgagcctgcccgagctggatctgaatcccagcaccacgccgctgaccacagaactggacgggtgcttctattcgatcaccaagatcgagggtgtggacggctccaagccctcacacacctggttgcagcagcgccttgagcgtggtggcgtgaacagcgtcaatgcggtggttgacgtcaccaatctggtgatgctggagcaggggcagcccctccacgcctttgatgccgatgcgctggaacaactgaccgggcaaccggtggacgccaagagttttgctgtccgttccgctcgcgatggggaaattttcgtgggtctggatgatcagaagcgaaacctcgacagccgtgttcaggtcgtcacctgccatgaccggcctgtcgccgttgctggtgtgatggggagtctcgagagtggggtgactgccggtacccggaacatctggctcgaatccgctctgtttgctccgccgcgggttcgccagtcggcccgggccctggggctgcgtacggacgccagcagccgtttcgaaaaagggttgcctgtggaaatgaccctgccctgttcggcccgtgcctcggccttgttgagtcatgagttttcctgctctgagagcggccgttgggtgggcggtaacggtcccgcagaagcggaaccggtgctgttgaggcgcagtgccctcca

SEQ ID NO: 302255 - DNA, 634 bp, Unknown
  Bacterial polypeptide expressing nucleotide sequence isolated from the Sargasso Sea
tatgtctgatattaaaaaaataagagaagagtatataaataaattaaatcaggatttagatttaaaccatattaatcaaatcaagacagaattatttggaaaaaatggaaaagtttcaaatgaatttaaaaaaataggatctatctctgaagatcaaagaaaaaaatttgcatctgatttaaatatcataaaggatgagctacaaaacataatttcaaagaaaatccaagattttgaaataatgaaaattaaccttaagcttaaaaatgaaaaagttgatgttactttgcctgagagaactttttataaaggaaaaattcatcccgtatcacaagttattgacgaaatttcgtcaatcttctcagaaataggttttagtgtagaggaaggcccagatgttgaaaatgagtataataattttacagctttaaatactccagataatcatccagcaagagatatgcatgatactttttacttggatgaagataagaaatttttattaagaacgcatacatctcctgttcaagttagaacaatgctcaaaggaaaacctccttttaaaattatagctcctggcaggacttacagatcagatagcgatcaaactcatgcccctagttcatcaagtaga

SEQ ID NO: 302256 - DNA, 766 bp, Unknown
  Bacterial polypeptide expressing nucleotide sequence isolated from the Sargasso Sea
aaaaattgttataaaaaaagataaatatgaaaataaagaaaatagtgaaaatgtagacatctctatagattggttagaaagtactggcactaaagaacacttaatatcttcagtaatgaatgaagttgttcagatattttcatcaataggttataccgtagcgcatggtcctgaagcagaaacatcatggcataattttgatgcactcaatactcctgtatggcatccagcaagatatgaatctgacacattatatatagacaaaaaacttgataatttattaagaacacaaacaagtactgtccaagtaagacatatgcaagaaaacaaacctcctatatatattgtttctcctggacgtgtgtatagatctgaccagttagactcaacgcactcaccagtatttcatcaaattgaagggttggcggtagatgatgcaatcacatttacagacttaaaaggtacgttagagttttttgtaaaagagttttttggtaataacgttaaaacaaaatttatacctcatttctttcctttcacagagccatcagctgaagtattagtgagttggaaagatggtgattggttagaaatattagggtgtggaatggtagatcctaatgtatttgaaaatgttggtttcaagaaagggactcaaggttttgcttttggtgtaggtgttgaacgacttgcaatgttaaggcacaatattgaccatattaagaacttttatgacaacgacttaagatttcttaggcagttctga

SEQ ID NO: 302257 - DNA, 978 bp, Unknown
  Bacterial polypeptide expressing nucleotide sequence isolated from the Sargasso Sea
gatgatagttttaaaatcatggctcaatgattggattaatatatcaaatattgatgacagcaatatatcagaagcacttgaatctttgggtttcgaaattgaatcaacaaataaaattgaaccaaattataaaaatatagtggtaggtaaagtagtagatatttacccacataataatgctgacaaattaagaattacccaagtagatgttggaagtaatacttacgaaatagtttgtggtgcatggaattttgatgttggagctattgttcctgttgcgttaccaaagtcacatatcgttgacaattttttaatagaaaaaagagaaattagaggggttgtttcaaatggtatgatatgttctgctagggaacttggtctttgggatgaacatgaaggaattttattacttgaagactcattagctccaggtacagattttagttcaacatacgattcagaagatacttcctgggaaattggaattactccgaatagaggagattgcatgtcacacctaggtgtagcgagagaactatctaactattttgatataaaaatttcagaaaatgattttaaacttaaatctaaaatagagaatgttctaaaaacaaacagtggaaaaatttctgagtgtaattcttatgtgtctattgagattgaaaattttaatataacagattctcctttctatattagatatagactttcacaggtaggaacaaggataattaataacgttgttgatttaactaattatgttttatatgatatcggacaaccattacatgcattcgatagagataaaatatttggaacagtgtctgttagaaaagcaaaagacaatgaaaaaatattaactctagataatcaaaaaaggtctttggacaaaaatgatttagttattactgataatgataatccaattgccttagctggagtaatgggtggtttggatacagaagtaactgaaaatac

SEQ ID NO: 302258 - DNA, 529 bp, Unknown
  Bacterial polypeptide expressing nucleotide sequence isolated from the Sargasso Sea
atgcaacagcttgaagaagtagtcggccaagccagggccgaaattgagggcgtaagcgacatcgccgcccttgacgaaatccgggtcaaatatctgggtaaaaagggcttttttaccgagcagatgaagggcctgggcgccctgtccgctgaagagcgtcccgccgcgggcgccgtgatcaaccaggccaaacagcaggttcaggatgccctgaatgagcgtcgtgaagccctcgaagtcgccgtgctcaaccagaagctggccgccgagaccatcgacgtcagcctgccgggccgccgtatcgaaaatggcggtctgcacccggtgacccgcaccattgagcgcatcgagcgcctgtttggcgagatgggcttcaaggttgcccgtggtcccgagattgaagatggcttccacaacttcgatgcgctgaatatcccggctcaccacccggcgcgtaccgatcacgataccttctacttcaatcctgatttgatgttgcgtacccacacctccggtgtgcagatccgca

SEQ ID NO: 302259 - DNA, 1189 bp, Unknown
  Bacterial polypeptide expressing nucleotide sequence isolated from the Sargasso Sea
tatggctggtctagaagtagaaggttatgattcttttaattccaaaataacagggcaggatgcaattataaagctagatataactcctaaccgaggagattgttttagcattttaggagttgccagagagctatctgttataaacaatctaaaatttaagaatcctacttttcatccaattcaaggtaccttcaaggaggatattaaaattcaagtttgcaaggaagctccgagatatgttggaagatctataaaaaatatagacctaaaagtaaaaactcttcctttagttgctgaaagattgagtttaagtgaccaaaagctaatagatcccgtagtagatataactaactatatacttttggagcttggtcagccccttcatgcttttgatagagataagttagaaggagatataatagtaaggcctgctaaaaaatctgagaaccttactttactagatgatcaagagattaaattaagtccagagtatattgtcatttctgatagcaataaatctatagctcttgctggcattatgggaggtaaaaacacctgtattacttctaaaactaagtctattttcttagagagtgcattttttaaaccatcaatcattagaggaagagcaagaaggcttggttttcaaaccgatgcttctatcagatatgaaagaggcgtggattatgaaattcaacggcttgctatcgataaagcaagtgaaatacttcacgaaacagttggtggagagtttggaataattaaagaaagtaaactagcaagagaattacctaaaacaaaaaaggtttcaattgatatagatagagcaaatatgattcttggcactaacattactagtatgcgagcaaggaaatacctaaaaggtcttggaatgaatcctataggctcaaaaagaagattagaaactacttcaccttcatggagatatgacgttgagatagaagcggatctaattgaagagctggctagattagaaggctatgattcacttccaatagtatctcttgaaccaaaattgcaaaaaaaaatagagtctaaagaaaaagttatttcagcttccctcttatctcagggctttagtgaagttatcaattattcttttataagtgaaaaagatgagaagatctttggagaatctaaacatatgattgaagtggagaatcctatt

SEQ ID NO: 302260 - DNA, 1069 bp, Unknown
  Bacterial polypeptide expressing nucleotide sequence isolated from the Sargasso Sea
atgcaagattacgataagcttaaaaatgaagttctgattaaaattaaagaagctaatagtttagatgatctagaaaatcttcgtgttcaagttttagggaaaaagggatctataacttctcttatgaaacaacttggttcattggaacctgataaaagaagagaagctgggcaaatactcaacagtcttcaaaagaatataatagaatccatagataataaaaaatcctctcttgaagaaacttatttaaatgaaaagcttaaaaatgaggctttagatattacacttcccacaagacctgaaaatattgggagaatacacccattgtctaaaactatggatgaggttatttctatatttgctcagatgggcttcactgttgcagaagggccagatattgagagtgatttctataattttactgcattaaatattcctcaagaacatcctgcaaggcaggaacatgatactttttattttaatgaagatgaaaatggtgagagaaaagttttaagaactcatacaagtccagttcagataagaacaatggaaaaattaaagccgcctctgagagtaatagtacccggtaggacttacagaagcgatcatgatgctactcacagtcctatgtttcatcaatgtgaaggattggttataggtgataaattaaatatgagtcatttgaaaggctgcttaatagatttttgtagaattttttttggggttgatgatttgccagtaaggtttagacccagctactttccttttactgagccatctgctgaggttgatattggctgctcaagaaaaagtggagaactgataattggagagggagacgaatggcttgaaattttaggtagtggaatggttaatcctagggtgctacaaaactgtggacttgatccaaatgagcaccaaggatttgcttttggaatgggacttgaaaggattgcaatgttaaagtacggaataccagatttaagaccattttttgactctgatctgagatggatgaagcactatggtttttttccttttgagcaaacttcaatccaccaaggttaga

SEQ ID NO: 302261 - DNA, 1582 bp, Unknown
  Bacterial polypeptide expressing nucleotide sequence isolated from the Sargasso Sea
gaatagaggggattgtatgtcacacctaggtgttgcaagagaattatctaactattttgatataaaaattctagaaaatgattttaaacttaaatctaaaatagagaatgttctaaaaactaacagtggaaaaatttcagagtgtaattcttatgtgtctattgagattgaaaattttaatattacagattcgcctttctatattagatatagactttcacaggtaggaacaagggttattaataacgtagttgatttaactaattatgttttatatgatatcggacaaccattacatgctttcgatagagataaaatatttggaacagtgtctgttagaaaagcaaaagataaagaaaaaatattaactctagacaatcaaaaaaggtctcttaacaaagatgatttagttattactgacaatgataatccgattgccttagctggagttatgggtggtttagaaacagaggtaactgaaaatacgaaaaacttattaattgaaagtgcatactttgataaagtttcaataatgaatacatctagaaaacttaatttaatctctgatgcatctataagatttgaaagaggtattgactttaatcttcaattaaaagcaataaatagatttataaatatttttagtacatatcaagatataaattattcatcaccattagttgatgataaaaaaaatattaagaacaagcctgtttcttttagtagtaatgatatttataaaatactaggcacaaaaattgataacaaatttattacaaaaacactaaagaatttagatattgatcatactattaataatgaagatattaaatttgtttctccgtcatggagatatgacttagaaagacccattgatataattgaagaaattgctaagcactatggttttaataatttcgatagtactttaccaattggtaataatagaaataatttaggagactattggaattctaaatctttttttagccagcaacttagaggtaaggattatcaagaaatacaatccctatcttttgttgatgatataagtaatcaaagatttaatccagaaaaaaaatacgtagaagtttacaatcctattgattcaacaaataagtatttgaggtcaaatcttttctcatcattattgaatatttatcaatcaaatttagaaaaaaactctgtttcttctaaatatttcgaaattaacactgtatttgataaaggtaagcatgagaaatacgaaaatatacctaatcaactttataccttaggagtgcttacaccctcaagagttacaaatgttgatttaagaggtgaagataaatcttttgatatttattatgtcaaaaacttaatttctaccttaattggtgaatttaatgttaaatatttgcacaagccaggatttcacaaacgattatcatttttaatactaaaaaatggaaaacaagtaggtttttttggtcagctttcttatgaattaatggatgatttaaacttagaagatcctatatatttaatggagcttaatattgaaaaaatcgacaataccactaaagaaactaacgattttata

SEQ ID NO: 302262 - DNA, 667 bp, Unknown
  Bacterial polypeptide expressing nucleotide sequence isolated from the Sargasso Sea
aaatgaatataacaactttactgctttaaatacacctgacaatcacccagcaagagatatgcatgatacattttacttagatgaaaacaaagaggttttgttacgaactcatacttcaccagttcaaatcagaactatgctaaaagacaaacctccattcaagatcattgctcctggaagaacatatagatctgacagtgatcaaacacacgcaccaatgtttcatcaagtagaaggtttgcatattgatacaaatattaatatgggacatttgaaaggatgcttgaattatttcattaaagaattttttgaagttgaaaaaattaaaatgagatttagacctagtcattttccattcacagaaccatctgctgaagtagatattggttatgaaataaaagatggaaaaataataattggagagggagataagtggcttgaaattttaggttgcggtatggtgcatccaaatgtcttaagaaatgtaaaagtagatccttctaaatatcaaggatatgcctttggcataggtatagaccgattagcaatgcttaaatacggcattaatgatttaagagcgttttttgattgtgattatagatggttaaatcattttggttttgatccacttgatgttccttcaaattacagaggtttaagcagatga

SEQ ID NO: 302263 - DNA, 1045 bp, Unknown
  Bacterial polypeptide expressing nucleotide sequence isolated from the Sargasso Sea
gaatattgaaagtttaatcaaaataaaaacagaattatttggtaaaaatggaaagatttctaatgcttttaaaaaattaggatctttatcaactgatgagcgaaaaaaatttgcatcggatttaaattcaataaaaaacgaacttcaagataagatagattctaaacttcaagaaattgaaacaaaagagattaactctaaacttgaaaatgaaaaagtagatgtaacattacctgagagagaatttagtcgaggaaaaatacatcctgtttcacaagtaattgacgagatatcttcaatattttcagaaattgggtttagcgttgaagaagggccagatatagagaatgagcattataattttactgcattaaatacacctgacaatcatccagcgagagatatgcatgacactttttatatagacaataataaagaattattattaagaactcatacttctccagtacaagttagaacaatgctaaatggaaaacctccatttaaaattatagctccaggcagaacatatagatctgatagtgatcaaactcattctcctatgtttcaccaagttgaaggtcttcatatagataaagacataaacatgggtcatctaaaaggatgcttgaattatttcataaaatcattttttgaagtagataaaataaaaatgagattcagacctagtcactttcctttcactgaaccatctgctgaagtagatattggttatgagataaaagatggaaaaatagtaattggagaaggagataaatggttagaaattcttggttgtgggatggtgcatcccaatgtacttaagaatgttaaagtaaatccagataagtaccaaggttatgcttttgggattggtatagatagacttggaatgcttaaatatggaattaatgatttaagagcttttttgagactgactatagatggcttaatcattttggttttgatccattggatgttccatcaaattatagaggtcttagtagatgaaattcacaataggatggctaaaagaacatcttga

SEQ ID NO: 302264 - DNA, 730 bp, Unknown
  Bacterial polypeptide expressing nucleotide sequence isolated from the Sargasso Sea
aagctagatgtcactctcccggccgatccttataatctaggttctgagcatccaataacaaaaatttcaaaaaaaattattaaatattttgctccattaaactatcaaattttttctggcaatgagatcgaaacagacttttataattttgaggctttaaattttcctgaaaatcatcccgcaagacaaatgcatgacactttttatctgaattctaaaagtagttcagattatctgttgagaacacatacctcaaacactcaaatccatgcaatgctatcagaggatttgcctttatatatgctttctcctggaagagtctttaggtgtgattctgatactactcatcttccaatgttcacccaaatagaaggtttggtagtggatgaaggagttacatttggagacttaaaaggaattcttattgacttcctggaagacttttttaatgaaaaaatggatgtaaggtttaggccgtcctattttccgtttacagagccttcagctgaagttgacataaaatttggaaacaaaggttggttagaaattttaggttgtggaatggttcaccctaatgttcttaagggatgtaatattgatactaaaaaattccgtggttttgcctttggtatggggattgagagattagctatgctttattatggcgtcacagatatcagagaattttattcttcaaatttagactttttaaatcaatttccttcatgaa

SEQ ID NO: 302265 - DNA, 495 bp, Unknown
  Bacterial polypeptide expressing nucleotide sequence isolated from the Sargasso Sea
ctcccggaaaaacgtttagatgtgataatgatcaaacgcactctcctatgttccatcaagttgagggtttagtaatagatcaagaaagcaacatgagccacctcaaaggatgtttagaaatattcctaaagactttttttgagactgataaattaaatatgagatttcgacctagtcatttcccctttactgaaccatctgcagaagttgatattggatacactgagaaaggaaatcaattaattattggagagggtgaggattggttggaaattttagggtgtggaatggttcatccaaacgtgcttgaaaatgtaaatatcaattcaaatgaatatcaaggttatgcatttggtatgggcatagagaggcttgcaatgctcaaatacggaattagtgatttaagaactttctttgatagtgatcttagatggaataagcattatggcttttcacctttgaacataccttcgatcataggagacttaagctaga

SEQ ID NO: 302266 - DNA, 922 bp, Unknown
  Bacterial polypeptide expressing nucleotide sequence isolated from the Sargasso Sea
tgccatcgatcaaaaaaaaataaaaggccaggaattaaataaacttaaatctattattgaagaggctattgataatcaaaaaacttctattgaaaatcaggcaatagaaaaaaaattaaaaaacgaaaatattgatattaccttacctcaacttgaaacttctaatggaaaaattcatcctatttctcaaacaatttttagtatcatagaaatttttggtaatttaaattactcggttgaagcaggaccagatattgagagtgattttaataatttttctgctttgaatatccctacacatcatcctgctcgtgaaatgcaagatactttttatgttcaaaatagtgatggtgaagataatgtattaagaactcatacaagtcctgtccaagtaagaacaatgcttaaaacaaaaccacctataaaaataattgttcctggtagaacatacagaagtgactcagactcaactcatacaccaatgtttcatcaagtagaggggttggtggtaaatacagatgcgacaatggcagatttaaaatctaccctgattacttttttaaaagagttttttgaaattgaaaatttaaaataccgttttaggccaagttattttccatttactgaaccaagcgcagaaatggatgttgcttttaccaaaaaaaataatgttttaaaaattggtgagggagatgagtggttagaaattttaggatgcggtatggttaatccaaaggttttagagaattgtaatattgactcctcggtttaccaaggctttgcatttgggatgggaatagagagattatcgatgctcaaatacggaattaccgatatgcgaggtttatttgacttaaatattaagtggttagatcattacggtttttcaccattggatctaaggaatagaacagaggtttaa

SEQ ID NO: 302267 - DNA, 733 bp, Unknown
  Bacterial polypeptide expressing nucleotide sequence isolated from the Sargasso Sea
aatagatgaaatttcatctatattttctgaaataggatttagtgttgaggaaggcccagatgtagaaaatgaatacaataattttacagcattaaatacaccggataaccatccagctagagatatgcatgatactttttaccttgataataataaggaattacttttgagaactcacacatctccagttcaggtaagaactatgctaaaaggtaaacctccttttaaaattattgctccaggacgaacttacagatcagatagtgatcaaacccatgctccgatgtttcatcaagttgagggacttcatatagataagaatataaatatgggacatttaaaaggatgtttaaattattttattaaggagttttttgaagttgataaaattaaaatgagattcagaccaagtcattttccatttacggaaccttcagcagaagtagatataggatatgaaattaaaaatggaaagattgtaattggtgaaggtaataaatggttagaaattctaggctgtggaatggttcatccaaatgttttaaaaaatgtaaatgttaatccaagtaaatatcaaggatatgcctttggaattggcatagacagacttggaatgttaaaatatggaattaatgatttaagagccttttttgagactgattatagatggttaagtcactttggctttgatccattggatgtcccttcaaattatagaggactaagtagatga

SEQ ID NO: 302268 - DNA, 460 bp, Unknown
  Bacterial polypeptide expressing nucleotide sequence isolated from the Sargasso Sea
agattcaacgcatacacctatgtttcaccaagtagaaggtttattaatggatgaaaaatcaaccatgtcccatttaaaggggtgtttaatagattttttaaaagaattttttgaaattaatgatttaaaatacagatttcgtccaagttattttccttttactgaaccaagtgcagaaatggatatcgcatatacgaaaacaaacaatgttcttaaatttggagaaggtgatgaatggatggagatactaggttgtggaatggtaaatccaattgttttagaaaattgcaaaatagattccaaaaaatttcaaggttttgcttttggtatgggaattgaaagattatcaatgttaaaatatggaattacagatatcagaagtttttatgaaagtgattttagatggattcaacattatggctttaatcctttggatttaaattctacgtcagggttataa

SEQ ID NO: 302269 - DNA, 496 bp, Unknown
  Bacterial polypeptide expressing nucleotide sequence isolated from the Sargasso Sea
ttggttagaggattagattattatactggttttgtttttgaggctatttcttctgagcttggagctcaagatgcatatttaggaggcggaagatatgatgagctttgttctcaattaggtggcaaagatctcccagcaattgggatggcaatcggtatagaaagattggcaagtatagccaatacgaatgaaattaataaaactttagtatcttttataattttgtctaacaaagttgagcaaaaagcatataaaatagcgcacgatttaagatcagttaataaaaagcttaatctagatattcagctatctgacggtagtttaaaatctaaattaagaagagcaaataaggataatgcttcatatgctctaatagttggagaagaagagttaaaatcaaatacagttattgttaagtcattgttagatgaaaattctgaacaatccaatatgaatattaatgaattacatgattttataaaatcaattgtgtaaa

SEQ ID NO: 302270 - DNA, 505 bp, Unknown
  Bacterial polypeptide expressing nucleotide sequence isolated from the Sargasso Sea
gaatattatactggtgtgattttcgaagtgaacttaaagtttgatgttacaaataataaaggacaggtgataaaatttggatccataggcggtggagggagatacgataatttagtaaataattttggtaactttgaggctcctgcaacaggtatatcaataggattagatcgattggtttatgcattgatccagaaaaaggaatttaaagtaaaacaatccaaacctgtagtaatttgcgtttttgataaaaattcaatgaaagaatacataaacatacaaacgattttaagaaaagccgatatcagtgcagagatttatcctggagaaagtaaattaaaaaaacaaatggaatatgcgaataaaataaaatctccagctgttatcttatatggtgaagatgagataaaatcaggcaaacttaccttaagaaatttgagtagtggcaaagaacgatcaattaaaattagtgaattagtttatgaaatcaaaaaaaatatctgaa

SEQ ID NO: 302271 - DNA, 994 bp, Unknown
  Bacterial polypeptide expressing nucleotide sequence isolated from the Sargasso Sea
tataggctcctttcttgcagaggacgagaataatcctatgtctgatgtgtttacattcgatgatggtgaaaagaatattactttaagatatgatttatccagtccacttgctagatttgttgcacaaaataatcagaagcttccttcaatatataaaagatatgcaattcaaaatgtatttagaaatgaaaaatctggaaatgcaaggtatagggaatttacccaagcagattgtgatatagttggaaacgttaatccagcccaagcgaatgctgaactgtgtaatttgatctcaaatactttagtagattgtggtttaaaaaaagatcagtttactattaatgtcagtaacagaaaaatcgttcaaggtctgattgaggatttgaaaattgaaaaagataaacaaatcaaagtaatgagagctatagataaactcgataaacctgggtttggtttaaagggtgttgaggaattattaaaagaagaaagaaaagataaaagtggagctataacaaaaggagcaaatctaagcgatgatcaagctttaaaaatcttaaattttttaaagattaaagatttaaagaaacttaaagaaaattttaaaaatcctgttacccaagagggcattaaagaattggaagaattatttgaagttttaaactttggaaattactccgatcaagtaaaaactaattttacgatagttagaggtttagattattatgatgggttttgtgttgaaaccaatttaaattttaaagcaaaaaatattaagggtaaggaagttgatattggaagtatttgctcaggcggacagtataataaattaatttcaagatttaagggagtagatattccagggacaggtataagtattggtgttgatagactgctatttgtaatgatgcaattaaatcaaatagaagttgatacacaaaatccagttattgtttgtgtaatggatgaaaaatatttaataaattattacgaaatt

SEQ ID NO: 302272 - DNA, 430 bp, Unknown
  Bacterial polypeptide expressing nucleotide sequence isolated from the Sargasso Sea
tttggatctataggtggaggaggaagatatgataatcttgttagtaattttgggaatcttgattgtccagcaactggaatatcaattggtatagatagacttgtatatgctttaatgcaaaagaaagattttaaaatgcagtctacgagaccagtagtcatttgtgtatttgataaaagcaatattgaaaaatatgttgagatattaaaaaatttaagatcatccaacatcagctcagaaatttatccaggagaaggaaaattaaaaaaacaaatggagtatgcaaataaaataaaatctccatgtgttattttttatggagatgatgaaattaaaaaggctcaagtaaaattaagaaaccttaaaactggcgaagagtcttctataaaaattaaaaatctagtcaatgaaatcaaaaaaattatctgaa

SEQ ID NO: 302273 - DNA, 628 bp, Unknown
  Bacterial polypeptide expressing nucleotide sequence isolated from the Sargasso Sea
gtcgaaggcatttggatctaacaatccagaacaagacgttgaaataattgcgattgcatggaaaattctttccctatgtggtttggcaaaagatactacccttaacctgaatagcattggctcaaaggaatgtaggaataattataggaaagcattaaaaaattatattgacccgtacataaaagatttttcaaagacaagtcaacatagatttgagacaaatcccttgcgcatactcgatacaaaatctgaaaaagaacaggaaattttaaatgatgcaccaaagatatctgattaccataatgaaaccgatagcacgcattttgaatctttgaaagaatttttaaaagatattgacctccctttctccataaatcacaaacttgtaaggggattagattattacactggaacagtatttgagtttaattcagttaatttaggagcgcaagatgccctactgggcggtggccgctacaacggactagtagagactttgggcggaaaacctactccaggaataggttttgcagctggcatggagagattcctcattgcaatggagcaatctaattttaacattaagaaatctaatccagatatatactttatttgtgcagacaaaaaa

SEQ ID NO: 302274 - DNA, 146 bp, Unknown
  Bacterial polypeptide expressing nucleotide sequence isolated from the Sargasso Sea
gatgtcttttaacatacctcgtggaactcaagatatattaccggatgaagttacaaaatggcagcatattgaaaataccgcacggcaattatttaaagcatatcactttcaagaaatacgtacaccgattttgaaaatacaaatgt

SEQ ID NO: 302275 - DNA, 696 bp, Unknown
  Bacterial polypeptide expressing nucleotide sequence isolated from the Sargasso Sea
gagagggtcgaaaagataaatcaggagattatacaaagggagcaaatcttagtaatgaacagatcaaaacaatcgaatctactttgcgaggtaaaattcctgatagcgatgacatcttagaaattctaaaaatatttgaggcttacaattttaagaattacaaatttgatccatcagttataaggggattagaatactacaccggacctatttttgaggttaatttaaattttcaagtaaaaaattcaaaaggacagactattcaatttggatcaataggagggggaggaaggtatgataatcttattagtaattttggaaatttagattgtccagcaaccggaatatcaattggtctagatagacttgtgttcgctttgatgcagaaaaaagattttaaaataaagtctacacgacctgtcatcatatgtgtttttgataaagataaagccaaggaatatataggtatactaaataaacttagagcatcgaatatcagctcagagatttatccaggagagggtaagctaaaaaaacaaatggaatatgcaaacaagttaggatccccagctgttattttgtatggtgataacgaaataaaatcaggaaaagtgactttaaaaaatttagaaagtggaaatgaaagttcagttaaaattgaggaaatagcaaatgaaatcaaaaaattactctgaa

SEQ ID NO: 302276 - DNA, 739 bp, Unknown
  Bacterial polypeptide expressing nucleotide sequence isolated from the Sargasso Sea
taaaatcgacagacttggctgggacgaggcaaaaaaacttcttggagagggtcgaaaagataaatcaggagattatactaagggagcaaatctcagtaatgaccaaatcaaaacaatcgaatctactttgagaggcaaaatccctgatagtgaagatatattagagattttaaaaatatttgagttttataattttaagaattacaaatttgatccatcagttataaggggactggaatattatacaggacccatttttgaggttaatttaaattttcaagtaaaaaattcaaaaggacagactattcaatttggatcaataggtggcggtggaagatatgataatcttgtaaataattttggaaatttagattgtcccgcaactgggatttcaattggtctagatagacttgtatttgctttgatgcagaaaaaagattttaaaataaagtctacacgacctgtcattatttgtgttttcgataaaaacaatgttaaggaatatgtagatatattaaataaactaagagcctcgaatatcagctcagaaatttatccaggtgaaggtaagttaaaaaaacaaatggaatatgcaaacaagttaggatccccagctgttattttgtatggtgacaatgaaataaaattaggaaaagcaactttaaaaaacttagaaagtggaaatgagagttcagtgaaaattgaggaaatagtaaatgaaatcaaaaaattactctga

SEQ ID NO: 302277 - DNA, 871 bp, Unknown
  Bacterial polypeptide expressing nucleotide sequence isolated from the Sargasso Sea
acaaaaaatttacaagccgacgctgaactttgtgttttaatttctgagatattagaaaagtgtggtttggataaaaaagattacactgtcaaaatttcctctagaaaattaacagataaattattcaaaaagctgaaaattacatcgaaagagcaaatctcaactactttaagggctctagataaaatcgacagacttggctgggatgaggtaaaaaaacttctaggagagggtcgaaaagataaatcaggagattatacaaagggagcaaatctcagtaatgatcagatcaaaataatcgagtctactctgtggggtaaaattcctgatagcgaagatatattagagattttaaaaatatttgagttttataattttaagaattacaaatttgatccatcagttataaggggactggaatattatacaggacccatttttgaggttaatttaaattttcaagtaaaaaattcaaaagggaagactattcaatttggatcaattggtggcggtggaagatatgataatcttgtaaataattttggaaatttagattgtcccgcaactgggatttcaattgggttagatagacttgtatttgctttgatgcagaaaaaagattttaaaataaagtctacccgaccggtcattatatgtgttttcgataaaaacaatgttaaggaatatgtagatatattaaatatacttagagcctcgaatatcagttcagaaatttatccaggtgagggcaagttaaaaaaacaaatggaatatgcaaacaagttaggatctccagctgttattttgtatggtgacaatgaaataaaattaggaaaagcaactttaaaaaatttagaaagtggaaatgaga

SEQ ID NO: 302278 - DNA, 493 bp, Unknown
  Bacterial polypeptide expressing nucleotide sequence isolated from the Sargasso Sea
aagattcttgttagaggtttagattactattgtcatactgcctttgagttcattacaaacgaattaggctctcaaggaactgttcttgctggaggaagatatgatggtctctcaaagatgttaggtggagtagatgtagctggtgttggatgggcagctggcatagaacggttagcattgatggtgcaaagtaaatatgtcagtaaacctgatgtagtattaattggtctttctgaaaatattaattatttattactcacaatgatgaatcaattagtaaaagaaggcttaaaagtagagattatttatacaggtaacatatctaaaaaatttaaaagagcccacaaaattcaagcttcatatgctttaattttgggagaagacgaggttaacaaaagaattattaagttaaaaaatctttcatcaggtcatgaggaattaatgagtttgagtaaagcaactaaaattatgaaaaacaaactacaagtataat

SEQ ID NO: 302279 - DNA, 445 bp, Unknown
  Bacterial polypeptide expressing nucleotide sequence isolated from the Sargasso Sea
ggtcaagtaattcaatttggttcaatcggtggcgggggtagatatgataatttagtcaataattttggcaactatgatgctcctgccaccggtatatcaataggtttagatcgattagtttatgcattgatgcaaaaaaaggaatttaaaattaaacaatctaaacctgttgtgatttgtgtatttagtaaaaactctatgaaggaatacatcgatttacaaaaattattaagagaagctggtgtaagtaccgaaatatatcctggcgaaggtaaattaaaaaaacaaatggaatatgcaaataaaatcaactctccggctgtaattttatatggcgaagatgaaattaaatcaggtaaacctactttaagaaatttaagttcaggagatgaaagatcaattgaaataaaggaattagttaatgaaatcaaaaaaattatctgaa

SEQ ID NO: 302280 - DNA, 872 bp, Unknown
  Bacterial polypeptide expressing nucleotide sequence isolated from the Sargasso Sea
ctttagagaatttatgcaatgcgacattgatgtagttgatacaagagaagtcccattgcatttcgatgttgaaattccagcaatcatgaatcaaacgctaaaatcaatcgacgccggcccagtattcactaaaattaataatagaaaaatattggaaggctattattcgggcttagatatggaaaatacgtcagcagctatacgtctgattgataaagttgataaaattggttttgatggagtcgcagatttacttagaatcgaattgggacttaataccaaaactattgataaaatttttcaactcacacaaatttgtggctctgggcagcaagtcgcagatcaaattcagaacttgggagtgcactccgaattactcgatcagggattgacagaacttacctttgttatgcaagaactagaacatatcgataacaaggcattctctgtcgatctctcaatagctcgtggtttagcctactatacaggcacagtttacgaaacgcgtttcgcggaataccctgcttatccatcaatttgtggcggtggaaggtatgataacctggtaggggatttcgtgagcaaacgcttaccaggtattggtatctcaataggattgagccgtatttttgcaaaactcctcaaagagaagcgaataaaaactgataaaaagtcaccaacggaaatattagtaattcactctagaggagccccctaccgactcgtaaataaaacagcgcaaactttgcggcaaagagggtttaacgtcgaacaatatcatgaagaccgaaagttaaatgcacagctaaaatatgcagaggtgaaaggcataccatggatatggtttcccccagtcaatattgatggggaac

SEQ ID NO: 302281 - DNA, 853 bp, Unknown
  Bacterial polypeptide expressing nucleotide sequence isolated from the Sargasso Sea
tcaattaaagataacagatcaaaaacaaaaacaaaaagttttaagagcaatagataagcttgataaaaaaaattttggaattttaggtgttacagatttattaagagaaaaaaggactgatgaaagtggagcagtaacggttggagcaaaattaagcgaaacacaaacatccgagataatcagtttcttaaaaataaaagatttaaaaaaactgaaatcaaatttaaaagactctttatctcaagaaggtattaaagaaacagaggatttattagaaaatctaagatatggagaatatgctgatcttattaatttttcaggaaaaatctgtagaggtttggacatatatacgggttttatcgtagaaaccaatctaacttttgatgttaaaaattctaaaggaaaagttattgcacctgggtctgtagcgagtggaggagaatatctggtttcaaaatttaaaggagataattttttaggatcaggtatcagcataggaattactcgcctcaattattgtgttgaacaacttaatcaaattgaagcagatgaaagtaagccagttttaatatgtgtaatggatgaaaatttgttaccaaagtattatgaattattgaagttattaagaaataacaatattaattctgaaatatttctggatcctaaaaagaacttaactaaacaacttacttatgccaataagcgtcagcttcagctggcaataatagtgggagaaaatgaggtccagaacaatacagttactataaaaaatttattaggtgttaaaggggaagaaaaccaattcaatgtttctatgaaagatttagtcgatgaaatcaaaaaacttatctaa

SEQ ID NO: 302282 - DNA, 611 bp, Unknown
  Bacterial polypeptide expressing nucleotide sequence isolated from the Sargasso Sea
catgaatttagagttaaactcaattggattagataagaagccgtctgatacaaaagtaattgtagctatgtctggtggtgtagactcatctacagttgcaggtttgatgaaaatgcaaggatataatgttaccggcataacattaaaactatacaacgatagtaaagaagttgttaaatcaaaagtatgttgctcaggccaagatgttatagatgcaaaaagagttgctcataaattagatattgatcataaaattctttattaccaagataaatttaagcaaggtgttattgataattttgtagaaagttacttaaaaggagaaactccaataccttgcgtacagtgtaatcaaactgtcaaatttaaagatttgtatgaagttgctaaagatttaaatgctgatgctttgattacaggtcattatgtaaaaaatataacaataaatgaaaaaaataatatgtatagagcagtagatgaaaatagagatcaaagttattttctatttaatactacaagagagcaattaaattatttacgatttccattaggtggaatgttaaaaaaagaaactagagatatcgccaaaaaactaaatttaaatgttgctg

SEQ ID NO: 302283 - DNA, 855 bp, Unknown
  Bacterial polypeptide expressing nucleotide sequence isolated from the Sargasso Sea
agaatgtatttagaaatgaaaagtctgggaatgcgcgttatagagagtttactcaggcagattgcgatattgtaggtaatgttaattcagctcaagctaatgctgaattatgtaatcttgtagcaagcacattaattgaatgtggtttaaaaaaagatcagtttattatcaatgtcagcaacagaaaaattgttcaaggtttaattgaggatttaaaagttgaaaaagataaacaaattaaagtgatgagagctatagataaactcgataaacctggttttggtttaaaaggtgttgaagaattattaaaaaaacagagaaaagataaaagtggagctataacaaaaggagcaaacttaagtgatgagcaagctacaaaaatcttaaattttttaaaggttaaagatttaaaggaacttaaagaaaattttaaaaatcctattactcaagagggcattaaagaattagaggaattatttgaagttttaaactttggaaataattctgatcaagtaaaaactaattttacaatagttagaggtctagattattacgatgggttttgtgttgaaaccaatctaaatttcaaaacaaaaaatatgaagggtaaggaagttgatattggaagtatttgttcaggtggacagtataataaattaatttcgagatttaagggtgtagatattccagggacaggtgtaagtattggtgttgatagattgctatttgcaatgacacaattaaatcaagtaaaaattgatctacaaaatccagttattgtttgtgtgatggacgtaagatatttaaaaaattattacgaaattttggataatttaagaaaaaatggatattaat

SEQ ID NO: 302284 - DNA, 369 bp, Unknown
  Bacterial polypeptide expressing nucleotide sequence isolated from the Sargasso Sea
tatgaaattaagatcagtaagaggcacacatgatatatttggaaaagaaatagataaatttaaccgtatttctaatattgtttcgaaaaatgctaatctaaaagaatataaagaaatccagacaccaatttttgaatttagtgatttatttgcaaagcctcttggcgaacattctgatgttgtgttgaaagaaatgtattcatttgaagacagaaataatgaatatttaactctacgtcctgagtacacaacgcctatgattagagcggctattactaataatctcttaaatgatcttccattgaaaatatatggaattgggccaatgtttagaagggaaaggccacaaaaaggtagatatagacaatt

SEQ ID NO: 302285 - DNA, 554 bp, Unknown
  Bacterial polypeptide expressing nucleotide sequence isolated from the Sargasso Sea
tataactttaaaaaattacaaatttgacccatcagttatacgagggctggagtattacacgggacctatctttgaagttaatttgaattttgaggtaaaaaattcaaaaggacaagccattcagtttggatctataggtggaggaggaagatacgataatcttgtaagcaattttggaaatcttgattgccccgcaactggaatatcaattggtcttgatagacttgtatttgctttgatgcagaaaaaagattttaaaataaaatctacacgaccagtaatcatatgtgttttcgataaagacaaaatcaaagaatatatcgatatattaaataaacttagggcttcaaacgtcagttctgagatttatccaggggaaggtaagttaaaaaaacaaatggagtatgcaaataaaataaattccccagctgttattttatatggtgatgatgaaatgaaatcaggaaaagcaactttaaaaaatcttgaaaccggcaaagagagttccgttaaaattgaggatttagcaaatgaaatcaaaaaattactctgaa

SEQ ID NO: 302286 - DNA, 420 bp, Unknown
  Bacterial polypeptide expressing nucleotide sequence isolated from the Sargasso Sea
taggtggaggtggcagatatgataaccttgtaagcaattttggaaatcttgattaccctgcaacaggaatatcaataggtctagatagacttgtttttgctttaatgcaaaaaaaagatttcaaattaaaatctacaagaccaatcatgatttgtgtatttgataaaaataataataagcaatacgtagaaatattaaataaacttagggaagcaaatataagctctgaaatttatccaggcgaaggaaagttaaaaaaacaaatggagtatgcaaacaaaacagaatgtcctggagtgatattttatggtgacgatgaaattaaaaaagctgaagtaaaatttagaaatcttaaaacaggcgaagaaacatctataagagttgaaaatttatcaaatgaaatcaaaaaacttatctgaa

SEQ ID NO: 302287 - DNA, 735 bp, Unknown
  Bacterial polypeptide expressing nucleotide sequence isolated from the Sargasso Sea
tttcaaaaatgagtcaaaaaagtattcatattttggaaaaatgtttcgatatgaaaatcctcaaaaaaatcgttacagagagttcgttcaggctggtgcagaaatagttggaactattgatgagtactcaaacttacaaattctgaaaacttcaataagatttttgaaattattaaaagtaaattcaaaattaaacataaacacaataggaactaaagaagaacgggaagaatatataagtgaacttgataagtactttaataaaaataaaaaagaattatctaaagaaagcgttgataaaattggaaaaaatactttaagaattcttgattcgaatgatccgtttgataagcaaatcatcgatttagcaccagttatttatgactttctaaatgatgacacgttaacccaatatgaaacttttaaaaaagagttaacgaaggaaggtatagattttgtagaaaatccaaaactagtaaggggattagattattacaatgatttaacttttgagtttgtagctaatggaacagtcgtaggaggtggtggtaggtatgacagtctttcagaaattcttggtttagggaaattatcaggggtaggcgtagcatttggagttgatagattaataaatattgttaaatccattccttctaaaactagagtaatgttgatagctcaaaatttgacagatttaaatttagtcagttcaaaattagacaaagctggaatagg

SEQ ID NO: 302288 - DNA, 550 bp, Unknown
  Bacterial polypeptide expressing nucleotide sequence isolated from the Sargasso Sea
tttcgatgagctttgcgtacttttagatactttaaacatcaaatatgaagtcgattcttttttagtaagaggtttggattactattcaaggacgacattcgagcttttatcgccatcactgggtgcacaaaatgcaatctgcggaggtggaagatatgataagttggttgagatgattggtggaaagccgactcctggtattgggtttgctgctggaatagaacgaattatgatgacgttacaaaactaccccgacaacaacagtattgatatttatgtagttggtatcggacctaaagttaaacagactgtttttgcgctcactgatgaattacgacaaagtaatctatcaacagaatgcgatatgttacgaaggtctattaagtcccaattaagggaggcaaataaaattggtgcaaagtatgctatcatcattggagacaaagaatttgaaaataaacttgttgaagtaaaaaatttaaaaaacggtgaacaagaaaaagtagcaattaaatcaattattggccatatgacatctttgtcattttag

SEQ ID NO: 302289 - DNA, 484 bp, Unknown
  Bacterial polypeptide expressing nucleotide sequence isolated from the Sargasso Sea
catgtcacgacttcagcctgcccgcggaaccgcagatattcttcccaataatatggccaagcacaggctggttattgaggctgcgcgcactgccgcttcgcgttatggctttcaggaaatggcaacgccaattttcgaattttcagaagtattttctcggccacttggtgaaactagcgatatcgtaaccaaagaaaactatagttttactgaccgtggtggagaaatgctgaccttgcggccagaaaatacggctggtgtagtgcgcgccgtgatttctggcgggctgacacaaaatcttccattaaaatatttttatgctggaccaatgtttcgctacgagcgcccgcaaaagggccgactgcgccaatttcatcaggttggaattgaatatctgggcccagatcattcgttagccgatgccgaaattattgcctgtggagcccggcttctggccgctcttggcgttcttgatgattgcgtg

SEQ ID NO: 302290 - DNA, 883 bp, Unknown
  Bacterial polypeptide expressing nucleotide sequence isolated from the Sargasso Sea
cagtcaaatctaattgatgctgaattatgcgttatggttgtaaatattttgagaaggctgggtttaaatgattctcaatttaaaattaaatattcaaatagaaaaatttggacaagtctttttgagaaaataaatgcttcgaaagaagttgagtcaaaaattcttagagcagtagataaaaaagatcgtctaggtgatgaaggtgttaaagagttattatgtgagggtagaaaagataaatctggtgattttatggaaggcgtgggtcttgatagtgaacaagcatcaatgattttagactttatgaacgaccagaagcaaacgagtgatgatattgatgagtttaactcttatctagagaattttgcagattatccaatttcatttgatccatccattgtaagaggattggattactatacaggcatgatttttgaagctgaattattaattgatgtaaaaaatacaaaaggtgaaactatagtttttggatcagtggctggaggaggaagatatgacaaactgatatcaagatttgggaaagaggacgttcccgctactggtatttctgttggtgttgacaggcttattgtcgctctagagcagttggatctcattaaagccaaatcgagacctttagtaattgtagcaaatttaggagacaataatttatccgagtatattcgaatagcatctgaaattagagatgcagggatggcctgcgagatttcttttggctcaaaaaacttagctaagcaacttaaatattgcgatcgcaagcaagctgatgcagttgtaattgcaggtgatgatgaaattaaaaacaataaaatatcacttaaagatttaaaagagggaagtgagatttcaaaaaatataactg

SEQ ID NO: 302291 - DNA, 335 bp, Unknown
  Bacterial polypeptide expressing nucleotide sequence isolated from the Sargasso Sea
catggaaaagattaattcattaacaggaatgactgatttgattgagactaaggcagatgagaatgtgttagccaataaagtattccaaaccgaaaaaatattgaaaggaatttttactaattatgcgatgtctgaaatcagaacacctgctctggaaaatacaaatctttttaagagatctgtaggcgatacttcagatatagttaataaagaactctatactttctcagataaaaatgacaaaagcataacattgagacctgaaggaactgcaagtgttatgagatctattattgaaaaaaaattagatggagaaactcataagttatggtatt

SEQ ID NO: 302292 - DNA, 786 bp, Unknown
  Bacterial polypeptide expressing nucleotide sequence isolated from the Sargasso Sea
gaaataccaaagccattcaaacgttatcaattaggttctgtttggagaaatgaaaaacctggacctggaagatttagagaatttttacaatttgatgcagactatgttgggacaaaaaatttgcaagcagacgctgagctttgtgtattaatttctgagatattagaaaagtgtggtttagataaaaaagattatacagtaaaaatttcttctagaaaaataacagataaattatttgaaaagcttaaaattacatcgagagatcaagtttccactactctgagagccctagataaaattgacagacttggctgggaagaggcaaaaaaactcctcggagagggtcgaaaagataagtcaggagattatacaaagggagcaaaacttagtaacgaccagataaaaacaatcgagtctactttgcagggtaaaagttctgatagcgaagatattttagaaattctgaaaatattcgaagcttacaattttaagaattacaaatttgatccatcagtcataaggggcctggaatattacaccggacccatttttgaagttaatttaaattttcaagttaaaaattcaaaaggacagaacattcaatttggatcaataggtggaggaggaagatatgataatcttgtaagtaattttggaaatttagattgtcccgcaactggaatatcaattggtctagacagacttgtatttgctttgatgcagaaaaaagattttaaaataaagtctacacgaccagttattatatgcgttttcgataaagataaa

SEQ ID NO: 302293 - DNA, 553 bp, Unknown
  Bacterial polypeptide expressing nucleotide sequence isolated from the Sargasso Sea
gacgacaagaaaatatcatatattcaaaattctaatctggtaagaggacttgattattataataaaacagtatttgagtacatagataataccgaaaactctcaaaatacaatatgtgctggcggtagatatgactatttattcgaaagcctatgtggcaaagaggtgccagcattaggttttgcaataggaatagaaagactgatggactttattaatttaccaataacgaataaccagatagtacaattctatttaattgttttagacgaggaaaatcactcatattcacaaactgtagcaaaaattatcagaagtacttcagaaaaatttactgttcttcacagttacagctataaaaatttaaaaacacaattgaaaaaagccgacaaattatcattagactattgtgttattataggaaatgaagaacgcaaaaaaaatatttgtcaaataaaaaagatgaactcaggagaacaggaagatatttgtattgataaattaactgatttcttaaaagaaaaaattatagcaggaatacaagatgagtagc

SEQ ID NO: 302294 - DNA, 981 bp, Unknown
  Bacterial polypeptide expressing nucleotide sequence isolated from the Sargasso Sea
ttacccgataaagatagaccagatcaaggagtattctctttcaaagacgaaaggatctggctttcgctacgatatgatctaaccgcacctctagcgaggtatgttgcaaaaaattatcttgaactagctaagccttttaaacgttatcaattaggaacggtatggagaaatgaaaaaccaggacctggtagatttagagagtttttacaattcgatgcagattatgtcggaacaaaaaacttacaatctgatgcagaactttgtgtattaatatctgagatattagaaaagtgtggactagataaaaaagattatactgttaagatttcttctagaaaatttactgacaaactctttgagcaattaaaagttaaatcaaaagaacaaatatcaacaactctacgtgctctggataagatcgatagacttggatgggaagaagcaaaaaaacttcttggagaaggtagagaagacaaatctggagattatacaaagggtgcaaatcttaataaagaacaaataaaagttattgaaaatgctttaaataacaaaacatctgaaagtgaagatgttttagagattatcgaaatatttaaaggttataattttaaaaattacaaatttgacccatcagtgataagaggtttagaatattatacaggacctatttttgaggttaatttaaattttgaggtgaaaaactcaaaaggaaaagctattcaatttggttcaataggtggaggtggaagatacgataatcttgtaagtaattttggaaattttgattgtccagcaactggaatatcaattggtcttgataggcttgtttttgcactgatgcaaaaaaaagattttaagataaactctataagaccagtaatgatatgtgtttttgataaaaataaaatatatgattatattaagatacttaaaagtcttagagcatcaaatatcagttctgagatctatccgggagaaggt

SEQ ID NO: 302295 - DNA, 791 bp, Unknown
  Bacterial polypeptide expressing nucleotide sequence isolated from the Sargasso Sea
tttacaataaaattttcttccagaaaaatacttgaaggtttgttagatcgctatgaaattaaaacaaaagagagacgactcaaagttttaagatcacttgataaagttgatagactagggtggaaagaagtaaaaaaacttctaagttcaggacgaaaggatgaatcaggagattttactgagggggcagacttaacaaaagatatgattgatgatctacaaagtcagttaaaatatgatgatgatggaacattcgcttatgatgaatgggataaaaaagtaaatgaaagtgcatataatgatgttaagaaactaaaagaaaattttgatttttacggtttaaaaaatattaaatttgatcctacaattataagaggtttagaatattatacaggtcctatcttcgaagttaatttaaactttgaagttaaaaatattaaaggagaaaatattaattttggctccataggtggtggaggaagatatgataatcttgttagcaattttggaaattttgactatccttcaacaggaatatcaattggcatcgataggctagtttatgcattaacgcagaagaaagactttaatttaaaaccctctaggccagtagttatatgtatttttgatcaaaaaaatattaaaaattattttgatatacttaataaactaagattatcaaatatcagttcagaaatttatccaggagaaggtaaacttaaaaaacaaatggaatatgcgaataaaataaaatctccatgtgttattttttatggggatgatgaaataaa

SEQ ID NO: 302296 - DNA, 435 bp, Unknown
  Bacterial polypeptide expressing nucleotide sequence isolated from the Sargasso Sea
ataatctatcacatataaaattatgtgatatgaagatggtttatgacttaaatgaattagaagaaacacataaaacatatgtagaggaaggatacgaaggactgattataagaagtcaagatggtaaatatgagccagatcatagaagttcatcattgttaaaattaaaatcatttaaggatgatgaatttgaaatagtaggatttaaagaaggaaaaggaaacgacaaaaaaacaattatatttacatgtcagacaatgagcgataaaaagttatttgaagtaagaccaagaggaacgcgagatgaaagaatgaagatgtttaaaaatggtaatagttatataggtaaaaatttaacagttaaatactttgaattaacagacgaaggtataccaagatttcctgttggtatagcagtaagagattatgagtaaa

SEQ ID NO: 302297 - DNA, 679 bp, Unknown
  Bacterial polypeptide expressing nucleotide sequence isolated from the Sargasso Sea
gatcttaaagatatatctctgcacataaactcacttggatcaactgatgagagagctaaatactccacaaaattaaaggactattttaataagtattcaaattcatttaataaccaacaaattaatactatcaatagaaaccctctaagattacttgataacaaagatagtaaactagaagatgttataaataattctccagttatctcagattatttaggtaaatcctctctttctagattcgaggatataactaattctttgagtatccttggcatagactttacattggataccagactagttagaggattagattactataatgacctcgtttttgaatggaaaactgataagctgggaacacaagacgcaatttgtgctgggggaagatacgatagtttgtctaaatcaataagtgatattgaaattccagccgtaggctttgctatgggcgttgatagaattgtagaattaatcaacataaataatatcgagcacgtaataggtttatctgtaatcacagataataaagctgatttacataaagtatcctcacagctgagacaaactaatacaaaatttagactagtgcaaatggatattgataaatccttatctaaacaaattaaatcagcggtgaagcacaactgtgacattttaataattgtagggagcg

SEQ ID NO: 302298 - DNA, 534 bp, Unknown
  Bacterial polypeptide expressing nucleotide sequence isolated from the Sargasso Sea
aatttgatccatctgtaatacgaggtttggaatattatacggggcctatctttgaggttaatttaaattttgaggtaaaaaatataaaaggacaaactattcaatttggctcaataggtggtggaggcagatatgacaatcttgtaagtaactttggaaatcttgactatccggcaaccggaatatcaattggtttagatagacttgtatttgctttaatgcaaaaaaaagattttaatattaaagctacaagaccagtagttatatgtgtttttgatcaaaataacaccaaacaatatgttggtatattaaacaaacttagatcatccaatataagttcagaaatttattcaggagaaggtaaattaaaaaaacaaatggaatatgcaaataaaatacaatccccttgcgtaattttttatggtgataacgaagaaaaaaaagctgaagttaaattaagaaatcttaaaacaggtgaagaattatctgtaaaaattgaaaatttaatcaatgaaatcaaaaaaattatctgag

SEQ ID NO: 302299 - DNA, 919 bp, Unknown
  Bacterial polypeptide expressing nucleotide sequence isolated from the Sargasso Sea
atcactacgatatgatcttacagcaccactagcaagatatgttgcaaaaaattttaatgaaattccaaaaccttttaaacgttatcaactaggaactgtttggagaaatgaaaaaccgggacctggaagatatagagagtttcttcaatttgatgcagattttgtgggaacaacaagtttgcaagctgatgctgaactttgtgtattaatatccgaaatattagaaaagtgtggacttgataaagctgactatactgtaaaaatttcttctagaaaatttacagataaattatttgaaaaattaaaaattaaatcgaaagtccaaatatcaactatacttcgtgctcttgataaaattgatagactcggttgggaggaagcaaaaaaacttcttggagatggtagaaaagataaatcaggagattatacaaaaggtgcaaatcttataaatgaacagattaaaataatagaaaatgctttaaagagcgatgttcctgatagcgaagatgtcttagaaattataaaaatatttgaagcatataactttaaaaattataaatttgatccatcggttatacggggtttagaatattacacaggaccaatttttgaggtcaatttaaactttgatgtaaaaaatttaaaaggacaaacaatacaatttggctcgataggtggcggaggaaggtatgacaatcttgtgagtaattttggaaatcttgactgtccagcaacaggaatatcgattggtcttgataggcttgtttttgctttaatgcaaaaaaaagatttcaaaataaagtctacacgaccggtggtcatatgtgtttttgatcaaaacaaaactaaacaatatattgatatattaaataaacttagatcgtccaacatcagttcagaaatttatcctggagaaagg

SEQ ID NO: 302300 - DNA, 664 bp, Unknown
  Bacterial polypeptide expressing nucleotide sequence isolated from the Sargasso Sea
tacaaagggcgcaaatttaagttctcaaaatatagatgttatagaaaaagaattaaagaaaaagacacctgaaacagaagatctaaaagaggttttaaaaatttttaaagattataattttaataattttgaatttgacccatcaataattaggggacttgaatattataccggcgtaatatttgaggtgaatttaaaatttgatgtaacaaataataaaggtcaagtaattcaatttggttcaataggaggcgggggaagatacgataacttagtaaacaattttggcaactatgacgctccttcaacaggaatatcaatcggattagatcgattggtttatgctttaatgcaaaaaaaagattttaaaataaaaagatctaagcctgtcgtgatttgtgtttttaataaaaattcaatgaaagagtacatcaatgttcaaacaatattgagaaaagcagatattagtgtggaaattttccctggtgaaaataaattaaaaaaacaaatggagtacgcaaataaaatcaaatccccagctgtaattttatatggtgaagacgagataaaattaggtaaaccaactgtaagaaatctagcctcaggtagcgaacaatcaattgaaattaaagaattagtaaatgaaatcaaaaaaattatctga

SEQ ID NO: 302301 - DNA, 736 bp, Unknown
  Bacterial polypeptide expressing nucleotide sequence isolated from the Sargasso Sea
tttgaaattattaaaagtaaattcgaaattaaacataaacacaataggtactaaggaagaacgagaagaatatataagtgaactagataagtactttaataaaaataaaaaagaattatctaaagaaagcgttgataaaattggaaaaaatactttaagaattcttgattcgaatgatccgtttgataaacaaatcatcgatttagcaccagttatttatgactttctaagtgatgaaacattagcccaatatgaaacttttaaaaaagagttaatgaaggaaggtatagattttgtagaaaatccaaaactagtaaggggattagattattacaatgatttaacttttgagtttgtagctaatggaacagtcgtaggaggtggtggtaggtatgacagtctttcagaaattcttggtttagggaaattatcaggggtaggcgtagcatttggagttgatagattaataaatattgttaaatccattccttctaaaactagagtaatgttgatagctcaaaatttgacagacttgaatttagtcagttcaaaattagacaaagctggaataggttatttattgcctgttagagacagtaaagaaaatactcaatacaaagaagctatcaaaaacaatgttgactatgttataaattgttctgaaaatactattaagaatattaacaataacgaatctatcaagtttaatataagtaacttacgaaaattattatga

SEQ ID NO: 302302 - DNA, 991 bp, Unknown
  Bacterial polypeptide expressing nucleotide sequence isolated from the Sargasso Sea
aaagaagttatgatcaagtacgtttttcaatatctcgaaacaccaagtttcgagtattcggatagtattggcaaattttacccagataaggaaagaccagactccggggtattttcttttaaagatgaaaataagtggatgtcccttcgttatgatctcactgctcctctagcaaggtatgttgcaaaaaattatctagaaataccaaaaccattcaaacgttaccaattaggcgctgtttggagaaatgagaaacctggaccaggaagatttagagaatttttacaatttgatgctgactatgtgggaacaaaaaatctccaggcagacgcagaactttgtgttttaatttctgagatattagaaaagtgtggtttagataaaaaagattatactgtaaaaatttcatctagaaaattaacagataaattattccaaaatttgaaaattacatctaaagatcaaatctcaactacgctgcgagcccttgataaaattgacagacttggttggaatgaggcaaaaaaacttcttggagagggtcgaaaagataaatcaggagattatacaaagggagcaaaccttagtaatgatcaaatagaaacaatcgaaactaccttaaaagataaaatccctgatagtgaagatatcttacagatcataaaaatatttgaggcttacaattttaaaaattacaaatttgatccatcggttataaggggactagaatattatacaggaccaatttttgaggttaatttaaattttcaagtaaaaaatttaaaaggacagactatacaatttggatcaatcggtggcggaggaaggtatgataatcttgttagtaactttgggaatttagattgtcctgcaactgggatttcaattggtttagatagacttgtatttgccttgatgcagaaaaaagattttaaaataaagtccacacgacctgttattatttgtatttttgataaggataaaatcaaag

SEQ ID NO: 302303 - DNA, 385 bp, Unknown
  Bacterial polypeptide expressing nucleotide sequence isolated from the Sargasso Sea
cttggtgaaggtagaaaagataaatctcggggactatacaaagggtgcgaaccttaaaaatgatcagattaaaataatagaaaatgcattaaagagcacagcaccagatagcgaagatgttttagaaattatcaaagtatttcaggcttataactttaaaaattataaatttgatccgtcaattatacgaggacttgaatattatactggtcctatttttgaggttaatttgaactttgaggtaaaaaattcaaaaggacaaccaattcaatttggatcgataggtggaggaggaagatatgacaatcttgtaagtaattttggaaatcttgattgtcctgcaacaggaatatcaattggtttagataggcttgtatttgctttg

SEQ ID NO: 302304 - DNA, 611 bp, Unknown
  Bacterial polypeptide expressing nucleotide sequence isolated from the Sargasso Sea
attaaaaaattttttaagtagtcaatcatcagatatttttagtgaattcaaagataattgcaaagaattaaaaataccaattgttgttgatgacaacctagttagaggactagattattataataatatttgctatgaatttgtttcaaaagatattggttcacaagattcttttttagcaggtggaagatatgatgggttaataaaaaaaatggggggccctgattatccagggtgcggttttgctgctggcgttgaaagaattagattgttatgttctaaaaattttaaattaccagtcgatattaattatgttgcgattgctataggaaataaaaataaaattagagcaatgaaaataataaataaatttagagacgaatttgaatttaataagtatttttctatagattttatttgcagagatgatttatcaaagggccttagatatgctagcgaaaagaaagcagattttgctttaattttgggcgatgatgaaatattaaaaaaagaaattacaattaaagaattaaaatcacgtaaacaaattaaaataaacatatcaaatttatttaattatctattagaaccaaaaaaaattaaattttaaa

SEQ ID NO: 302305 - DNA, 540 bp, Unknown
  Bacterial polypeptide expressing nucleotide sequence isolated from the Sargasso Sea
attataaatttgatccatcggtgataagaggactggaatattatacaggacctatttttgaagttaatttaaattttgaggtgaagaattcaaaaggacaagctattcaatttggatcaataggaggaggaggaagatatgacaatcttgtgagtaattttggaaattttgattgtcctgcaactggaatatcaattggtcttgataggttagtgtttgcattgatgcaaagaaaagattttaaaataaagactattcgaccagttgtcatatgtgtttttaataaaaaacaaaacaaagaatatgttgcgatattaaatacacttagaatgtcaaatatcagctctgagatttatccaggggaaggtaagttaaaaaaacaaatggagtatgcaaataagataggatctccagctgttattttatatggagatgatgaaataaaagcaggaaaagcaactttaaagaatcttaagtcaggtaaagaaacatccgttaccattgaaagtttaagcgatgaaattaaaaaaattatctgaa

SEQ ID NO: 302306 - DNA, 233 bp, Unknown
  Bacterial polypeptide expressing nucleotide sequence isolated from the Sargasso Sea
gaaatatgcttaaaaactttcaaaagttttaattacaaagaatttagaacacctttactagagaatagcgcgctattttcaagaagtattggccttacctcagatattgttcaaaaagaaatgtatgagttcaaagataaaaaaggagaaaggctttgcatgagaccagaaggtactgctggcttagtacaagctttaattaccaatgggctcgatgatgaacaaataaaaaa

SEQ ID NO: 302307 - DNA, 881 bp, Unknown
  Bacterial polypeptide expressing nucleotide sequence isolated from the Sargasso Sea
atctgagatattagaaaaatgtggactagataaaaaagattataccgtgaagatttcttctagaaaattcaccgataaactctttgagcaattaaaaattaaatcaaaggaacaaatatcaactactttacgtgctcttgataagatcgatagacttggatggggagaggcaaagaaacttcttggaggaggcagaaaagacaaatctggcgattatacaaagggtgcaaatcttaataatgatcagataaaaataattgaaaatgctttaaaaagcaaaacatctgacagcgaagacgttttagaaattataagaatatttgaagattataaatttgaaaattataaatttgatccatcggttataagaggtttagaatattatacaggtcctatttttgaggttaatttaaattttgaggtaaaaaattcaaaaggacaagccattcaatttggttcaattgggggaggcggaagatacgataatcttgtaagcaattttggtaattttgattgtcccgcaacaggaatatcaattggccttgatagacttgtatttgctttaatgcaaaaaaaagattttaaaataaagactactcgacctgtagttatatgtgtttttgataaaaacagaaacaaagaatatgttgggatattaaataaacttagaatgtcaaatatcagttctgagatttatccaggagaaggtaagttaaaaaaacaaatggagtatgcaaacaaaataggctctccggcagctattttgtacggcgatgatgaaataaaatctggtaaagctactttaaaaaatcttaaatctggcaaagaaacttccgttacaattgaaagtttaagcgatgaaatcaaaaaaatactctgaa

SEQ ID NO: 302308 - DNA, 867 bp, Unknown
  Bacterial polypeptide expressing nucleotide sequence isolated from the Sargasso Sea
taggcttttctgctgttacagagctacttggtaagggtagaaaggataaatcaggcgatttcacaaaaggcgcagagcttaagaatgaacaaatagataaaataattaatttcttaaagcagggcgataagagtcaaaagacagatagaaaatctgcactagaaaaattagaaaaggatttttgtgatagtgataaattttctgatgcagttattgagctcttggctatttcagatatcttagatggcgcagggtacaatgaagatagagttgctatagacccatcagtagtaagaggattaggatattacacagggccagtttatgaagcagatcttattttcccaaaaaataatgatttacaaaactttggtgctgttggagggggaggtcgttacgacagtctcgtagaaagactgaaaggagtaaaagttccagctacaggaatttcaataggtgtgagtagattaatgacagccctaaaacttttggatcaaaaagttaataacaaaagtgaaattgatgttgttgttttgttaatgaacaaagatgatcaagtttattattttaacttagcatcaaaacttagagatcaaggtttattagcagatttatatgttggcgatggaagtatgaaagcccaattaaaatatgctgataaaagaaatgccaaaattgctttaattataggtgatgatgaaaagcagaataacactgtaacaattaaagatttaaataaaggaaaacaattatctaaagacattagtaaaaatgaagaatggcgatcaagtaaagatactcaagtgaatgtccctcaagaagaaatgatcaagacgataaagtctattttatctaaaagttcataaa

SEQ ID NO: 302309 - DNA, 882 bp, Unknown
  Bacterial polypeptide expressing nucleotide sequence isolated from the Sargasso Sea
attgccaaaaggatttaaagataatgacgagattacaattagtgttcgaaaaaaagtttcgaagacaatagaagaagtgtgtcaaaattttggatttagagagttagaaactcctgcatttgaatttacagaagccttaggaaaattcttgcctgatattgatcgtccaagtggcggagtattttcaattcaagatgaagataatcaatggatatctttacggtacgatctcacagcaccattagctcgttttgttgcagctaattatcaaaatattgtaaagccgtttaaacgctatcagagtggaaatgtttggagaaatgaaaaacctggaccagggcggtacagagaatttagacaatttgatgcagatgtcattggtgttcaaagtgctaatattgatgcagagctttgtgttatggttgctaaaatttttgagaaacttggtctcagttcaaaagattatagaattaaatattctaatagaatgatttggaatgatttgtttaatgaaactgatattccattaaaccagatttcagacgtgttaagggctatagataagcttgatcggtttggtgaggatggagttagagagctgcttacaactgggcgaaaagatcagtcaggtgatgtgatgagtggggttggcctatcagatgagcaagcagagtcaatcgtccaatttataaaaaatggagataaatcaaatgaacaaattttagattttgaaaattatttatctaacttcccaaatttatcgattgattttgatccatcagtcgtcaggggacttgactattatactggaatggttttcgaggcagaattattattcaaggtaaagaataataagggcgtagatgttgtttttggttctgt

SEQ ID NO: 302310 - DNA, 415 bp, Unknown
  Bacterial polypeptide expressing nucleotide sequence isolated from the Sargasso Sea
cctgggtggcggcagatatgacaatttatcaaaacaacttggagggaaagacatgcactctattggttttgcaataggggctgaaaggatcattgagttagtaaacatggatgattctaacgaaaaaataaaagttggatttattgtaagtgagcagcagattaatcaaaaaacatataaaatagccgatgatttaagatcagctaatagcagtattattcttgacacttttttaagtggaggaagtatgaaatctcagcttagaaaagcgaataaatgtggatgtagttacgccataattattggagaagaagaattaaaaagcaatcaagctatatggaaagatcttcgtgaggatggtgggcaagaattgttaagcttgcaagagttaatcaatcaatatatcaatctatag

SEQ ID NO: 302311 - DNA, 873 bp, Unknown
  Bacterial polypeptide expressing nucleotide sequence isolated from the Sargasso Sea
atggatatgatttaatagaattgccaacaattgaacataaagaattatttgataagtctattggtgaaaattctgaaattgttacaaaacagatgtatgaatttaaagataaaggtaatagagatcttgttttaaggccagaagcaactgcgagtgtagtaagatttcataatgaatttttcaaaaatgagtcaaaaaagtattcatactttggaaaaatgtttcgatatgaaaatcctcaaaaaaatcgttacagagaattcgttcaggctggtgcagaaatagttggaactattgatgagtactcaaacttacaaattctgaaaacatcaataagatttttgaaattattaaaagtaaattcgaaattaaacataaacacaataggtaataaggaagaacgagaagattatataagtgaactagataagtactttaataaaaataaaagagaattatctaaagaaagcgttgataaaattggaaaaaatactttaagaattcttgattcgaatgatccgtttgataaacaaatcatcgatttagcaccagttatttatgactttctaagtgatgaaacattagcccaatatgaaacttttaaaaaagagttaacgaaggaaggtatagattttgtagaaaatccaaaactagtaaggggattagattattacaatgatctaacttttgagtttgtagctaatggaacagtcgtaggtggtggtggtaggtatgacagtctttcagaaattcttggtttaggtaaattatcaggggtaggcgtagcatttggagttgatagattaatcaatattgttacatccattccttctaaaactagagtaatgttgatagctcaaaaatttgtatgat

SEQ ID NO: 302312 - DNA, 684 bp, Unknown
  Bacterial polypeptide expressing nucleotide sequence isolated from the Sargasso Sea
aatgaataaagaaaaacaaataaaagcaactttacctagtggttttaaagatagatcaggtgatgagttagcattaaagaagaaattattagatataattgaaaaaaatttcattaaatttggttttagtccattagagactagtccaatggaattaagttctgtaattggtaattcattagcagaggatgacgataacccaatggcagatatttttacatttgatgactctggaactgatatatctttaagatatgatttatcccaaggatgtattcgctactatagtcaaaattatttaaaattacctaatccttataaacgttatcaggttggagaaactgtctatagacgagaaaaaccgggaaatggcagatttaaatcattcggccaatgtgacgttgacattattggtaaatttgatgttaaacaagcgaatgctgaactttgtaatattatagcaagtacttttatagaatgtggacttaaaaaatctgaatttgttataaacgttagtaacagaaaagtaatccaaggcttgatggatgaacttaaaattgtagatgaaaaacaaaagcaaaaagttttacgtgctatagataaacttgataaagaaggatttggcattaaaggtgtagaagaattattaaaaactgagagaaaagatagtagcggagctattac

SEQ ID NO: 302313 - DNA, 754 bp, Unknown
  Bacterial polypeptide expressing nucleotide sequence isolated from the Sargasso Sea
ttgcgcgctcttgataagatcgataggcttggatggggagaggcaaagaagcttcttggagaaggcagaaaagataaatctggagattatacaaagggcgcgaatcttaatagcgatcagataaaaataattgaaaatactctaaaaagcaaaacacctgacagtgaagatgttttagaaattattaaaatatttaaagattataattttaaaaattataaatttgatccatcggttataagaggtttggaatattatacaggacctattttcgaggttaatttaaattttgatgtaaaaaattcaaaaggacaagctattcaatttggctccataggaggaggagggagatacgataatcttgtaagcaattttggaaattttgattgtcccgccaccggaatatcaattggccttgatagacttgtatttgctttaatgcaaaaaaaagactttaaaataaggactacgcgaccagtagttatatgcgtttttgataaaagcaaaaacaaagaatattttgaaatattaaataaacttagaatgtcaaatatcagttccgaaatttatccaggggaaggcaaattaaaaaagcaaatggagtatgcaaataaaattggatctccagctgttattttatatggcgatgacgaaataaaatctggaaaagcaacattgaaaaatcttgaaagtggcaaagaaagcttggttaaaactgaggatctagcaaatgaaatcaaaaaattactctgaa

SEQ ID NO: 302314 - DNA, 506 bp, Unknown
  Bacterial polypeptide expressing nucleotide sequence isolated from the Sargasso Sea
ccctaaactagtaagaggttggatttattatacaaaaactgtttttgagataacctctagtgagcttggctctcaaaacgcattattaggtggtggtagatatgataaccttgttgcaaatttaggcggcaagccaaccccgggcattggttttgctgcggggatggagcgtattttacttttgattaatgaaaaacaacaaaaagaaaataaaccatcacccgatatttattttatttgtcttgaaaaatcaggattaccacgtgcgctcagtttatctaataaattgaggatgaatggatttaaaataatttcagactctcttcgtaggagcatgaaagctcaaatgcgcgacgcaaataaatcaggagcaaaatatgttttaattttaggcgaaaaagaattgtcggaaaacactattctatttaaaaatctggaaaacagtcatcaaaaaattattgaacagaaaaagattattaagttttttgataatctgacaaattaaa

SEQ ID NO: 302315 - DNA, 583 bp, Unknown
  Bacterial polypeptide expressing nucleotide sequence isolated from the Sargasso Sea
ttggttgaaatatttaaaatttttaaagattacgatttcgataattttgaatttgatccatcagttataagaggtttagagtattatacaggtgcaactttcgaagtaagtctaaagtttgaagtaagaaacaataaagggcaagtcattcaatttggctccataggcggtggaggtagatatgataatttagtaaataattttgggaactttgatgctcctgccacaggtatatctataggattagatagattggtttatgcattaatgcagaaaaaagattttaaagtaaaaaaatcaaaacctgtcgtcatttgtgtttttgataaaaattcaatgaaagaatacataaaggtgcaaatgatattaagaaaagccggtatcagcacagaaatttaccctggagaaaataaattaaaaaaacaaatggaatacgcgaataaaataaaagctccagctgttattttatatggtgaagatgagattaaatcaggcaaaccaaccttaagaaatttgagcagtggaaaagaacaatcaattaaaattaatgaattaatcaatgagattaaaaaaattatctgaa

SEQ ID NO: 302316 - DNA, 301 bp, Unknown
  Bacterial polypeptide expressing nucleotide sequence isolated from the Sargasso Sea
gtagtttttgaagttaattttttttttgatgtaaaaaactccaaaggacaagtagtacaatttgggtctattggtggaggaggaaggtatgacaatctagtaagcaactttggtaatatagattgtcctgcaacagggatatcaattggtattgataggctagtttatgcattaatgcagaagaaagattttgatataaaacctacaagacccattgttatatgtgtatttgatcaaaataaaattaaagaatacattaaaatattaaaaatacttagatcagccaacattagttcataaa

SEQ ID NO: 302317 - DNA, 925 bp, Unknown
  Bacterial polypeptide expressing nucleotide sequence isolated from the Sargasso Sea
gttcgtgattttgtaatttctaatattaaagaagttatgatcaaatacggatttcaatatctcgagacaccaagttttgagtatgcggatagtattggaaaatttttacctgacaaagaaagaccagatgaaggagtattttcttttaaagatgaaaaaaaatggttgtcacttcgatacgaccttactgctcctctagcaagatatgtagcaaaaaactatcttgagcttcctaaaccttttaagcgctatcaattggggtcagtatggagaaatgaaaagccgggacctggtagatttagggaattcttacagttcgatgcagattatgttggaactaaaaatctacaagcagatgcagaactttgtatattaatatctgaaattttagaaaaatgcggtttagcaaagtcagactatactgtaaaaatttcctctagaaagtttacaaatgaattatttgaaaaattaaaaataaaatcaaaagatcaaatatccacgactctccgtgctcttgataaaatagatagacttggttggtctgaagcaaagaaacttcttaaggaaggaagaaaagacaaatctggtgattatacaaaaggtgcaagtcttaaagatgaacagataaaaattattgaaaatgcaatgaaaagcaaaacatcagaaagcaaagatgttttggaaatcataaaaatatttaaagcttataactttgataactacaaatttgatccatcggtaataagaggcttagaatattatacaggacccattttcgaagttaacctaaattttgaagtaaaaaacttaaaaggacaatccatacaatttggctctataggaggaggagggagatacgataacttggtaagcaattttggaaactttgaatgtcctgccactggaatttccataggtctgatag

SEQ ID NO: 302318 - DNA, 417 bp, Unknown
  Bacterial polypeptide expressing nucleotide sequence isolated from the Sargasso Sea
aagacaccttattgggtggaggaagatatgatggtttaataaaagtattaggaggacctgatatacccggaattggatgggctgcaggtattgaaagaattgcattattaatggagtctgaaaaaaaaataagttcaacaattcatattgctgtaacaaacgagaaatttatagattattttcttcatttacaaaaatatttatctgaaaatagaatttcatattactggaattataaatacaatctaaaaaaatcatttacaaaagctaatacttcttcagcatctcatataattattattggagaaaatgagtttgacggtaatttttttaccattaaaaatttaatgactggcgaacaaagagaattaaagcttaatcaaatatttaatcatttgaatgataaatctagataaa

SEQ ID NO: 302319 - DNA, 669 bp, Unknown
  Bacterial polypeptide expressing nucleotide sequence isolated from the Sargasso Sea
gatttacaaaaggagcgaatttaaaactgaaagatattaaaacaatagaagaaacacttcagaagaattcacctgaaacagaagatttagttgagatgttagaaatttttaaggattacaattttaataattttgaatttgatccatcagttatacgtggtttagaatattacacaggtgcaatttttgaagtaaatttaaaatttgatgtaacaaacaacaaagggcaagttattcaatttggatccattggaggcggcggaagatacgacaatctggtaaataactttggtaactatgatgcgcctgctacagggatatcaattggtttagatcgtttagtttatgctttgatgcaaaaaaaagaatttaaagtaaaacaatctaaaccggtcgtgatttgtgtttttgataaaaaattgatgaaagattatataaatgttcaaacaatattaagagaagctggcgttagcactgaaatttatcctggagaaagtaaactaaaaaaacaaatggagtatgcgaataaaataaaatctccagcagttatattatatggtgagaatgaaattaaatcagggaagccgactttgaggaatttaaattcaggtgaagaaaaatcaattgaaataaaagaattagttaatgaaatcaaaaaaattatctgaa

SEQ ID NO: 302320 - DNA, 333 bp, Unknown
  Bacterial polypeptide expressing nucleotide sequence isolated from the Sargasso Sea
tttggaatattatacaggtcctatttttgaagttaatttaaattttgaggtaaagaattcaaaaggacaagctattcaatttggttcaatagggggaggcggaagatacgataatcttgtaagcaattttggaaattttgattgtccagcaacaggaatatcaatcggccttgataggctagtgtttgctttaatgcaaaagaaagattttaaaataaagactactcgacctatagttatatgtgtttttgataaaaacaaaaacaaagaatatgttggcatattaaataaacttagaacgtcaaatataagttctgagatttatccaggcga

SEQ ID NO: 302321 - DNA, 912 bp, Unknown
  Bacterial polypeptide expressing nucleotide sequence isolated from the Sargasso Sea
aatgaaaaaccaggacctggaagatatagagaatttcttcaatttgatgcagattttgttgggacaaaaagtttacaagctgatgctgaactttgtgtattaatatctgaaatattagaaaagtgtggattagataaagttgattatactgtaaaaatttcttctagaaaatttacagataaattatttgaacaattaaaaattaaatcgaaagaccaaatatcaatcattttacgtgctcttgataaaattgacagacttggttgggatgaagcaaaaaaacttcttggagaaggtagaaaagataaatcaggagattatacaaaaggtgcaaatcttaaaaaagatcagattaaaataatagaaaatgctttagatagtaaaatatctgacagtgaagatattttagagattataaaagtatttgaggcttataactttaaaaattacaaatttgatccatcggtaataagaggcctagaatattacacaggacctatttttgaggttaatttaaattttgaggtaaaaaatttaaaaggacaaataattcaatttggatcgataggtggaggaggaaggtatgataatcttgtaagtaactttggaaatcttgactgtccagcaactggaatatcaattggtcttgatagattagtttttgctttaatgcaaaaaaaagattttaatataaaaactactcgtcctgtaattatatgtgtttttgataaaagtaagaccaaagaatatgttgaaattttaaacaagcttagaaaagcaaatataagttcagagatttatccaggagatgggaagttaaaaaaacaaatggaatatgctaataaaatagaatcttcatttgtaattttttatggtgatgatgaaataaaaaaagctgaagtaaaattaaga

SEQ ID NO: 302322 - DNA, 931 bp, Unknown
  Bacterial polypeptide expressing nucleotide sequence isolated from the Sargasso Sea
ggattcaaataaattaaaaagagaaatatcaaaaaaaggacttaggtatgatttaactgttccatttgctaggtatgttagtatgaatagggataaattaactctaccatttaaaagatatcaaattcaaaaagtttggagagctgatagaccacagagaggaaggtttagagagttttttcagtgtgatgttgattatattggtacaaagtcaatattatgtgaatccgagattattgaattagtctatacaatttttgataaaatacaattaaaaaatatttctataaaagttaataacagaaaaatattatatggtatttctgaagtattaaatttcgaagaagcatttgataaattttgtattcttatagataaaatagataaaattggaaaagaaaaattcaatgatgagttagaaaaaattcaattttctaaaaaacaaatagatagtataaataatgtgttattttttaacggctcaaataaacaaaaactgatttttttaaaagatttcctttcaaaatctaataagggctcagaaggtttaaatgatattgaaaaattaatgggactttctaagaagtttgattttgatgtaagcttagcaagaggattatcatattatacctcatctatttttgaagtagttgtaaaagacaaaaaaattggaagcctatgtggtggtggaagatatgatgatttgactgaaatatttggatataaaaatatttcaggaattggtatatcatttgggattgaaaggatatatcaaatcatgaatgaagaaggactttttcctaaaaatattgttaattctaaaactattttagttagctgtctttctgaggagtttatgacgaattccttaaaattagcatcaaaacttagagaaaataatataaaaactgatttatatcctgataaccct

SEQ ID NO: 302323 - DNA, 826 bp, Unknown
  Bacterial polypeptide expressing nucleotide sequence isolated from the Sargasso Sea
aacgttaatcctgcacaagctaatgccgagttgtgtaatttgatctcaaatacattgatagattgcggtttaaaaaaagatcagtttaccattaatgtcagtaatagaaaaattgttcaaggtttaattgaagatttgaagattgaaaaaaataaacaaattaaagtaatgagagctatagataagctcgataaaccaggttttggtttaaagggtgttgaagaattattaaaaaaagaaagaaaagataaaagtggagctataacaaaaggagcaaacttaaatgatgaacaagcttcaaaaattttaaattttttaaagattaaagatttaaagaaacttaaaaaaaattttaaaaatcctattacacaagagggcattaaagaattagaagaattatttgaagttttaaattttggaaattactctaatcaagtaaaaacaaattttactatagtaagaggcctagattattacgatggtttttgtgttgaaactaatcttaattttaaaacaaaaaatattaagggtaaggaagttgatattggaagtatttgttcgggtggacagtataataaattaatttcaagatttaagggtgtagatattccagggacaggcttaagtattggcgttgatagattgctgtttgcaatgatgcaattaaatcaaatagaagttgatacacaaaatccagttattgtttgtgtaatggatgaaaaatatttaaaaaattattacgaaattttggataatttaagaaaaaataatatcaattctgaaatatttttggatagtaaaaaaaatctaggtaagcaacttactt

SEQ ID NO: 302324 - DNA, 661 bp, Unknown
  Bacterial polypeptide expressing nucleotide sequence isolated from the Sargasso Sea
cctggaccaggaagatttagagaatttttacaatttgatgctgactatgtgggaacaaaaaatttgcaagcagatgcagaactttgtgtattaatttctgagatattagaaaagtgtaatttagataaaaaagattatactgtaaagatttcatctagaaaattgacagataagttatttgaaaagttaaaaattacatctaaagatcaaatttcaactacgcttagggccctagataaaattgacagacttggctgggaagaggcaaaaaaacttctcgcagagggtcgaaaagataaatcaggtgattacacaaaaggagcaaatctaagcaatgatcagatcaaaacaatcgaaactactttacagaacgaaattcctgatagtgaagatattttagaaattttaaaagtatttgaggcttacaatttcaagaattacaaatttgatccatcagttataagaggattagaatattataccggacctgtgtttgaggttaatttaaattttgaagtaaaaaattcaaaaggacagaccattcaattcggctcaataggcggaggaggaaggtatgataatcttgttagtaattttggaaatttagattgtcccgcaacgggaatatcgattggtctagatagacttgtatttgctttaa

SEQ ID NO: 302325 - DNA, 758 bp, Unknown
  Bacterial polypeptide expressing nucleotide sequence isolated from the Sargasso Sea
ctaacatcagatgatatagtaattcgaataagtagcagaaaggttctggaggaagttttaggttcattaggtgttgagggagacttattcaccaaaacatgtgttatagtagataagatggataaactatcatctgaaatcatagaagaacaattatctgagttaggtcattcttcagacgtaataaacaagattcaaacaattcttgggattaaggatatggacaatttgcgttcctccctggaagattcaagttcggccattttagaattagacactctgtttgatttgattgacgcatatggaatgtctgaatgggttcagtttgatgcatcgatagttcgtggattagcgtattacactggaagtgtgtttgaagctcatgatagagaaggtaagtttagggcaatttgcggtggtggcagatatgacaatcttctatctacattaggtgggaaagatttgccagcaacaggctttggattcggtgatatggtaatcatggaagtgttgaaagaaaaaggtctagttccagaattaatcagtggcgttgatgacatagttattcctttgagtcctgatctaagagatattgcagttagagtagctgcatctttacgtttatcagatagaacagttgatttagtcttagaggataaaaagataaaatgggcatttaagcacgctgaacgtactggtgcaaagagattagttttacttgccccagatgagtggtctcgtaagatgattaaagttaa

SEQ ID NO: 302326 - DNA, 844 bp, Unknown
  Bacterial polypeptide expressing nucleotide sequence isolated from the Sargasso Sea
ggaactgtcgaagcgcttggaaaatttttacctgatgtagatcagccgaatgaaggtgtttttgcttggcaagaagatgacaaagattggttagcacttcgctatgatctaactgctccgttggcaagggtttatgcgcaatacagaaacgagcttccaactccatatcgcaggtattcaatgggtcctgtttggagaaatgagaaaccaggcccaggccgttttaggcagttttatcaatgtgatgcagacacagtagggtcggcaagtatagcagcggactcagaaatttgtatgctcctttgcgatactcttgaaaatgttggaattgcggagggtgactatataattaaagcaaacaatcgcaaagtcctgaatggtgtccttgagagtatgaatattcaagaaacttctaacagagacgcaatacttcgaactgtcgataagtttgataaagttggagagagtggcatacggcaactacttggcaaaggccggcttgatgcatctggggcttacattgatggagtgggtctatctgatagcgaggccgatatagttttggcgttcttaacttctaagggcaccgatattgaaacaacattaagaaatttaaaaaatttgattggatcttctgaaataggactagagggtgtcaatgaactggaaacgatggcagaactctttgaagctggcggatacggctataataagatttcaattgatccgtctgtggtaaggggtttgggctattatactggtccagtttatgaagccgagcttacctttgaaatttttgatgaaaagggaaggacaagacaatttggatcagttgcaggcggtg

SEQ ID NO: 302327 - DNA, 795 bp, Unknown
  Bacterial polypeptide expressing nucleotide sequence isolated from the Sargasso Sea
aaaaattaaatattacctcaaaggatcaaaaatcaaccactctacgtgcgcttgataaaatagatagactaggttgggaagaagctaagaaacttctttctgaaggcagaaaagataaatctggagattatacaaaaggagcgaatcttaaaaaagatcagattaaaattattgaaaatgcattaaatagtaaaaatgctagcagcgaagatgttttggaaattataaaaatatttcaagcttatgattttaaaaattataaatttgatccgtcagtcataagaggtttagaatactacactggacctatttttgaagttaatttaaatttcgaagtaaaaaatttaaaaggacagaacattcagtttggatctataggtggagggggaagatatgataatctagtaaataattttggaaatcttgattgtccagctactggaatatctataggccttgatagacttgtttatgctttaatgcagaaaaaggattttaaaataaaaagcactcggcctgtagttatatgtgtttttgataaagataaaactaaagaatatgtcaatatattaaatcaattgagatcttcaaatgtcagttctgagatttatccaggagagggaaaattaaaaaagcaaatggagtatgcaaacaaaataggctctcctgcagtaattttgtacggagatgatgaaattaaatcgggtaaagcaactttaaaaaatcttgaaacaggcaaagagagctcaattaaaatagaggacttagtaaaaaaaatcaaaaaaattatctgag

SEQ ID NO: 302328 - DNA, 589 bp, Unknown
  Bacterial polypeptide expressing nucleotide sequence isolated from the Sargasso Sea
atcaccatcttatactgattatcttgaacccgatcatctatctatattaaataacttattagatgattttggtgaatcaaacataactatagatccaaaattagtaagagggttagattattacactggattcatatttgaggtaacttcaaaagaattaggatctcaagattcgttcattggaggaggaaggtatgatagtttgttctcatctttgggcggtaaggatattcctgcaataggctttgcaattggtttagagagaatgatttatattatgcccgagtctaccaaagtaaataagaaagtatttattgttaatttaactagtaataattcaagatatccatataaaatagcccaaaatttgcgttcattagatacaaatattgttgttgaagatccattattaacttcaagcgctaagtcgcaattaagacgtgcaaataaaactggtgctacagctgcattgattataggggatgatgaagtctctaaaaatgaagttatttggaaagatttagacgataaaattgagcaacaatctctttcattggacgaattgataaataagtttaaaaagttatag

SEQ ID NO: 302329 - DNA, 914 bp, Unknown
  Bacterial polypeptide expressing nucleotide sequence isolated from the Sargasso Sea
caaatcctatgggctgatattttcacatttaatgacaatggaatagatatttcgttgagatatgatctatcagtgccgcttgctcgtttttatagtcaaaattacttaaacttaccaaatccatataaaagatttcaaattggaacagttttcagacgcgagaagccaggcaatggtagattcaaatcttttgatcagtgtgattgtgatattattggtaaattcgatattagacaagcaaactctgaattaattaaccttataggaagcactttaacaagttgtggtttaaaaaaatctgattttaaaatcaacgtaagtaacagaaaaattgttcaaggtttaatggaagaattaaaaatagttgatgagaagcaaaagaagaaagttttaagagcaattgataaactagataaaccaggcttcggtataaaaggtgttgaggagctattaaaaaaagaaagacgtgattcaagtggggctgtaactaaaggagcaaatttgaaagataatcaagctcaacagataatagactttcttaaaattagagatttaaaagatatttcaaaaaaattttataatccattaatcaaagagggtataaaagaacttgaagatttatttaaaattttaaactatggggattttgcggacttagttaaatttgatccatcaaaaattagaggattagacatttatacaggctttattgttgaaactaatttaaacttcgaggttaaaaattcaaaaggtaaaattatagatccaggatcaatttgtagcggtggtgaatacttagttactaaatataaaggcgagccattccttggtactggtatatctataggaatttcacgtttagtttggtgtttattacaaaaaattaaagatgaaattgaagaacaaaaacccgt

SEQ ID NO: 302330 - DNA, 691 bp, Unknown
  Bacterial polypeptide expressing nucleotide sequence isolated from the Sargasso Sea
tgactctgtactttcgcaattacactcccttgtagatggttctacgttgggggaagctggtgttgagtctcttcgtagtcttataaagcaggtgcacgatgtgggcgtgcctgacgggcgtattactgttgatccctcgattgcacgtggtttggattactacacgggtattgttcttgaaagctttcttgatgaacttcctgcgcttggtagcatttgttctggtggccggtatgacaatcttgctggactgtatacgaaacaacaattaccaggggttggggcatcgttaggtattgatcgacttcttgctggactggaggagttgggaaaactaaccggtatcgagactccagccgaggtctttctgccctacttcgataaacagtatctggggcagtatctcaagattgccagagcccttcgttgtgctggagttgcagtggagttttttcctgagcccaaaaaactaggcaatcaattaaaaaatgcagcaaagaagggcgtcctattcgcgctcattcttgggagtgacgagtttgaatctggttcagcgcaactcaagcatcttgatacccagagaaccgatacaattcactggcaagggaaagagtcaaatcttgttaaagaggtgcagcgggcacttgcatctaaccatcagaattcaattgcttttcgatctcttcaatag

SEQ ID NO: 302331 - DNA, 985 bp, Unknown
  Bacterial polypeptide expressing nucleotide sequence isolated from the Sargasso Sea
aatgtatgaatttaaagataaaggtgatagatcacttgtattaagacctgaagcaactgctagtgttgtgagatttcataacgagttttttaaaaatgaatcaaaaaagtatgcgtattttggaaaaatgtatcgatatgaaagtcctcagaaaaatcggtatagagagtttattcaagcaggagccgaattagttggtacgattgatgatttttctgaactacagatactgaaatcctcaatcaattttttagaaaaattaaatataaatgcaaaacttaatataaacactattggatctattgaagaaagaaaactttatataaatgaactagataattactttaaaaagaataaaaataatttatcaaaagaaagtaatgaaaagattggtaaaaatactttacgaattttggattctaatgaccctttcgattcagaaataattgatcttgcacctgtaatttatcaatatttagatcaagatacgttagacagatatgaaaatttaaaacaaaacttaaaaaatgaaaatatcggatacgtagagaactcaaaactagttagaggacttgattactacaatgacttaacatttgagttcgtttataaagctacagtacttggtggtggtggtaggtatgataagcttgctgaatctttgaaactaggtaattctgcaggagtaggtgttgcttttggtgttgacagaataattaattgtataaattatgtaccttctacaaaaaagatcatgttgattggtcaaaattttgatgatattaaatccgtttctaaaaaattagataaaagtggaattaaatattttttaccaataagaaaaagtaaagagaacacacagtataaagaggctataaaaaacaatgtagactatgttataaactgtactgaaaagaccattaagaatccaaaaaatagtgaatcatttgaatttaatatacgaaacttgaagaagttaatatga

SEQ ID NO: 302332 - DNA, 1390 bp, Unknown
  Bacterial polypeptide expressing nucleotide sequence isolated from the Sargasso Sea
aatgagtaaaattaaaaataatccaaaggcaattttgccgaagggttttaaagacagtgacattgaaattttaaatcttagaaaaaaagtttctaagataatagagaaggaatgtctaaagtatggatttattgaattagatacatccacaattgaatatactgagagcattggcaagtttcttcctgatgtagacaggcctagtggaggtatattttcatttcaagacgatgatgagaaatggctatcactgagatatgacttaacggcccccttagcaagatacgtagctcaaaattatcaagacctcgttaagccatttaaacgttatcaatcaggactagtttggagaaatgaaaaaccaggaccaggtagatacagagaattttttcagtttgatgctgacgtggtgggagttgattcaacactaattgatgcagagctgtgtgtaatggtatgtgatattttaattgagcttggcctaaatacttcacaatttgaaataaaattttcaaatagggaaatttggacagaacttttttcgaacttagatgttaaagaggacgatttaccaaaaattcttagagcagtagataaaaaagatcgattaggtatagagggcgttaatgagttgcttcaaaaaggaagaaaagatgtatctggtgactttatggagggcgtgggcttaagcgagacagatgctgataaaattatttcttttataaccaattcaaaccaatcaaacgcccagatggaagaattcaactcctatataaaaaatttcccagattatccaattcgttttgactcatcagttgttcgcggtctcgactattacactggaatgatttttgaagcagagcttcttgttgatattaaaaatgagaaaggcgaaaaaattgtatttggatcagttgctggcggtggaagatatgacagacttatttcaagatttgggaaagaggatgttccagctactggtatatctataggtgttgatagattaattgtagcgttaaatcaattagaccttttagataataagaaaaatccattagtggtaattgcaaatttagataatcaaaatatgccggattatatttcaatggctaaagaaattagaaatgaaggtattgcatgtgaaatatcatttggatctaaaaaccttggaaagcaattaaagtattgcgatcgcaaaggtgcagatattgtgatcattgctggtgatgaagaattaaaaaagggtgaaatatcaattaaggatttaaataaaggtaaagaggtttcaaaagatattgtcgatagagacaaatggaaagaggcaaaagctggacaacaaacaattaatcgctctgacctgatgacagcattaaatgaaattttgaattaa

SEQ ID NO: 302333 - DNA, 553 bp, Unknown
  Bacterial polypeptide expressing nucleotide sequence isolated from the Sargasso Sea
ttacaattttatatttttgaatttgatccatcagtatttcggggactagaatattacacaggtgcaatttttgaagtgaatctaaaatttgacgtaacaaacactaaagggcaagttattcaatttggttccataggcggcggcggaagatacgataatttagtaaataattttggtaattatgatgctcctgctacagggatatcaattggtttagatcgtttagtttatgctttgatgcaaaaaaaagaatttaaagtaaaacaatctaaaccaatcgtgatttgtatttttgataaaaattcaatgaaagactatataaatgttcaaacaatattaagaaatgctggtattagtactgaaatttatcctggagaaagtaaactaaaaaaacaaatggagtatgcgaacaaaataaaatctccagcagtaattttatatggtgagaatgaaattaaatcaggtaagccgactttgaggaatttaagttcaggcgaagaaaaatcaattccaataaaagagttagttaatgaaatcaaaaaaattatctgaa

SEQ ID NO: 302334 - DNA, 1065 bp, Unknown
  Bacterial polypeptide expressing nucleotide sequence isolated from the Sargasso Sea
ttcctctgtctaggtttgtacaacaaaacttaaatgaaattactctgccatttaaaagatttcaaactcaattagtttggagagcagatagaccgcaaaagggtagatacagagaatttcttcaatgtgatgtagatataattggagaaaaaaactttttaaatgaggtagagtgtatcaaagtatatgactatgtttttgaaaatcttggtttgccaaaattagttcttagaataaataatagagaaatattagaaggtatatcgaagattatgaatcttggtagcttatctgaaatctcttcaacactagataagtctgataaaattggtattgatggagtggtggaagaattagctaaaaaaggtatcagtactgaatcaattgataaactaatgttttttcttaatatcgagggttctaatgaaaataaaattgatatagtcagaaaggagtttaatagtaagaatatttcttctcattcaattgatttaattgaaaaaataattaatacttgtaatcaatttaagttaaacaacattgagattaaatttgacttatctctagcaagaggtctgggatattatactggtactatcgttgaagtttcgtctcccaaagacttcagtctaggttctgttgggggaggaggtagatatgatgacttagtccagaaaaataatcctaaactaagtggttttgggatatcttttggctttgataggatttttttaattcttgaagagcttaatctttttcctaatctattagactcatctaagtcatttctatttctaaattttgggactgataaaatatccaattttattgactctgtaaatcagttaaggaaagatggtattgtttgcgaaatctatcctggtgatgtaaaaattaaaaagcaattagactatgctaataaaaaaggaattgactatgtagtaattcttggtgatgatgaattgaagaaagatatttttaaggttaaggatatgtcaaaaggagatgaattaacatataatcaaataaactctttaactgataaaattaaagaaattagctaaa

SEQ ID NO: 302335 - DNA, 601 bp, Unknown
  Bacterial polypeptide expressing nucleotide sequence isolated from the Sargasso Sea
ctgcgcaaattcgcgctctggaaacccaattccggagctaccttcattaacgtcggagccgaggaggcgattgttcccgcgttgtggtcgcaggatacattcattcaaaaggccggcggcagcgagatcatcggccagatgtgggcctttccggataagaagggacgcgcgtgctgcctgattcctgaggcaacggcactgttccaggagcgatgcagcgaactgctgggccgacaacgggagcggatgttgttttacatcgctcgatgctaccgctatgaacgacctcaagccggtcgctaccgcgaattctcacaactcgggtttgagtatctctgccccaacccggaatccgcggtcaaacgtagccaggaggtagcgatcggcttcttcgattcgctcggcctgcgctacgaaatcgacgattcggcccgcagagggctcagctactatctgaacggtaggggcttcgaaatgcgctgtagagaactcggggcacagcagcaagtcgttggtggcggcgcatatcaggagggggccggtttcggcatcggcgctgaacggctattgttggcgatgaccgctcaagggcttgtgtagc

SEQ ID NO: 302336 - DNA, 435 bp, Unknown
  Bacterial polypeptide expressing nucleotide sequence isolated from the Sargasso Sea
tttgcggtggaggaaggtacgataatttagttgaagaattaggaggtaaatcttgcccagcaacaggattctcaataggcatggaaaggttaattttgctaatgaaagaaactctagaattaaatgtaggaaataaaaaagtagatatatttttcgtttgcttgtctaaagagagcattcaaaaagctataatgtactcagagtctttgagagaaaaagtttctgaacttggcataagaattaatatgggcctagaaggcgcgggatctcagtttaaaaaggccgataagtcaggtgctatgtttgcttttattttgggagatgacgaattaaagaataacactatctcaatgaaagacctgagatctaagtctgatcaagagactctttcatataaagatttagagaaaagaattaaggaaacctataaatagg

SEQ ID NO: 302337 - DNA, 946 bp, Unknown
  Bacterial polypeptide expressing nucleotide sequence isolated from the Sargasso Sea
tcagtttgatgcagattatgttggaacaaataatctacaagctgatgcagaactttgtatattaatctctgaagtattagaaaaatgtggtttagataaagatgaatatactgtaaaaatttcttctagaaaatttacagatagtctattcaaaaaattaaatattaactctgaaaaacaaaaaacaaccactcttcgtacacttgataaaattgatagacttgggtggagcgaagttcaaaaattattaggagaaggcagaaaagataaatctggagactatacaaaaggcgcaaacttaaaaaatgaccagattaaaataatagaaaatactttaaaaagtaatgaaccagatactgaagatgttttagaaattataaatatatttaaagcttatgactttaaaaattataaatttgatccatcaattataagaggcttagagtattacacaggtccaatatttgaagttaacctaaactttgaggtaaaaaatttaaaaggacaagttattcaatttggttctataggtggtggaggtagatacgataaccttgtaagtaattttggaaatcttgactatcctgcaactggaatatcaataggtctagatagacttgtttttgctttaatgcaaaaaaaagatttcaaattaaaatccacaagaccaatcatgatttgtgtatttgataaaaataatactaagcaatatgtagaaatattaaataaacttagggctgcaaatatcagctcagaaatttatccaggcgaaggaaaaattaaaaagcaaatggagtatgcaaacaaaatagaatgccctggtgtgatattttatggtgacgacgaaattaaaaaaactgaagtaaaatttagaaatcttaaaacaggcaaagaaacatctgtaaaaattgaaaatttagcgaatgaaatcaaaaaatttatctga

SEQ ID NO: 302338 - DNA, 538 bp, Unknown
  Bacterial polypeptide expressing nucleotide sequence isolated from the Sargasso Sea
atgttcaaaggggtagaatttgaaatagataaagggctagttagaggattagattattattctaaaactgtatttgaaatacaaccaaagaattcaaataaagctcaatctagtattctttcaggcggaagatacgacaatcttgtagaaaatattggaggccctgatacacctgctgctggatttggaagtgggatagaaagagtactacttaatatgaatgagaaagaatatgaagagcttgattttacacaattattaattattcctgcatctgaagaaggcttaattctttccattaaaatagcccagcaattaagaaataaaaaaatatctacttccatctgctcatctgataggagctttaaagctcaaatgaggtatgcaaatcaaataaatgctaaaaacgttattgtcttaggaagcaaagagatagaaggcaataagatttctataaaaaatttatcttcaaaaattgaaaaaacaattgatctaactttagaaaacattttatcggtactagattcaaatggataaa

SEQ ID NO: 302339 - DNA, 1198 bp, Unknown
  Bacterial polypeptide expressing nucleotide sequence isolated from the Sargasso Sea
ttaagattttatcctctgggtgaaaaagtaaaaaaagcagatataaactcactaaatgatggaaagctatctaagtttgctaattccataagtgataaagccctgaggtatgatcttacagttcccttatctagatttgtacaacaaaacttaaatgaaattactcttccatttaaaagatttcaaactcaattagtttggagagctgatagacctcaaaagggtcgatacagagaatttcttcaatgtgatgtggatataattggagaaaaaaactttttaaacgaggtagagtgtatcaaagtatatgactatgtttttgacaatcttggattaccaaaactagttctcagaataaataatagagaaattttagagggtatagcgaagattatgaaaattaatagcttatctgaaatttcttcaacattagataagtctgataaaattggcattgatggagtcttagacgaattagctaaaaaaggtatcgataatgagtcaattgataaacttatgttttttcttaatatcgacggttctaatgaaaataaaattgatatagttagaaaggagtttagtaatgaaaatatttcttctaacgcaattgatttaattgaaaaaataattaatacttgtaataaatttaatttaaataatattgaaattgaatttgacttatctctagcaagaggtttgggttattatacgggtacgatccttgaggtttcctctcccaaagatttcagtataggttctgtcggaggaggaggtagatatgacgacttagttcagaggaataatcctaaattaagcggttttggtatatcttttggttttgataggatttttttaattctcgaggagcttaatcttttccctgatttattagactcatctaaatcatttctatttctaaattttgggactgataaaatatttaattttattgactctgtaaatcatttaagaaacgatggtattgtttgcgaaatttatcctgatgatgttaaaattaaaaagcaattagattatgctaataaaaaaggaattgactttgttgtaattattggtgatgatgaattgaaaaaagatatctttaaagttaaggatatgtcaaaaggagaagagtcaacatacacagaaatagattctttagctcaaaaattaaagatattagctaaagtatttataccat

SEQ ID NO: 302340 - DNA, 1333 bp, Unknown
  Bacterial polypeptide expressing nucleotide sequence isolated from the Sargasso Sea
atgtgtggaataggtggaattattaacactaataattccaaaattgacccaaatattattgaaaatattaaagattccttagaacataggggaccggacaactcttccataaaatacatttccgaatcaaattgttttgtacatacaaggctttcgataattgatttaaatgacagatcaaatcagccttttcaatcatccgatggcagatatacattggtatttaatggtgaaatatacaactataaagaaataagaaaagacctagagtcaatcgggatcagttttaatactgaaggcgatacggaagtactcttaaaaggttttatagaacatggtgaaggcatattggaaaagcttagaggtcaatttgcttttgctatttatgatgaggcagaaggaagtgtttttcttgctagggatagggttggaattaaaccattatatttttctacatataaagattggtttgtttttggttctgagattaaagcaattgagaaatctggtgtagtaccctttgagcctgacattgactcatatgttacatatttgagacacctttgtgtaccgtctgatagaactggaaataaaaatattttaaaacttcaaccaggtgaatatgccatctattcaccaaagaatggaatttcaaaaaagaaatactggaacccttttaattttgaggtaaataatgatatcaatgaaaaagaagccatttcagaagtagatagactattgtctgaatctgttgaatatagaaaagttagtgatgttgaagtaggtttgtttctctctgggggaatagattcatcactaattggaaaactaatgaaagaaaacgaaacagctggattaaaaggttttaacatagactatgaagatcactttgcaggatatgaaggagaagcagcagaagctgaatttgcttcttcaaatatagatattgaattaattaaagaaaatataaaatattctgattttcaagatttattaaataattattctttttaccaagatgacttaattggagatgaagtaggtataccactgtattttcttggaaagagtacacggtctaatggaatgaaagttgtacaggtaggagaaggggccgacgaactgttttatggttatgatcattggttaaggtttataaaattaaataaatatataaaaacaataaatcaatctcgttcaaactttttaagttttaaaaatcatcgaatgaatctagtttcaaatattctatttaatagaacctcattttctggaggagcaataggatttaatttatccgaaatcgatagtcttattgatggaggattagcaa

SEQ ID NO: 302341 - DNA, 988 bp, Unknown
  Bacterial polypeptide expressing nucleotide sequence isolated from the Sargasso Sea
catgaaaaaagaacaaaaaaatcctaaggctgtattgccaaaaggatttaaagataatgacgagattacaattagtgttcgaaaaaaagtttcgaagacaatagaagaagtgtgtcaaaattttggatttagagagttagaaactcctgcatttgaatttacagaagccttaggaaaattcttgcctgatattgatcgtccaagtggtggagtattttcaattcaagatgaagataatcaatggatatctttacggtacgatctcactgcaccattagctcgttttgttgcagctaattatcaaaatattgtaaagccgtttaaacgctatcagagtggaaatgtttggagaaatgaaaaacctggaccagggcggtacagagaatttagacaatttgatgcagatgtcattggtgttcaaagtgctaatattgatgcagagctttgtgttatggttgctaaaatttttgagaaacttagcctcagttcaaaagattatagaatcaaatattctaatagaatgatttggaatgatttgtttaatgaaattgatattccattgaaccagatttcagaagtgttaagggctatagataagctcgatcggtttggtgaggatggagttagagagctacttacaactggacgaaaagatcagtcaggtgatgtgatgagtggggttggcctatcggatgagcaagcagagtcaatcattcaatttataaaaaatggagataaatcaaatgaacaaattttagattttgaaaattatttatctaactttccaaacttatcgattgattttgatccatctgtcgtcagggggcttgaatattatactggaatggttttcgaggcagaattattattcaaggtaaagaataataagggcgtagatgttgtttttggctctgttgctggaggaggtagatacgataaattaatttcacaattggaaaagaagatgttcccgcaactggtatttcca

SEQ ID NO: 302342 - DNA, 1216 bp, Unknown
  Bacterial polypeptide expressing nucleotide sequence isolated from the Sargasso Sea
atgaataaagaaaataaattaattcctggattaccctcaggttttgaagatagatggaataaaaaattacttctcaaaaaaagactattaagggttattgagaaaaattttataaaatatggatttgatccattagaaacaccatcatttgaaattagtgaaaatataggctcctttcttgcagaggatgagaataatcctatgtctgatgtgtttacattcgatgatggtgaaaagaatattactttaagatatgacttatcaagtccacttgctagatttgttgcacaaaataatcaaatgcttccttcaatatataaaagatatgcaattcaaaatgtatttagaaatgaaaaatctggaaatgctaggtatagggaatttacccaagcagattgtgatatagttggaaacgttaatccagcccaagccaatgctgaattgtgtaatttgatttcaaatactttagtagattgtggtttaaaaaaagatcagtttactattaatgtcagtaacagaaaaatcgttcaaggtctgattgaggatttgaaaattgaaaaagataaacaaatcaaagtaatgagagctatagataaacttgataaacctgggtttggtttaaagggtgtcgaagaattattaaaaaaagaaagaaaagataaaagtggagctataacaaaaggagcaaacctaaatgatatgcaagcttcaaaaatcttaaattttttaaggattaaagatttaaaggaacttaaagaaaattttaaaaatcctgttacccaagagggcattaaagaattagaagaattatttgaagttttaaactttggaaattattctgatcaagtaaaaattaattttaccatagttagaggtctagattattatgatgggttttgtgttgaaaccaatctaaattttaaagcaaaaaatattaagggtaaggaagttgatattggaagtatttgctcaggcggacaatataataaattaatttcaagatttaagggtgtagatattccggggacaggtgtgagtattggtgttgatagattgctatttgcaatgatgcaattaaatcaaatagaagttgatacacaaaacccagttattgtctgtgtaatggatgaaaaatatttaaaaaattattacgaaattttagataatttaagaaaaaataatatcaattctgaaatatttttggatagtaaaaaaa

SEQ ID NO: 302343 - DNA, 1106 bp, Unknown
  Bacterial polypeptide expressing nucleotide sequence isolated from the Sargasso Sea
aatgaataaagaaaataaacaattgaaagcaagccttcctaaaggatttcagaatagatggggtgaaactttgcttttaaaaaagaaattactagaagtaattgaaaaaaattttataaaatttggatattcagctcttgagacgagccccatgcaacttagcagtataattggaaattcgttatctgaagatgaaaaaaatccaatgtcagacatttatacttttaacgacgatggaactgaagtttctttaagatatgatttgtcccagcctttaataaatttttataaacaaaattatatggatttaccaaatccttataaacgcttcgagatagggactgtctttagacgagaaaagccaggaagcaatagatttaaatcttttgggcaatgtgatgtcgatatcattggaaattttgatgttaagcaagctaatgcagacttgtgttcaataattggaagtatctttaccgagtttcttaaaaaatcagaatttattatcaatgttagcaatagaaaaattgttcaaggtttaatggatcaattaaaaatcactgatcaaaaacaaaagcaaaaagtcttaagagcaatagacaagcttgataaaccagggtttggtttaaaaggtgtagaagatcttttaaagaaagaaagagttgatcagagcggagctgttaccaagggtgctaatttaaacgatgaacaatcgtcccaaataatagaatttttaaaaattaaggaaattcaagagcttaaaaaaaagattgataattcattagcaagagagggaatagaagaacttgaggatttatttgaactcttaagttatggagaatatttagatcaagtaaaatttaacagctcaattgtacgtgggatggatatgtatacaggaaatgtaattgaaacaaatttaaaatttgaggttaaaaattcaaaaggtaaaattattgatccaggggctgtttgtagtggtggagaatatttgatttccaagtttaaaggagacccatttcttgggtgcggcatatcaattggaagtgaccgtctaatttgggcattatcgcaaaaaaataatttaaaaatagaagaaaaaaaaccca

SEQ ID NO: 302344 - DNA, 328 bp, Unknown
  Bacterial polypeptide expressing nucleotide sequence isolated from the Sargasso Sea
tatgaaaatacagccaataagaggaacacacgatatattcggtaagaatttagataaatacaattctatttgcgatgaagtcaaaagagtagcaagtatatttaacttttctgaaattaaaacaccaatttttgaaagtactgatttattttctaaacaattaggagaaagtagtgatgtagttttaaaagaaatgtatacttttcaagatagaaatggtgaatcattaactttaagaccagaatatacaacaccaatgatcagagccgcaatttcaaataatcttattaatttactaccatgtaaaatttttggaattggtcaaatg

SEQ ID NO: 302345 - DNA, 913 bp, Unknown
  Bacterial polypeptide expressing nucleotide sequence isolated from the Sargasso Sea
tttcataacgaattttttaagaatgaatcaaaaaaatattcatattttggaaaaatgtttaggtatgaaaatcctcaaaaaaatcgatacagagaattcatacaggctggagcagaaatagttggtacgattgatgaatactcgaacttacaaatactgaaatcttcaataagatttttgtcattattaaacataaagtcgaaattaaatctcaacacaattggaactaaagaagaacgtgaaaaatatataagagaactagataagtatttcagtaaaaataaaagagaactatccaaagaaagtgtagataaaattggaaaaaatactttaagaattcttgattcaaatgatccgtttgataatcaaatcatcgatttagcaccagttatttatgactttcttagtaatgaaacattatccctatatgaaacttttaaaaaacaattgaaaacgaacagtatagattttgttgaaaatccaaaactagttaggggattagattattacaatgatttaacttttgagtttgtagctaatggaacagttgtaggcggtggtggtaggtatgacagtctttcagaaattcttggattaggaaaattatcagggataggtgtagcatttggagttgatagattaataaatactataagatctattccttctaaaacaaaagttatgttgatagctcaaaatttgtctgatttgactctagttagttctaaattagataaagctggaataaattatttattaccggttagagacagtaaggaaaatactcaatacaaagaagctatcaaaaacaatgttgactatgttataaattgttctgaaaatactattaagaatattaacaataacgaatctatcaagtttaatataagtaacttacgaaaattattatgaa

SEQ ID NO: 302346 - DNA, 424 bp, Unknown
  Bacterial polypeptide expressing nucleotide sequence isolated from the Sargasso Sea
acatcagatttaggatcacaagacaccttaattggtggaggcagatatgatggcttaacaaaattacttggaggtcctgatattcctggagtagggtgggctggaggtattgagcgtttaattatgttaatggatgatattaaaccattacaaaaaaccattcatctaataattataaatgaatcttttagagaatatggacttaaagttgctaatcaacttcgacagaaaaatattaatattcattttgattataaatataatttaaaaaaatctttatcttacgctaatcaacttggtgctagatatgcaataattattggagaagaagaagttaaaaaaaatctttgtacattaaaagatttaaataagaatattcaagaaaaaaagacaatagaaaatattattaaagatttaagctgat

SEQ ID NO: 302347 - DNA, 136 bp, Unknown
  Bacterial polypeptide expressing nucleotide sequence isolated from the Sargasso Sea
atgaatttagagttaaactcaattggattagataagaaaccgtctgatacaaaagtaattgtagctatgtctggtggtgtagactcatctacagtagcaggtttgatgaaaatgcaaggatataatgttaccggta

SEQ ID NO: 302348 - DNA, 640 bp, Unknown
  Bacterial polypeptide expressing nucleotide sequence isolated from the Sargasso Sea
gatcaaataaaaataattgaaaatgctttgaagagcaaaacatctgactgtgaggatgttttagagattattaaaatatttaaagattataattttgaaaattataaatttgatccatcggtgataagaggtttggaatattatacagggcctatttttgaggttaatttaaattttgaggttaaaaattcaaaaggacaaactattcaatttggttcaataggtggaggaggaagatacgataatcttgtaagcaattttggaaattttgattgtccagcaaccggcatatccattggtcttgatagactggtttttgctttaatgcagaaaaaagattttaaaattaagactactcgacctgtagtcatatgtgtttttgatcaaaacaaaaacaaagaatatgttgggatattaaataaacttagaatgtcaaatatcagttctgagatttatccaggtgaaggtaagttaaaaaaacaaatggagtatgcaaataagattgcatctccagccgttattttgtatggcgatgatgaaataaaatctggaaaagtaacattaaaaaatcttgaaagtggtaaagaaaacttgattaaaattggagatctagtaaatgaaatcaaaaagctattctgaa

SEQ ID NO: 302349 - DNA, 352 bp, Unknown
  Bacterial polypeptide expressing nucleotide sequence isolated from the Sargasso Sea
atggataaaataagctcaatcagaggtatgcccgatgttttcgaatctgatacaaattatcttgcagaacttaacaaaaccctaagtaaaatatttctttcccataatcttaacgaggtaaatactccaattttagaacaaacagaactatttataagatctaccggaataacatcagatattgtaaataaagaaatttacagctttaacgatcgtaacgaacaaagtctttcattaaggcccgaaggaacagctggtgtagtaagatcagtaatccaaaagaaacttgatagtgttgaacataaactttggtatcagggtcctatgtttagatatgaaagaccacaaaagg

SEQ ID NO: 302350 - DNA, 1028 bp, Unknown
  Bacterial polypeptide expressing nucleotide sequence isolated from the Sargasso Sea
gttggttagagcagcggtttgtggaaccgaaggtcgacagttcgaatctgtccccgtgtaccaaaaaatggaaaaacaaaaaaaaataaaacctctaaaggaattaccttcaggttttgaagatagaaaagaaaaagaacttttaatcagagacttcataattttaaagattaaagaggtaatggttaagtatggctttcaatatcttgaaaccccaagttttgaatacactgaaagtataggtaaatttttacctgataaagaaagacctggagagggtgtattttcttttaaagatgaaaataggtggttatctttacgatatgatttaacagcacccttagcgagatatgttgcaaaaaattttaatgaaataccaaaaccttttaaacgctatcaattaggaaccgtttggaggaatgaaaaacctggacctggaagatatagagagtttcttcaattcgatgctgattacgttggtacaaaaaatttacaggcagatgcagaactatgtgtaatgatatcagaaattttagaaaattgcggcttaactaaagatgattatacagtcaaaatatcttctagggaaattacagatgaattatttaaaaaactaaaaattcagtcgcaagaaaaaatttctataattcttagagctttagataaaatagataggctaggctggatagaagtaaaaaaattactgggtgaaggtagaaaagataaatcaggagattatacaaaaggagcagaattagactatgatcaaataaaagttattgaaagctctttaaatgttaactcacctcagagcgaggatttaaaacaaataataaaaatctttaaagattataaatttaataactataagtttgacccttcggtaataagaggtttagagtactacacaggcccaatatttgaagttaatctaaatttcagtgtaaaaaatttaaagggacaagttattcaatttggatcaataggtggtggagggagatacgataatttagtaagcaattttggta

SEQ ID NO: 302351 - DNA, 1447 bp, Unknown
  Bacterial polypeptide expressing nucleotide sequence isolated from the Sargasso Sea
tttgtggaactttagtttttggttcaattccaagccagggtaccaaaaaatgaataaagaaaataaattaattcctgggttaccctcgggttttgaagatagatgggacaaaaaattatctcttaaaataaaattaataagaacaatagagaataattttataaaatatggatttgatccattagaaacgccatcttttgaaattagtgaaaatataggatcatttcttgcagatgataatagcaatcctatgtccgatgttttttcttttaaggacggcgaaaaaaatattactcttcgatatgatctatcaagtccattagctagatttgtcgcgcaaaacaatcaacagcttccttccatttacaagcgttacgcaattcaaaatgtctttcgaaatgaaaaagctggaaatgctcgttatagagaatttacccaagctgattgtgatattgtaggaaacgttaatcccgcacaagcaaatgctgaactttgtaatttaatcgcaagcactattttggcttgtggattaaaaaaagaccagtttgttgttaacattagtaacagaaaaattgttaaaggtttaattgaagaacttaaaatatctactgaaaaacaagtaaaagttatgagagctatagataaattggataaacctggttttggattaaaaggagttgaagacttattaaaaaaagaaagaatagatattagcggagcagttacaaaaggggcagatttaagtgatggtgaatcttcagcaataattaactttttaaaaatcaaaaacttaaaagaattaaagaacaatttaaaaaacccattgtcccaagaaggaatgatagaattagaggatttattagaagttgtaagctatggagattattcagatcagatcaaaactaattttacaattgttagaggtttagattattacgatggtttttgtgttgaaacgaatatgagctccaaaataactaataataaaggaaaagaaattgatattggaagtatttgttcagggggtcaatataataaattgatttcaagatttaaaggtgttgatattccagggacgggaatgagtattggtgtagatcggttgttgtttgtaatgatgcaattaaatcaaatgaaagttgatgaaaaaaaaccagtaattgtatgtgttatggatgaaaaatatttaaaaaattattatgaaatcttaaaaatattaagagaaaacaatattaattcagaaatatttttagatagtaagaaaaatcttggtaaacaactaacttatgcaaataaaagagagtgtccagtagctgttatttgtggagagaatgaatttaaagaaaatacacttactttaaaaaatcttctaggcattaaaggagatgataatcaaaagacagttaaaaaagaaaatctagttaatgaaatcaaaaaacttatctga

SEQ ID NO: 302352 - DNA, 872 bp, Unknown
  Bacterial polypeptide expressing nucleotide sequence isolated from the Sargasso Sea
cctggttcaaaatctaaaatcatttgattttacttataatagaaatgagtataaataccaccacatgaatttagagttaaactcaattggattagataagaaaccgtctgatacaaaagtaattgtagctatgtctggtggtgtagactcatctacagttgcaggtttgatgaaaatgcaaggatataatgttaccggcataacattaaaactatacaacgatagtaaagaagttgttaaatcaaaagtatgttgctcaggccaagatgttatagatgcaaaaagagttgctcataaattagatattgatcataaaattctttattaccaagataaatttaagcaaggtgttattgataattttgtagaaagttacttaaaaggagaaactccaataccatgcgtacagtgtaatcaaactgtcaaatttaaagatttgtatgaagttgctaaagatttaaatgctgatgctttgattacaggtcattatgtaaaaaatataacaataaatgaaaaaaataatatgtatagagcagtagatgaaaatagagatcaaagttattttctatttaatactacaagagagcaattaaattatttacgatttccattaggtggaatgttaaaaaatgaaactagagaaattgctaaaaaactaaatttaaatgttgcagataagccagatagtcaagatatatgttttgttcctaacggagactattcatcagtaataaaaaagtttaagccagattcattaaaaaaaggtaatattaaaaatttaaatggtgatgtaataggtgttcatgatggaattatcaattttactattggtcaaagaaaaggaattaaagtagctgacaaagaggcattat

SEQ ID NO: 302353 - DNA, 1232 bp, Unknown
  Bacterial polypeptide expressing nucleotide sequence isolated from the Sargasso Sea
tttgtggaactttaagtttgagttcgactctcagcccgggtaccaaaaaatgaatacagaaaataaattaattcctggattacccccaggttttgaagatagatggaataaaaaattatctcttaaaaaaagattattaacggtcattgagaaaaattttattaaatatggatttgatccattagaaactccatcatttgaaattagtgaaaatataggatcctttcttgcagaggatgacagtaatcctatgtctgatgtttttacatttgatgatggtgaaaagaatattactttaagatatgatttatccagtccacttgctagatttgttgcacagaataatcaagagcttccctcaatatataaaagatatgcaattcaaaatgtattcagaaatgaaaaatctggaaatgctaggtatagggaatttactcaagcagattgtgatatagttggaaacgttaatcctgcacaagctaatgccgaactgtgtaatttgatctcaaatactttagtagattgtggtttaaaaaaagatcagtttactatcaatgtgagtaatagaaaaattgttcaaggtttaatcgaggatttgaagattgaaaaagataaacaaatcaaagtaatgagagctatagataaactcgataaacctgggtttggtttgaaaggtgttgaagaattattgaaaaaagagagaaaagataaaagtggggctataacaaaaggagcaaacttaagtgatgaacaagcttcaaaaatcttaaattttttaaagattaaagatttaaaagaacttagagaaaattttaaaaatcctattactcaagatggtattcaagaattagaagaattattaggagtattaaattttggaaattattatgatcaagtaaaaactaattttaccatagttagaggtttagattattacgatgggttttgtgttgaaaccaatctaaattttaaagcaaaaaatattaagggtaaagaagtggatattggaagtatttgctcaggtggacagtataataaattaatttcaagatttaagggtgtagatattccagggacaggtgtaagtattggcgttgatagattgctatttgcaatgatgcaattaaatcaagtagaaactgatctacaaagtccagttattgtttgtgtaatggatgaaaaatattttaaaaattattacgaaattttagataatttaagaaaaaataata

SEQ ID NO: 302354 - DNA, 1402 bp, Unknown
  Bacterial polypeptide expressing nucleotide sequence isolated from the Sargasso Sea
gctggttagagcagcggtttgtggaaccgaaggtcggcagttcgaatctgccctcgtgtaccaaaaaatgcaaaaacaaaaaaaatttaaaccttctaaggaattaccatcaggatttatagatagacaagaaaaagaactgttaattagagattttgtaatttctaacattaaagaggtaatgatcaaatatgggttccaatatcttgaaactccaagcttcgagtatacggatagtattggaaaatttttgcctgataaggaaaggccaggcgaaggagttttttctttcgaagatgaaaatagatggatttcacttcgatatgatttaaccgcacctttagcaagatatgttgcaaaaaattataatgaaattccaaaaccttttaaacgttatcaactaggaactgtttggagaaatgaaaaacctggacctgggaggtatagagaatttcttcaatttgacgcagattatgtaggaacaaataatcttcaggctgatgcagaactttgtatattaatttctgaaatattagaaagatgtgggttagataaatctgactatatagttaatatttcttctagaaaatttacagataatttattcaaaaaattaaatattatttctgatgaacaaaaaacaactactttacgtgcccttgataaaattgaaagacttggatggatcgaagttcaaaaattattaggcgagggtagaaaagataagtcaggagattatacaaaaggtgcaaacttaaaaaatgaccagattaaaataatagaaaaagccttaaaaaataatgaaccagataccgaagatgtattagaaattataaatatatttaatgcctataactttaaaaattataaatttgatccatcaattatacgtggtttagaatattatacaggtcctatttttgaggttaatttaaagtttgatgtaaaaaatttaaaaggacaaaatattcagtttggttcaataggaggcggaggaagatacgataatcttgtaagcaattttggaaatcttgattatcctgcaactggaatatcaataggcctagatagacttgtttttgctttgatgcaaaaaaaagatttcaaatttaaatctacaagaccaattgtgatttgtgtatttgataaaaataatactaagcaatatgtagaaatattaaataaacttagggaagcaaatatcagctcagaaatttatccaggagaaggaaagttaaaaaaacaaatggagtatgcaaacaaaatacaaagtcctggtgtgatattttatggtgacgatgaaattaaaaaagctgaagtaaaatttagaaatcttaagactggtgaagaaatatccgtaaaaatagaaaatttagcgaatgaaatcaaaaaatttatctga

SEQ ID NO: 302355 - DNA, 825 bp, Unknown
  Bacterial polypeptide expressing nucleotide sequence isolated from the Sargasso Sea
taattctaattgcaaagttattatttgatgaccttggaattaaagataataaacataggttattaattaattctttagggtcaaaagaggatcaaatcaaatatgcttatgaattaaaaaaatatttaagtgaatttaaaaaacagttatcagaaatctcacaatctagattggataaaaatccacttagaattttggatagtaaagatccaaaagactctgaaatattagtaaatgctccaaaaattagtgaacacttatctgaagagagtaaaaattatttcaatcaagttaaaaagcttttaaacgataataaaattaaattttttgaagacccaaaattagttagaggattagattattattcacatacggcttttgagtttcaaacaaatgaagataaaagacaaaatgcaatattagctggaggtaggtatgacaatttaattagcatgatttcttctagagatataccaggagttggctgggcagctggtatagaaagattaatggatttgatatctataaaagatgaaaagtcagaattagataaaaagatattatttgctgtccaagatgagtcttatttaaataataatagaatattaaaacaaatttacagtttaagatataatcatgaagttagagttagtaaaaatataaaaaaactttttagttatgcagataaaaacaatttcaattttattcttcttatgggtgaagaagagatcaaaaataaaaaaattattttaaaagatttaaaaaataaaaatcaaaaatcttttgaaatttccaaattcgagcttaaaaatgaaattagataaa

SEQ ID NO: 302356 - DNA, 366 bp, Unknown
  Bacterial polypeptide expressing nucleotide sequence isolated from the Sargasso Sea
tatggataaaataagctcaatcagagggatgcctgatgttttcgaatctgatacaaattatcttgcagaattaaacgaagtactaagtaaaatattcctttctcataatcttaatgaggtaaatactccaattttagaacaaacagaactatttgttagatccactggggtaacatcagatattgtaaataaagaaatttatagttttaatgatcgaaacgaacaaagtctctcattaagaccagagggaacagctggcgtagttcgatcaataatccaaaagaaacttgataatgccgagcataaactatggtatcaaggtcctatgtttagatatgaaagacctcaaaaaggaagatttaggca

SEQ ID NO: 302357 - DNA, 748 bp, Unknown
  Bacterial polypeptide expressing nucleotide sequence isolated from the Sargasso Sea
gatgttgacagaaaaaagtattctcaagaattagctacatatctcaattctcatagtgacgaattatctgatacacagcgcaatactctaagaaaaaaccccatgaggttacttgatagcaaggatcctaaattaaaatctattattatatctgccccgcttattagtgattttctaaataaagaatcacaagctaattttgatagcattaaggaaagactcgagagattaaaaattccttacatccatgatcctaaattagtgcgaggacttgattattataatgatcttgtatttgaatggaaaagtaataaactaggttcccaagatgccgtatgtgccggtggaagatacgacaatctgtcgaaaactattggtgataagattgtcccatcagttggttttgcaatgggcttagatcgaattgtagaactcatggagtatgaatcaaatgcattaattattgggctagctgtcattactaactcaaatgatgaaagttatgaaattttaaactctttaagaaatattgactacacatataaccttattcaaatggataatgataagtcattatccaagcaaataaagcaagcagataagtctaactgcgatattttaataattgtaggtaatgatgaaataagtaataatacttttactgtaaaacacttgaaatgtgacaggaaagaccaaaatattccatttgaacagctaattgatttaataacagggtataagaaatgag

SEQ ID NO: 302358 - DNA, 847 bp, Unknown
  Bacterial polypeptide expressing nucleotide sequence isolated from the Sargasso Sea
atgagtaaatcccgttatcaagcccctcgaggcaccagagacatacttcctgaagaagctggaagatggcgatgggccttggattcttttgccgagctagctgagcgattcggttacggtcaagtaatttctccgatgtttgaagatctcggagtttttctccgactcggggaaaatactgatgtcgtatctaaagagatgttcacttttcaggacaaagatccaaagacgcctcaaaacttagccctgcgacctgaattgacagcaagcatttgcagggcgtttgcccaacatcgtccaacgactccatggaaagtatggtacgaggggccacaatttcgatacgaaaaacctcaggcaggacgcttcagacaatttgttcaagtaggtgctgaaattataggggagaatgaccctgcagctgattcagaaataatttcgttagcttggaggttttacgaattccttggccttaagcacgtcacacttcaaatgaattcacttgggaatgcggagactagaggggtatacaaccaagaacttcattcttacctttcgtcagaagcaacgaatcttagtgcagaatcaagagataccctggaaaagaatcctctccgggttttagactcaaagagagaagaagatctcgagataattagcgctgcgccgacaatacaggaattcctttcggtggaagatgcaaatcattttgaattagtttgtgaagggcttagttccgtcggtatacctttcgtcatatcaccgcgattagttcgcggcctcgactattacacacgaacaactttcgaattcactgctgacaaactgcagacggctcaaaatgcga

SEQ ID NO: 302359 - DNA, 947 bp, Unknown
  Bacterial polypeptide expressing nucleotide sequence isolated from the Sargasso Sea
gctatcattaaggtatgatctcacagctccattagcacgctattctgcgaaaaactttgaagaaataccaaagccatttaagaggtatcaaatcggaacggtatggcgaaatgaaaaaccgggtccaggacgttttagagagtttttacaatttgatgccgattttatcggaactagcaatttattagctgactctgaattatgtgttttagcgtctgaaatattaaacaaatgtggattagaaaaagaagattataaaataaaaatatcaaatagaaaactatctattggcttgctaaactttctgaaaataaatcgagatgagcaaaaatccacaacattaagagccatcgataagcttgatcgagtagggatgaatggtgttaaattgcttttaggtaaaggaagaaaagataagtcaggtgattttacaaaaggcgcgttattgaatgaaaaacaaataagtaaaattatagatttcttgagtattaaaaatttggaagaattaaataattttgaatgtgacgacaaagattttcaatctggattaaatgagcttaaggaagtgattgaaaattttaaattaatgaattttgaaaattttaaatttgatgcaactgttgttagaggtcttgaatattacacaggaataatttttgaagttcttttaactttcaaagtaaaaaacgaaaaaaaagaaactgtagaatttggtgcagtcgggggaggaggaagatatgataaccttgtaaaaagatttaaaaaccaggaatgccccgcaactggtatttcttttggattagatagactactttacgctttaaggcaaaaaaatattttcaattttaaacaaaaaaaacctgtattaattttagttttagataaaaaatataatgattattatttcaaagttttaaatgatcttagaagaaatagtataaattctg

SEQ ID NO: 302360 - DNA, 682 bp, Unknown
  Bacterial polypeptide expressing nucleotide sequence isolated from the Sargasso Sea
aggtgtatggagatatgatgaacctcaaaaaggaagatattgttttttccatcaatgggacattgaaatttttggaaaacaaaataacgaaactgattcagaaatcatagaattcacgtcaaaatttttctctaatctgggattaaataatataattttgagtatttctcatcgtaaaattgttcagtcatacatctcatctatctttgaaactgaagattctgaagtaatctctgacattcttcgtgcaattgataaaattcagaaaaaatcagagcaagaaattatttctgaatatgagaaaaagggatatcaaaaagaaaaattagggaaaataattgaattttctaaattaaaaggtagtcctcaagaaatttctaaatctttagatgtatcgcaatttgaaaattggtctgaactaacagcactttttgaatctctcagtaacagaaatgttaagaacattcaaattgattttggaattgttcgtggccttgattattattctggagtagtctttgaagcatttgatcaaacttttgatattggtgctttagttgggggtggaagatatgataatcttcctgctgtttttggaagaaatgatatgggcgcaactggtgttgcaggaggtgttgagagaatcatgttagctttagaaaaccaaaaattcatcatttaa

SEQ ID NO: 302361 - DNA, 729 bp, Unknown
  Bacterial polypeptide expressing nucleotide sequence isolated from the Sargasso Sea
tttgtatgatactgagggtaaggaaaattttccagaaccaaacaaatatgctcctcttggacagtacgattttttagaccctctttacgatgaagggcagaaagaactttcaaatttttttaaaaatactcaattaagtgaatttaaaaatcaaatagtttattcaccaacgctagtaagaggtattgaatattatacaggtaccatatttgaagcaaatttattatttaaggttaaaaatcaaaagggacaagaagtggaattcggctcaataggtgggggaggaagatatgatggcttagtatcaaggtttacaaataatattgctccagcaactggagtatcaataggtttggatagacttttagtgggaattcaacaaagagataatttttggaaaaataataaggaaatagaaaatacaggacctgttgttatatgtgtgtttgatgaaaaacaaatagcacaatacaataaattattattacttcttagatcttcaaatattaattcagaaatttattgcggggacggaagtttgaaagcccagatgaaatatgctgacaagagaaatgctccagctgttatattgtatggagataatgagattaaatcaggaacagtaactataaaaaatcttaaattaggaaaagaagcttcagcaaaaatcactaaaagagaagattggactaatattgaaaaagcagaagagcttggtaaaaaagaaaa

SEQ ID NO: 302362 - DNA, 962 bp, Unknown
  Bacterial polypeptide expressing nucleotide sequence isolated from the Sargasso Sea
agaccgaatgacggaatctttgcatggttagatgatgatgacacctggctggccctaaggtatgatcatactgcacctctagccagattttattcacaatataggaatgaccttccaaatccctaccgaaggtattcctatgggccggtatggagaaatgaaaagcccgggccagatcgatttaggcaattttaccaaatagatgctgatacagttggcacaccacaaattggggcggatgcggaaatgtgcatgatggtttgtgatgccttagaattgataggcatggatgctgaagattataaatttaagttaaataataggaaaattttatcaggcatcatccagatagcgggaataaaagaaaatcagatgcatccagtggatgataccttttttcaaaatatatgtagggcgattgataagtttgatagacttgggttagaaggggttaggaaattgcttggctctggcagaagggatgaaagtggagacttcacagaggggttaaatctatcaactggccaaattgatttctttaccgagctattatcttctaaaggctcaaggaaagaatttctcacaaatttaagaaatatcttaaaaaaatcagagattggaactcagggtttgagtgagttagaagagatggtcgatatatttttagcatcaggttacagtgaggataaattttcttttgatccctctgtagtaagggggttgggatattacactggcccagtttttgaagtggagctaaataaaaaaataatagataagaagggtaatgaacattcttttggctcaatttcaggtggagggcgctatgataatttagtaaagcgatttacaggtcagaatgtaccggcaactggagtttctataggagttgacaggttaatagctgctcttaagattgaggaaaaaatcaaacaaaatacacttggtccaattcttgtaac

SEQ ID NO: 302363 - DNA, 877 bp, Unknown
  Bacterial polypeptide expressing nucleotide sequence isolated from the Sargasso Sea
ttgatttcggaaatacttgagaattgtgggttaaataaaaaagattatattattaaaatttcatcaagaaaaattactgaggaaatattcaaaaaaattaaaattgagagcgaagaacaaaaattagcaactctaagagccctagataaagttgatagacttggctgggatggtgttaaaaaattgttaggggaaggaagaaaagacaaatctggagattttactaaaggagcaaatttaagtttaaaaaatatagatttattagaaaaagaattaaataataactcacctgaaacagaagatttaaaagaaatattaaaaatatttaatgattacaattttaacaactttgaagttgatccttctgtaataagaggattagaatattatacgggtccaattttcgaagtgaacttaaaatttgatgtaaagaataataaaggacaggtcgtacaatttggttctataggcggtggtggaaggtatgataaccttgtaagtaattttggtaattacgatgcccccgcaactggtatctcaataggattagataggttagtttatgcgttgatgcaaaaaaaagaattcaaagttaagcaaacaaaacctattgttatttgtattttcgaaaaaagctcaatgaaagaatatattagcttacaaacagttttaagatctgagggtattagtgttgaaatttatcctggggaaggaaagttaaaaaaacaaatggaatatgcaaataagataaaatcaccagctgttattctttatggtgaaaatgaaatcaaaacaggtaaaccaacattacgaaatctagtttcaggaaatgaaaaatcgacaacaattgaagagttagccaatgagatcaaaaaaa

SEQ ID NO: 302364 - DNA, 844 bp, Unknown
  Bacterial polypeptide expressing nucleotide sequence isolated from the Sargasso Sea
tcacaaagaggaaggtatcgccaatttcatcaaattggtgctgaaattttaggttctaaaaatatttattatgaagttgaactgataggtttggctctagatattttaaaaaatcttcaaataacggattttattctagagattaataacataggagataagatatcgcttcaacaactaagtcaaaaagtatttgaatttgcaaatgataacaaagataaaatcaatccagaggattttaaaatagtagagaaaaatccacttagatttttagataaagcaattcataaatatgaattttctgatattccatcgtcaaaagaatttcttaataacgaatcaaatgaaagatttaatgaactaaaagagcttcttaataaaaactcaataaaatttaaagttaatgagcaacttgtaagaggtatagactattataacgatacagtatttgaaattaaatcatctgaactaggatctcaagatacaattctggctgggggaagatatgataacctagttgaaaaatttggtggtcctccaacagactgtataggatttgcagctggaatagagagattaattttaattgtaaataataatgttaaaaaagcctcaaacattaaaattgatttttatgtaatatatcaatctgatggtgtaaaaagctatgcatacaatgtattagataaaattagaaatattggatttagatctgaaatggatctcgatggtaaatcctttataaaacaattaaaatctgccagtaaaaacaattcattatttacagctgtaataggtgaagaagaaaaagtaaataattttgtaaaaataaaagaactatcga

SEQ ID NO: 302365 - DNA, 406 bp, Unknown
  Bacterial polypeptide expressing nucleotide sequence isolated from the Sargasso Sea
atggataaaataagctcaatcagagggatgcccgatgtattcgaatctgatacaaataatcttgcagaactaaacgaagccctaagcaaaatattcctttctcataaccttagtgaggtaaatactccaattttagaacaaacagaactatttattagatccactggggtaacatcagatatagtaaataaagaaatttacagctttaacgatcgcaacgaacaaagtctatcattaagaccagaaggaacagctggtgtagttcgatcaataatccaaaagaaacttgataatgctgagcataaactttggtatcaaggtccaatgtttagatatgaaagacctcaaaaaggaagatttaggcagttcaatcaggctggagttgaattgcttggatttgaagagg

SEQ ID NO: 302366 - DNA, 953 bp, Unknown
  Bacterial polypeptide expressing nucleotide sequence isolated from the Sargasso Sea
actattaattcgtgattttataatttctaatattaaagaagttatgatcaagtatggttttcaatatttagaaacaccaagttttgagtatacagaaagtatcggtaaatttttacctgataaagatcgacctggcgagggagttttttcatttaaagacgatacaaaatggttatcgcttagatatgatttaactgctcctcttgctcgatatgttgcaaaaaactttaatgaaattccaaaaccttttaaacgttaccaactgggaactgtttggagaaatgaaaaacctggtccgggaagatacagagaatttctacaatttgatgcagattatgtaggaacaaaaaatttacaagcagatgctgagctatgtgtattaatttctgaaatattagaaaagtgcgggttaaataaaacagattatattgtcaaaatttcttctagaaagtttacagataagttattcgagcaattaaaaattaaatctaaagatcaaatatcaattattttaagagcccttgataaaattgatagattaggttggagtgaagcacaaaaacttcttgaaaaaggtagagaagataaatcaggagattttacgaaaggagcaaaccttaaaaaggatcaggttaaaataattgaaaatgccttaaaaaataaaaaccctaacagtgaggatgtattagaaattataaaaatatttgagtcttataattttaaaaattataaatttgatccatcagtcatacgaggtctagaatattacacaggacctatttttgaggttaatttgaactttgatgtaaaaaatttaaagggacaatcaattcaatttggatcaataggaggaggtggaaggtatgataatttagtgagtaattttggaaatttagattgtcccgcaactggaatatcaataggtcttgatagacttgtctttgctttgatgc

SEQ ID NO: 302367 - DNA, 943 bp, Unknown
  Bacterial polypeptide expressing nucleotide sequence isolated from the Sargasso Sea
aggtatcaattggggactgtttggagaaatgagaaacctgggcccggaaggtttagagaatttttacaattcgatgctgattttgtaggcactaaaagcttacaagcagatgtcgaattatgtgtgatgatttcagagattcttgaaaagtgtggtctagctaaatcagaatatataataaagatatcatcaagaaaaataactgaagaattatttaaaaagataaatgtaaaagataataagcaaaaacttactgctttaagagctttagataagattgataggcttggttggagtggaataaaagaactattaggtgctggtagaaaagataaatctggagattttacaaaaggtgcaaatttaaaatctaaggacattgaaacaatagaagaaacacttaaaaaaaagtcaccggaaacggaggatttagtagagatattaaaaatttttaaagattacaattttaaaaattttgaatttgatccatcaattattagaggtctagaatattatactggtgcaattttcgaggtgaatttaaaattcgatgtaacaaacaaaaaagggcaggttattcaatttggatctataggaggtggaggaagatatgataatttagttaacaattttggcaactatgatgctcctgccacaggtatatcaatcggattagatagattggtttatgccttaatgcagaaaaaagaatttaaaataaaacaatctaaacctgtcgtgatttgtgtttttgataaaaaatcaattaaagaatacatagatttattaatgatattgagaaaagctggtgttagtgcagaaatttatcctggagaaagtaaattaaaaaaacaaatggagtatgcaaataaaataaaatctccagctgtaatcttatatggtgaaaatgaaataaaatcaggaaaaccaactttaaggaatc

SEQ ID NO: 302368 - DNA, 726 bp, Unknown
  Bacterial polypeptide expressing nucleotide sequence isolated from the Sargasso Sea
gcggactcagaaatttgtatgctcctttctgatactcttgaaaatgcaggaattccggagggtgactacataattaaagcaaataatcgcaaagttcttaacggtgtccttgagagtgtgaatattcaagaaacacctaaaaaagacgcaatacttcgaactgtcgataagtttgataaagttggagaaagtggcataaggcagctactgggaaaaggcaggcttgatgcatctggggcttacatttatggagtgggtctatctgatagcgaggccgatatagttttggcgttcttaacttctaagggcaccgatattgaaacaacattaagaaatctaaaaaatttgattggatcatctgaaataggactagagggtgtcaatgagctggaaacgatggcagaactctttgaagctggcggatacggcagtaacaagatttcaattgatccttctgtagtaaggggtttgggctattatactggcccagtttatgaagccgagcttacctttgaaatttttgatgaaaagggtaggaaaagacaatttggatcagtttcaggcggtggacgctacgatggtttagtaaagcgctttacaggtcaatccgttcctgcaacaggtgtatcgattggggtagataggcttttagctgcattaaaagaaaaaggaagaataaaatcgtctggattaggccctgtcgttgttactgttatggatcgagat

SEQ ID NO: 302369 - DNA, 712 bp, Unknown
  Bacterial polypeptide expressing nucleotide sequence isolated from the Sargasso Sea
gatggataaaatcaaaacaataaaaggaacccatgatattctcccagagttttcacataaatggcaaaaccttgaaaaaacaattcacgatagtgccaagctttttggatacaaggagataagaacgccaataattgaacaggctaagttatttaatagaggaatcggagaaggaacggatattgtatcaaaagaaatgtattcttggttagatagagatgaaaaagcaatagcattaagaccagaaatgactgcatcagtagtgagatcatttatccaacacaatctaggtagccagacaccactacaaaggctttattatatgggaccttcatttagaagagaaaggcctcaaaagggtaggcaaaggcagttccatcagtttggtgtagaagccataggcagtaataatccagagcaggatgctgaggtaattattctagcctgggaaattctatcaaaatcaggaataaacaatctagaacttaaactgtccagtattggttcagatgactgtcgaatcaaatataaaaatgctttaattaaatttttagaaccgcataagaataaactaacagatgtgagcagagaacgtttaaagcacaacccccttcgaatcctcgacacaaaaaacgaagaagaaattaacatactcaaagcagcctcgataattggagatttttatacaaatgaagatcgagaacacttttga

SEQ ID NO: 302370 - DNA, 544 bp, Unknown
  Bacterial polypeptide expressing nucleotide sequence isolated from the Sargasso Sea
ctgacacgaaatggagttgaatcctacattcggctcgatccgaggatcgtccgtggtttcgactattatacgcgaaccgttttcgaagcgtgggccaagacctccttgagacgagcgctgttcggtggaggccgatacgacaacctgaccctccaggtcggcgggaaacggcagatcccgggtgtcgggcttgctgtcggggatatggcaatgacggagctccttaaggagctcgacaaacttcccaacggagcggctacaggggctacggttctcgtctccatattctccgaagaacacatggccaaatcgtcagaattggccgatcaactaagagacgagggtatccgtaccgagttgtatctgaaccccaaacacaagctggatcgccagttcaggcacgccgaccgcaagcagattcgatacgttgcgattctgggtccggacgaggcagcgaacggcacagttgcattgaaagacctgactactggcaaacagcaaaccgtcaaaccagccgagcttccccggacgctcggcgcataaa

SEQ ID NO: 302371 - DNA, 697 bp, Unknown
  Bacterial polypeptide expressing nucleotide sequence isolated from the Sargasso Sea
atgcctcttcaagctcccagaggaaccagcgacatacttccagaaagtcaatttcaatggaattactttcgagaagctgctgaattgattgcttcaattcatggatatgaaaaaattgatactcctatatttgaataccacgacgtattctcacgagctgtaggaacttcaactgatgtaatggaaaaagaaacatatacatttaaggaccgtggagaggaattaattacacttcgtcctgaaggaacagctccagtttgtagagcatttattgaacacggcatgcataattctccattaccaataagattgttttacatcagtccaatattccgatatgaacgaccacaatcaggaagatacagacaacaccaccaattcggaatggaattacttggaagtgaaaacccagaaggagatgctgaagttgtttctgctgcatggcagttactcaaaaaacttggtctaaaaaatctaaatcttttggtaaatagtattggagactcaaattgtcgaccgaaatatatgcaaaatctaatatcattttattcagataaaatttcttcactgtgtactgattgcgaaagaagatttgaaaataatccccttcgcttattggattgcaaaaaccccaaatgccaggaaattattgatcaagctccaaagagtattgagaatctgtgtaaggattgcgctc

SEQ ID NO: 302372 - DNA, 445 bp, Unknown
  Bacterial polypeptide expressing nucleotide sequence isolated from the Sargasso Sea
tatgaaaataaacccaataagaggaactcacgatttatttggagaagaattaaaaaaattcaataaaattgtttatgaagtcaaagataaggccaaaaaatttggatttaatgaacttataacccctatatttgaaagttctgaactttttaaaaaacctttaggtgagcaaagtgatgttgttttaaaagagatgtatacctttaaggataggaatgaagatgaaattactttgagaccagaatacacaacacctatgataagagcagctatatttaacggattattaaacaatttacctgctaaattttttggaactgggcaaatgtttagaagggaaaggccacaaaaaggaaggtatagacaattcaatcaaattaattttgaaaattttggtactgatgatattttttctgatattgaaattataaatttagcaaacaca

SEQ ID NO: 302373 - DNA, 834 bp, Unknown
  Bacterial polypeptide expressing nucleotide sequence isolated from the Sargasso Sea
ttattgagttcacctcaaaatttttctcaaatcttggtcttgaaaatataattctcagtatctcacacagaaaaattacccaatcatacatttcatcactctttgaatctgaaaattctgaaattatttcagatattcttcgtgctatagataaaattcagaaaaaatctgaacaggaaattatatctgaatatgaaaaaaagggatattctaaggaaaaattagaaaaaataattgaattttcaaaattgaaaggttctcctgatgaaatatctaaaaaatttgatctaactcaatttgaaaactggaatgaacttacatctctttttgaatctttgaaaaatcgtaatgtaaataatattcaaattgattttggaatagttcgaggtcttgattattattcgggaatagtttttgaggcttttgataaaaattttgatattggtgcattagtaggtggtgggcgatatgataacttgccgtctgtttttggtagagatgatcttggtgctacaggcgttgcaggtggtgttgaaaggatcatacttgctctagaaaaccaaaattcatcattcttacaaaaaactaatcgtgtttctgttttgtatgtaaatgaagaaatgaaatcaaatgcaatcaaaataacatctatcttgagagagaattctatttctactgacattgatctttctggtagagcattaaaaaaacagatggaacaatcaacaaactcaaaatttgttataattgtgggtccagaagaattttcaaaaaatatggttgttgtaagaaatatgtctgatagaactgaaaataaaattttaatcccctgat

SEQ ID NO: 302374 - DNA, 725 bp, Unknown
  Bacterial polypeptide expressing nucleotide sequence isolated from the Sargasso Sea
aaatttgcaaaattttaaaaaaattttatcaaaatattttaaagatcatcaaaattctctgtcaattgaaagtaaaagtaaaatagaaactaatcctttgagaatattagactcaaaaaatattcaagataaagaaatagttttgcaatctcccaaacttattgagttaatatcacaagcagaattgaagtcttatgaagaaatcaaagattgcttgaatgatttgagtataccaatttttgaagatttaaatcttgtgagaggtttagattattattgtaacacagtatttgagtttaaaactaatgaaattggtagtcaggatacattgatcggtggaggtagatataatggtttaataaaaactctcggaggaaaagatattcctggtattggctgggcaggaggaattgagagaataatgttattaatgaaggatgttattgagactactgaagttattcacttatctatcaaagattcaacattaaaaaaacatggattaaaaatatatgatcatttaattaaaagcaatttatccgtctattggaactataaatataatcttaaaaaatctttatctctggccagtgaaaaaaaagcaaaatatatagtaatagttggcgaagaagaaaaaaataataacaattacgttctcaaaaatttatctaatggagaccaaaaaactgttaacttaaataatatattagatcatattaaatgat

SEQ ID NO: 302375 - DNA, 531 bp, Unknown
  Bacterial polypeptide expressing nucleotide sequence isolated from the Sargasso Sea
aaaggtcattaaatatactagaaattgattttgaagaaaacgctaatctcgttagaggtcttgattattattgtaatacagtattcgaatacaaatcagataatttaggaagtcaagatacattacttggtggtggaagatatgatggtttaataaaagtattgggtggacctgatatacccggtattggatgggccgcaggtattgaaagaattgcattattaatggagtacgaaaaaaaaataagctcaactattcatattgcagtaacaaatgaaaaatttatagattatttcctttacctacaaaaatatttaactgaaaatagaatttcatattactggaattataaatacaatttaaaaaaatcatttacaaaagcaaatgcatcttcggcatcatatataattattattggagaaaatgagtttaatggtgacttttttactattaaaaatttaatgaatggtgaacaaaaagaattaaagcttagtcaaatatttaatcatttgaatgataaatctagataaa

SEQ ID NO: 302376 - DNA, 415 bp, Unknown
  Bacterial polypeptide expressing nucleotide sequence isolated from the Sargasso Sea
atgattaaatttcgaaatattaaaggaacgcatgatcttttaccagagcaagtagctatatggaggcaggtagaaaatattattcacttgataatggagcaaaatggttttggtgaaattagaacacctatatttgaaaatacagatctttttataagaggtattggaacagatactgatattgttagtaaagaaatgtattcttggacagatcaaggaaacaatttacttactctcaggcctgaattgacggctcctgtagcaagggcatatattcaacaccaattgtcaaataaaaatccaatgcatcgtttatattatttagatactttatttagaagagaaagaccacaaaaaggcagacaaaggcagtttcatcaatttggtgctgaagcaatagggtctccaaaaatcc

SEQ ID NO: 302377 - DNA, 730 bp, Unknown
  Bacterial polypeptide expressing nucleotide sequence isolated from the Sargasso Sea
aatctctatagaaataatttagtaaaatattttttaagtaatgaatcaaggttatctgaagtttctcaaggtagattgaggttaaaccctctcagaattttggactctaaagagcctgaagaccaagatattattaaaaaagcaccactcttatcatcatatttgaataatgtttctgtagaccattttgagaaggttttaaaataccttaaaaaatcaaatattaaatttattcataatgaaaaacttgtaagaggtttagattactattgccatacaacgttcgaatttataacaaaagatttaggctctcaaggcacagttttaggtggaggtcgttataatgggctatctgagatgcttggtggaccaaatattccagctgttggttttgctgcaggtgtcgataggcttgttatgatgaataaatcaaatgaaatattaactaaattaatatgcattatccccatagaaaaagaaaattttgaatactgttacatgattttaaatcaattaagagagaatgagataaaatcagaaatatatcctggcggaaatgtgaaaaaaaacttaaaaaaaattaataaaaaaggacaaaattttgtaattttgataggtaataatgaaattcaaaataaaactgtagtttttaagaacctatctactggagaacaaacagaaattactaatgatgaactttttatcagattaaattttataaaacactaat

SEQ ID NO: 302378 - DNA, 544 bp, Unknown
  Bacterial polypeptide expressing nucleotide sequence isolated from the Sargasso Sea
tttatcgaaatttcatttagtgagaggtttagattattacacacatactgcatttgaaataaccagcgggacattaggttctcaagctacagtatgcggaggaggaagatatgatagtttaattagtcaaatggggggggcagaaactccagcaattggatttgcaattggattagaaagactcataatattatgtggtagcgagtttgaagaaactagagaaacagatatttatattgtgaataaaggtattcatgctgaaatattggcaatggaattatccagaaagctaagaaattatgatttgatagcagagttagatcttagtggagcatcattttcaaagcaatttaaaaaagctaataaattaaaatcaaaaagtattattgtaattggtgatgatgaagcagtaaaaaatgaatttgttattaggctttttaataatgataattccgaaaacaaagaagaaactatatcaattgaagataatattaaatttgaaaagtggataaaaagatatttaattttagataaaaacctttag

SEQ ID NO: 302379 - DNA, 631 bp, Unknown
  Bacterial polypeptide expressing nucleotide sequence isolated from the Sargasso Sea
caccctggccgatgccctcagctcagagagccggcaacgctttgctgcggttcagcaggggctgaccgccctgggcattcccttccggctcaatccgcggctggtgcggggtctggattactacggccacaccgccttcgagatcacaagtgaccaacttggggcgcaggccaccgtatgcggtggtgggcggtacaacggtttgatcgctcaactgggcggagccactacgcctgccatcggctgggccctgggcatggagcggctattgctggtgctggaggcggcggcgaaggccgatccggatggggcagcggcgcggttggtgggctcggccgcccccgatgtctacgtggtcaaccgtggtgaacaggcggagaccatggcgctgaccctcacgcgcggtctgcgggctgctggtctggccgtggagctggatgggtcgggctccgccttcggcaagcagttcaagcgggcggatcgttgcggtgcccgctgggctctggtgctgggcgatgacgaagcaacccgcgctgaggtgcggttgaagccgctgcagcagcaaggagaggagtccaccgttgcgctgacggcaatcgccgcgatggtggaggcgctgcgcactccctga

SEQ ID NO: 302380 - DNA, 313 bp, Unknown
  Bacterial polypeptide expressing nucleotide sequence isolated from the Sargasso Sea
catggcgaaacttcaacccgtacgtggaacgcacgacctcctgggtgacgaggcgcgttcgcacctcgcgattgtcgaggcggcgcgcgacgtggccgaccggtacggctacgggcccatgtcgacgccggtgttcgaatttacggatgtgttccagcgtaccctcggagacacttccgacatcgtgaccaaggagatgtacaccttcgaggacaagggcggcgacagcctgaccctgcgcccggagggcacggccggtatcgcgcgcgccgtcatttcgggtgggctgcgcaacgagctgccgctcaaatgt

SEQ ID NO: 302381 - DNA, 886 bp, Unknown
  Bacterial polypeptide expressing nucleotide sequence isolated from the Sargasso Sea
ggggaggtttagacaatttaatcaaatgaattttgaaattttgggatcagatgatgcattggcagacgctgaattaatcttattagcaaacaaaattcttgcaaatttattgttaaataaaaagtttacattatacataaattctttgggcgatagagatacattaaaggcttataaaaaagaattaagtaatttttttgataaatataaagaagatctttctttagatagtcaaagtaaaattaaaaaaaatcctctaagaatattagattccaaagaaaaaaacgatataaaaatctgtaaagatgctccattaatttctaaattatattcatacgaagcaagtaaacagtttgatgaagttaaaaatttactcacaagttcaggaatagaatttatacaagataattttttagtaagaggtctcgattattattgcaaaactgtttttgaatttaaaaattctaatttaggaagtcaagatacactaataggcgggggacgatataatggattagtaaaggcaattgggggacctgatatacctggtgttggctgggcaggagggattgaaagaatcacacttctaaaagaatcaaaaaaaaatgaaaattcaaattgccatctaattttaattgatgaaaaagttaagaattatggaattgaaactttaaaaaaactaaatgaggaaaatttatcaattttttttgattataagtataatcttaaaaaatctttagcttacgcgaataaaaagcaagtaaaatttgctattattattggggaagatgaagcgaaaggtaatttttatactctaaaaaatttaactgattctaaacagcaaaaatttaattttaatgatttaattttagaattgaataaatga

SEQ ID NO: 302382 - DNA, 817 bp, Unknown
  Bacterial polypeptide expressing nucleotide sequence isolated from the Sargasso Sea
aatgaaagattttgaaaatgatgaaattcaaaagattgagttcattagagaaaaatttctctcaacctccaacatatttggatttcaattgatggaaccatcaccaattgaattaatgtctgttattgaagcaaaaagtggaccaacaatccgggatgatgtttattttttcaatgataagggtgatcgagaagtttcactaagatttgattttactgttggtttaacacgttatgccacagaacaaaaatcaatgaaacttccagcaaaaatttctgcatttggaggcgtatggagatatgatgaacctcaaaaaggaagataccgtttttttcatcaatgggatattgaaatttttggaaaacaaaataccgaaaccgattcagaaatcatagaatttacatcaaaatttttctctaatcttggattaaataatataattttgagtatatctcatcgtaaaattgttcagtcatacatctcatctctctttgaaactgaagattccgaagtaatctctgatattcttagagcaattgataaaattcagaaaaaatctaaacaagaaatcatttctgaatatgagaaaaagggatatcaaaaagaaaaattagaaaaaataatcgaattttcgaaattaaaaggtagtcctgaagaaatttctaaatctatagatgtatcacaatttgaaaattggtctgaattaacaacactttttgcatctcttagtaaccgaaatgttaagaatattcaaatcgattttggaattgttcgtggtcttgattattattctggaatagtttttgaagcatttgat

SEQ ID NO: 302383 - DNA, 184 bp, Unknown
  Bacterial polypeptide expressing nucleotide sequence isolated from the Sargasso Sea
atgagtaaagagcaaatacgttcaattaaaggcactcaagatattcttccagatcaatcgcataaatggcagaatctcgagaatagaattcattctataatgaagctctacaattacaaagagattcgaacaccggttttcgaaaaaacagagctctttaatcgtggagtgggtacggaaactg

SEQ ID NO: 302384 - DNA, 688 bp, Unknown
  Bacterial polypeptide expressing nucleotide sequence isolated from the Sargasso Sea
atctgaggttagccaaagaagactaaaaaagaaccccttacgtatccttgacacaaaaaatgagcaggaaaaacagatactcaaatctgctccaaaaattgaagaattctatacagatgatgataaaaattattttttaaaagttcagcaatatattaatgacttagatatcccatttaaaatagaccctctactagttagaggtttagattattacacccagactacttttgaaatatcttccaaggatctaggtgctcaagatgctttacttggaggtggaagatataatggcctaattaaagcattaggaggaaaggatactccagctgtcggatttgcagcagggatggagagagtacttattgcagctgaaaaaaggaaaaaattaaaaaataagaacctatgtatttatgctatatgcactcataatgaatctttaggtgtcttacaaaaaagttcagaagaattaagaaatttaggtattaaggtagtttgtgacacacttaggagaagcatgaggtctcaaatgagggaggcaaataagtgtaatgctgactttgcaattattgttggagaagaagaatttaccaataaaactatccaaataaaaaatttgagtgaaggaaaacaagaaagtataaaatatcagaacctaattacttatttcaaaagtttgacattttaa

SEQ ID NO: 302385 - DNA, 847 bp, Unknown
  Bacterial polypeptide expressing nucleotide sequence isolated from the Sargasso Sea
tcagattatataattaaaatatcatcaagaaaaataactgaagaattttttaaaaagataaacttaattgataataagcaaaaacttactgccttaagggctttagataaaattgatagacttggctggagtggagtaaaagagctgctgggtgctggtagaaaagataaatctggagattttacaaaaggcgcaaatttaaaatccaaagatattgttaaaatagaagaaactttaaaaataaaatcacccaaaacggaagatctagttgagttggtaaaaatttttaaagattataattttaataattttgaatttgatccatcaatcattagaggtttagaatattatactggcgcaatttttgaggtgaatttgaaatttgatgtaacaaataataagggacaggtaatacaatttggttccataggaggtggaggaagatatgacaacttagtaaacaactttggcaacttcaatgctccagctacaggtatatctataggtatagatcgattggtttatgctttgatgcaaaaaaaagaatttaaagtaaaacaaactaaacctatagtaatttgtgtttttgataaaaattcaatgagagagtatataaatttacaaacgataataagaaaagagggtattagcgtagaaatttatcctggagtaagtaaattaaaaaaacaaatggagtatgcaaataaaataaactctccagctgtaattttatatggtgagaatgaaataaaatcaggaaagattactttaagaaatttaagttcaggtaaagagcaatcaatcgaaataaaagaaatagttaatgaaatcaaaaaaattatctgaa

SEQ ID NO: 302386 - DNA, 598 bp, Unknown
  Bacterial polypeptide expressing nucleotide sequence isolated from the Sargasso Sea
tcaaaaaaagaggaagatgttgaaatttcactatcttcaccaaaaatatatgaatacttaacccaggaagctaaaaagcactacgaagatcttaaaagatcattaaatatactagaaattgattttgaagaaaatgctaatctcgttagaggtcttgattattattgtaatacagtatttgaatacaaatcaaataatctaggaagtcaagatacattactaggtggtggaagatatgatggtttaataaaagtattaggcgggcctgatatacccggtattggatgggctgcaggtattgaaagaattgcattattaatggagtccgaaaagaaaattagctcaactactcatattgcagtaacaaatgaaaaatttacagattattttctttatctgcaaaaatatttatctaaaaatagaatttcgtattactggaattataaatataatttaaaaaaatcatttacaaaagccaatacttcttcagcatcatatataattattattggagaaaatgagtttaatggtaatttttttactattaaaaacttaaatactggggaacaaaaagaattaaagcttgatcaaatatata

SEQ ID NO: 302387 - DNA, 930 bp, Unknown
  Bacterial polypeptide expressing nucleotide sequence isolated from the Sargasso Sea
gatatattactgatactataaggtctgtatttattagttatgggttcaatgaaatagagacaccatctttagaaaaaagagatactttatatcaaaaatatggtagtgaaggagataaattcgtttttaatatcatcaattcaggagaaaaaattaaaaaggctgacatacaatcattcaataatgaaaaatataatgactttatatcctctatttctgaaaagggtttaaggtttgatttaactgttccgcttgctagatatgtatcacagcatcaaaatgaaataacctttccttttaaacgatttcaaatacaaaatgtgtggagagctgatagaccacagaaaggaagatatcaagagtttacacaatgtgacgcagatgttattggatctaaatctgtattacttgaatttgaaatgctacaattgttctcaacagtttttaaaaaattaaagttaagttctgtaaatattcgaattaatcacagaggagttcttaatgaaattgctaatcgtattggattaaaagataatttcaatgagtttttaataatccttgacaaaatagataaaattggtgttgataaggctaaagatgaggttaaaaataattttaaaaatattaaagatatcgatgggttatttgaaatgatatcaaaaaagatgtcggcaaaaaaatatatagaaaatttaaaaaataatgttttggttcaaaaggataatttaatttttgaggagctagaaacattgtcaaaattgattgaaaatgacgacagcttaattaatattgattttgatctatcactagctcggggattggaatattatacaggtttgatttatgaagtatcattaaaatcagattctcaaattggatccttaggtgggggaggtcgctatgaaaatttaactgagtcatttaattaaa

SEQ ID NO: 302388 - DNA, 706 bp, Unknown
  Bacterial polypeptide expressing nucleotide sequence isolated from the Sargasso Sea
tatggataaaataagctcaattagaggaatgcctgatgtttttgaatctgatataaactatcttgcagaactgaatgaaactctaagtagaatattcctatcccataacctaaatgaagttaatactccaattttagaacaaacagagctatttataagatctacaggagtgacatcagatattgtaaataaagaaatttatagctttaatgatcgtaacgaacaaagtctatctttaagaccagaaggaacagctggtgtcgtaagatcaataatacaaaaaaaacttgataatgcagaacacaaactttggtatcaaggtcccatgtttagatatgaaagaccacaaaaaggacgatttaggcagtttaatcaagcaggagttgaattgcttggatttgaggagggttcatcagatttagaaattatttcgatagtatgtgatatttttatcgaattagaacttgaaaactctgttttaaaaattaatcatctaggagataaagataccaaagaaaaatttttatcagaacttctcaagtatttgaaaacttataaagatgagttaagtgataacgacaaggaaaaactaaataaaaacccactgagattacttgattctaaagatggaaatttaaaggactttcttgataaaggcccaaagattataaattttctctcttccgaacaattgaatcttcttgat

SEQ ID NO: 302389 - DNA, 504 bp, Unknown
  Bacterial polypeptide expressing nucleotide sequence isolated from the Sargasso Sea
attataatttggtaagaggtttagattattactcaggctttgtttttgaggctatatctccaaatcttggagcgcaagatgcttatcttggaggggggcgttatgacaatctctgtaaacagttgggtggtaaagatcttcctgcaattggaatggctattggaattgaaagattggcattgatttcaaatatcttcaagaaagataagactctagtatcttttataattatttctagtaatcttgagcaaaaagcatataaaatagcgcacgatataagaactataaatagtgaaatagaaataaatgttcagttatcagatgggagcttaaagtcgaagctaagaagggcaaataaagacaaatcttcttatgcaatcatagttggtgatgaggagcttcaaacagatactgtcattttgaaatcactatctaatgaggaatttgaacaaaaaacactagatttctcagagttaaaacaatttatatcaaatttggaataag

SEQ ID NO: 302390 - DNA, 778 bp, Unknown
  Bacterial polypeptide expressing nucleotide sequence isolated from the Sargasso Sea
atgtctttaaaaccgtctatatctaaaggaactaaagattatttaccaaatgatctaggtaaaagaaactatctaaaaaaaattttaagacaaacattcgaaatatttggatttcttccaattgaaaccccctcttttgaaagaattgaaactcttactggtaaatatggagaaaatggagatagattgatttttaaaattttaaattcaggagataagctaaaaaaggctgatattaaatcatttgtagataaagatttgggtaaattttcaaattcattatctgagaaagcattaagatatgatttgactgttccacttgctcgttttgtttcccaacatcgtaatgaaattagctttccattcagacgctatcaaatacagaatgtttggcgtgctgatcgcccacaaaagggaagatttcaagagtttttacaatgtgatgtagatattttaggaaatagatctattttacaggaggttgagattattttgatgtgtgaatacatattcagtaaattaaatcttaaaaacatttctgttaatataaatcatcgtaaaattttagagggtattgctattttaattggcgcaaaagataaattttcacttctaacttcttcccttgataaacttgaaaaaattggaaaaaatggagtcatcaaagatcttaaaactcatggatttactaaaaaatcaattgacgctttattaccatttcttcaaattaagggagaatttaaatcaaagatagattttctctctaatagacttaaag

SEQ ID NO: 302391 - DNA, 745 bp, Unknown
  Bacterial polypeptide expressing nucleotide sequence isolated from the Sargasso Sea
aggttcagtttggagaaatgaaaaacctggaccaggtagatttagggagtttacccagatagatgcagacatagtaggaaccagaagtacatatgctgatgctgaaatgtgtatgctaatggctaatactttattaaagtgtggtcttgagaagaatgaatttataattaaaataaataatcgaaaaatttttcaaggtatattagattttttcgatattcaggatccaaaacaaagtttaactattttaagatctatagacaaatttcaaaatattggaaaaaaaggtgttttagaacttttaacaaaaggaagattagactcatcaggagattttaccaaaggtgcaaatttaaaaatgaacatagctgaagaaatttttgaactttttagtgctggttcaataactagatttgatggaaaatatagactaacaggatcaagcacattatatcaaatagacaataaaatatatttagaaggaataaaagagcttgaagaaatatttaattatctaaaagctacaggtgaaattaatattgcaaatacagatacaacgtatgtaagtgacaagattaatattcagctagattattcagtggttagaggtcttgaatattatacagggccaatatttgaggctgagacagcagaaacagctttctggaaagaagcacctgaagatcctaaagcatttaaaaaaataaaaatagaatcaattgggggaggaggaagatacgataag

SEQ ID NO: 302392 - DNA, 376 bp, Unknown
  Bacterial polypeptide expressing nucleotide sequence isolated from the Sargasso Sea
atgttcagttcaatcagaggaacaaaagatatattacctaaagaccaaaaatattgggattattttaagcatcatgcttttaaacaatctgagatatatggctttgaaagaatagaaacccctacttttgaaatgactgatttatttctaagaggaataggaatggggacagatatagttacaaaagaaacttattcgtttcttgatagaggaaaaaataatattacattaagacctgaaggtacagcttctgtatgcagggcatatattcaaaattctatgcacagcgaatcacagccaaaaaaaatgtactattttacttctatttttcgatatgaaagaccgcaatcaggcagattaagagagcatcacccaa

SEQ ID NO: 302393 - DNA, 725 bp, Unknown
  Bacterial polypeptide expressing nucleotide sequence isolated from the Sargasso Sea
gaaaaatgaacttcctgaagttgataaaaaaaagtttgatgtaaatcccatcagaattcttgattctaaagaaaaggtcacaagggatttaattcttgattcaccaaaaccaattgaatttcttgataatgaatctaaacaacattgggagaaacttcaattaattattaatcaaatgatagaaaattttgatgatatcgatttagtcattgatcataatttagtaaggggacttgattattattcaatgactgtttttgaaattgaaccagttgataaaagtgaaaaatctcaagcaagtatactttcgggaggaagatacgataatttaatttcatatattggggggccagaaacacctgctgccggttttggtagtggaatagaaagggtaatgctttcaatggatgatgatttttttgaaattgattgtttgcctcaattaactatcattcctctttcaagtaaagcgtggataaaaacaaacttactttctagtaaattgagagaaaaaaatattgttgttgtaaattcatcttcaaataaaagttttaaatcccaaatgagatatgcaaatcaaataaaatcaaaatatttaatggttgttggggataatgaattaactaataatgagattgaacttaaggaactttcaagtggcctagccactaaaatgaaattcaattttgaagaaatttactcaaaattaattgaaaatggataaa

SEQ ID NO: 302394 - DNA, 889 bp, Unknown
  Bacterial polypeptide expressing nucleotide sequence isolated from the Sargasso Sea
ttgccaaacattgaacacaaagatttatttacaaaatctataggtgaaaattccgagatagttactaagcaaatgtatgaatttgaagataaagctggacgaagtcttgtattgagaccagaaggaacagctagcgtcgtaagatatcataacgaatttcataaagataaatcaaataaatacagttattttggaaaaatgtatagatatgaaaacccacaaaaaaatagatacagagaatttcatcaagcaggggctgaactaatcggaacattagataattattctgacgttcaattaattaaatcttcatttagatttcttaattcacttgaattaaattttaaattaaaaatcaacacaataggtagcgtggatgaaagaaaagagtatgtaagtgttttaaaaaagtattttgataaaaacaaaaaagatttgtctaaagaaagtatagaaaagattgaatcaaatacattaagaatattagattcaaatatacaagaggacttacagattattgatctggccccacttattacaaattacctagaggatgaaacaatacagaaatacgaagatacaaagaatatgctaaataatattaatattccttactccgaagatcataagttagttagaggtttagattattacaatgatttaacttttgaatttgtagccgatggtgtagttattggcggtggtggaagatatgataaattgtcacaaatacttaacataggtcaatctcaaggagttggtgtcgctttcggagtagaccgtataataaatcaacttcaacttgatactcataaagaacaaatatttttaatatctcaagatgaagaagaaatgaatgacatttctgatgaattagataaaaatcata

SEQ ID NO: 302395 - DNA, 664 bp, Unknown
  Bacterial polypeptide expressing nucleotide sequence isolated from the Sargasso Sea
gatggaaaatccaagaacagttagaggggttcatgacatacttccagacgtcatgcacaaatataattacataaataaaattggtacttttgtatgcaatcaatcttgttatgaacagattgatactcccatatttgaatttgcggacttatttataaaacctcttggtgagacaagtgatatagttacgaaggaaaattatatatttaaagataaaagcaataatacattaatgttaagaccggaggggacaactagtgttgtcagagcaataattaacgcaggattaacacaaaacatgcccaaaaggtatttttattttggacctatgtttcgttatgaaagaccccaaaagggaagattaagacaatttaaccaatttggcgttgagttgttaggagtagacaatacatttggtgatgttgaagtaattaatttgggttacaattttttaaaaaaacttaaattactgaataaagttgatcttgtaattaatactttaggtgatcaagaaagccgatctaaatatagagatgaacttgtactatattttaacaaatataaaaatgatttgtcagaggaaagtaatatcaggttaaagaaaaaccctcttagaatacttgattctaagattaatagagacaaagaaataataaaaaatgcc

SEQ ID NO: 302396 - DNA, 583 bp, Unknown
  Bacterial polypeptide expressing nucleotide sequence isolated from the Sargasso Sea
agtattaagaattttttaaataaaactcaattagaagaatttaaaaaaataaaatctaaactagatgagattggaattcaatacgaagagaatgctagccttgtaagaggattagattattacaatggtctagtttttgaatttctttctgatgatctgggtgcacaaaatgctattttgggcggaggtagatacgatgggcttattaaaaatcttggaggtagagatttatcagctacaggttttgctcttggtatagatagacttgcagatattgtgaaattatcatcgattaaaaaagatctatttataggttgtgttgataaagaatcacgaacttatgcccaagcattagggtacaaaattaggaaagataatagccttcttgtagttgagaactatcttggtaatgcaaatgttggcaaacaattgaaaaaagctgattctcagggctttaaatttgctatcatagtcggccaagatgagcttaaaagtaaaacacttaaattaaagaatttaagagaggataaacctgatcttgagctaaaagaaaaagatttattggagcattttgaatgttaga

SEQ ID NO: 302397 - DNA, 515 bp, Unknown
  Bacterial polypeptide expressing nucleotide sequence isolated from the Sargasso Sea
taatgttaactctaaattagtaaggggtttggattattacaatcaaacagtttttgaatggaagactaacttgctaggctctcaagacacaatcatcggtggaggaagatatgaccgtctcgttgaagagttaggaggtaagtcttgcccagctattggtttttcaataggaatggagaggcttatgttgcttttagaagagcaaggaggaatgaatatccaagatgatttagatatatattttatatgcttatctgaaagctcagcacaagaggctataatgtactctgaaaaacttaaggacaactttccatctctaagaataaaaactaatttaggcatagaaagtgcaaactcccaatttaaaaaggctgataaatctggtgctaaaatagccttagtaataggttcagaagaattagataataataaaataggtttcaaagatttaagaacaaagtctaatcaagagagtcttacttttgaagatttgttaaagaaatttaaagaataat

SEQ ID NO: 302398 - DNA, 909 bp, Unknown
  Bacterial polypeptide expressing nucleotide sequence isolated from the Sargasso Sea
gacaatttcatcaatttggaattgaatgcattggagacgattcgccagatgtagattttgaagttataaaaatagcttgggatatattgagtaatctaaattttaataatgtcttacttaacgtcaattctttaggagattctaaagatagatttatttatactgaagaattaaaaaaatattttagtaaatatattaatgatttaccaaaagtagataagcttagatttgaaagatctccactaagaatattagactcaaaagaagatataacaataaaaatttctgaagaagcacccaaaacattagattttatttcttctgaaagcttagtacatcatgaaaacctaatattaaatttagaagaattacgttcacatgataagaaatttaattataagattaataatcgattagttagagggttagattattataataaaacggtttttgaatatacaagtgactctttaggccctcagggagttctactcggaggaggtagatacgatcctctaattaaaattctaggaggtcaagatacacctgctgtggggtttgcaatgggaatagaaagagttgtaaatgaactaaagaagaatattgatgtacaaaaaaattatgttgatgcagtaataattgttactgatgaaaatctaagaattgaatcagttcaaatagcaaataatctaagaaatagtaatattagaacaataattgctccaaggaaatctataaaagctcaaatgagatttgcaaacaatatcgattctaaagcagctgtttttattggtaaaaatgaattagaaaatcaaaaattatctataaaattattacaaataaaatctgaacaatttgaaatagatatagacgatatgaatcaactaaagaaaatcttaaattcttgaa

SEQ ID NO: 302399 - DNA, 745 bp, Unknown
  Bacterial polypeptide expressing nucleotide sequence isolated from the Sargasso Sea
tttaatcaaatcaattttgaaaattttggttctgatgattattttgctgatattgaaattataaattcagcaaatattattttaaaaaaagtaatacccaattctaactttatcttgcatattaactcattaggcaccagagaaaatttaattgattataaaaaaatattatcttctttctttgaagaaaataaaaaatcattatctttagaaagtattgataaaataaattcaaatcctcttagaattttagattcaaaaaattctgaagacaaagaaattattaaaaaatcaccaaagttaattgaattgttgtcaaaatcagatttaaatatttatgaagaaattaaaaaatgtttaaaagatctaggcatttcaattttggaggatttaaaattagttagaggcttagattattattgtaatacagtttttgagtttaaaactaatgaaattggcagccaagatacacttattggaggtggaagatacaatggtcttattaaaactctgggaggaaaagacattcctggtgttggatgggcaggtggaattgagagaattatgctattaatgcaagatatatcttttgaaaataaagatattcatttagcaattatcgaaccaaattatagaattcatgccataaaagtttatgattttttaataaaaaacaacttttcagtattttggaattataaatataatcttaaaaaatccttatctatcgcaaatgaaaaaaatg

SEQ ID NO: 302400 - DNA, 634 bp, Unknown
  Bacterial polypeptide expressing nucleotide sequence isolated from the Sargasso Sea
agacaaaaaattaattgaaacatcacccaacatattatcttttcttgatgatgaatcaaaatttttttatgatagtttcaaagaaactttgttaaaacttaatattaattttgttgaaaaccctaacttagttcgtggtctagactattacaatcatactgcttttgagtatattgaactaaatcaacaaagtaataataaaacaatcttagcaggtggtcgatatgatggattagtaaatgctattggaggtaaggatatctgtggtgtaggttgggcagctggtattgaaagaatatcatcaattatttcaaagaattttattaataaaaataattttattatctctatttttacattatccgaagaacttgatttaattctcttgaaagttattaaaaaaattaataatcataaaaatatttcttttaatataatttattcaggttcagtaaaaaaaaaattttcaagagcaaataagatacattcaaaggcttgcttaatttttggtccagatgaatataaagacggaaatatgattttcaaggatcttaattctggcaatcaagaaatatttaaaataagcaaagttaatgactttttaatgaaaaaatctaaaaatttaaaatcgtga

SEQ ID NO: 302401 - DNA, 553 bp, Unknown
  Bacterial polypeptide expressing nucleotide sequence isolated from the Sargasso Sea
gatgactttaacaaggaatctggatgttctgtctattccatatgaggtagaccatacattggttagaggctttgattattatactaggaccgtatttgaaatagtgccttctgtcgagaagagccaaaacactctgatagggggcggaagatatgatggattgatcaaaatgcttggtggaaaaccaactcccggtattggatttggcatgggacttgagcgtgttatttcagctattaacaaaacgtcacatcagtcagacttgaatgattacatgaagcttttagtggcacatattggagatgcggctaaagaaagagcagtgctattaagttctagaataaggaatgctggaattccggctgtgttggctccaactaggggtattaaaagtcagctgagatacgcaacgtccatatcggcaacacataccataattattggtgacaaggaattacagactggtgaggtggtgttaagagacttttcaacacattcacaagaaactatatccgaggctaatcttattcaagtcctcttaaatcttatttaa

SEQ ID NO: 302402 - DNA, 765 bp, Unknown
  Bacterial polypeptide expressing nucleotide sequence isolated from the Sargasso Sea
atgtttagaagagaaagacctcagtcaggaagattaagacagtttcatcaggttggtttagaagtatttgatgatggaaattttcttaatgatgttgagataattctcatagctgagaaattcttggagttacttgatattaaaaaaaaggttagattggaagtgaatactcttggcagtttggaaagtagaaaaaaatacattgatgtattgcttgattttttaaaaaaaaaaaaaaaccgtctttctgttgagagtcaaaagaaattagatcttaatccactaagaattttagactctaaaaatcaagaagataatgatataataaaacaggctcctaaacttattgattttttagatgagaaatcaaaattattctttaataattttattgatagtttgaagatattaaaaattgatttttccataaactattttttagttaggggtttggattattacaatcatacagcctttgaatatgtaactttcgaggataagagccaaaacgcagttttagctggaggccggtatgatggtttgttgaaatctttaggaggcaatgatttgaatgggattggttgggcagccggtatagagagaattctattatgcatggaaaaaataaaatcacaaagaaaaattatcagttgtttctctacatctgatagtcttaatttaataatgtttaatatttttagaaagttgaagattaataaaggatatgcattaaattttttattagctggtagtttcaaaaaaaaa

SEQ ID NO: 302403 - DNA, 337 bp, Unknown
  Bacterial polypeptide expressing nucleotide sequence isolated from the Sargasso Sea
atgtcatcaaaacctaatacacctaagggaacaagggatttttcttctgaccaaatagtaaaaagaaactatattctaaaaattctagtagactcatttaagtattttaattactctgaaatacaaactccatcgtttgaaaacctggagacgttaattggagaatatgaagatgatcaggatggtcaaatgtttaaaattatctcatccggtgaaaaaataaaaagagcagacattgattctcttaataaaggtgaattaatcaaattctctaactctatttctgataaggctttaagatatgaccttactgttccacttgctagatatgtatctc

SEQ ID NO: 302404 - DNA, 542 bp, Unknown
  Bacterial polypeptide expressing nucleotide sequence isolated from the Sargasso Sea
gatggatttagtaagcaagaaggcagacaagacagaagtgtctaatagaattttcttcacagagaaagttattaaaaatatttttcaaagttattgtttatcagaaataaggactccagcattagaggatgaaaatctatttaaaagatctgtaggcgatacttctgatattgtaaacaaggaactgtattcgttcttggataaaaatgataaaagaatagtgcttaggcctgagggtacagcaggcgttattagatcaataattgaaaaaaagattgatggagatgctcatagattatggtatctgggacctatgtggagatatgaaaggccacaaaaaggaagatttagacaattttatcaagctggaattgaaattttgggacatgaagagggtttggctgaattagaaatgatctctttaatttgttcaatcaatacacaattagaaattaaaaatccagtaattaaaatcaatcatttaggaaacaagggatgtaaaaagttattttgtaaagagcttgtgagttatctaaaacctt

SEQ ID NO: 302405 - DNA, 447 bp, Unknown
  Bacterial polypeptide expressing nucleotide sequence isolated from the Sargasso Sea
catgaaaaagctcagaagccttaaaggaactcatgacatattgccagaagattcttacaaatggcgtcatatagaatctattgtgcatgaagtatgtgcacaatttggatatcaagagattcgaactccgatttttgaacaaaagcaactcttttcaagaggtgtgggagaagaatcagatattgttacaaaagaaatgtactcatggcaagatagagaggatagcttccttacattaagaccagaattaacagcttcagttgtacgggcgtatatccagcataatttgggaaatctttctcctgtccaacgtttttattatataggtccgctctttcgcagagagagaccgcaaaaaggtagacaacgtcaatttcatcagttcgggatagaggcatttgggatcagttttgctgaacaggatgctgaaactatagcaatcgcatg

SEQ ID NO: 302406 - DNA, 520 bp, Unknown
  Bacterial polypeptide expressing nucleotide sequence isolated from the Sargasso Sea
aatatcccatttaacattaatgataagcttgtgagaggattagactactacactaggacagtatttgaattcaactccactaagctcggagctcaagatgcaattcttggtggtggacgctatgatggccttgtagagatccttggtgggaaatcaactccaggtatcggtttcgctgctgggatggaacgttttctgatcgcgatggatgacgaaaaagtaactaattcaagtatagatatttattttgtatgcctagatgagtacggactttctaagactctacaactttcgaatcaactaaggagtagtggacttaaagtgatctctgatcctcttcggaggagtatgaagtcacagttaagagatgcaaacagatcaggtgcgagatttgctttgatcttaggtgaaactgaaatgaatgatggcacggtcggttttaaagatcttgaaaaaggtattcaaaagacaattttacaatctgaggtactaaatttttttgataatttgacaaactgaa

SEQ ID NO: 302407 - DNA, 574 bp, Unknown
  Bacterial polypeptide expressing nucleotide sequence isolated from the Sargasso Sea
tatgtctaaactgcagcctgttcggggcactgctgatcttcttcctgatgtgatggcacagcaccggctggtgattgatacggcgcgctatgtgacggcgcgctatggctttcaggaaatggctacaccaattttcgaattctccgaggtgttcagccgtccgcttggcgagaccagcgatattgttaccaaagaaaattacagttttgctgaccgcggtggcgaacaactgaccttacgtccggaaaataccgctggcgtggtgcgcgcgatgatctcaggtgggttgacgcaaagcctgcctcttaaatatttttatgcggggccgatgttccggtatgagcgcccacaaaaaggtcggatgcgccaatttcatcaagttggcattgaataccttggtccaaatgatgccttggcagatgccgaggtgattagcgctggcgcacggtttctggcccagcttgacgttttgccacattgcgtgttgcatttgaactctcttggtgatgtggaaagccggcaggcgtatcgggcggcgctggtgggatttttacagacacatgaaagtgaattg

SEQ ID NO: 302408 - DNA, 277 bp, Unknown
  Bacterial polypeptide expressing nucleotide sequence isolated from the Sargasso Sea
atgtctaagatacaaaccctaagaggtatgaatgacatccatcctaagcaagttaaggagtggacttttgtcgaggaagtcattaaatccgtcgttgaatcttatggatatgaagaaattagatttccagttgttgaaaaaacagaattatatacaagatcaaacgaagccgcagacatcgtcactaaagaaatgtataccttcagtgacaaaagtggagaaagcatctcattaagacccgaaggaactgcaggatgtgttagagcggctattgata

SEQ ID NO: 302409 - DNA, 934 bp, Unknown
  Bacterial polypeptide expressing nucleotide sequence isolated from the Sargasso Sea
atgagaaagttaaaaaccattaggggaatgcctgatatttttggaaacactcttcaaaagatctcttttgttgaagaagtctgtaggaagacttttcatgcacataatttccaagaatttagaacaccacttttagaagataaagatatatttacaagatcagtaggtgaaacatcagatattgttcaaaaacaaatgtacgagttccaagataaaaaaggagcaactttgtgcttaagaccagagggaaccgtgggacttgctagagctcttttaacgaacggtcttgatgacagtgagattaaaaaacttttctacattggaccaatgttcagatatgagagaccacaaaaaggaagaaaaagacaattcaatcaggctggtattgagctgattgctgacgaaagctatcacgctgatttagaagttattcaggtgggagtaagaattttaaaagatcttaacgtgaaatttaagttagaaataaactatgttggagacgtacaaacactttctgtatatagagagcatttaagggatttccttttaaaaaataagacaaaaattgctgaagaattctatcaaagactccaaagaaacccgctgagaggcttagactcaaaagacgaaaatataaaagcaattttctctaaaacgaaaaaactatcggattttttagatagcaatcaggaacaaaaatttaaatctgttataaatggtcttgaggcccttggtattgagtatacaatcaaccaggatctagttaggggtcttgattattatacaggcacagtatttgaatttattacagacaaacttggaacgcagaatgctcttattggtggaggcagatacgatacactactcatggatttgggtggcaaaaagcttccagcagttggttttgctctggagttgataggcttgctgaact

SEQ ID NO: 302410 - DNA, 616 bp, Unknown
  Bacterial polypeptide expressing nucleotide sequence isolated from the Sargasso Sea
atcttgttggaagatgctccaaaaatttctgacttttattcagacgcagatgaagagcactttagtgaattgcgaaaatacttaaagaaaatgaatattccctttaatatagatacccatcttgtacgtggtctagactattacacgagaaccacttttgaaattacttcggatatcctgggcgcccaagatgctgttttaggaggtggtcgatatgatgagttagttgaaacacttggaggaaagcctacacctgcagtaggctttgcagccggcattgaacgaataataattttaatgaaaaataaaaaactattagaaaacagaaatagccctgatgtatacttctcatgtctagaaaacaacggactatcaatcgctctttcattatcaaaaaaacttagggattcagggattattgttcaaatgaacacacttagaaaaagcatgaaagcacaactacgggaagcaaataaattggaagctaaatacgcagtcatacttggagattctgagattaaaaacaaagaagtcataattaagaatttggaggatggaaagcagttaaaagtcgctcagtctgaaatgatggataattttagtgatttaacataat

SEQ ID NO: 302411 - DNA, 406 bp, Unknown
  Bacterial polypeptide expressing nucleotide sequence isolated from the Sargasso Sea
atgaaaataaatcccataagaggaacacacgatctttttggagaagaaataaaaaaatttaatagagttttagatgaagttaaagatactgctcaaaaatttggatttaatgaaattataactccaatatttgaaagttcagaattatttaaaaaacccttaggtgaacaaagtgatgtagttttaaaagaaatgtatacttttaatgatagaaataaagatgagatcactttaagaccagaatacactactccaatgataagagctgcaatatcaaatggtctattaaattatttacctgcgaaattttttggaactggacaaatgtttagaagagaaagacctcaaaaaggaagatatagacaattcaatcaaattaattttgaaaattttggttcagaatgac

SEQ ID NO: 302412 - DNA, 718 bp, Unknown
  Bacterial polypeptide expressing nucleotide sequence isolated from the Sargasso Sea
ctgcttaagtatttgaaaagttacaaaggcgatcttaatgacaatgacaaagaaaaactaaataaaaatcctctgagattacttgattcaaaagatgttgatttaaaagaatttcttgataaagggccaaaaataatagattttctctcatctgaacaactaaatcttcttgataagattcaaagtatttttggtaaatatgttgaaattgagttagatagctccttagttagagggcttgattattatactggacttgtttttgaagcagcctcttcaaacttaggtgcgcaagactctttcttgggaggaggcagatatgatggcctatcaacagaccttggcggcaaagaaatgcctgctattggctttgctattgggcttgaaagattaaatctcataaagaagcacaagaatatcaaatccaataaagtaatttcttttgtcacaacctctagcaaaatgaatgctttagcatttaaaatagctcaacttttgagaagtcataattatgatattcgacttgaaacgaatttcactgatgcaagtctcaaagcaaaactaagaaaggcaagtaagctcggtgctaaatttgtctttataatgggagaagaagaatttgaatctgacactataacggtcaagtcgtttgatgaagacggataccaagtaaacatgagttttgatgagattcttgatttttataaagatatttaaa

SEQ ID NO: 302413 - DNA, 737 bp, Unknown
  Bacterial polypeptide expressing nucleotide sequence isolated from the Sargasso Sea
ttacctcctaagtctaaaaacatattatagtaaccatctggagttattatgtaatgattgtaataacagaatggaaaacaacccattaaggttattagattgtaaacaaaaacaatgccaaccatttctagaagatgccccccattcaattgattctttatgtcaagaatgtagagatcatcatgaaaaacttcttggatatctagactcattacaattggcctacataataaatagtaaacttgtaagaggcttggactattacaataaaacagtgtttgaaatccaaccagaaactgaaggtagccaaaatactattattggcggaggaagatatgatggattaatcgaacaaataggaggacaatcaactccaggtattggttttggttgtggcattgaaagactaatactaaatttgaaatcaaacaatattgaaccaccagaaatttatgaaaaacctgtagtcatatgtcatatgggagaagatgctttgaatattgctgtaccattatcaaaaaaattgagaagcaataatattcataccataattgctccatacggaaaaagcattcgaagccaaatgagatatgcatcatccaatgattctgattatgttgtcattattggagaagaagaaataaaacaaaaaacatatcgagtaaaagatatgaataaatcaacagaatatgatttaaatgaaagtgatttgattaatttaatattaaaaatttaaa

SEQ ID NO: 302414 - DNA, 151 bp, Unknown
  Bacterial polypeptide expressing nucleotide sequence isolated from the Sargasso Sea
atgagtaaaaatcaaataaggtcgattaaaggtacccaggatatactgccaggagagactgaaaaatggcaaagactggagcaattggtccgatcaacaatggacacctataattataaggaaatcagaacaccggtttttgaaaagactg

SEQ ID NO: 302415 - DNA, 829 bp, Unknown
  Bacterial polypeptide expressing nucleotide sequence isolated from the Sargasso Sea
agaagttggtatgcggtttgatctcactgttccatttgcgcgttttgctgctcagcacatctcgaaacttggtgccccattcaaacggtatcacatgggtaccgtctggcgtggcgaaaatacacagcgaggacggtatcgagaattcatgcaatgtgattttgatacgatcggtacaaccagtgcgatttcagatcttgaaacagtcttggtcgtgcatgacctgctcacagctattggtgtcgacaaatttacaattcgtattaacgacagaagaattctttcaggcatcctggaggtgcttgggctcacaggcaagacaacacatgtgcttcgatgtcttgataagaccggaaaaatccctcgcgatacgctagccaacgaacttcaggaacagggtgtttctgtcccatcggtcgattgtcttcttggtctcggtgagctggctggatcggcaacagatgttttgagtgaacttcataatttagtcggagaatctgcagtcggtgtacaaggagttgaagccgttggtgcactcttgaacggtttagctgaagttggggttgttgatgatcgcattgcgattgatccatcgatcgcaagaggtcttgactattacacaggcatcgtcctcgagagctttcttgatgaattacctgatcttgggagtgtctgttcgggtggtcggtatgacaaccttgcagaactctatacaaaacaatccctgccaggagttggcgcgtcacttgggatcgatcgcctgctggcgggcctcgaggaacttgacaagctgaagtcgtccgaaacgccagcatcaatatttctagtg

SEQ ID NO: 302416 - DNA, 609 bp, Unknown
  Bacterial polypeptide expressing nucleotide sequence isolated from the Sargasso Sea
tttcaagctgatgcagaattatgcgttatgatttcagaaatacttgagaattgtgggttaaataaaaaagattatattattaaaatttcatcaagaaaaattactgaggaaatattcaaaaaaattaaaatagaaagcgaagaacaaaaattggcaactcttagagccctagataaagttgatagacttggctgggatggtgttaaaaaattgttaggggaaggaagaaaagataaatctggagattttactaaaggagcaaatttaagtttaaaaaatatagatttattagaaaaggaattaaataatagctcacccgaaacagaagatttaaaagaaatattaaaaatatttaatgattacaattttagtaactttgaggttgatccttctgtaatacgaggattagaatattatacgggtccaatattcgaagtgaacttaaaatttgatgtaaagaataataaaggagaggtcgtacaatttggttctataggcggtggtggaaggtatgataaccttgtaagtaattttggtaattacgatgcccccgcaactggtatctcaataggattagataggttagtttatgcgttgatgcaaaaaaaa

SEQ ID NO: 302417 - DNA, 345 bp, Unknown
  Bacterial polypeptide expressing nucleotide sequence isolated from the Sargasso Sea
catgtcaaagattacaacacttagaggaatgaacgatcttccccccgaagaagtaagagtatggaatcttgctgaagaagctatacaaaaggttttcaattcctatgggtatgaagaaatcagatttcctatagttgaaaagactgaactttttacaagatctaatgaatctgcagatgtggtcactaaagaaatgtatacgtttgaagataaaggtggagatagcatttcgttaagacctgaaggtactgctggttgtgttagggcagctatagataacgacctcattagggtcgattctccaaggctttggtatcaaggccctatgtttaggtacgaaagacc

SEQ ID NO: 302418 - DNA, 1474 bp, Unknown
  Bacterial polypeptide expressing nucleotide sequence isolated from the Sargasso Sea
atggctaaagaaaaaaaacaaaatagaccaaaagctattacgccaaagggttttcgtgactactttggttccgaagtgacagaacggaaccagatgttaaagaaaatagcggaaatatatcatagctatggttttgaggcttttgaaagttccgcagtggaaaatgtcgaagcgcttggaaaatttttacctgatgtggatcaaccgaatgagggcatttttgcttggcaagaagatgatcaagattggttggcacttcgctatgatttgactgcgccgctggcaagggtttatgcgcaatatagaaatgaactcccgaccccatatcgcagatattctatggggccagtatggagaaatgagaaacctgggccaggtcgcttcagacagttctatcaatgtgatgccgacacggtggggtcggcaagtatagcagcggacgcagaaatttgcatgctcctttccgatactcttcagaacgtagggatttcggatggtgactacataattaaagcaaataatcgtaaagttctaaatggtgtccttgagagcatgaatattcaagaaacacctaaaagagacgcaatacttcgaactgtcgataaatttgataaagttggagaaagtggcataaggcagctactgggaaaaggccggcttgattcttctggggcttacatcggtggcgtaggtctatctgatagcgaagcggatatggttctggcgtttttaacttctaagggcaccgatattggaacaacattaaaaaatttaaaaaatttgattggatcttctggagtaggactagagggtatcgatgaactggaaacgatggcggaactctttgaggctggcggatacagcagtaataagatttctattgatccctctgtagtaaggggtttgggctattatactggcccagtatatgaagccgagctgacctttgaaatttttgatgaaaagggaagaaaaagactatttggatcagtttcaggcggtggacgctacgatgatttagtaaagcgctttacaggtcaatctgttcctgcaacaggagtatcgattggagtagataggcttttagctgcattaaaagaaaaaggacgaaaacaagcatctggtttaggtcccgtcgttgttactgttatggatcgagatcgaattagtgattatcaaaagatagtatccgaattacggaacgctggaatacgttctgaggtatatcttggaaacccaaaaaattttggtaatcagttaaagtatgcagacaatagaggttcacctgctgccattatagagggtactgaagagcgtgagagtggaatgattcaagttaaggatctgattttaggcaagaaactttctgaggaagcgactttagagcagtggaaagatagaccaagtcaattcactgttaagcgggatgagcttgttcaaaaaatcatagaaatattaaattcctacaagtgat

SEQ ID NO: 302419 - DNA, 281 bp, Unknown
  Bacterial polypeptide expressing nucleotide sequence isolated from the Sargasso Sea
gctgcagagcctcaggggcatggtggatctgttgccggaggctctgcagtgctggcaggccgtcgaagcagtcgcccgggagcatttccgccgctccggtttcggcgagatccgaacaccgttgttggaaaccaccgatctgttctgccgtggcatcggcgaaggcaccgacgtggtgggcaaggagatgtacagtttcaccgatcgcggtgagcgtgcctgcacactgcggccagagggcaccgcgtcggtggtgcgggcggcgctgcaacacggcctgt

SEQ ID NO: 302420 - DNA, 787 bp, Unknown
  Bacterial polypeptide expressing nucleotide sequence isolated from the Sargasso Sea
aaaaatataaacttaattaataacataactttgtatattaactctctaggagacaatcaaagcagaaataattatagaaatgttttggtatcgtatttaaaaaaatttgagaaagatttgtcaactgaaagtaaaataagattacaaagtaatcctttaagaatactagattcaaaaaataaaactgatcaagccatactaaaaaattctccaaaatattttgattatctaaataatgaatctaggtcatactatgaaaatgtatgtaattctttgactaaacttggaataccttttaaacaagacgaaaaattagtaaggggtttagattattattctcacacaacttttgaatttaaaactagtttacttggagcccaagatacagttgttgcaggaggtagatatgatggtctttctaaaatgattagtaattatagtttgccaggagttgggtgggcagcaggaatagagagattagctttaatgacaataaataaatataactcatctcctaaagtgacgctagtttctcaatcaaatgaattaaattcgacaattttaaaatactataaatttttaatagataatgatattaaaacagaaatgatttattctggtacaattaacaaaaaattgaaaagagccaataaaacatcctcagagtatgctatcattatcggagaaaatgaattggaaaataatttagttcaattaaaaaatttaagaaatggaaaacaattaaaattaaatattaatgatgttttagatgaaattaaaaaataaa

SEQ ID NO: 302421 - DNA, 778 bp, Unknown
  Bacterial polypeptide expressing nucleotide sequence isolated from the Sargasso Sea
tatgatagaaaaaacttgtaaagaagtatttctaggctttaattattcagaagttagaacacctttaattgaatataagtctttatttgagcgatcagttggagagtcatctgaaataattcaacaaaaagaggtatttgagctagatgatagaaaaggtgaaatgctttgcttaagaccagaaggaacagctggtcttgtaagatcgttgattacaaatggtcttgatgacgaggaaatcaaaaaatttttctacattggtccaatgttcagatatgaaaggcctcaaaaaggaagaaaaagacagttttttcaagctggagtagagcttattggcaatgcaatttatggagatttagaagtaatccaagtagctaaaatgattttagataaattaggcattgagtcgaatttagaaataaattttttaggtgataacgagagtttggaagcatataacaaatacttagatgattatttatcaagatcaaatgaagtgccagaatatgttaagaaaaatcccataagggctttggactcaaaagatgaaaaagtaaaaatacttatgtcagaggccaaaagcattgaaagctttctaaatgagaaacaaaaaaataaattcttagatattaaaaataagttgaatgagctaaagattaattttagggaaaacaaaaatcttgttcgtggacttgattattataatggtctagtttttgaatttacctcttctgaacttggggcacaaaacgcaattatttgggggaggaagatatga

SEQ ID NO: 302422 - DNA, 772 bp, Unknown
  Bacterial polypeptide expressing nucleotide sequence isolated from the Sargasso Sea
tctaaaactgaactcaattggttcagaaaactgcagagataaatacaaaggtgagctgaagaaattcttgaaaccgtacctaaaagatttaagtgctagcagtcaaaaaaggtttgaaaccaaccctttaagaattcttgataccaaatctccatccgatattgaaatcataaaagatgccccaagaatatctaatttttggagcaatgatgacgaagtgcatttcgatgagctttgcgaacttttggatactttaaatatcaaatatgaagttgattcaaatttagtaagaggtttggactactattcgagaacgacatttgagcttatatcaccgtcacttggtgcgcaaaatgcaatctgtggaggtggaagatatgataagttggttgagatgattggaggaaagccgactcctggtattgggtttgctgctggaattgaacgaattatgatgacgttaaaaaactacactgacaaaaacagtattgatatttatgttgtaggtatcggacctaaagttaggcagactgtttttgcgctcgctgatgaattacgacaaagtaatctatcaacagaatgcgacatgttacgaaggtccattaagtcccaattaagagatgcaaataaaatcggtgcaaagtatgctatcatcattggagacaaggaatttgaaaataaacttgttgaagtaaaaaatttaaataacggtgaacaagaaaaagtagcgattaaatcaattgttagtcatatgacatctttgtcattttag

SEQ ID NO: 302423 - DNA, 730 bp, Unknown
  Bacterial polypeptide expressing nucleotide sequence isolated from the Sargasso Sea
gatggataaaatcaaaacaataaaaggaacccatgatattctcccagagttttcacataactggcaatacctcgaaaaaacaattcacgatagtgccaagctttttggatacaaggagataagaacaccgataattgaacaagctaagttattcaatagaggaattggagaaggaacggatattgtatcaaaagaaatgtattcttggttagatagagatgaaaaagcaatagcattaagaccagaaatgactgcatcagtagtgagatcatttatccaacataatctaggtagccagacaccactacaaaggctctattatatggggccttcatttagaagagaaaggcctcaaaaaggtaggcaaaggcagttccatcagtttggtgtagaagccataggaagtaataatccagagcaggatgctgaggtaattattctagcctgggaaattctatcaaaatcaggaataaataatctagaacttaaactgtccagtattggttcagatgactgtcgaaataaatataaaaatgatttaattaaatttttagaaccgcataagaataaactaacagatgtaagcagagaacgtttaaagtacaacccccttcgaatccttgacacaaaaaacgaagaagaaattaacatactcaaagcagccccgataattggagatttttatacaaatgaagatcgagaacatttgaaaatctacagaaatactaaa

SEQ ID NO: 302424 - DNA, 701 bp, Unknown
  Bacterial polypeptide expressing nucleotide sequence isolated from the Sargasso Sea
catgtctcgtttgcaaccagccaggggcacttcagacctgctgccgtcgacgatggcggcgcatcgccgcgttatcgatacggcgcgcaacgctgcgggcctctatggctttcaggagatgtcaacgccaatcttcgaattcgccgaggtgttttcgcgcccgcttggcgacagtagcgacgtggtgaccaaggaaacctacaatttcaatgatcgaggtggcgagacgctgaccctgcggcctgagaacacggccggcgtggtgcgggcgatgatttcgaacgggttgacgcagagcctgccgctgaagtttttctatgccggcccgatgttccggtacgaacgcccccagaagggccggatgcgacagtttcatcagatcgggatcgaatatctcgggccgcgcgacgggctggcggatgccgaaatcattgcctgcggcgcgcgtgttctcgccggcctgggtgttctcgaccactgtcggctgcacctgaattcgctcggcgacgccgagagccggcaggcctatcgtgcggcacttctggcattcctccagtcgcatgcctcggagttgtcggtggacagccagtcccgtctgcaaaccaacccgctgcggattcttgattccaaggatgctggcgaccgcgcgatcctcgagaatgcaccgcggctcgatggctatataaacgatgcctcgaagc

SEQ ID NO: 302425 - DNA, 1096 bp, Unknown
  Bacterial polypeptide expressing nucleotide sequence isolated from the Sargasso Sea
tggctatctctaagatatgatttgactgcaccattagctagatatattgcaaaaaattatttagaaattccaaaaccttttaaaagatatcagcttggaacagtttggagaaatgagaagcctggaccaggaagatttagagagtttttacaatttgatgcagactttgttggaactaaaagtttacaagctgatgcagaattatgcgttatgatttcagaaatacttgagaattgtgggctaaacaaagaagaatatattataaaaatatcctctagaaaaattacggaagaaattttcaaaaaaatcaagatagacaacattgagcaaaaactgacagttcttagagcgcttgataaaattgataggttaggatgggatagtgtcaaaaaattattaggagaaggacgaaaagataaatctggagattttacaaaaggagcaaatttaagttcaaaaaatataaattttttagagaaagaattaaaaaataaatcaccagaaacagaagatctaaaagaaatcttgaaaatatttagtgactacaattttaacaactttgaagttgatccgtctgtgataaggggattggaatattacacaggtccaattttcgaagtgaacttaaaatttgatgttaaaaataataaaggacaagttattcagtttggttcaatcggtggcggcggtagatatgataatcttgttagaaattttggtaattacgatgctcctgctacaggtatttctataggattagataggttagtttatgcgctgttacaaaaaaaagagctaaaagtaaagcaaacaaaacctattgttatttgtattttagataaaaatttaatgaaagaatatattagtttacaaatgattttaagatctgcaggtataagtacagaaatttatcctggagagggaaaactaaaaaaacagatggaatatgcaaataagataaaatcaccagccgttattctttatggcgaaaatgaaatcaaaactagcaaaccaacattacgagatctagtttcaggaaatgaaaaatcaataacaattaaagatctagccaatgaaatcaaaaaaattatctgaa

SEQ ID NO: 302426 - DNA, 1504 bp, Unknown
  Bacterial polypeptide expressing nucleotide sequence isolated from the Sargasso Sea
aatgataaatagatgccgcaggacattcataatggctaaagacaaaaaacaaaatagaccaaaagctattacgccaaaaggctttcgtgactacttcggttccgaagtgacagaacgaaaccagatgttgcagaaaatagcggaaatatatcaaagctatggttttgaggctcttgaaagttccgcagtggaaactgtagaagcgcttggaaaatttttacctgatgtagatcagccgaatgaaggtgtttttgcttggcaagaagatgatcaagattggttggcacttcgctatgatctaactgccccgttggcaagggtttatgcgcaatatagaaacgaacttccaactccataccgccggtattcaatggggccagtatggagaaatgagaaacccggtccaggccgtttcagacagttttatcaatgtgacgccgacacggtagggtcggcaagtatagcagcggactcagaaatttgtatgctcctttctgatactcttcagaatgtaggaatttcggagggtgactacataattaaagcaaataatcgcaaagttcttaacggtgtccttgagagtatgaatattcaggaaacacccaaaagagacgcaatacttcgaactgtcgataagtttgataaagttcgagaaagtggcataagacagctactgggaaaaggccggcttgatgcatctggggcttatattgatggagtgggtctatctgatagcgaggccgatatagttgtggcattcttaacttctaagggcaccgatattgaaacaacattaagaaatttaaaaaatttgattggatcttctgaaataggactagagggtgtcaatgaactggaaacgatggcagaactctttgaagctggcggatacggctataataagatttcaattgatccgtctgtagtaaggggtttgggctattatactggtccagtttatgaagccgagcttacctttgaaatttttgatgaaaagggaaggacaagacaatttggatcagtttcaggcggtggacgctacgatgatttagtaaagcgctttacaggtcaatccgttcctgcaacaggtgtatcgattggcgttgataggctcttagctgcattaaaagaaaaaggaagaataaaagcggctggtttaggccccgtcgttgttactgttatggatagagatcgaattagtgattatcaagagatagtagccgaattgcggaacgctggaatacggtctgaagtatatctcgggaacccaaaaaactttggtaatcagctgaagtatgcagacaatagaggttcacctgctgccgttatagagggtactgaagaacgtgaaagtggaacgatccaaattaaggatctgattttaggcaaaaaactttctgaggaagcgaccttagaagagtggaaagataggccaagtcaattcactgttcagcgggatgagcttgtgcaaaaaattaaagaaatattaaattcctacaagtga

SEQ ID NO: 302427 - DNA, 634 bp, Unknown
  Bacterial polypeptide expressing nucleotide sequence isolated from the Sargasso Sea
atgaaacaaattagaagcattaaagggacccatgatatcctaccaaaagattcctacaagtggcatcaattagaatctattgttcatgatgtctgcgcgagatttggatatcaagaaattcgcactccaatttttgaagaaagcactcttttttctaggagcgttggggaagaatcggatattgttacaaaagaaatgtactcatggaatgataaaagcaataccgtcttaacgttaagacctgagttgaccgcctcagtcgttagatcatataatcaacataatttagggaacctagctcctattcaacgtttttattatataggaccactttttagaagagaaagaccgcagaagggtcgtcaacgacaatttcatcagtttggggtcgaagcatttggatcgaagtttgcagaacaagaggcagagactatagcagttgcctggcatattttatcaaagtgtggactaactgaaaatacaactctactattaaatagtattggtacgagtgaatgtagatctgcataccaagaggctttaaaacattttcttgaaccacatttaaatgatttatctgaaactagtcgaaaacgtttacatcataaccctctccgaattctagatacaaaaa

SEQ ID NO: 302428 - DNA, 227 bp, Unknown
  Bacterial polypeptide expressing nucleotide sequence isolated from the Sargasso Sea
gtacacaacacctatgattagagcggctattactaataatctcttaaacgatcttccattaaaaatttttggaatcgggccaatgttcagaagagaaaggccacaaaaaggtagatatagacaatttaatcaaattaattttgaaatacttggaactagagattttctagctgatgttgagttaatttctctgtcaaataatattttaaaacacacttttacctaaa

SEQ ID NO: 302429 - DNA, 559 bp, Unknown
  Bacterial polypeptide expressing nucleotide sequence isolated from the Sargasso Sea
gatgacttcagataataaaaaaaagattaaagctgaacgtcctagaggatttgaagatctttcgggtgaagatcttttattgctagaaaaaatcatatccacgattgagaaaacatatcaattttatggatttgaaaaattggagactagtattattgagctatcgaatgtaattggctcttttttacctgatcaggatagacctaatgaaggtgttttttctttggaagatgatgatagcaggtggttatctttaagatatgatttaacatctggtttagctcgttatgtggctgaaaattatgatgcattacccaaaccttatagaaggtatcaatctggttgggtttttagaaatgaaaaaccaggtccaggtaggttccgtcaattcatgcaagtggatgctgatacagtaggaagtaaaaatcctttagcagatgctgaaatgtgtatgatgttttcagatgtatttgaaaatataggaattgaaagaaatgactatctaataagattaaataatagaaatttgttggatgctctattagatcaatcggattaa

SEQ ID NO: 302430 - DNA, 433 bp, Unknown
  Bacterial polypeptide expressing nucleotide sequence isolated from the Sargasso Sea
atgaaaaagttacatagcatcaaagggacacatgatattcttccaaaagaaatctataaatggaaagcacttgaatcaatagtaaatcaaacgtgtgaacaatttgggtatcaagaaatccgcaatcctatttttgaagaaaccagacttttttcaagaagtgtaggcgaagaaacagacatagttacaaaagaaatgtattcttgggaagatgttgatggtgcctcccttacactgcggccggagttaactgcatcggttgtaagaagttatattcaacataatttaggtactttatcccctatccaacggctttactacagtggccctctttttcgaagagaaaggccacaaaaaggtaggcaacgtcaatttcatcaatttggcgtcgaggcatttgggtctaacaatcctgaacaagatgtgaaataat

SEQ ID NO: 302431 - DNA, 550 bp, Unknown
  Bacterial polypeptide expressing nucleotide sequence isolated from the Sargasso Sea
atgagtgatttaaagactataagaggaatgccagatctatatggagaaaatatagaggctatttctatggtcgaagaaatatgcttaaaaactttcaaaagttttaattacaaagaatttagaacacctttactagagaatagcgcgctattttcaagaagtattggccttacctcagatattgttcaaaaagaaatgtatgagttcaaagataaaaaaggagaaaggctttgcatgagaccagaaggtactgctggcttagtacgagctttaattaccaatgggctcgatgatgaagaaataaaaaaattcttttatattggcccaatgttcagatatgagagaccacaaaaagggagaaaaaggcaattctttcaggcaggtatagagctaataggagatagatctattgattcagacattgaaattattcttgttgccaaaaaaattctcgatgagcttaatattaaatacaatcttcaagttaattatttaggtagtgttgcagagattgaagaatatagtgcgtatcttgaagagtttatgcaaa

SEQ ID NO: 302432 - DNA, 464 bp, Unknown
  Bacterial polypeptide expressing nucleotide sequence isolated from the Sargasso Sea
aatgaaaagaaatattagtttagtaaaaggcacacatgatattcatggagctgaaatggagaagtttgaatttattattgaaaaattttattcaatctgtaggaatttcaattttaaatctatacaaactcctattttggaacaacaagatttattctctaggaccgtaggcgagcaaaccgatattgtctctaaagagatgtattcatttttagataaaggagaagcgtatatttgtttaagacctgaggccacaagtagtctagctaggtttgctgcttcaaactatcaatcgggcttacttaaattaattactcacggcccaatgtttagaagagaaagaccccaaaaaggtagatatagacagtttcatcaaataaatattgagtctattggtgaaaaaagtccttatgtagattttgaattaaattctatagcaaagttattattgatgatcttggaat

SEQ ID NO: 302433 - DNA, 452 bp, Unknown
  Bacterial polypeptide expressing nucleotide sequence isolated from the Sargasso Sea
tatgaaattaagatcagtaagaggcacacatgatatatttggggaagaaatagataaatttaactttatttctaatattgtttctaaaaatgctaatttaaaagaatataaagaaatccagacaccaatttttgaatttagtgatttatttgcaaaacctcttggtgaacattctgatgttgtattgaaagaaatgtattcatttgaagatcgaaacaatgaatatttaacactacgccctgagtacacaacgcctatgattagagccgctatcactaataatctcttgaatgatcttccattaaaaatttttggtattggacctatgtttagaagagaaagaccacaaaaaggcagatatagacaatttaatcaaataaactttgaaatacttgggacaaaagattttcttgcagatgttgagttaatttctctatcaaataatattttaa

SEQ ID NO: 302434 - DNA, 555 bp, Unknown
  Bacterial polypeptide expressing nucleotide sequence isolated from the Sargasso Sea
aattagaagaatttaaaaaaataaaatctaaactagatgagattggaattcaatacgaagagaatgctagccttgtaagaggattagattattacaatggtctagtttttgaatttctttctgatgatctgggtgcacaaaatgctattttgggcggaggtagatacgatgggcttattaaaaatcttggaggtagagatttatcagctacaggttttgctcttggtatagatagacttgcagatattgtgaaattatcatcgattaaaaaagatctatttataggttgtgttgataaagaatcacgaacttatgcccaagcattagggtacaaaattaggaaagataatagccttcttgtagttgagaactatcttggtaatgcaaatgttggcaaacaattgaaaaaagctgattctcagggctttaaatttgctatcatagtcggccaagatgagcttaaaagtaaaacacttaaattaaagaatttaagagaggataaacctgatcttgagctaaaagaaaaagatttattggagcattttgaatgttaga

SEQ ID NO: 302435 - DNA, 493 bp, Unknown
  Bacterial polypeptide expressing nucleotide sequence isolated from the Sargasso Sea
atgaaacttagatcagtaagaggtactcatgatttgtttggaattaatgttgaaaaatacaatattattcaaaaaatagtaactaaatttgcagaaattaattcttttaaaaaactagaaaccccaatatttgaatttacagaattattttctaaacctctaggcgagcagtctgatgtagttttaaaagagatgtatacttttaaagatagaaataaagattttttaacattgcgtcctgaatatacgacaccaatgataagagctgctataactaataatctcttgaatgatttacctcttaaagtttttggtattggccccatgtttagaagagaaagaccacaaaaaggtcgtttcagacaatttaaccaaataaattttgaaatatttggatctgatgattgtattgctgatttagaacttataaatttggctaacgatgttttaaaatcaactcttcctaatacaaaatttatattaaatataaatc

SEQ ID NO: 302436 - DNA, 844 bp, Unknown
  Bacterial polypeptide expressing nucleotide sequence isolated from the Sargasso Sea
ttggaattcaaagctcaaagaggaacagcagatattcttccaaaagatcaatatatttggaactttgttcaaaataaatgttctgaagtagctaaatcttttggttatagatttattgaaacccctatatttgaagattctagaatctttgaaagaactgtaggtgaagatacagacatagttgataaagagatgtattcctttgtagataaaggcggtgataatatcagtttgagacctgaaaacactgcaggagtttgcagagcgttcatagagaatggtctttacaatgaaactttacctgcacgtcttttttattatggccctatgtttagatatgaaagacctcaggctggtagatttagacaatttcatcagtttggaattgaatgtataggcgatagttctcatgataatgattttgaagtaataaagcttgcttggaatattttaaataatttagaaattaataatactgaactaaatattaattctttaggtgataaagatgatagagaagtttatgtttcaaagcttatagattatttcagtaagtatattaatgatttacctaaagttgataaactaagattagaaagagctccattaaggttattagactcaaaagaaaagataactttaaatatttctcaggatgctccaaaaactttagattttatatcgaaagatagtaagaatcatcacgacaaaattattgaaaatcttgaaaatttacgaggaagagaaaaaagctttaaatacaaagataacgataagcttgtaagaggattagactattacaacagaactgtttttgagtacttaagcgactcctctgggcctc

SEQ ID NO: 302437 - DNA, 1331 bp, Unknown
  Bacterial polypeptide expressing nucleotide sequence isolated from the Sargasso Sea
ttttaacccattaactcttaagagaagaaggtatattacaaatacaatcagatcagtttttactagttttggatataatgaaatagaaacaccttcaattgaaaaaagaaacactctatatcaaaaatatggtagtgatggagataagtttatctttaacataattaattctggagaaaaaattaaaaaagcagatataaaatcttttaataatgaaaaatacaatgattttatctcatcaatttctgaaaaaggtttaaggtttgatcttactgttcccttagctagatatgtttcacaacatcaaagtgaaatcacttttccgttcaaaagatttcaaattcagaatgtttggagggcagacagacctcaaaagggaagatatcaagaatttacacagtgtgatgctgatgttataggatcaaattcaattatgcttgaatatgaaatgcttcaattgttttcagatgtttttaggaaattaaagttggattcagtaaatattaggattaatcacagaagagttcttaataaaattgctaatcatattggaatagttgaagattttaatgagtttttagtaattattgataaaatagataaaattggtatcgataaggctaaagaggaggtaaaaaataaatttaaagatttaagaaatcttgatgaattatttgagatgatttccaaaaaaatgtcaccaaaaacatatttaaataatttaaaatccaactttattgaccacgatgatgataaccttttagatgagattgaaacattatcaaaattgataatgaatgataaaaaattgataaatattgaatttgatctttctctagccagaggtttagaatattacacaggtttgatttatgaagtatccttagggtcagattctgaaattggatcattaggtggtggaggtcgttatgaaaacttaactgaagcttttaatttaaaagataactcaggcataggaatttcctttggattagatagaatttatcatgttattgatgacaaaaatctattcccaaaagatctctctcttaataatgatattctggtaataaattttggaaaaaaatatttaattgaaatatttgaaaaaatcaatcagcttagagctaatggctggaaggtatcgatatatcctgataataataaactttcaaaacagttcaactattcaaataagaataattttaaatatgcatgcatttatggagaatccgaaagtgaaagtaattgtataaaaataaaggatcttcaatctggatctgaaagtaattttggttttgataacttcattaaaaattttaagggatagt

SEQ ID NO: 302438 - DNA, 1080 bp, Unknown
  Bacterial polypeptide expressing nucleotide sequence isolated from the Sargasso Sea
gttggttagagcactagtttgtggaactaggggtcggtggttcgaatccaccctgctgtaccaaaaaatgacaaaagaaaaaaagaacaaaccttctaaagaacttccattagggtttgtagacagacaagaaaaagaattactcgtacgtgattttataatttctaatattaaagaagttatgattaagtatggttttcaatatcttgaaactccaagttttgagtattcggatagtattggaaaatttttacccgataaagatagaccagatgaaggcgttttttcatttaaagatgaaaacaaatggctttctttaagatatgatcttacagcaccacttgcaaggtatgttgcaaaaaattacttagaaattcctaaaccatttaaaagatatcaacttggcactgtttggagaaatgaaaagccaggacctggtaggtttagagaattcttacaattcgatgcagattatgttggaacaaaaagtttacaagcagatgccgaattgtgtatcatgatttcagaaattctagaaaaatgcggtcttacgaagtcagagtatacaatcaaaatctcatctagaaaaatcactgaagaactatttaaaaagttaaatataaacgatagtcaacaaaagcttaccacccttagagctcttgataaaattgatagacttggttggggtggtgtaaaagaattattaggtaagggaagaaaagataaatcaggtgacttcacaaaaggagcaaatttaaagcttgagaatattaaaataatagaagaaacacttaagacaaactcacctgaaacagaggatttagttgaaattttaaaaattttcaaagattacgattttaataattatgaattcgatccatcaattattcgaggattagagtattacacaggtgcaatttttgaagtaaatttaaaatttgatgtaacaaacaataaagggcaagtcattcaatttggatctataggaggcggtggaagatatgataatttggtaaataattttggtagctatgatgctcctgccacagggatatcaatcggtttagatcgtttagttta

SEQ ID NO: 302439 - DNA, 873 bp, Unknown
  Bacterial polypeptide expressing nucleotide sequence isolated from the Sargasso Sea
gatagaagtaataactctctaatgttgaggcctgaaggtacaacaagtgtggtaagggctttgatcaacgctggcttaacacaaaatttgcctcaaaggtttttttattctggaccaatgtttcgttatgaaagacctcaaaaaggaagattaaggcagtttaatcaatttggtgcagagttaattggtattgataatttttatggagatgttgaagttataaatttagcttataattttctaaagaacctaaatttaattgaaaacaccactttatatgttaattctttgggtgatagtcaaagtagaaaaaattatagaactgctttgatatcatacttagaaaaatttgagaaagatttatctacggagagtaaaataagattaaataaaaatcctctaagaatattagattcaaaaaatagtaaggatcaaatcatacttagaaattctccaaaatactttgacagtcttaataaagaatctagagcctattttgaaaacgtttgtatttctttggaaaaactgaatataccctataaaaaagatgaaaaactagtaagaggtttagattattattctcatacgacttttgaatttaagactagtttgcttggatcgcaagatacagttcttgccggtgggaggtatgacggtctttctaagatgataagtgaacatattcttccaggtgtcggatgggctgcaggcatagagagattagctatgatgacagaaaataaatatgaatcatttccaaaagtgactttagtttctcaatccaatacattaaattctgtaatgcttaattattataaaattttaatagataatgatatcaaaacagaaatgatttactctggttccataaac

SEQ ID NO: 302440 - DNA, 437 bp, Unknown
  Bacterial polypeptide expressing nucleotide sequence isolated from the Sargasso Sea
attgaaagaaatttttactaattatgcgatgtcagaaatcaggacacctgcactggaaaatacaaatctttttaagagatctgtaggcgatacttcagatatagttaataaagaactctatactttctcagataaaaatgacaaaagcataacattgagacctgaaggaactgcaagcgttatgagatctattattgaaaaaaaattagatggagaaacccataagttatggtatttggggccaatgtggaggtatgaaagacctcaaaaaggaagatatagacagttcaatcaggcaggaatagaaattttgggttattcagaaggtgctccagaatttgaaatgatttctttgatatgtgaactcaatagaaaattacaaataagaaaaccgcttataaaaattaatcatctcggagactctaatacgaaaaaat

SEQ ID NO: 302441 - DNA, 871 bp, Unknown
  Bacterial polypeptide expressing nucleotide sequence isolated from the Sargasso Sea
atggaaaagattaattcactaacaggaatgactgatttgattgagactaaggcagatgagaatgtgttagccaataaagtattccaaaccgaaaaaatattgaaagaaatttttactaattatgcgatgtctgaaattagaacacctgctctggaaaatacaaatctttttaagagatcagtaggcgatacttcagatatagttaataaagaactctatactttctcagataaaaatgacaaaagcataacacttagacctgaaggaactgcaagtgttatgagatctattattgaaaaaaaattagatggagaaactcataagttatggtacttagggccaatgtggaggtatgaaagacctcaaaaaggaagatatagacagttcaatcaggcaggaatagaaattttgggttatccagaaggtgctccagaatttgaaatgatttctttgatatgtgaacttaatagaaaattacaaataagaaaacccctcataaaaattaatcatcttggagactctaatacgaaaaaattattttgcaaggtgcttgtagattatttaacaccaatgaaatctaatttagatgaaaaagatttattaagattagatagtaatcctttaagaattttagactcaaaaaatccaaatactatagagattttgaagaaggcgccctcaatttcagattatctgcaagatagttcaaaagagttactaaaatctatacaggaattattttctgacaaatgtgaaattcaaatagattgcaacttagtaagaggcttggattattatactggctttgtttttgaggcaatatcagaagatttaggtgctcaagatgcatacttaggcggtggtaggtatg

SEQ ID NO: 302442 - DNA, 606 bp, Unknown
  Bacterial polypeptide expressing nucleotide sequence isolated from the Sargasso Sea
attgaaagaaatttttactaattatgcgatgtctgaaatcagaacacctgttctggaaaatacaaatctttttaagagatcagtaggcgatacttcagatatagttaataaagaactctatactttctcagataaaaatgacaaaagcataacacttagacctgaaggaactgcaagtgttatgagatctattattgaaaaaaaattagatggagaaactcataagttatggtatttagggccaatgtggaggtatgaaagacctcaaaaaggaagatatagacagttcaatcaggcaggaatagaaattttgggttatccagaaggtgctccagaatttgaaatgatttctttgatatgtgaactcaatagaaaattacaaataagaaaaccgctcataaaaattaatcatcttggagactctaatacgaaaaaattattttgtaaggcgcttgtagattatttaacaccaatgaaatctgatttagatgaaaaagatttattaagattagatagcaatcctttaagaattttagactcaaaaaatccaaatactttagagattttgaagaaggcgccctcaatttcagattatctgcaagatag

SEQ ID NO: 302443 - DNA, 699 bp, Unknown
  Bacterial polypeptide expressing nucleotide sequence isolated from the Sargasso Sea
tttgactgagaaaatcaaatccattaggggaatgccaacactgcttccggcagagttaaagctttggcagtcagtcgaatcaaccatcaagaaaattttatcgaattatgcttttcaggagataaggacgccgctccttgagagaacggaactctttcaaagaacaataggggagcaaacagatgtcgtttcaaaggagatgtattcgtttcttgatcgcaaagaacaatcactttctctcaggccggaggctacagctggagttgtcagggcaggcatagagcatggtctttttcacaatcaaacgcaaaaattctggtctatgggccccatgtaccgttatgagagacctcagaaagggcgttatcgtcaattccatcaggtcaatatggaagcattcggatatgaaggaccaggaatcgatgctgaactcatccttctgacttctaggatatggagaaaattgggagtcgaagacattcaattggaactgaattcattgggaacagcagagtcaagaaaaggatatcgtaccatccttgttgaatattttaacgatcacacagactcgcttgatgaggactcgatcttacgattggaaaaaaatccaatgcggattttggatagcaagaatccagagatggctgatgtcattcattcagcacctaaaatgaatgatcacttggatcaagaatcaga

SEQ ID NO: 302444 - DNA, 376 bp, Unknown
  Bacterial polypeptide expressing nucleotide sequence isolated from the Sargasso Sea
catggcaaagaaaattcaggcaatccgcggtatgaacgacatactgccaacacagagcccggtctggcagtatcttgaaggcacggtaaaagatgtactggctggttatggatacgacgaaattcgtatgccggtgctggagcagacggcgctgttcaagcgttctatcggtgaagtgaccgatatcgttgaaaaagaaatgtacacctttgaagaccgtaacggcgacagtctgacgctgcgtccggaaggcacggccagttgtgtgcgtgcgtgtgaagagcacggtcttctgtacaatcagacgcaacgcttgtggtacacaggccccatgttccgccatgagcgtccacaaaaaggccgctatcgccagttt

SEQ ID NO: 302445 - DNA, 838 bp, Unknown
  Bacterial polypeptide expressing nucleotide sequence isolated from the Sargasso Sea
ttgagaggtatgccagatctatttcctgaggatttagagagatggcattactttgaatcaaagctcacatacatttttaattctttcaacactctcgaaataagaactccattgttagaatctacagaacttttttcaagatcagttggtaactcatctgacatcgtaaacaaagaactttattcttttttagatcgtaataaagaaagcattagcctcagaccagaaggttctgctagtgtaataagggcaattattcaaaaaaaacaagagcatgaaaaacataaattgtggtatcaaggccccatgtttagatatgaaaggcctcaaaaaggcagatttagacaatttcatcagataggagttgagtatcttggttttgaagagggagtttcagagtatgagttaatatctatggttttgcagatcaatcaatcactaggcataagtgattatactcttaaaattaatcaccttggagatgctcatgccaaggagagtttttgtaattctctagttagttttcttgagccacatgcgaatgaattgcatgaaaaagaccaaataagattgaggtctaatccattaagagtcttagattcaaaagaaaagtctacgattgaattattgaaaaatgctcctaaattccaagattttatctcagaggagtctaaattatttttagaaggtcttgtgaattcatttaaagatcaatgcgatattcaaatcgaccaatcattagtaagagggttagattattatacaggcgttgtctttgaaacagtttctagtgaacttggagctcaaagatgccttccttggtggtggcagatatgac

SEQ ID NO: 302446 - DNA, 949 bp, Unknown
  Bacterial polypeptide expressing nucleotide sequence isolated from the Sargasso Sea
gatgttccacagcgcttttcatactatggtcctatgtttaggtatgaaagacctcaaaaaggaagactcagacaatttaaacaacttggtattgagtgtcttggcttaagtagtgcaatggctgatattgaagtaatatccttgggtcaggaatttttagatcaattaaatattttagacaaaataaatttgaaaattaacactttaggagattttgagagcagaaaaatatatagagatgctcttataaattatttaagtgattacaaatctaaattatcagaagatagtgttaaaaggctatacattaacccccttagaatacttgactccaaaaatgatgaagatttaaaaatcgttgaaaatgctccgagtattttggattttttaaattctgactcaaagacaaaatttgaaaacatttgtaaaggtttagatcatttaaatatcaaatatacaattgataaaaatcttgttagaggattagactattattgtcatactgcttttgaattcacaactaatgagcttggatcacaaggtactgttcttgcaggaggtaggtatgatggtctctcaaaaatgttaggtggaccagatgtgcctggagttggatgggctgcaggtgtagaaagattagcgctaatggttgagagtaaattcataaataagatagaagttgttttaatgggtcaatctgaaagttttaattatttattattaccaattctgaagaaattaactcaaaatggaataaaatctgagattatctacactggtaacatgtcaaaaaaatttaagagagctaataagctaaaagcttcatatgcaataattttaggtgaagaggaagttagtaaaaaagtacttaaatttaaagacttaacatctggtaaagaagaattattaaaattaagtgaagtattactaaaagtaactaatgattgat

SEQ ID NO: 302447 - DNA, 913 bp, Unknown
  Bacterial polypeptide expressing nucleotide sequence isolated from the Sargasso Sea
gggtactgatatcgttgaaaaagaaatgtatacctttaatgatcgaaatgaggaaagcataactctgaggcctgaagcaaccgcctcattagctagggctggcataactaatggattattgcacaatcaacaacaaaaattatggacgatgggcccaatgtttaggtatgaaaagcctcaaaagggacgctatcgtcagttctatcagtttaatattgaagccatgggtttcgagggccctgatgtggatgctgaaataataattttatgccaaagaatgtggaagcaacttaatattaataaaatatccttgaaaataaactctcttggggataaaaaaacaagatctgattatagaaaagacctgatcaattacttttcgtcacatgaaggacaattagatcagaatagtaaaaatagattgcatcaaaatccattaaggatattagacagtaagaatccagaaatgagcatgcttatagataacgcaccattgctctcagactacttagattcagcttctaaagatcattttgaaaaactcaaagaaataattagctccgctggtattgaatttgaggtaaatcctaagcttgttagaggtttagattattataatcgaacggtctttgaatgggagacagaagctctaggatctcaaggtgctgtatgttcgggaggaagatatgatggtctcgttgaaaaaataggtggtcgaccaacaccggcaatcggttgggcgatgggtatggagcgattggttagtttgtatgaactttctaatgaaaaaatatcaaaagtttctcctcatatttatatcgtggtagacggagagaaatctcaacaaaaagcttacaaaatatctgaagagttacgtgatcttaatccaagcattaggatacaattgaacatg

SEQ ID NO: 302448 - DNA, 823 bp, Unknown
  Bacterial polypeptide expressing nucleotide sequence isolated from the Sargasso Sea
tctgagctttttaaaaaacctttgcggtgagcaaagtgatgtagttttaaaagagatgtatactttcaaggatagaaacgaagatgaaattaccttaagaccagaatacacaacaccaatgatacgagctgctatatctaatggtttattaaacaatttgcctgcaaaattctttggaactggacaaatgtttagaagagaaagaccacaaaaaggtaggtacagacaattcaatcaaattaatttcgaaaattttggttctgatgatttttttgctgatattgaaattataaatttagcaaacaatatattgaaaaatattcttccaggcagaaaaattaatttaaatttaaataccttgggaagtagagaaaacttaaaagattataaaaaaattctttcaaaatattttaatgatcatagaaattcattatctactgaaagctctaataaaattaatactaatcctttaagaattttagactcaaaaaattttgaagataagaatataatagaaaaatgcccaaagcttattgaattaatttcaaaatctgatttagattcatatcaagaaattaaaaattgcttgatagctcttaatatccccttttttgaagatccaaatctagttcgaggcttagattattattgtcatacagtatttgagtttaagactgacgaaattgggactcaagacacactgataggtggggggaggtatgatggactaattaaaactctgggaggtaaagatattcccggtgttggatgggcaggtggaattgaaagaattatgctattaatgaaagatatagttgatgat

SEQ ID NO: 302449 - DNA, 715 bp, Unknown
  Bacterial polypeptide expressing nucleotide sequence isolated from the Sargasso Sea
gtcacaaaagaaatgtatacatttcaagacaaaggaggagaaagtatatctttgagacctgaaggaacagcaggttgtgtgagagctgctatagataatgaccttattagaaccgacaagccaagattatggtatgcaggaccaatgtttagatatgagcgcccccaaaaaggtagatctagacaatttcatcaattcagtgcggaagtgtttggaattaattcacctgaaatagatgcagaattaattctaatgtcagcaagattatggagagagctgggagttgccgacaaagtaagattagaacttaataaccttggagatgaagagacaaggaattctttctctaaggcacttgtggagtttctgaagaatcaaaaagaagatttggacgaagatactcaaagaaaacttcttgaaaaccctcttagaatcttagactctaaatcacaaactgttcaaaatttgctaaaaaatgctccttctatagaagattttgtcagcgaaggttctaaacaatatcatcataatcttctccggatactagaaaaatctgagatagactttaatgttaattctaaattagtaagaggattggattattacaatcaaacagtctttgaatggaagactgacttgctaggctctcaagacactatcataggtggaggaagatatgaccgtctggttgaagaattaggtggtaaatcttgcc

SEQ ID NO: 302450 - DNA, 829 bp, Unknown
  Bacterial polypeptide expressing nucleotide sequence isolated from the Sargasso Sea
atgtcgaaagttacaaaacctagaggattcaatgatctggatccgagtgaatttgagcataaatcaaatctactagatgaaataaaaaatatttttaatagttatttttttaaagagattgaaactcccatagttgaaaagaaagaactttttatcagatctgttggagaagaaacagacatagtaaataaggaaatgttcacttttcaagacaaaaagggggaggatttagttctaaggccagaaggaactgcaggttgccttagatctgcaattgattcaggtttgcttgatttaggtccaattaaactgtcttatgcgggaccaatgtttagatatgaacgacctcaaaagggccgatcaaggcaattctttcaagtaagtgcagaaacatatggcgtcagagggtttgaggcagatcttgagttgctaatgatggcaaatgaaattttccaaagatttggattagataacgtttcattaaatatcaattctcttggtgatgaggaatctcaaaaacaatatgcttcagagctaaagaagtatttaagtgatttctctgaagctcttgatgaggatagcttgaaaagacttgaaactaatcctctaagaatcttagattctaaaaatgaagaaactcgaaacgtgattataaatgcacccaaaatatcttcatttctcagtcaaaaatcagctgataattatgaattgattcaagaaggccttaatgatttaggaatatcatacataaaagacgagaaattggtcagaggtctcgattactacaacaatctcgtttttgaatggacatctccagatcttggaagtc

SEQ ID NO: 302451 - DNA, 879 bp, Unknown
  Bacterial polypeptide expressing nucleotide sequence isolated from the Sargasso Sea
gatttatttggagaagaaatacaaaaatttaataaggttatatctgaagttaaagataacgctagaaaatttggatttaatgaactgataacacctataattgaaagttctgaactttttaaaaaacccttaggtgagcaaagtgatgtagttttaaaagaaatgtatactttcaaggatagaaacgaagatgaaattactttaaggccagagtacacaacaccaatgatacgagctgccatatcgaatggtttattaaacaatttgcccgcaaaattttttggaacaggacaaatgtttagaagagaaagacctcaaaaaggaagatatagacaattcacgcaaattaattttgaaaattttggttctgatgatttttttgcagatattgaaattataaatttagcaaacaagatattaaaaaatattcttccagatagaaaaattaatttacatttaaataccttaggaagtagagaaaatttaaaagactataaaaaaattctgtcaaaatattttaatgatcataaaaattcattatcagctgatagtgttaataaaataaattctaatcctttaagaattttagattcaaaaattatagaagataagataataatcgaaaaatgcccaaagcttattgaattaattgcaaaatctgatttaaattcatatcaagatattaaaaattctttgattgatcttaatatccccttttttgaagatcaaaatctagttcgtggtttagattattattgtcatacagtatttgagtttaagactgatgagattggaactcaagatacactgataggtggaggaagatatgacggactaattaaaactcttggaggtaaaaatattcccaggtgttggatg

SEQ ID NO: 302452 - DNA, 701 bp, Unknown
  Bacterial polypeptide expressing nucleotide sequence isolated from the Sargasso Sea
tttgactgagaaaatcaaatccattaggggaatgccaacactgcttccggcagagttaaagctttggcagtcagtcgaatcaaccatcaagaaaattttatcgaattatgcttttcaggagataaggacgccgcttcttgagagaacggaactctttcaaagaacaataggggaacaaacagatgtcgtttcaaaggagatgtattcgtttcttgatcgcaaagaacaatcactttctctcaggccggaggctacagctggagttgttagggcaggcatagagcatggtctttttcacaatcaaacgcaaaaattctggtctatgggccccatgtaccgttatgagagacctcagaaagggcgttatcgtcaattccatcaggtcaatatggaagcattcggatatgaaggaccaggcatcgatgctgaactcatccttctgacttctaggatatggcgaaaactgggagtcgaagacattcaattggaactgaattcattgggaacagcagagtcaagaaaaggatatcgtgccatccttgttgaatattttaacgatcacacagactcgcttgatgaggactcgatcttacgattggaaaaaaatccaatgcggattttggatagcaagaatccagagatggatgatgtcattcattcagcacctaaaatgaatgatcacttggatcaagaatcagaag

SEQ ID NO: 302453 - DNA, 742 bp, Unknown
  Bacterial polypeptide expressing nucleotide sequence isolated from the Sargasso Sea
actgtttcgttgttttcgcatccggcacgtgactcagctccaaagtcttaggggcatggtcgatctcctcccggaggctgtgcagcgctggcaggccgttgaagctgttgcacgggagcattttcgccgctctggtttcggcgagatccgcacgcctctcctggaaacaaccgacctgttctgtcgcggaatcggtgaggccaccgatgttgtcggcaaagaaatgtacagcttcacagatcgcggtgagcgcgcctgcacactgcggccggagggcaccgcgtcggtggtgcgggcggcgctgcaacacggcctgttgagccaaggtgcgcagaagctttggtatgccggcccgatgttccgatacgagcggcctcaggccggtcgacagcgtcagttccaccagattggggtggagtggcttggcgcggaaagtgcccgctgtgacgttgaggtgattgctctcgcctgggatctgcttgcccgtctcggagtggggggccttgagctggaaatcaacagcctcggttctcccgaggatcgccaggtttatcgagcagcactggtgaattggctggagcagcggtctgaggctctggattccgattcccaggcccgtctcagcaccaatcccctgaggattcttgattccaagaacaatgacacccaggcattactcgagcatgcaccaaccctggccaatgccctcagcccggagagcaggcagcgctttgatgcggtt

SEQ ID NO: 302454 - DNA, 659 bp, Unknown
  Bacterial polypeptide expressing nucleotide sequence isolated from the Sargasso Sea
gttggaccttattggtcacaaaaccagtaaagatgatcttgctgaaaaaatattttatacagaagaaattcttagagatatttttgaaagtttttcgatttctgaaataagaactcctgctttggaaagttcaagtctattcaagaggtcagttggagatgcttcagatattgtaaacaaggaactatattcttttctagataaaaatgaaaaaagtataactcttagaccggaaggcacagctagtgtaataaggtcagttattgaaaagaaattagataatgatactcataagctatggtatttaggacctatgtggagatatgaacgtccacaaaaaggcagatataggcagtttaatcaagcaggtatcgagatcctaggctatccagaaggattggcagagctagaaattgtttcaataatttgttcaattaataatgcactaggaatagaaaagccagtattaaaaataaaccatctaggaaataatgaaacaaagcaaaattactgtaaggctttagaagattttttaataccattgtcatcaaaacttgataccaaagacttggaacggcttaataagaacccgctaagagtcctcgattcgaaaaatttagatactcaggctatcttaaaagatggccctaaaataatcg

SEQ ID NO: 302455 - DNA, 898 bp, Unknown
  Bacterial polypeptide expressing nucleotide sequence isolated from the Sargasso Sea
caacaagcttgctttgaaacagcaagactatttggttatagatacattgaaacaccagtattcgaggagtctgggttatttcaaagaacagttggggaaaatacagatattgtagaaaaggaaatgtattcctttgatgataaaggtggggagaatattagcctcagacctgaaaatactgcaggtgtttgcagggcatttatagaaaatggactacacaatacaactttaccatcaagacttttttattatggccccatgttcaggtatgaaagacctcaatcaggaagatataggcaatttcatcaatttggaattgaatgtatcggagaagcatcaccagacgttgattacgaagtgataaaaattgcttgggacgtattaaaaatactagactttggcaatgtagttctgaatgtcaattcattaggagatagtcaagatagatatctatattctgaagaattaaaaaaatattacagtaaatatttaaatgatttacctagagtggatcaacttagatttgaaagatctccacttagaatccttgattcaaaagaagatatcacaattaaaatttctgaagatgcccctaaaactttagattttatatctactgaaagctcaattcatcatgaaaatctgatattaaatttagatcaattaagttcaatagataaagaattcaagtataaaatcaatcacagattggttaggggtctcgattattacaataagacagtttttgagtacaccagtgactctttaggtccgcaaggagttttgcttggaggtggaagatatgatccattaattaaaattttaggtggacaagatacacctgctgttggttttgctatgggtatagaaagagctgtaaatgagctgaaaaaaaaca

SEQ ID NO: 302456 - DNA, 937 bp, Unknown
  Bacterial polypeptide expressing nucleotide sequence isolated from the Sargasso Sea
atgataagagcagccatatctaatggtctattaaataatttaccaacaaaattatttggaacaggccaaatgtttagaagagaaagacctcaaaaggggagataccgacaatttaatcaaattaattttgagaattttggctctgatgatttttttgctgatatcgaaatcataaacttagcaaatacttttttaaaaaaaattattccaaatagtaatattaccttacatataaattctttaggtactagagaaaatttaattgattataaaaaaattttatcaaaattttttaatgacaataaaaattttttatcaaaagaaagcatagataaaatagatagtaatccacttagaatattggactcaaaaattaaggaagaaaaagaaattattaataaatctccaaaattaattgaactattatcaaagtcagatttaaatgtttatgaagaaattaaaaaatctttaactgatttagaaattccaatcttcgaagacccaaaacttgttagagggttagattactattgtcacacagtttttgaatttaagactaatgaaatcggcagtcaagatacgcttataggtggcggaagatataatggacttattaaaattcttggagggaaagatattcctggtgttggatgggcaggtggaattgaaagaattatgcttttaatgaaaaacatactttctaaggataaagacatacatttcgctattattgatccagattataaaatacatgcatttaaaatttatgattttttaattaaaaataatttttcagtatattggaattataaatataatttaaagaaatccttatctatagccaatgaaaaaaaagcagattatattgtgatcattggtgaaaatgaaaaaataaataatcattattctttaaaaaatttaactaatggagatcaaa

SEQ ID NO: 302457 - DNA, 847 bp, Unknown
  Bacterial polypeptide expressing nucleotide sequence isolated from the Sargasso Sea
aataccgcaaaggctcattttgatctgtataattacaaggaaataagaacacctatctttgaaaacacagaggtttttgagcaaagcataggcgataataccgatattgttgaaaaagaaatgtactcatttttagataaaggtgagaggcgattaactttacgaccagaaggcactgcccctattgttagagcttatattcaaaacaatttaagcaagcaagaagcactttctaaattattttatgtaggccctatgtttaggtacgaacggccacaagcaggtagatacaggcagtttcatcaagttggtgttgaaactatcggagatgcctctccggcaatggatatcgaaattatctcaatggcctttcgattatttgataatttaggtattaaaaatttaaaagtatgcgtaaacagtataggagattccatttcacgccctgtaattaatgaagctatcaaacaatttctaggcaacagtccatggtacgagaaaaaaatgtgcccacggtgtattaaacgttttgataaagatcccttacgtttactagactgtaaaaatgaaacttgcaaggcctacctatcaggtttacccaatattatcgatttacaaagcgctgaatgcaaagatcactttcatgctgtgacagacggtttatataaattgggaataccctttaaagtagatccctttttggttcgtggattaggttattattcaaaaactacttttgaaattatttcagatcatcttggtgcacaaaatgccatttgtggtggtggaaggtatgataatttaattcaaagcatggggggtcctgataagcccgctggtaggattt

SEQ ID NO: 302458 - DNA, 865 bp, Unknown
  Bacterial polypeptide expressing nucleotide sequence isolated from the Sargasso Sea
attggaaaaaattaggacagtaagaggcgtgcacgatttattgcctaacgaattgcataaacatgatttagtcattgaaactggattagagatttcaaataagtataattattcacaaattgaaataccaatatttgaatttgcagaagtttttacaaaaccactaggaaaatcaagtgatatagttaccaaagaaaattatgtcttcaaagatagaagtgaagatgtattaatgttaagacctgagggtacttctggagttgttagagcattcttaaattcaggtcttattcaagatattcctcaacgattttcatattgtggtcctatgtttagatatgaaagacctcaaaaaggaaggctaagacaatttaagcaaattggtgtggaatgcctaggtttgagtagttcaatggctgacattgaggtattgttattgggatacgatttcttagacaaattaaatatattagataaaattgagcttaaaattaatactttaggagattttgatagtagaaaaaaatacagagaggtcttagtagagtatttcagtgattatcaatcagaactttctaaagatagcataaagagactgtcaattaaccctcttagaatacttgactcaaaaaatgaagcagaccagaaaattattaaaaacgcacccaatatcttagatcatcttaacatcgagtccatgacaagatttgaaaaaatctgcaaaggtttagatcaactgaatattaaatatataattgataaaaatcttgttagaggacttgattattattatcatactacatttgaatttactacaaattattttgggttctcaaggaactgtgcttgcgggaggaagatatga

SEQ ID NO: 302459 - DNA, 873 bp, Unknown
  Bacterial polypeptide expressing nucleotide sequence isolated from the Sargasso Sea
aatgagggaattgcaaccggtccgtggaacacgagacatcatgtctgaggagttcagacaacataattatctcattgatcaattacgttattttgcggaattgtatggttattcagaaattgcaacccccatatttgaattttcagatgtttttaaacgcacacttggtgatacttcagatattgtcaccaaagaaatgtataccttttccgacaaagcgggggatgaaattacattaaggcctgagggtacggctggtgtcgcccgaatgctgatttcttccggtttaaaacaaaatctgccactgaagtatttttataatggtccaatgtttcgttacgagcgtccacaaaaaggcaggttcagacaatttcatcaaataggcgtcgagctgctcggtgtgccagaggtgattggtgatatagaagttatagcattggcatcaagtatgttggatggattaggtattttgtcgcaatgtaccttagaaataaacacgcttggcaataaagtaagcagaaaaggttacaggcataaattgatcaattatcttagagactatcgcgatcaactctctgaggatagccgccggcgactggaccggaatcctctgagagttcttgattctaaagataagggtgatcaaaaaataatagagaatgctccggagtttaccgaaagtcttgatactgagtcgaaagattttttttcgggggtaaaagaaggcttagataaattatctatttcctatgagttgaacccgcgcttggtaaggggtttggattattattgtcatactgcttttgaatttactactcgagatcttggagcccaagggacaattcttgcaggtggaagatatgatggccttgt

SEQ ID NO: 302460 - DNA, 812 bp, Unknown
  Bacterial polypeptide expressing nucleotide sequence isolated from the Sargasso Sea
tatgaaaattacaccagtacgaggaacccatgatttttttggacaacaagttataaaatacagaacgatacaagacttaatcagtcattattctgtaatttataattttgaagagattattactcctatttttgaatcaacagagttatttaaaaagccattaggtgaaaatagtgatgtggttcttaaagaaatgtatacctttaaagacaaaaatgaagattttcttactttaagaccagaatatactacccccatgataagatcagcaataagtaataaccttttagaaaaactcccaaaaaaattatatggcattgggccaatgtttagaagagaaagacctcaaaagggaagatatagacaatttaatcaaattaattttgagatacttgggactcacgatatatcagcagatatagatttaattattttagctaataattttctaaaaaatttattacctgaaaaaaaaatcaatttatttattaattctttaggagataagaacaccataactaattttagtatagctttaggcaattatttcaaacaaaataaaaagaaattaacagaagaatcacaaagtaagattgttttaaacccaataagaatcttagactcaaaagatccaacagatatagaaattaatttaaatgcaccacaaatatctgatttttattcgaatgaagctaaagaaaaattttccaatattcaaaaaatattaaaagatatgtctgtagatttttctataaatatgaattttagtagggggcttgattattattgtcacactgtatttgaattcaaac

SEQ ID NO: 302461 - DNA, 855 bp, Unknown
  Bacterial polypeptide expressing nucleotide sequence isolated from the Sargasso Sea
acacctatgattagagcggctattactaataatctattaaacgatcttccattaaaaatttttggaattgggccaatgtttagaagagaaaggccgcaaaagggtagatatagacaatttaatcaaattaattttgaaatacttggaactagagattttcttgctgatgttgagttaatttctttgtcaaataatattctaaacgaactcttacctaaatctagaataaaacttcatattaattctttaggagataaaaaaacattaattgattttaaaaaaaatcttacaaaatattttaattttcataaaaaaaaactatcggaagaaagcataaaaaaaattgaaactaacccattaagaatattagattcaaaaaatgatgaagatgttgaaattgcactatcttcacctaaaatatatgaatacttaaccgatgaagctaaaaaacactacgaagatcttaaaaaatcattaaatatactagaaattgattttgaagaaaacgctaatcttgttagaggtcttgattattattgtaatacagtattcgaatacaaatcagataatttaggaagtcaagatacattactaggtggtggaagatatgacggtttaataaaagtattaggtgggcctgatatacctggtattggatgggccgcaggcattgaaagaattgcattattaatggagtccgaaaaaaaaataagctcgactattcatattgcagtaacaaatgaaaaatttatagattattttctttatctacaaaaatatttatctgagaatagaatttcatattactggaattataaatacaatttaaaaaaatcatttacaaaagcaaataca

SEQ ID NO: 302462 - DNA, 680 bp, Unknown
  Bacterial polypeptide expressing nucleotide sequence isolated from the Sargasso Sea
tatgaaaattaatcctgtaagaggaactcatgatttatttggaaaagatattaagaagtttaataagattatatctgatgttaaagatattgcatatcaatttggttttaatgagctagtaacaccaatttttgagagtactgcactatttaaaaaacctttaggtgaacagagtgatgtagttttaaaagaaatgtatacttttaaagataggaatgatgatgagattacactgagaccagaatatacaacaccgatgattagggcagcaatatcaaatggtctcctaaataacttaccagttaaattttttggtacggggcaaatgtttagaagagaaagacctcaaaaaggaagatatcgacagtttaatcaaattaattttgaaaattttggttctaatgattcttttgctgatgttgaaattataaatttagcaaatttattaattaaaaaaatacttcctaataagaaaataaaattacatattaattcattaggtactagagaaaatttaattaattataaaaaaactttaagtcattattttaatcaaaataaaaattttttatctagtgaaagtaaagataaaattcaattaaatcctcttagaatactagattcgaaaaatatcgaagataaggaagttattgataaagcgccagttttaattgattttt

SEQ ID NO: 302463 - DNA, 747 bp, Unknown
  Bacterial polypeptide expressing nucleotide sequence isolated from the Sargasso Sea
catggcggaggagagtagcgttcagtcaatccgggggatgaatgaccttttgccaggtcagattgaaacctggcaacgtgtagaagcagccgtgcgggaagtatcccgccgctacggttaccgggagattcgaacgcccatagtcgagcggactgagctttttcgcagatctatcggagagcagaccgatattgtcgaaaaggagatgtataccttcactgacaacaatggcgacagtctcaccttgcggcccgaagcgacggcgagttgtgtccgggcaggaaatgagcatggtctgcttcacaaccagacacagcgactctggtatgtcggaccgatgtttcgacatgagcgcccgcaaaagggtcgttatcgacagtttcatcagtttggaatcgaagccctgggttgggcgggatcggatatcgaagcagaggtgatcgcggtgggggagcggctatggcgctgtctcggaatcaaggatttgaacctcgagatcaattcgctcggttcggtagcagcgcgcgcaaattaccgggatgcgctgaaagcttatctctcggatcatgtagatgcgctggacactgacagtcagagacgcctggaacgtaacccgctgcgaattttggacagcaaggatgcaggcacacaggaagtgcttgatagtgcgccgagtctttcggatttccttgaagagacagagcaggagaatttcgagcgactgcagcagctgctgacgactgtgaa

SEQ ID NO: 302464 - DNA, 838 bp, Unknown
  Bacterial polypeptide expressing nucleotide sequence isolated from the Sargasso Sea
atgaaattaagatcagtaagaggaacccatgatatttttggagaagaaatagaaaaatttaaccaaatctctaatattgtttctaaaaatgctcatttaaaaaattttaaagaaatccagacacctatttttgaatttagtgatttatttgcaaaacctttaggtgaacattctgatgttgttttgaaagagatgtattcatttgaagatagaaataatgaatttttaacattacgccctgagtatacaacacctatgattagagctgctatcactaataatctcttgaatgatcttccattaaaaatttatggtattggtccaatgtttagaagagaaagaccacaaaaaggtagatacagacaatttaatcagataaattttgaaatacttggcaccaaagattttcttgcagatgttgaattaatattactgtcaaataatattttaaaagaacttctgcctaaatctaacataagacttcaaattaattctttaggagataaagaaactttaattaattttaaaaaaagtcttactaaatattttaatacttataaaaagaaactatcagaagaaagtattaaaaaaattgatactaacccattaagaatattagattcaaaaaatgatgaagatattgaaattgcaaaatcttcaccaaaaatatatgaatatttaactatcgaagctaaaaagcactatgaagatattaaaagtgctttaaatcttcttgaaattaattttgaagaaaatgctaatctagttagaggtcttgattattattgtaatacagtatttgaatacaaatcggataatttaggtagtcaagatacct

SEQ ID NO: 302465 - DNA, 862 bp, Unknown
  Bacterial polypeptide expressing nucleotide sequence isolated from the Sargasso Sea
aatgtatagatacgaaagacctcaaaagggaaggctacgtcaattccaacaatttggagtggaaagtttaattgatcaagaaaaatcctctcaagaggaattgataaggatggagttaaaagtcattggttgccttttagatattgtcggagcattaaatataaaagatttcaaactagaaattaataatattggctcgtctgaaactaagaaaaaatattctaaagaattagtaagttttcttgaaactaaccttgatacgctttcagatactgaaaaaaatagactgagcacaaatccactaagaatattagattcaaaagaccccataactagagatatcttaaaatcagcaccagaatataatgattttttgagtaaagatgagaagcagcaccttagtaaattgactaatgcaatcgaagaaaattacataaaacctcacatccaacaaaatcttgttaggggtctagattattattctggaattgttttcgaagttgtatgcaatgatcttggtgcgcaaaaagctattgctggaggtggtttttatagtgaactgtttgaagagtttggtggtaatagtatctctgcttttggttttgcaatgggaattgatagattaatggatttagctagcccagcagaagataaaattttaaaagtttttgtattagacgttactaaagctagctcaaattttgcaattcaagtttttaatagaattaagatgctttcacacacaactcaattgttcttcccacgcacaaaagattctagcctaaagtcacttttacgaaatgtaaataaaaaaaatggcgatattgctattattgtgggtgataaggaggaggccaataaa

SEQ ID NO: 302466 - DNA, 696 bp, Unknown
  Bacterial polypeptide expressing nucleotide sequence isolated from the Sargasso Sea
aatgtcaaaaatacaatcattaagaggcatgaatgatattggccctcaacaagctaaagaatggtcttatgtcgaaaaagttataaagtctcttgtaaagtcttatggttacgaagaaatcaggttcccgctcgtagagaaaacagaactttatacaaggtccaatgaggctgcagatatagtttcaaaagaaatgtatacatttcaagacaagggaggagagagtatatctttgagacccgaaggaacagcgggttgtgtaagagctgctattgataatgatctcattagaacagacaagccaagattatggtacgcaggaccaatgttcagatatgagcgcccccaaaaagggagatctaggcaatttcatcaattcagcgctgaagtgtttggaattaattctcctgaaatagatgcagaattaattcttatgtcagcaagattatggagagagttgggacttgccgataaagtaagattagaacttaataaccttggagatgaggaaacaaggaattctttttctaaggcacttgtagagtttttaaaggatcaaaaagaagatttagatgaagatactcaaagaaaacttctagaaaaccctctccgaattctagactctaagtcacaaactgttcaaaatttactagaaaatgcccctttaatagaaaattttgtcagtgaagattcaaa

SEQ ID NO: 302467 - DNA, 904 bp, Unknown
  Bacterial polypeptide expressing nucleotide sequence isolated from the Sargasso Sea
attccatcaattcggtgccgaggtgtacggcctaaatggacctgatgtggatgcagaattaatcatcatgactgcgcgcctatggcaaaaattaggcattggtgaagttttaactttgcagctaaataccttaggtagtcgcgagtcgcgcgcggcctaccggcaagatttggtcgttttcttacagcaacatatggataagttggatcctgatagtcagcgtcgtgttaccgccaacccattacgggtgctggatagcaaggatcatgcaacacaggcattacttgaccaggcgcctgacttctatagttatctggacgctaattcgaggcggcattttgaacgtttgaaaatgctgctagatcaagtgggtttggtttatgaactcaacccacgcctagtacgtggcctagattactactgtaaaactgtgtttgagtgggtgaccaatcgcttgggagctcaaggcaccgtctgcggcggtgggcgctatgacggcttgactgaacaactaggtggtcgttccacgcccggcgtaggatgggctatgggtgtagaacgcctggtacttatgctgcaggaaatgaatctggtaccacctgagctggcgcaacagatagatgtttatatggtgcacacagtggacactgccgccgctagcatgttgctagctgaacagctgcgtcagcaattgcccaatgtacgtattttgtggcactgcggtggtggcagttttaagaaccagatgaagaaagcggataagattggtgctgctgtggcgctaatcatgggtatagatgagctacagaatgggcaggtaaaagtaaagccgatgcgcagccagtctgatgtgcaaacggtgctagcgtctgaggttgccactgcggtgcaacgactgatataa

SEQ ID NO: 302468 - DNA, 883 bp, Unknown
  Bacterial polypeptide expressing nucleotide sequence isolated from the Sargasso Sea
ttttatgcggggccaatgtttcggtacgagaaaccgcaaaaaggcaggtaccgtcagtttaaccaaataggtgttgaagcctacgggttctcaggtccagatatcgatttagaactgattcttttggctcgagatatttgggaaggtataggtctgaaggaagtgcttaccttagagataaataatcttggctcgttagaggctcgaagaaagtatcgcttagcacttgtagaatttttgcagcctaataaagccgcccttgacgaagacagtcaacgaagattgcagactaatccgttgaggattctagacaccaaaaatgagaagacaaagctgatactagaaaaagcgcctaagttggaggattttttagattccgaaagtaaagaacggttcagtcggttgtgcgcattattgactgagcaaggacaggattacgtgattaacccctttttagtgagaggactagattattacacggactgcgttttcgaatggaaagccaataatgtgggtgcccaagacacgatttgtgctggcggcaggtatgacggattagtagagcgactgggaggtcgacagactcctgcaatcggttttgccatcggtttagagcgaatgattctagcgcttgaagcgctagagcagactcaagagtctcgggtaagtgtcgatgtctatgtctcttttctggaggaaagcctcttagggaaagcaatgaatatggctgagctgattcgaaagtcagacgctggtttaagagtccgcgttcatatgggaggcggaaatttcaagaagcaattaaaacgagcagatgcggtgggtgccaagtgggcggtcttgatcggagatgaagaagttaaacagaatatttcactctgaa

SEQ ID NO: 302469 - DNA, 896 bp, Unknown
  Bacterial polypeptide expressing nucleotide sequence isolated from the Sargasso Sea
catgatatattttggggaagaaatagataaatttaactttatttctaatattgtttctaaaaatgctaatttaaaagaatataaagaaatccagacaccaatttttgaatttagtgatttgtttgctaaacctcttggcgaacattcagatgttgttttgaaagaaatgtattcatttgaagatcgaaataatgaatttttaacacttcgccctgagtacacaacgcccatgattagagcggctattactaataatctattaaacgatcttccattaaaaatttttggaattgggccaatgtttagaagagaaaggccacaaaagggtagatatagacaatttaatcaaattaattttgaaatacttggaactagagattttcttgcagatgttgagttaatttctctgtcaaataatattttaaaagaacttttacctaaatctaaaataaaacttcatattaattctttaggagataaaaaaaccttaattgattttaaaaaaagtcttacaaaatactttaatactcataaaaaaaaactatcagaggaaagcattagaaaaattgaaactaacccattaagaatattagattcaaaaaacgaggaagatgttgaaatttcaatatcttcacctaaaataaatgaatacttaactgatgaggctaaaaagcactacgaagatattaagagatcattaaacatactagaaattgattttgaagaaaacaccaatctcgttagaggtcttgattattattgtaatacagtattcgaatacaaatcagacaatttaggaagtcaagatacattactaggtggtggaagatatgatggtttaataaaagtattaggtgggcctgatatacctggtattggatgggctgcaggtattg

SEQ ID NO: 302470 - DNA, 485 bp, Unknown
  Bacterial polypeptide expressing nucleotide sequence isolated from the Sargasso Sea
tttgaataacctaaaaaatcttacaggaacagtcgacctattgcctgatcaattaataaagtggcaaaacgtcgagaaaattttattagagcagcttgcaagagcatccatcaaagaaataagaacaccaatattggaaatgaccgaattatttataagaggaattggtgaaggaacagatgttgtcagtaaggaaatgtatacttttcttgatagaggggagagatcctgcactcttagacctgaaggaaccgcttctgttgcgagagcgttaatacaaaatggtatgtcttctaatccacttcagaaactttggtacatgggtcctatgtttcgatatgaaagacctcaagcaggtaggcaaagacagtttcatcagttaggtgttgagtttataggatacgattcacttagaagtgatgttgaaattgttgctttatcttgggatgtcttgagtaaattagggataaaagaacttaatcttg

SEQ ID NO: 302471 - DNA, 621 bp, Unknown
  Bacterial polypeptide expressing nucleotide sequence isolated from the Sargasso Sea
tatgaaaaaaataaaaccttctattcctcggggcacaagagactttggtcctaatgaaatgataaaaagagaatatattttttcgatattaaaaaaaatatttttgaattatggatttcaaaatatagaaactcctagtcttgaaaagattgatattcttaaaggaaattatggtgaagaaggtgataaattattatataatattcttgattcaggagattttttaaaaaatgcaacaattgatcctaaaacaaattataaaactcttaaaagaaaaatctcacaaaaaggtcttatttatgatttaactgtacctctagcaagatatgttagcatgaatagagataaaatatcttttccatttaaaaggtatcaaattcaaaaagtttggagagcagatagacctcaaaaaggtagatatagagaattctatcaatgtgatattgactatgttggaactaattctattttatgtgaaatagaaataatagatataatttctgaagtttttcaaaaattaaaatatgaaaaattcaaaattaaattgaataatagaaaagttttggcaggaattgcagaacaattaaatatcaaagaaagatttattgatttatgtatttc

SEQ ID NO: 302472 - DNA, 687 bp, Unknown
  Bacterial polypeptide expressing nucleotide sequence isolated from the Sargasso Sea
gttgaaagaaatgtattcatttgaagacagaaataatgaatatttaacactacgcccagaatacacaacgcctatgattagagcggccatttctaataatctcttaaacgatctaccattaaaaatttttggaattggcccaatgtttagaagggaaaggccacaaaagggtagatatagacaatttaatcaaattaattttgaaatacttggaactagagattttcttgcagatgttgaattaatttctctgtcaaataatattttaaaagcactgttacctaaatctaaaataaaacttcatattaattctttgggagataaaaaaacgttaattgattttaaaaaaagtctgacaaaatattttaacacccataaaaaaaaactatcagaagaaagcattaaaaaaattgaaactaacccattaaggatattagattcaaaaaacgaagaagatattgaaatttcactatcttcacctaaaatatatgaatacttaaccgatgaagcaaaaaagcattacgaagatattaaaagatcattaaatatactagaaattgattttgaagaaaactccaatctcgttagaggtcttgattattattgtaatacagtattcgaatacaagtcagataatttaggaagtcaagatacattactgggtggtggaagatatgatggtttaat

SEQ ID NO: 302473 - DNA, 847 bp, Unknown
  Bacterial polypeptide expressing nucleotide sequence isolated from the Sargasso Sea
gattttcaagacgacaactcaaaaaaaattttttacatagaagatgaattaaaaaaaatatttaatttatataatttgaaagaatttagaacgcctgcattagaagatagctctttgtttagtcgctctgttggcgatatttcagatattgtaaataaagagatttattcttttgaagataaaaataaaaaaaatatttctttaagaccagagggcacagcagggatcattaggtcaataattcaaaaaaaacttgatatctcgtcacacaaactatggtacataggaccaatgtggagatatgaaagacctcaaaaaggaagatttagacaatttacacaagctggtgttgagattttagggaatgaagaaggcacgtctgaatttgaaatgatttctatagttacttctattgttaataaatttaagcttaaaaactatgtcattaaaataaaccatttaggtaacaaaaaaaccaaagattcgtattgcacagcattaaaaaaattccttgaaaattttaaagataatattcattccagtgatctagaaaaattagaaaaaaatccgttaagaattcttgattctaaaagtcaagaaacacaaacgattcttaaaaacgcaccctccataaaagattttttagataaagaatcttatgacttattaaaaaaaataaaagatactttttctgacattgaaattgatttcaatctagttagaggacttgactattattctggatttgtttttgaagcaaactcatctgaacttggtgctcaagatgctatccttggtggtggaagatatgataatttatcaaaggatcttggtggcaaagatttgc

SEQ ID NO: 302474 - DNA, 676 bp, Unknown
  Bacterial polypeptide expressing nucleotide sequence isolated from the Sargasso Sea
atgaagaccaaatcaatacaatcaatcaaaggaacacaggatatccttccaagtgaagtccatttttggcaagaaatggaacgtaagatatttgaagaaatggcgctttttgggtttagtgaaatccgcacccccgcttttgaaaatacagaccttttttcaagaagcgttggagaacaaacagatattgtatctaaagaaatgtataccttcgaagatcgcagtggaggcagtctaacattaaaacctgaagcaacagcatcagttgttcgcgcttttatccagcataatcttgataaaatcaatactctcactaggcttttttatattgatgcattatttagaagagaaagaccgcaaaaagggcgctatagacaatttcaccaatttggtgcagagctatttggctcagaacatccagaggctgatgtagagattgtctcgcttgcatcatcaatcttcaaatcaattggaataaatgaaattactttaaagataaacaccattggttcaaagagcgcaagagacaattacaaaattgaattgaaaagatttcttaaaccccattttaataaacttagtgaagcaagcagagaaagacttgaaaagaatcctttaagaatacttgacaccaagaactcgcaagagcaagaaatcctatcaaatgcacctcaaa

SEQ ID NO: 302475 - DNA, 598 bp, Unknown
  Bacterial polypeptide expressing nucleotide sequence isolated from the Sargasso Sea
aatgagtaaatcacctattcgctcagttaagggtacccaagatattcttccagatcagtcttctagatggcaggatttagaattgactattcaaaagattatggataggtatggatataaagaaatacgtacccctgcttttgaaaacactgaagttttcttaagaggtgttggacaagaaactgatattgtttcaaaagaaatgtatagttggactgatcaaggtggtaacaatttaactctcaaaccagaactgactgctcctgtagtaagatcatttatccaacataatcttggtcaaataaattctataaataagctttattatatagattcactttttagaagagaacggccccaaaaaggtcgatatcgcgaatttcatcaatttggtgttgaagtttttggttcagaatatcctgaagttgatgtagaagttattgcattagcaatgtatgtatttaataatatgggcctagaaaatctaacgctaaatttaaattctattggttctccaaaatgccgtaaaaattaccgtgatgcgattaaagattttttagaaccgcattttgacgatttaagtaaaactggtcaagat

SEQ ID NO: 302476 - DNA, 707 bp, Unknown
  Bacterial polypeptide expressing nucleotide sequence isolated from the Sargasso Sea
aaagaggatagataagaatcctctcaggattttagattctaagaatgttcaaacaaaaaagattcttgaaaatgccccccgattatttgattttttgtctgaaaaaagtcttcataggtattttgctgttaaagagcaattaaaacttctaaaaattccctttatagaaaattttaatttagtaagaggtttagattattacacacatactgcatttgaaatcacaagtggggtgcttggatctcaatctacagtttgtgggggaggaagatatgataatttaattaatcaaatgggaggaaaagaaactccagcaattggattcgcaattggattggaaagactaattcttttagcaggtaaagatcttgaagaaagcagagaaacagatatatatattgtgaataaaggctttaaagcagaaacattagcaattaacttatcaagaaaattaagaaattatgatttgataatagaattagatttaacaggagcatctttttcaaagcaatttaaaaaagctaataaacttaattcaaaaagtattattataattggggacgatgaagcactcaaaaatgaatttgttattagattatttgaaggaaagtttatcgaaaatagagaagaggttttatcctttgatgacagtgaaaaattagagaattggctaaataaaaatctccttaagaaaaatccttgttaaa

SEQ ID NO: 302477 - DNA, 853 bp, Unknown
  Bacterial polypeptide expressing nucleotide sequence isolated from the Sargasso Sea
ttccaatgtttataattttgaagaaattataactccgatttttgagtcaacagagttatttaaaaaaccgttaggagagaatagtgatgtagtacttaaagaaatgtatacatttaaagataaaaatgaagactctattacgttaagacctgaatatacgacgccaatgataagagcagcaataagtaataatcttttaaataaacttccaaaaaaattatatggtattggacaaatgtttagaagggaaagacctcaaaaaggtagatacagacaatttaatcaaattaattttgaaatacttggaacacatgatgtttcagctgatatagaattaattattttagcaaataattttttgaaaaaattacttcctacaaaaaagattgatttatttataaattcattaggagataaaaatactttatccagattcaatattgatttaaaaaaatattttgaaaaaaataaagaaaaattatcaaaagattcccagaataaaattaatactaatcctgtaagaattttagactcaaaagatccaattgatactgaaattaatacaaaagccccaaaaatatgtgatttttattcctctgaagctaatgaaaaatttattaaagttcaagaaatattaaagaatatgtcagtggatttttcaataaaccctaatttagtaagaggcttagattattattgtcatactgtttttgaattcaaaacatcagatttaggctctcaagatactttaattggtggtggcagatatgatggtttaacaaaattactgggcggtcctgatattccaggagttggttggggcggaggtatagagcgcttaatgatgttaatg

SEQ ID NO: 302478 - DNA, 835 bp, Unknown
  Bacterial polypeptide expressing nucleotide sequence isolated from the Sargasso Sea
aatgaaaaatttacggacagttagaggggtaaatgacattctcccagatgtcatgcacaaacataattacataaatcaaattgggacacttgtatgcaatcaatcttgttatgaacaaattgatactcctatatttgaatttgcagatttatttattaaaccccttggtgagacaagtgatataattacgaaagaaaattatgtatttaaagataaaagtaataatgcattaatgcttagaccagaaggcacaactagtgttgtcagagcattaattaacgcgggattaacacaagttcttccaaagagatttttttactttggtccaatgtttcgttatgaaaggccacaaaaaggaagattaagacaatttaatcaatttggagctgagttgttaggagtagatgatgtgtttggtgatgttgaggtaattaatttagggtataattttttaaaaaaacttaaattaataaataaagttgatcttgtgattaatactttgggagatcaggaaagcaggcttaaatatagggagcaacttgtaacgtattttaataaatataaaaatgacttgtcagaggaaagcaaaataaggctggagaaaaatcctcttagaatactagattctaaaagtaaaaaagacaaagaaataataaatacagcgcctgattacagaaaatttttaaataaagtatcaataaaatattttgatgatgtttgcagggctcttaatgttttagaaatatcgtttgtaagagatcctaatttagttagaggcttggattattatagtcatacaacgtttgaatttaaaactaatttgataggagcccaa

SEQ ID NO: 302479 - DNA, 529 bp, Unknown
  Bacterial polypeptide expressing nucleotide sequence isolated from the Sargasso Sea
tatggccattaaatcaaaatatcacgctgtccgtgggatgacgggaagccttcctaaagagaacctcctctggcgaacgatagaagatgaactgattcaaatactaagctcatactcgttccaagaaatcagattaccaataatagaatattcagggatttttaatcgttctatcggtgaatcatcagatatcgtgcaaaaagaaatgtacagctttacagacagaaacggggagtcacttacactccgcccagaaggcacagctggatgtgtaagagctacaatagagaataatctacttagtactagcgccccattacgcctttggtatcatgggccgatgttcagatatgaaagaccccagagaggaaggcaaagacagtttcatcagattggcttagaaatttttggctcggatagtgttctcgctgaaacagagctcatggttatcttttcaaggttttggtcgagcttggggatatctgatataacgctccaaattaatacactaggaaatcaggaagataga

SEQ ID NO: 302480 - DNA, 808 bp, Unknown
  Bacterial polypeptide expressing nucleotide sequence isolated from the Sargasso Sea
tatgaaaataagacctgtaagaggaacacatgatttgtatggggaaaacatatttaaatacaatactattagagatgtaatttccaattatgcgaagttaaataatttcaaagaattacaaacacctatttttgagttttctgatttgttttcaaaacctttaggagatcaatcagacgttgttttaaaagaaatgtacacatttagagatagaaataatgataatttaaccttaagaccagaatatacaacacctatgattagatcagctctatcaaacaatctgctgaccaatcttccgcttaaagtttttggtataggtcctatgtttcgaagagaaagaccacaaaaaggaaggtatagacaatttaatcaaattaattttgaaatttttggtacaaacgattttttagccgatctagaattaattattttagcaaatgatattttaaaatcaatgattcctaaaactaattttatattgcaaattaactcactgggagagaaaaacacattaaatgattataaaagtattttaagtaaatattttaatgataaaaaaaatcaactatctgaagactcaaaaaacaaaattcatacaaatccattaagaatattagactctaaaaatgaaaatgatatgaatgtatcaaataatgctccatctattagagaatttatatctagtgatcaaaaaaatcattttgaagaattaaaaaatggacttcaatttaatgacattgaatatattgaaaatcataatctggttagaggtttagattattattgtagtactgtgtttgagttt

SEQ ID NO: 302481 - DNA, 899 bp, Unknown
  Bacterial polypeptide expressing nucleotide sequence isolated from the Sargasso Sea
tcttactcttcgccctgaattaactgcttcaatagttagatcatatatacaacataatcttcaaagttattcaccaatacaacggcttttttatactggcccaatatttcgaagagaaagaccccaaaaaggaagacagcgtcaatttcatcaatttggagtagaagcatttggatcagataacccagaacaagatgctgaagttatttcacttgcatggcatcttctctcaaaacttaatattattgataatattaccctaaaaatcaacagccttggttcgccagagtgtagaaaaagatatcgtcttgctctaagagattttattcgtccgcaccttagtacattttctgagacaagtaatattcgatttaaaaaaaatcccttacgtattttagatagtaaaaatacccatgaaaaaaatattttaaaatctgctccatccatttcaaatttttataattcagatgatgaagatcattttaaatcagttttaagctttcttgataaaatggaaatatcgtataaagttagtcctcaattagttagaggattggattactatacaaaaacagtttttgaattcacatccaaagatttaggtgctcaagatgcaattcttggaggaggaagatacgatagtttagttaaaacattagggggaaagccaactgcagggattggatttgcagctggtatggaacgttttttaattgcattagaatcaaagggttttaattttgaaaatgagccacctgatatttattttgtatgcgttgaaaaagaagcaataggattaactttagctttgacaaaaaagttaagagaaaaagattttagtgtgatgattgatccaataagacgaagtatgaaagcccaactaagggaagccaataaat

SEQ ID NO: 302482 - DNA, 895 bp, Unknown
  Bacterial polypeptide expressing nucleotide sequence isolated from the Sargasso Sea
agtgatagaaatgatgattcgttgacgctaaggcctgagtacacaactccaatgataagggcagcaatttcaaatgatctattaaataaattaccatgtaaactttttggcattggtcctatgtttagaagagaaaggcctcaaaaaggaagattcaggcagtttaatcaaattaattttgaaaactttggatcaaatgacatttttgctgaagtagaattaattaatattgctaatagtctgttaaaaaaaattttgcctaaacaagaaatagttctttatataaattcacttggcgatagaaatactttaaataaatataaagaaaaattaactaatttttttgaaaaatataaaaaggaactttctatagaaagtaaggaaaaaatattaaaaaacccaattcgtatattagattcaaaagataataatgataaaaaagttatttctaaagcgccattaattattgattttttgtctaaagattctctaagaaaatttgaagaattaaaaagttttttacaaaaatataaaattaattttaaagaagatttttctttggtaagaggtttggattattattgtgatactgtatttgaatttaaatctagctcattaggcagtcaagatacaattattggcgggggtagatacgatggtttaattaaagttttaggtggtaaggatttaccaggagtaggctgggcagcagggattgaaagaataatgattttaatgtctgaaattttaaataaaaatgaaaaaattcattttgcaatattaaatgaaaagttcaaatcacatgctttgaaagcctataaatcattatcagatctggaaattgcagtatattggaattataaatttaatttaaaaaaatcgaattatctccatt

SEQ ID NO: 302483 - DNA, 688 bp, Unknown
  Bacterial polypeptide expressing nucleotide sequence isolated from the Sargasso Sea
ctgactcgctgttctcgcatccggcaagtgactcagctccaaagtctcaggggcatggtcgatctcctcccggaggctgtgcagcggtggcaggcggtggagggtgttgcccgggagcatttcctctgctccggttttggtgaaatccgcacaccgttgctggaaaccaccgatctcttctgccgtggcatcggtgagggcaccgatgtggtgggcaaggagatgtacagcttcaccgaccgtggtgatcgcgcctgcaccctgcggccggagggcaccgcctcagttgtaagggcagctttgcagcacgggttgttgagtcagggtgcccagaagctctggtatgccggcccgatgttccgctacgagcggccccaggccggtcgccagcgccagttccaccagatcggtgtggagtggctgggggcggagagcgcccgcagcgatgttgaggtgattgccctcgcctgggatctcctggcccgtctcggagtgggtggcctcgagctggagatcaacagcctggggtcgccggaggatcgtcaggcgtaccgggcagcgctggtggcatggctggagcagcggtcggaggctctggattccgattcccaggcccggctcagcaccaatcccctgcggattcttgattccaagaacaaggacacccaggcatactcgagcacgcacc

SEQ ID NO: 302484 - DNA, 856 bp, Unknown
  Bacterial polypeptide expressing nucleotide sequence isolated from the Sargasso Sea
aatcaattttgaaaattttggaacaagtgactcatttgctgatgtagaaataataaatatagcaaacttattattaaaaaaaatcctaccaaacaaaaaaataattttacacattaattcattaggcaaaagagaaaatctgcaaaagtataaagaaactttgtcaaattattttaaagataagaaaactttattatcttctgaaagtatcaaaaagattcacacaaaccctttaagaattttagactcaaaaaataatgaagataaagaattaattttaaaagcacctaaaattattgaatttctatcaaaagaagatttaaagcattatgaagaggtgaaaaatagtcttttaaatctcaatattactttttatgaggattttaatcttgttagaggtttagattattattgtaatactgtatttgaatttaaaacaactgaaatcggaagtcaggatacattaattggcggcggcagatatgatggtcttataaaaatccttggaggtaaggatcttccaggagttggctgggcaggaggtattgagagattaattattttaatggacaatatatatcactctaatcaatcaattcattttgcaattttagattctaaatataaaaatcaggcattaagagcatacaatttattaactgaaaatggatattcagtttattggaactacaaatataatttgaaaaaatctttatcaaaagcaagtgaagaaaaagcaaaatatattattattgttggagaatcagaaaatacgaaagatcaattcacaataaaaaacctatctaacggcaaccaagaagtaataattttatctaaaattctagattttgttaaa

SEQ ID NO: 302485 - DNA, 511 bp, Unknown
  Bacterial polypeptide expressing nucleotide sequence isolated from the Sargasso Sea
ctggtggcggtgaagggcatgaacgacatcctgccgccagagtccgcccgttgggaatggttggaggccaaggtgcgcgatctgatggcgcgctatgcctaccgcaatattcggactccgattgtcgagcctacgccgctgttcgtgcggggactgggcgaggtcaccgatattgtggagaaggagatgtactcgtttgaggatcgcctcaacggagagcaactcacccttcgccccgaagcgacggccggtgtggtgcgcgccgtcgcggagcactccatgctgtacgacggtggcaagcggctgtattacatgggccccatgtttcgtcatgagcgcccccaacgaggacgctaccgccagtttcaccagatcggcgccgaggcactgggttttcccggcgccgaggttgacgcagaactgattctgctggccagtgcactgtggcgcgatctgggcctgcagaatgtgcgcctcgaactcaacagcttggggcagccggacgagcgca

SEQ ID NO: 302486 - DNA, 655 bp, Unknown
  Bacterial polypeptide expressing nucleotide sequence isolated from the Sargasso Sea
attggatagcaagaaccctgacatgaaaggtttaattttttatgctccaaaaattacagattatctcgacgatgaatccaaacaacatttctcaatcctgctcaaagctttggaatcgcacggtatcgattacaaattaaattcaaatctggtgagagggcttgattattacactaagacagtctttgagtggacttcggatcaattgggctcacaagctactgtttgtggaggtggacgctatgacggcttggttgaacagcttggcggcaaagacgtttgtggcattggttgtgctattggcatggaaagattaactgaattggttgaagtctctgtagaaaaagcagaaaatagccagccaaaaatttacattgtagcagttggtgagggcgcagagatacacgccagtataatggcagagactattagggatgagaatcagaattacgccgttgaggtaaacatggacggaggaaattttaagcagcagtttcggagagcagataaatctggagctgagttggcaattatagttggtgagcaggaaatagagcagggcactattagccttaagcctcttaaaagcgacgacgaacagacaactgtcaaacaagaagagcttatcgggcaactcgatgaattctttggttaa

SEQ ID NO: 302487 - DNA, 443 bp, Unknown
  Bacterial polypeptide expressing nucleotide sequence isolated from the Sargasso Sea
tttgaataacttaaaaaatcttagaggaacggtagacctattgcctgatcaattaataaagtggcaaaatgttgagaaaattgtattggagcagctttcaagagcatctattaaagaaataagaacaccaatattggaaatgactgaattatttataagaggaattggtgaaggaacagatgttgtcagtaaggaaatgtacacatttctggatagaggggagagatcttgcactcttaggcctgaaggaacagcctccgtagcacgagccttaatacaaaatggattgtcctctaatcctctgcaaaaactttggtacatgggacccatgtttagatatgaaagacctcaagcaggcaggcaaagacagtttcatcagttaggtgttgagtttataggatacgaatcagtaagaagtgatgttgaaatcatttgctttagct

SEQ ID NO: 302488 - DNA, 970 bp, Unknown
  Bacterial polypeptide expressing nucleotide sequence isolated from the Sargasso Sea
acttattcaacgctctatcggagaagtgaccgatatcgttgaaaaagaaatgtataccttcgaagatagaaatggcgacagtctaacgctgcgcccagaaggtactgcaagttgcgtgcgcgcaggaaacgaacacggcttattgtacaaccagcagcaacgcctgtggtacatggggccaatgttccgtcatgaacgtccacaaaaagggcgttatcgccagttccatcagttcggtgtagagacctacggtatggacggtcctgacatcgacttagaagttattcttcttagtgcacgcttttggaaagcttttggtattgagcaacacgtaaaacttcaaataaatacgttaggttcaaatgaagcgcgtgctgcatatcgcgatacgctggttgaattcttaaaacagcgcgcagatcagctagacgaagattcactacgtcgacttgaaacgaatccacttagggtacttgattcaaagaaccctgatgtccaagctgcgattgccgatgcgccagccctaatcgatcatcttgatgaagaatctaaagtacactttgaaaccttgtgttcgcgcttaacgcaagcaggcatcgagtttgaaataaatcctcgactagtgcgcggattagattactacaaccgtacggtgtttgagtgggtgacagatagcttgggagcccaaggtacagtgtgtgctggaggccgttacgatggcttggtagagcaactgggcggtaaagctacgcctgcggttggcttcgctatgggcattgaacgtttggtactgttgctaaccacgttaaccgaagaaggtcaggattcgagctttgcagatgtttacgtaacggcgatgggcgaagaggcacagtcatacgctattgaggtagcagagcatcttcgaaatacgctttctaatacacgcataatgatgcactgtggcggcggcaactttaaaaacaaataa

SEQ ID NO: 302489 - DNA, 607 bp, Unknown
  Bacterial polypeptide expressing nucleotide sequence isolated from the Sargasso Sea
tttgtcgaagcaaatccaggccattcgcggcatgaacgactgtttgccgcaggacacgccggcatggcaatacgttgagcagatgctacgcagtacagtagccagctacggctacagtgagatccgtttcccgatcgtggaaatgactgagctgtttaagcgctcgattggtgaagtgactgatatagtagaaaaagaaatgtacacctttgctgaccgcaatggtgacagccttacgttgcgcccggaaggcacagcttgctgcgtgcgcgccggcaacgaacatggcttgttgtataatcaggaacaacggctgtggtataccggccctatgttccgtcatgagcgcccgcaaaagggccgctaccggcaatttcatcagtttggtctggaggcttttggtatcgcctcggctgatatcgatgctgaagtgatcatgctaagcgcgcgtttgtggcagcagcttggcttaacaccttacgtgaaactggaaattaactctctgggttcaagtgaagcccgggcggcttatcgtgacgctttggttgcttatcttgagcagcacaagacagtactggatgaagacagcttacggcggatgtacacg

SEQ ID NO: 302490 - DNA, 946 bp, Unknown
  Bacterial polypeptide expressing nucleotide sequence isolated from the Sargasso Sea
tctgacatagttcaaaaagaaatgtactctttcacagattcaagtgaaaaaagttttacactaaaaccagaaggaacagctgctacttgtagatcatttatagagaatggaatgaataacctttcaaaacctgtaaggttattttatataagttcaatgtatagacatgaaagacctcaatcaggacgtttaaggcaacatcaccaatttggagcagaaatttttggagatgaatctccagaaattgattcagagttaatagaactagcactacattatcttaattctttaggtttaaaaaatcttaaaattaagattaatagtataggagatgtaactacaagatctaagttttccgaagacttaaaactattttttggcccttataaatctcaaatgaattccgtagataaaaaaagacttgaaacaaatccaataagattattagactcaaaagatgaaaaattactaactttaaaagaaaattccccaaaatcaatagattatttagatgaagaaagtgaaacacactggaattcagtactaaataacattcaaaaattaacaaaaacttataatgaatttgatatagaaatagatcacaaattagtgagaggcctagattattataatagaactgtttttgaaatacatcctaatgaggaaaaatctcaaagcagtatattgtccggaggaagatatgatggtttgatgagtttactgggaggtccagatgtaccaggagtaggttttgggagcggcatagaaagaattattctaaatctaaaaaatcaaaagattcttctccctgattcttatgacaataaaggcccagaattaatgattattagtgttggaggtcaacatattactgatacttccatagaaatagctacttttctacgaaaaaataatatctcagtaatattagctcccaaaaatagaa

SEQ ID NO: 302491 - DNA, 691 bp, Unknown
  Bacterial polypeptide expressing nucleotide sequence isolated from the Sargasso Sea
aaaataaatgagaaccctctgagagttttggactctaaatctgactctataaaaaacctattaaacgatgctcctaagatctctgattttatttctgaaaactctcaatcagattttaatgatttaatttttttacttaaagaagccggaattaaattctctataaatcaaaaacttgtaaggggattagattactacaatcaaactgtctatgagtggaaaaccgaccaacttggtgcccaagatactgtgtgtggagggggcagatatgacaatttagttgaagaattaggaggaaaaccttgctctgccactggattttcaattgggatggaaaggttaatactactaatgaaagaaactgctgaattgaatcttgataataaaagcgtaaatttattttttgtttgtttaactaaagagagtgtccaaaaagctataatgtattcagaatctcttagagaaaaggtttctaatcttggaataaagattaatatgggccttgaaggagcaggatcccagtttaaaaaggctgataaatctggtgcttctttagctctcatattaggtgatgatgaattagagagtaatactatctcgataaaagatcttagatctaactctgatcaagaagctatttcttatgatgatttagtaaaaagaattaagaaaatttataagaagggttaaa

SEQ ID NO: 302492 - DNA, 439 bp, Unknown
  Bacterial polypeptide expressing nucleotide sequence isolated from the Sargasso Sea
tatgagcttttctgtaccgcgaggcacacaagatatcctacccattgatataaataaatggcatttaattgagtctacagcacggtcgttattttctgtatataatttcagtgaaattcggacccctatttttgaaaatacagatgtctttgctcgaggtgttggtgaaaactccgatatttttaataaggaaatgtactcatttgaagatcgtggtggtcgtagtttaacgttgaggccagaaggtacagcggctgttacacgtgccaatattatgcattccttgcataaacatacgaatcccttaaaactgtattatattggtcctttttttcgttatgaacgaccacaggctggccgataccggcagtttcatcaaattggtaccgaatatattggtgagatgtctccctatgccgatgctgaagttattgcactg

SEQ ID NO: 302493 - DNA, 741 bp, Unknown
  Bacterial polypeptide expressing nucleotide sequence isolated from the Sargasso Sea
agcggctggaccaactggacgacgactcccgggcaaggctcaccaccaaccctttgcgcattctcgattctaaaaacaaggacacccaggccttgcttgagcaggcgcccaccctgggcgatgccctcagtcccgagagtcggcagcgctttgctgacgtgcagcaggggctcacggccctgggcattcccttccggctcaatccgcggctggtgcgggggctggattactacggccacaccgccttcgagatcaccagcgatcaactgggggcgcaggccaccgtctgcggtggtgggcgatacgacggtttgatcgctcaactgggtggagcggccacgccggccatcggctgggccctgggcatggagcggctgttgctggtgctggaggcagcggcgaaggctgatccgcatggagtggccgcgcagctggtgggtgcaccagcccctgatgcctatgtggtcaatcgcggcgaactggcggagaccatggcgctgaagctcgcgcggggcctgcgggctgcaggtttgaccgtggagctggatgggtcgggttccgccttcggcaagcagttcaagcgggccgatcgctgcggtgccccctgggctctggtgctgggtgacgatgaagcagcccgcgctgaggtgcgtctcaagccgctgcagcacaagggtgaagaacggtcctgggcagtcgacgacattgccgcgatcgtggaggcgctgcgcaacccctgag

SEQ ID NO: 302494 - DNA, 758 bp, Unknown
  Bacterial polypeptide expressing nucleotide sequence isolated from the Sargasso Sea
tcttcagatattatgcaaaaagaagtatatgaatttaaagatagaaaagatgaattgctatgtttgaggcctgaaggaacagctggcttagtcagagctttaataaccaatggtttagataatgatgagattaaaaaattctattatttggggccaatgttcagatatgaaagaccacagaaaggacgaaaaaggcaattttttcaagctggagttgagctgataggagatgaatcatccgatgcagatatagaaattatcctgatagcaaatacaatccttaaaaaattaaatatcaaatcaaagctccaattaaattaccttggagataaaaagagcctacaaaaatataatgaatacttgaaagagtatttatcagaaacatcaaacttaccaaaatatgtaatgaaaaatccgatcagagctttagattcaaaagacgagagtattaaaaatataatgtccaaagcagaaagcattaagaatttcttaaataaaactcaattagaagaatttaaaaaaataaaatctaaactagataatattggaattgaatacgaagagaacactagccttgtaagaggattggattattacaatggtctagtttttgagtttctttctgatgatctgggtgcacaaaatgctattttaggtggaggtagatatgatgggcttattaaaaatcttggaggtagagatttgtcagctacaggttttgctcttggcatagacagacttgcagatattgtgaaatt

SEQ ID NO: 302495 - DNA, 898 bp, Unknown
  Bacterial polypeptide expressing nucleotide sequence isolated from the Sargasso Sea
tcgttttcctattgtagaatcaaccgatttatttaaacgctctattggtgaagtaaccgatatagtagaaaaagaaatgtacacctttgctgatcgtaacggcgacttgctaacacttcgccctgaaggcaccgcagtgtgtgtacgtgctggcaaccaaaatggcttactgtacaatcaagaacaacgactttggtacatgggcccaatgtttcgtcatgaacgcccgcaaaaaggtcgttatcgtcagtttcaccaatttggtttagaaacctttggtattgccacagccgacatagacgcagaagttattttattaacagcgcaattatggaaagcgttcggcattagcgagcacgtacgtttagagcttaactctttaggttctaacgaagcgcgcgccgattaccgagatgcgcttgttgcttaccttgaacaacataccgacgtgcttgatgaagactcaaaacgccgtatgtattcaaacccgttacgtgtacttgatagcaaaaatccagacgttcaagcaatcttagttgatgcgcctaaattatctgagcatttagatgctgaatcaaaagaacattttgaaaatttatgtgaacgtttagacgcagctggcgtctcatacacggttaacgaaaaattagtgcgcggtttagactattacaaccgcacagtatttgaatgggtaaccgacagccttggcgcgcaaggcactgtgtgtgcaggtggacgttacgacggtttagtagagcaacttggtggaaaagcaaccccagcagttggctttgcaatgggcctagagcgcttagtattgttactccaagcacttgaatgtgttggtgacattcgtcgtaatgctgatgtatatttagcggcaatgggcgacaaagca

SEQ ID NO: 302496 - DNA, 868 bp, Unknown
  Bacterial polypeptide expressing nucleotide sequence isolated from the Sargasso Sea
atgaaactaagaccagtaagaggaacacatgatttatatggagataacataaaaaaatataataatatttttgatactgttactgaattagcaaaattattttctttttcagaaattcaaacaccaatctttgaattttcaaatttatttttaaaacctttgggtgaacaatctgatgttgtattaaaagaaatgtatacattcaaagatagaaatgatgagttattaactttaagaccagagtatactactccaatgattaggtcggcattaacaaacaatctgatggatgatcttccacttaaagtttatggtattggcccaatgtttagaagagaaagacctcaaaagggtagatatagacagtttaatcaaattaattttgaggtttttggatcaaataattttatggtagatttagaactaatcattttggcatatgaaattttaaaaaagttactaccttctaaaaatctaattttaaatttaaattccttaggaactagccaaaatttaatcgattacaaagataaattgaaaaaattctttaatgacaataaatctaaattatctcaagaaagttatgaaaaaattaattctaatcctttgagaattctcgattcaaaacaagatacagacattgcattatctagtaaagcaccgtcaataaatgaatttctatcaattgaaacaaaaaatcattttgaagaattaaagaagggtttggaatatcacaatataaaatatacagaaaatcacaaacttgtgagaggattagattattattgtagtacagtttttgaatttaaaactaacaatttaggaagtcaagacactatacttggaggaggtaggtatgatggtttaa

SEQ ID NO: 302497 - DNA, 742 bp, Unknown
  Bacterial polypeptide expressing nucleotide sequence isolated from the Sargasso Sea
aatatatttcattcttttgatacgcatgaaattcgcactccattgttggagtccacagagcttttttcaaggtcggtggggaactcatctgatattgttaacaaagaactctattcatttttagatcgtaatgaagaaagcattagcctaagaccagagggttcagcgagtgtgataagagcagttattcaaaaaaaacaagaacaggaaaaacacaaattttggtaccaaggaccaatgtttagatacgagaggccgcaaaaaggaagatttaggcaatttcatcaagtgggagttgaatatcttggttttgaggaagggattgcagaatatgagcttatgagcatggttttacagattaataaattaattggtatttcagactatacaattaaaataaatcatcttggagatagggatgctaaggaaagtttttgtgattcgctagttacttttttaaagccacatattaatgaattacatgaaaaagatcaggtgagattaaaatctaatcctttgcgagttctagattctaaagaaaaacccactcaggaattactaaaagaaggaccaaaatttcaagattttatttcagatgactctaagatttttttacaaaatcttgtagatgcctatagcaatcaatgcgatattcaaattgatcaatcattggtacgaggattagattactacacaggaattgtatttgaaactgtttcacaaaatcttggagcacaagatg

SEQ ID NO: 302498 - DNA, 529 bp, Unknown
  Bacterial polypeptide expressing nucleotide sequence isolated from the Sargasso Sea
ttgaataacctaaaaaatcttagaggaacagtcgacctattgcctgatcaattaataaagtggcaaaacgtcgagaaaattttattagagcagcttgcaagaacatccatcaaagaaataagaacaccaatattggaaatgaccgaattatttataagaggaattggtgaaggaacagatgttgtcagtaaggaaatgtatacttttcttgataggggggagagatcctgcactcttaggcctgaaggaaccgcttctgttgcacgagcgctaatacaaaatggcatgtcgtctaatccacttcagaaactttggtacatgggccctatgtttcgatacgaaagacctcaagcaggcaggcaaagacagtttcatcaattaggtgttgagtttataggatacgattcggttagaagtgatgttgaaattattgctttagcttgggacatcttaggtaaattaggaataaaagaacttaatcttgaaataaatacattaggtgatgtaagtgatagattaaattttcaga

SEQ ID NO: 302499 - DNA, 526 bp, Unknown
  Bacterial polypeptide expressing nucleotide sequence isolated from the Sargasso Sea
ctgcagagcctcaggggcatggtggatctgctgccggaggttgtgcagcgctggcaggccgtcgaagcagtcgctcgcgagcatttccgccgctccggtttcggtgagatccgtacgccgttgttggaaaccacggatctgttctgccgcggcatcggcgaaggcaccgatgtggtgggtaaggagatgtacagcttcacagaccgcggtgaccgcgcctgcacactgcggccggagggcaccgcctcggtggtgcgggcggcgctgcaacacggcctgttgagccagggcgcccagaagctttggtacgccggcccgatgttccgctacgagcggccccaggccggtcgacagcgtcagtttcaccagatcggtgtggagtggttgggggcggagagcgcccgcagcgatgtggaagtgattgcactggcctgggatctgctggcccagttgggcgttggtggtcttgagctggaaatcaacagcctgggtacgccggacgatcgtcaggcgtaccgggcagcgc

SEQ ID NO: 302500 - DNA, 538 bp, Unknown
  Bacterial polypeptide expressing nucleotide sequence isolated from the Sargasso Sea
aatgttttcatttgctgataaaaaaggacgaaatttagtactcagacctgaaggtacagctggtgtagtgagacatcatgtagataaaaattacaatagcttgaataaatattattattcagaccaaatgtttagatatgaaaggcctcaaaagggtaggtacagggaatttcatcaagttggtgctgaaattatcggttatgaaactggttcagtattagaaatattttcaattctacaattaagtaatgattttttggaaaattgtgtacctactaatacaaaatatagatttgagattaattcaataggcagtagtgatgataggaaaaattataataaagagctgacagcatattttaaaaaaaatattactaaattatccgatgattctgttaatagattagataaaaatccattgagaatactggattcaaaagataaaaatgacataactatttcgaaagatgctcctaaaatatcggaatatagaagtgatgaatcaaataagcaatttagtgaactaacccaaaagctt

SEQ ID NO: 302501 - DNA, 517 bp, Unknown
  Bacterial polypeptide expressing nucleotide sequence isolated from the Sargasso Sea
gatggacttaatcgaaaataaagctaataaagcagatacagctaatggcattttttacactgaacatatattaaaagatattttcgaaacttactcgatatcagaaatcaggactccggcgttagaagattccagtttatttaagagatctgttggagatacatccgatatagttaataaagagctttattcctttatggataaaaatgataaaagtatcacattaagaccagaagggactgcaagtgtaattagatcaataattgaaaagaaaattgataatgaatcaaacaagttttggtatctaggtccgatgtggagatatgagcgtcctcagaaaggcagatacaggcagtttagtcaggcgggtgttgaaatacttggctattcagaaggaattgctgaattagagatcgtttctataatttgttctataaataaagcgctaggaatagaaaattcaatattaaaaataaatcatcttggtgataaggaatccaaagaaaagtactgtaac

SEQ ID NO: 302502 - DNA, 656 bp, Unknown
  Bacterial polypeptide expressing nucleotide sequence isolated from the Sargasso Sea
catgtcaaagattacatcagtcagaggaatgaatgatcttccaccagaggaggtcagggtgtggactattgctgaagaaacaattaagaaagtttttaattcttatgggtatgaagaaattagatttccgatagttgaaaaaactgaattattcacaagatctaatgagtcagcggatatagttaccaaagaaatgtatacctttgaagacaagggaggtgatagcatttcgttgcgtccagaaggaacagcaggttgcgtgagagcagctatagacaacgatcttgttagaattgattgtccgaggctttggtaccaaggtccgatgtttagatacgagcggcctcaaaagggaagatctagacaatttcaacaatcaagcgcagaagcatttggaattagatctgctgaaattgatgctgaattgataattctttcttcaagaatatggaaggaattaggagtcataagtaatctcaatcttcagataaacaatataggcgatgaagagacccgtcagtcttatgctaaatctttacaaaattattttaagaaatatgaaagggacttagacgaagattcattaagaaagttaagcgaaaaccctctaagaatattagattctaaatctgaatctattcaaggtttattaaaaa

SEQ ID NO: 302503 - DNA, 632 bp, Unknown
  Bacterial polypeptide expressing nucleotide sequence isolated from the Sargasso Sea
aatgcctaaaataaaatctattagaggaatgaacgacgtaactcccttagatataagggtatggcagtatgcagaaaagagtattagatccattttcacttcttatggctatcaagaaattaggttacctttagttgaaaggacagagttatttgctagaggtgtaggtaaatcaaccgatatagtgtctaaagaaatgtatacttttgaagacaaggggggtgaaaccatttctcttaggcctgaaggtacagctagttgtgttagagcatgtttggagaatgatcttttaagagttgattcccctcgtctttggtatatgggtcctatgtttagatatgaaagaccccaaaaaggaagatcgagacaatttcatcaagctagccttgaagcttatggaaatgaaggaccacatatcgatgcagaaataattttggttgcctctagtctttggaaggacttagaaattaaagataaagtcaaattagaaataaataatttaggtaatgatgagacaagaaaaaagtacaaaaagcttttacaagatttttttgaaccttttacaaatgatttagacgaagacactatgagaaacttaaaggaaaatcctcttagaattcttgactctaaaa

SEQ ID NO: 302504 - DNA, 964 bp, Unknown
  Bacterial polypeptide expressing nucleotide sequence isolated from the Sargasso Sea
aatgtatgattttatagataaaaatggagaatctatatgcttaagacctgaaggcacagcgtcaatcgtaagagcagttattgagcataaccttgtttatgatcgtggactgaagaaacaaaaatatatgtactatggacctatgtttagacatgagaaacctcagaagggtagatatagacaatttaaccaatttggaattgaatattttggatttaaaaatataaatagtgatttagaaataattattttgggaaatcatattttcaataagatcggattaaataatattgaattatatataaattctttaggcaatgagcttgataagaataaatattcaaaaattatcatggactacttttcatcttttaaagacatccttgatgaatatcaattaaaaacccttagcaataatcctttaagattactagatagcaagaaagataatattataaatcttttagatgatatacctaaaatgattgatacattgtcaactgagtctaaaagtagatttcaggctttattaaataagcttgatgatatgggcatcgaatatcatgttgataattctattgtcagaggattggactattataatgatactgtatttgagtggagagacaaatcacttggcagtcaaaatgctatttgcgcaggggggagatacgattctcttgttgagaacactggcggaaataatgttccagctataggttttgcaataggagttgaacgtatagttgaacttctaaaaacaaataatatcaattatgcaagtgataaacctatcataccttttatgtctactatctctgagtcagagtcatatgatattgagctagtaacaaccttacggaataaatatccaaaaacctgttttctaacgactgataattcagcaagtctatcgtctcaaactaaacatgcattaaagacaaatgagagtataataattttg

SEQ ID NO: 302505 - DNA, 646 bp, Unknown
  Bacterial polypeptide expressing nucleotide sequence isolated from the Sargasso Sea
gatttatttggaaaagaaataaacaaatttaataaagttgtttacgaagttaaagacattgctaaaaaatttggatttaacgaactgataactcctatttttgagagctcagaactttttaaaaaacccttaggtgagcaaagtgacgttgttttaaaagagatgtatacattcaaagataggaataatgatgaaattactttaaggccagaatatacaacgccaatgataagagctgctttatctaatggtttattaaacaatttacctgctaaattctttggaacaggacaaatgtttagaagggaaagacctcaaaaaggaagatacagacaatttaatcaaattaattttgaaaattttggtactaatgatatttttgctgatattgaaattataaatttagcaagcacaatattaaaaaacattcttccagatagaaaaattactttacatttaaatactttaggaagtagagaaaatttaaaagattataaaaatactctttccaaatattttactgagaataaaaatttattatctgctgatagtgttaataaaataaattctaatcctttaagaattttagattcaaaaaatattgaggatcacaaatataataaaaaaatgtccaaagcttattgaa

SEQ ID NO: 302506 - DNA, 391 bp, Unknown
  Bacterial polypeptide expressing nucleotide sequence isolated from the Sargasso Sea
gctgcaaagcttgcggggcatggtggacctcttgcccgccgcaacgagccggtggcaatggctcgagcaaaccgcgcgcgagcactttcaccgctcctgcatccgcgaaatccgcaccccgcttcttgaggccacagaactctttgcccgcggcattggcgaagccaccgatgtggtgggcaaagagatgtacagctttaacgatcgaggcgatcgctcctgcaccttgcggcccgaaggcaccgccagcgtggtgcgcgcagccatacaacacgggctgctgagccaaggggcgcagcggctttggtatggcgggccgatgttccgctatgagcggccccaaggtgggcgccagcggcagtccaccaaatcggcgtcgagtttctgggct

SEQ ID NO: 302507 - DNA, 727 bp, Unknown
  Bacterial polypeptide expressing nucleotide sequence isolated from the Sargasso Sea
ctgtttgaagtagaaaaagtaattaaaaatatattcataaattataaattccaagaaatacgtactcctgttctggaagatgcaaacttattcaaaaggagtgttggcgactcttcagatattgttaataaagaaatttattctttcaatgataggaatgataaaactatcgcaatgagacccgagggaactgcaagtgtaattagatcaattattgagaagaaattagatcaggcaaatcataagttatggtatgtaggccctatgtggagatatgagagaccacaaaagggcagatatagacaattcaatcaagccggtattgaaatacttggcataccagagggtttgccggaatatgaaatgatttcagtagtatgtaatgttattgatcaatttaaacttaaaaattgttgcatcaaaattaaccacttggggactagagagaataaagaatctttttgtaaagcacttgttgagtttttggaaccatttaaaaaagatctcgatgcaaaagacttagaaagacttagtaaaaacccattaagagtccttgattcaaaaaattctgaaacacaggtaattctaaaaaatgcaccctctataagagagtttattgatagagcttcaattgaaatgcttgattcaattaaatatgagttctcagatatatgtaaaattgaaatcgaccataatttggtcagaggcttagattattattctggtt

SEQ ID NO: 302508 - DNA, 418 bp, Unknown
  Bacterial polypeptide expressing nucleotide sequence isolated from the Sargasso Sea
tttgaataactttaaaaacctaagaggaacagtagacctctttcctgaacaattaataaagtggcaaaacgttgaaaaaattttattagaacagctttctagagcatccatcaaagaaataagaacaccaatattggaaatgactgaattatttataagaggaattggtgaaggaacagatgttgtcagtaaggaaatgtatacatttcttgataggggggagagatcctgcactcttaggcctgaaggaacagcctcagtcgcacgagcgttaatacaaaatggaatatcgtctaatcctcttcaaaaactttggtacatgggtcctatgtttagatacgaaagacctcaagcaggcaggcaaagacagtttcatcaattaggtgttgagtttataggatatgattcagttagaagt

SEQ ID NO: 302509 - DNA, 701 bp, Unknown
  Bacterial polypeptide expressing nucleotide sequence isolated from the Sargasso Sea
tttcgttacgaaaagccgcaaaaaggcagatacaggcaattttatcaaatgggtgttgaggcgtttggtttcgaggggcctgatatcgaagctgagctcgttctgcttataacgaaatatttcgaggagataggcttaaatcaatatttgacgctagaaataaatacacttggttcccatgaggataggggacgataccgcgaagctctcgtgtcgtatttaacgcctttctacggcgagcttgatgaggatagtcaacgccgattgaagacgaaccccttgcgcattttggacagcaaaattgaaaaggtcagggacatagtttttgatgcgccaaaattgattgagttcgttggcagtcatgcgagggagcactttgagagatttcaagagcttttatgcaagatgaacctctcgttcaagttgaatgatcgcttggtaagaggcttagattattatacaaatactgtctttgaatgggtgactgaagaactaggctcccaaggtgccgtttgcgcaggcggaagatatgatgggcttgttgagcaattaggcgggaaatcaactcctgctgtgggtctagcaatggggttggatagaattgtcctcttgcatgaaaaatttcagggcgataccggtcgaccgagtctcgatttatatatttgtatcttagatgaatcgaagatggaccgagcattttt

SEQ ID NO: 302510 - DNA, 403 bp, Unknown
  Bacterial polypeptide expressing nucleotide sequence isolated from the Sargasso Sea
ctgaatagttgttctcccatccggcacgtgagtcagctccaaagtctcaggggcatggttgatctccttccggagacccttcagcgctggcaggctgtcgaggctgaggcgagggagcacttcagttgtgccggctttggtgagatccgcacgccactcctggaaacaaccgacctgttttgtcgtgggatcggtgaggccaccgatgtcgtcggcaaagagatgtacagcttccaggatcgtggtgatcggtcttgcacgctgcggccggagggcacggcctcggtggtgcgggctgcactccaacatggactgctgagccaaggtgcgcagaagctttggtacgccggtccgatgtttcgctacgagcggccccaggctggtcggcagcgtcagtttcacc

SEQ ID NO: 302511 - DNA, 782 bp, Unknown
  Bacterial polypeptide expressing nucleotide sequence isolated from the Sargasso Sea
attgcgacccgagggaactgcaagtgtcatgagatctattattgaaaaaaaattagatggagaaacgcataagttatggtacttagggccaatgtggaggtatgaaagacctcaaaaaggaagatatagacaatttaatcaggctggaattgaaattttgggttacccagaaggtgcttcagaatttgaaatgatttctataatatgtgaactcaatagaaaattactaataagaaaaccgcttataaaaattaatcatcttggagactctgatacaaaaaaattattttgtgaagcacttgtagattatttaacaccattaaaatcaaatttagatgaaaaagatttattaagattagatagtaatcctttaagaatcttagactcaaaaaatcctaatactttagagattttgaagaaggcgccctcaatttcagattatctagaagatagctcaaaagaattattaaaatctattcaggaattattttctaacaaatgtgaaatccaaatagattacaacttagtcagaggcttggattactatactggctttgtttttgaggcaatctctgaagatttaggcgctcaagatgcatacttaggcggaggaaggtatgataatttaagtacacaacttggaggtaaagatcttccagcaataggaatggcaataggtattgaaagacttgctctcatttcaaattatgataataaaagtaacactttaatttctttcataattatttctagtaattttgaagcaaaagcatataaaaatg

SEQ ID NO: 302512 - DNA, 916 bp, Unknown
  Bacterial polypeptide expressing nucleotide sequence isolated from the Sargasso Sea
gctgagaacaccgatctgttctgccgcggcatcggtgagggcaccgatgtggtgggcaaggagatgtacagcttcaccgatcggggtgatcggtcctgcaccctgcggccggaaggtacggcatcggtggtgcgggcagcggtgcagcacggtctgctcagccagggggcccagaagctctggtacgtcggcccgatgtttcgttatgaacggccgcaggccgggcggcaacgccagttccatcagctcggtgtggagtggctgggggtggagagcgctcgcagtgatgtggaggtgattgccctggcctgggacttgctggcacggctaggggtgggtggtctggagctggagatcaacaccctcggcacgccagaggatcgccagacctttcgggcggctctggtgggctggctggagcaaaggcaggaccagctggatgacgactcacgcgcccggctcaccaccaatccactgcgtattctcgattccaagaacaagaccacccaggccctcctggagcaggcgcccaccctggcggatgcccttagcccggagagccggcagcggtttgaggcggtgcagcgggggctcacggctctggccatcccgttccggctgaatcaacgtctggtgcgcggtttggattactacggccacaccgccttcgagatcaccagtgaccagctcggagcccaggccaccgtttgtggcggtggccgctacgacggcctgatcgctcagctggggggggcggccacgcctgccgttggctgggccctgggaatggagcggctgatgctggtgctggaggcggcggccaaggctgacccaaacggtcccgcggcccgtttggtgagcccgccgcctcctgatgcctatgtggtcaatcggggtgatcgtgcggaagccgcag

SEQ ID NO: 302513 - DNA, 745 bp, Unknown
  Bacterial polypeptide expressing nucleotide sequence isolated from the Sargasso Sea
tttaaaatggctagaaataaacaaaaattctctagatttagattctcagaataggattactaaaaatcccttaaggattttggactctaaagatattcaaacaaaaaaagcccttgaaaatgctccaagattatttaattttttgtctgaaaaaagttataaaagatattcagactttaaaaaacaattagaggttttaaaaataccttacgtggaaaattttaatctagtgagaggtttagattattacacccatacagcctttgaaatcactagtggcgctctaggctcccaagctacagtttgcggaggaggaagatatgacaatttaataaaacaaatgggagggccaaataccccggcaattggattcgctattggtttagaaagattaattttactagcgggaaaagagctcgaagtcccaagaaatactgatatttatattattaatcagggcttcattgctgaaccattagctatggatctatcaagaaaattaagaaattatgatttgttagttgagttggatttaagtggatcttcattctctaaacaatttaaaaaggctaataaactcaaatctaaaagtattattgttattggtgatgatgaggcgactaaaagggaatttattataaggctctttgatcaatcaggtaatggaaacaaagaagaggttatttctatagagaatgattttgatttagaaaagtggattaataataacttacttgcaaagtga

SEQ ID NO: 302514 - DNA, 682 bp, Unknown
  Bacterial polypeptide expressing nucleotide sequence isolated from the Sargasso Sea
ccaatgcggatactggacagtaaaaatccggaggtgcaatcagttattgaatctgcaccgattctttccgattttcttagtgaagatagtaaatcccattacgccaaattaaagggtatgctcgacgcgactggcgtaaattatattgaaaatgcaaggcttgtaagaggcctagattactacaacaattgtgtttatgagtggacgaccagtgttttgggtgcccaagggtcggtttgtgggggaggtcgctatgatgggctggtgaagcaacttggtggaaaagacacatatgcatgcggtttcgctatcggtatggagcgattggtactcatgttggattcgttagaaaaagttccgatctcacagcttaagcaaattgatatatttatagccactatcggtgcgaatttagtttcagagggcctgtctttggctaataaaattcgtaaagactacccaaacttaggaactttatgtcactgtggtggtggaaaatttaacagccaactgaaaaaagcttataactgcggagcagatgttgcgataattctggaagaagaatcttgtgaaggaaaaccaattaatgcgaaaatccgccggctcgatgattcaaatgaatcgaaagttgttaaaatcaatgaaatctcgcaggagttaagaggttttctatcaatttgag

SEQ ID NO: 302515 - DNA, 697 bp, Unknown
  Bacterial polypeptide expressing nucleotide sequence isolated from the Sargasso Sea
tttgaataaaattcagcctgttcgtgggactacagatttatatgcctctgagatgcaagtctatagaaaagttatcaatgatgcaaaacttgtttcggagttgtttggttatgaggaggcgtcttttcctatttttgaaaaagacgaagtcttttcaagacctttaggacattcaagtgatgtagtttcaaaagaaacgtatacatttaatgatagaggtggtgagaggattactttaagacctgagggcacagcaggtataatgagatcaattttgtccgaaggaaaaactaatgacttgcctttaaagcttttttattctggaccaatgttcagatatgagaggcctcaaaaaggacggttgagacaatttattcaaattggtattgaaaacattggtaatcatagtcctttagaagatgctgaagttattgcttgtggtgcttccttgttaaaaaggttaggctttaacaaagattgtgtcttgaacttaaattctttaggtgatacagaatctaggaacctttatagaaagagtttagtcgaatatttttcaaaaaatttagaaaagttatctcaattatcacaatcaagactttcattaaatcctttaaggatacttgactcaaaagaaccacaagaccaagaaataattaataacgcaccattatattcatcttacctgaataattcttca

SEQ ID NO: 302516 - DNA, 415 bp, Unknown
  Bacterial polypeptide expressing nucleotide sequence isolated from the Sargasso Sea
tttgactgagaaaatcaaatccatcagaggaatgccaacactgctgccggcagagttaaaactttggcagcctgtcgaatctgaaattaagaaaattttatcaagctatgcttaccaagagattcggactccattattagaaagaacagaactctttcaaagaaccattggtgaacagacagatgttgtctcaaaagaaatgtattcatttcttgatcgaaaagatcagtccttgtctcttaggccagaagcaacagccggtgttgtcagagcaggaatcgagcacggccttttttataaccaaacacaaaaattctggtccatgggcccaatgtaccgttacgagagaccgcaaaagggtcgttatcgacaatttcatcaagtcaatatggaagcgtttggatatgaggggcct

SEQ ID NO: 302517 - DNA, 1195 bp, Unknown
  Bacterial polypeptide expressing nucleotide sequence isolated from the Sargasso Sea
atggaaaagtttgaatttattattgaaagtttttactcagtttgcaaaaaatttaattttcaatctatacaaacccctatcattgaacaacaggagttattttcaagggctgttggtgaacaaactgacattgtctctaaagaaatgtattcatttctagataaaggtgaaattaatatatgtttgagacctgaggctactagtggtctagcaaggtttgctgcttcaaattatcaatctggtttaatgaaattagttacccacggtcctatgtttagaagagaaaggccccagaagggcagatatagacaattccatcagataaatattgagactattggagaaaaaagtccttatattgattttgaactaattctagttgcaaggctattattggatgaacttggggtgattaaaaataaatacaagctattgataaattcacttggatcaaaagaggatcagctcagttactctaaattattaaaaaaatatttaagcgattttaaaaatcagttatctgaaacatcaatttcaaggctagataaaaatccactgagaattttggatagcaaagacccagaagatactgaaattttaaaaaatgctccaaaaatcagtgaacacttatctactgaaagtaaaaattattttgagcaggtaaaaaaacttctaaatagtaatgaaatagaattttttgaggaaccaaaattagtaagaggattagattattattcgcacacagcctttgaattccaaacaacagaggataaaagacaaaatgcaatattagctggtggtaggtatgacaagttaattagtatgatttcatctagggatattccaggaataggctgggcagctggtgttgaaagattaatggatttaataacaattgaagatgaaaaatcaaagtcaaagaataaaatattatttgctgttcaagatgaggcttatttaattaataatagaattttaaaacaaatatataattttaaatataatcacgaagtaagagtaaataaaaatatcaaaaaactttttagctacgctgataaaaataattttagctttattcttctaattggtgaggaagaaataaattctaataaaataatcttaaaagatttaaaaaataaaagtcaacaaacttttgaaatttctaaattcgagctaaaaaatgaaattagataaa

SEQ ID NO: 302518 - DNA, 688 bp, Unknown
  Bacterial polypeptide expressing nucleotide sequence isolated from the Sargasso Sea
ctgacttgttgttgtcgcttccggcacgtgagtcagctccaaagtcttaggggcatggttgatctccttccagaaacccttcagcactggcaggccgtcgaggccgaggcgagggagcacttccgttgtgccggctttggcgagatccgaacgccgctcctagaaacaaccgacctgttttgtagaggaatcggtgaggccaccgacgtcgtcggcaaagagatgtacagcttccaagatcgtggtgatcggtcttgcacgctgcggccggagggaacggcctcggtggtgcgggctgcacttcaacacggactgctgagtcaaggtgcgcagaagctttggtacgccggtccgatgtttcgctacgagcggccccaggctggtcggcagcgtcaatttcatcagatcggggtggagtggcttggggcggaaagcgcccgcagcgacgttgaggtgattgctcttgcctgggatttgttgtctcgcctcggagtgggtggcctggagttggaactcaacagcctgggttcgtcagaggatcgccaggcttaccgggcggtgttggtgcaatggctggagcagcggtctgaatctctcgatcccgattcccaggcccggctcagcaccaatcctctgcgtatcctggactcgaaaaataaagacacgcaggctctgctgaaggatgcgc

SEQ ID NO: 302519 - DNA, 1048 bp, Unknown
  Bacterial polypeptide expressing nucleotide sequence isolated from the Sargasso Sea
tctcagacctgaaggaacagcctcagtcgtacgagcgttaatacaaaatggaatatcttctaatcctcttcaaaaactttggtacattggtcctatgtttcggtacgaaagacctcaagcaggtaggcaaagacagtttcatcagttaggtgttgagtttatagggcatgattcagttagaagtgatgttgaaattattgctttggcttgggatatcttaggtaaattaggaataaaagaacttaatcttgaaataaatacgttaggtgatactaatgacagatcaaagtttcaaaaatcctttttaaagtggttagaaataaataaagattctctagatttagattctcagaacaggattactaaaaaccctttgaggattttggattcaaagaatattcaaacaaaaaaagctcttgcaaatgcaccaagattatttaattttttgtctgaaaaaagtcatatgagatattcagatttaaaaaaacaattagaggttttaaaaataccttatgtggaaaattttaatttagtaagaggtttagattattacacccatactgcctttgaaattactagtggagctttaggttcccaagctacagtttgcgggggaggaagatacgatgatttaataaaacaaatgggagggccaaataccccggcaattggattcgctattggtctagaaagattaattttacttgcagggaaagagcttgaagttccaagaaatactgatatttatattattaatcagggcttaattgctgaatcattagctatggatttatctagaaaattaagaaattatgatttaatagttgagttggatttaagtggagcttcattttctaaacaatttaaaaaggcaaacaaattaaaatctaaaagtattattgtaattggtgatgatgaggcagctaagagcgaatttttaataagactctttgatcaatcaggcaatgggaataaagaagaggttatatcttttgagaatgatattaaattagaaaagtggatttataataacctgcttgcaaagtga

SEQ ID NO: 302520 - DNA, 1279 bp, Unknown
  Bacterial polypeptide expressing nucleotide sequence isolated from the Sargasso Sea
tttgaataacttaaaaaatcttagaggaacggtagatttgctgcctgatcagttaataaagtggcaaaacgttgagaaaattgtattagagcagcttgcaagagcatctatcaatgaaataagaacaccaatactagaaatgactgaattatttataagaggaattggtgaaggaacagatgttgtcagtaaggaaatgtatacatttattgatagaggggagagatcctgcactcttaggcctgaaggaaccgcatccgttgcacgagcattaatacaaaatcgaatattgtctaatcatcctctacaaaaactttggtacatgggccctatgtttcgatatgaaagacctcaagcaggtaggcaaagacagtttcatcagttaggtgttgagtttataggatacgattcagttagaagtgatgttgaaattattgctttagcttgggatatcttaggtaaattaggaataaaagaacttaatcttgaaataaatactttgggcgatcttaatgatcgattaaattttcaaaaatcctttttaaaatggctagaaataaataaaagtgctctagatttggattctcagaacagaattactaaaaatcccttaaggattttggactctaagaatattcaaactcaaaaagctctagagaatgccccaagattatttaattatttatctgaaaaaagtcataaaagatattcaaacttaaagaaaaatttagagtttttaaaaataccttatatagaaaattttaatcttgtaagaggtttagattactacacccatacagcttttgaaattactagtggggctctaggttcccaagctacagtttgcggaggaggaaggtacgacgatttaataaaacaaatgggagggccaaatacccctgcaattggcttcgctattggtttagagagattaattttactcgcgggaaaagagcttgaaattccaagaaatactgatatttacattattaatcaaggcttaattgctgaatcattagcaatggatttatctagaaaattaagaaattatgatttgttagttgagttagatttaagcggagcctcattctctaaacaatttaaaaaggcaaataaactgaaatctaaaagtattgttgttattggtgatgatgaggcagttaatggagaattcattataaggctctttgatcaatcaggaaatgggaatcaagaagaagttatatcttttgaaaatgataataaattagaaaagtggataaacaataacttattgtaa

SEQ ID NO: 302521 - DNA, 1235 bp, Unknown
  Bacterial polypeptide expressing nucleotide sequence isolated from the Sargasso Sea
aatgaagtttcgttctataaaaggcacttatgatgttttaccagatgtttctaataaatggaaaagcatagaatcatatattcataagaaccttaatcgcgctggttataatgaaattcgaacgcctatttttgaaaatacagaattgtttaaacgaagcgttggatcagatagcgatgttgtttcaaaggaaatgtatagctggattgatcaaggtggaacagatcttactttaaagccagaatataccgcttctgttgttcgttcatatattcaaaataatcttggtgctagcctacctgtaagcaagctctattatattggtgatttattccgcagagagcgtcctcaaaaaggtcgttatagacaatttcgacaatttggtattgaagcaatagggtctaaatatcctgagcaagattcagaagttatatcaattgcgtacaatcttataactggacttggtattaatgatattactttaaagctaaatagtatcggttcatcagaaacgagaaagaattacagacaggctttgctaaagtttttaaaaccaaagtatgatcaattatcagaaacaagtagaaatagatttgattcaaatcctttacgaattcttgatacaaaaaataaatctgaaatagaattactaaaaaaggcgccgaaaatcactgaatatttatcaaaagaagatgatttacatttcagtgaggtgaaaacttatttaaatgatcttaatatccctttcacattagatgcaaatcttgttcgagggcttgattattatacacgcacaacatttgaaatagcttctaatactcttggtgctcaagatgctatatgtggtggtggaagatatgataaacttgttggatcgcttggaggaaaaccgtcaccagctgttgggtttgcagcgggattagaaagattattattagcgatgggtgataaaaatgaactggctaataaagaaataaaaaaaatatatttgatcggcttaggagataaagctcgttctacaatgatgaaaattttgaataacattagaagttctgggtattttgttgagtttgactcgttaaggcgaagccttaaagctcagttaagagagtctaataaacttggtgcatctatcacaataattattggtgaacaagagatggaagaacagtgcgctcaaatcaaagatcttaaaagtggaaatcaagaatctgttccatttgattcaattattt

SEQ ID NO: 302522 - DNA, 1225 bp, Unknown
  Bacterial polypeptide expressing nucleotide sequence isolated from the Sargasso Sea
atgaaatcaaaattccagaaaattaaaggaacttatgatatacttccaccagaaagtaaaaaatggaatgaagctatttcaattcttcaatcaataagtagtcaatttggatatgaagaaattaaaactccaataattgaaaatattgatttatttaagcaaaatattggatatgaaactgatgtttcaaaagaaatgttttcttgggaagattcttcaagtaatcaattagttttaaaacctgaaatgactgctccagttgttagagcgtatattgaatcagggtttttcagaagtaaacctttatgtaaactattttatattgacgctttatttagaagggaaaaaccgcaaaaaggtagacaaagacaatttcatcagtttggaatagaggcattaggatcttcagaggttgaacaagatgtcgaggtaatcctattagctacaaaagtattatgtcatttgggcattactaatacaactcttcaaataaataatattggtaatcatgaaactagaaaaaaatatgaagaaaaattgaatgggtacttttctgattacaaatctaaactatcaaaattatctcaaaatagattagaaaataattctttacgcattcttgatagtaaagaaaaggaagatttagaaattattaaaaatgctccattgattaatgaatttctaacaaaagatgagctaaataattttaaaacacttttatcacacttagatgcattagagatttcttataaagagagtggtcatctagtgagaggtcttgattactataatggaactacattcgaaatttcaaatatgtcatcaagatcacaaaatgctctacttggcggtggaagatatgactatctagtggagagtatgggaggaccatcaactccagctgtcggctttgctgcaggaattgaaaggctcttaattgaatcatcaatgcatgataaaaatgaagaaatagactttttcatcggttttgattctcatgctgaaaaggcaatcaggattgcaaatcagttaattgatgagggttattctatccacatagatacattaaaaaaatctgaaaaaaatcagttaaaaaatgcaattaagatgaatgctagtttctacttaagatgtaatgaattaattgagctaaaaaaccttagttcaaaagaagaatgtgttataaataatatcacagatctaaaaaaattcataaaatcataaa

SEQ ID NO: 302523 - DNA, 882 bp, Unknown
  Bacterial polypeptide expressing nucleotide sequence isolated from the Sargasso Sea
gcagcgatgttgaagtgattgccctcgcctgggatctgctggcccggttgggggtgggtggcctcgagcttgagatcaacagcctgggttcaccggaggatcgtcaggcctaccgcgcggctctggtgagctggctggaacagcggctggaccaactggacgacgactcccgggcaaggcttaccaccaaccccttacggatcctggattccaaaaacaaggacacccaggccttgcttgagcaggcgcccaccctggccgatgccctcagtcccgaaagccggcaacgctttgctgccgtgcagcagggactgaccgccctgggcattcccttccggctcaatccgcgcctggtgcgcggtctggattactacggccacaccgcctttgagatcaccagcgatcaactgggggcgcaggccaccgtctgcggtggtgggcggtacgacggtttgatcgcccaactgggtggagcggccacgccggccatcggctgggccctgggaatggagaggctgttgctggtgctggaggcggccgccaaggccgatccaaatggagcagcggcgaagctcgtcgccacggccgctcccgatgcctatgtggtcaatcgcggtgtacaggcggaaaccatggccctgaccctggcgcggggcctgcgggctgcaggtttgtccgtggagctggatgggtcgggttccgccttcggcaagcagttcaagcgtgccgatcgctgcggtgcccgctgggctctggtgctgggcgatgacgaagcagcccgcgctgaggttcggctcaagccgctgcagtacaacggtgaggaacgctcctgggcagtcgacgacattgccgcgatcgtggaggcgctgcgcaacccctgag

SEQ ID NO: 302524 - DNA, 1261 bp, Unknown
  Bacterial polypeptide expressing nucleotide sequence isolated from the Sargasso Sea
aatggttgacttgatctcaaaaaaaatcagaggcttcagagatatactgcctgatgaaagccagaagtttttatttctcgaagaaaaaattcataatatatgtcctttgttcaatacgaagcaaattagaatcccagccttagagtcacttaacttatttaaaagatctattggggagtgctctgatattgtaacaaaagaaatgtactcatttaaggataagaatgatgaaactgtatgcatgattccagagggaacagcatctgctatgcgtttagcttttgaaaataacttaatttatgatcgtggaataaaaaaaaatagattttactacatcacacaaatgtttaggcatgaacgtccacaaaagggcaggtacagacaatttactcaatttggagttgagtttatgggtaatgaatcaattcatgaagatatcgatttattacttatgtctaaaatattttttgatgtaattaaacttgataatcttaaacttaatatcaattctctaggtctagcagaggacagaaacaaatattctcaggacctccaatcgtattttaataattatcatgaatcttttagtgatcagcaaataaacactataaaaaataatccccttaggatattagatagtaaggatcaacgactcactgagataataaatggggctccaaatatctcaaattatattaataaagaatcactcaagaggtttgatgatatggttcagattttaaatgacttgaaaattgattatacaattaatgacaaattagtacgcgggcttgattattacaatgatttagtttttgaatggaaaactgatcagcttggcacacaagatgctatttgtgccggcggaagatatgacaacctatcaaatattattggtaataaagctgttcccgcagttggttttgctattggtgttgacagagtagtcgaccttatgtcttataaggatacagatttagttgttggattgtctgttatttcaaattctaaatctgatatgtcaaagatatcatctattcttagaaacactgataataagttcacgcttatacagatggatgctgaaaaatcattaacaaagcaaataaaaactgcggttaaatctaattgtgatattttagtaattgtaggtagtgaagaaataagtaataatattctaacaattaaagatttaagaagtgatagagatgatatgtcgataagctttgatgatttctcaaaatttatagaagaatattaa

SEQ ID NO: 302525 - DNA, 1069 bp, Unknown
  Bacterial polypeptide expressing nucleotide sequence isolated from the Sargasso Sea
tatgggaaataaaattaattctattaaaggttttcaagatatcttaccaaaggatgctatcttttatagagatatcgaaaaaatgttactatcactaactaattcttttggaataaaagaagtacgcacgcctattctcgagagatctgagctttttaatagatctattggagactctacagatattgttaataaagaaatgtatgcgtttgaagataaaaatggcgataacatatgtcttcgtcctgagggaactgctggtattttaaggagcatgattcaacataatatgatatatgacagaggtataaaaaaacaaaagatatggtattacgggcctatgtttagacatgaaaatccacaaaggggtcggtatagacaattcacacaatttggcatagagtatttcggatatgatgatactaacagcgaaattgaattgatactgatgatgagcacattttttaaatctttgaatttaaaaaatataaaacttcatattaattcgttgggtagtcttgccgatcgtaataattataaagaaataattaaaagtaatatatctgataaaattgaatcatttgaagaatcaattaaactcacatttaataagaatccacttcgtctattagacagcaagaatgaaaatattgctaagatatgcgctgagctaccgaatttacttgaaaatattaatagcgatagtaaaaataagtttgatgattttgttaaaaaattagaggatttaggaattgaatatattattgacaattctatagttagaggtctcgattattataatgatttagtctttgagtggaaagcagatcaactaggtgcacaaaacgcaatctgtgctgggggaagatatgataatcttgtcaatgaattgagtgataccagcgtaccagctataggcttagctatgggagtcgagaggataattgaacttcttaagaatgaaaactatcaaaacaatcatatcattttgccttttgtagacgagcatggcgggaacaatgttaacttcatcaaaatcacaaataaaatcagagaaaaacataaaaat

SEQ ID NO: 302526 - DNA, 1138 bp, Unknown
  Bacterial polypeptide expressing nucleotide sequence isolated from the Sargasso Sea
atggataaaataagctcaatcagagggatgcctgatgttttcgaatctgatacaaattatcttgcagaattaaacgaagtactaagtaaaatattcctttctcataatcttaatgaggtaaatactccaattttagaacaaacagaactatttgttagatccactgggataacatcagatattgtaaataaagaaatttacagttttaacgatcgcaatgaacaaagtctttcattaagaccggaaggaacagctggtgtagtaagatcaataatacaaaagaaacttgataatgctgagcataaactttggtatcaaggcccaatgtttagatatgaaagaccacaaaaaggaagatttaggcagttcaatcaagctggagttgaattgcttggatttgaagagggctcttcagatttagagattatttcgatagtttgcgatatttttattgaattagagcttgaagacgcagttttaagaattaatcatctaggagataaagataccaaacaaaaatttttatcagaactgcttaggtatttgaaaagttacaagggtaatattaatgaaaatgacaaagaaaaacttaacaaaaatcccctgagattgcttgattcaaaagatgtagatttaaaggaatttcttgataaaggcccaaaaatcatagattttctctcgcccgaacagctaaatcttcttgataagattcaaagtatttttggtaaatatgttgaaattgagttagatagctccttggtaagaggacttgattattatactggacttgtatttgaggcagtctcttcaaacctaggtgcacaagactctttcttgggagggggtagatatgatgatctatcaaaagaccttggcggcaaagaaatgcctgctatcggctttgctattgggcttgaaagattaaatctcataaagaagcataagaatatcaaatccaataaagtaatttcttttgttacaacctctagcaaaatgaatgctttagcatttaaaatagcacaacttttgagaagtcataattatgatattcgacttgaaacgaatttcactgatgcaagtctcaaagcaaaacttagaaaggcaagcaagcttggtgctaaatttgtctttataatgg

SEQ ID NO: 302527 - DNA, 820 bp, Unknown
  Bacterial polypeptide expressing nucleotide sequence isolated from the Sargasso Sea
tatgcctgatctatttcccgaagatttagagagatggcatatattcgaatcaaagctttctaaaatttttcattcttttgatacgcatgaaattcgcactccattactagagtcttcagagcttttttcaaggtctgttgggaattcatctgatattgttaacaaagaactctattcttttttagatcgaaatgaagaaagcattagcctaagaccagagggttcagcgagtgtaataagagcaattattcaaaaaaaacaagaacaggaaaaacataaattttggtatcaaggaccaatgtttagatacgagagaccacaaaaaggaagatttaggcaatttcatcaagtgggagttgaatatcttggttttgaggaaggtattgcagaatatgagctacttagcatggttttgcagattaataaattaattggcatttcagactatacaattaaaataaatcatcttggtgatagggatgctaagaaaattttttgtgattcgctcgttacttttttaaagccacatattaatgaattacatgtaaaagatcaggcgagattaaaatctaatcctttgcgagttttggactctaaagaaaaacctactcaggaattgctcaaagaaggaccaaaatttcaagattttatttcagatgactctaagatcttcttacaaaatctcgtagatgcctttagcaatcattgtgatattcaaattgatcaatcattggttagaggattagattattacacaggtatcgtatttgaaactgtttcacaaaatcttggagcgcaagatgcattccttggaggagga

SEQ ID NO: 302528 - DNA, 1073 bp, Unknown
  Bacterial polypeptide expressing nucleotide sequence isolated from the Sargasso Sea
tatggtaaataaaattaattccattaaaggttttcaagacatcttaccaaaggatgctattttttatagagacatagaaaaaatgttactatcactaactaattcttttggaataaaagaagtacgcacacctattctcgagagatctgagctttttaatagatctattggagactctacagatattgttaataaagaaatgtatgcgtttgaagataaaaatggcgataatatatgtcttcgtcctgagggaactgcaggtatcttaaggagcatgattcaacataatatgatatacgatagaggtataaaaaaacaaaagatttggtattacggacctatgtttagacatgaaaatccacaaaagggccggtataggcaatttacacaatttggcatagagtatttcggatatgatgatactaatagcgaaattgaattaatactgatgatgaacacattttttaaatctttgaatttaaaaaatatacaacttcatattaattcattgggtaatctagctgatcgtaataattataaagaaataattaaaagtaatatatccgataaaattgagtcatttgaagaatcagttaaactgacatttaataagaatccacttcgtctattagatagtaagaatgaaaatattgccaagctatgtgctaagctacctaatttacttgaaaatattaatagcgatagtaaaaataaatttcatgattttgttaaaaaattagaggatttaggaattgaatatattattgacaattctatagttagaggccttgattattataatgacttagtctttgaatggaaagcagatcaactaggctcacaaaacgcaatctgtgctggaggaagatatgataatcttgtcaatgaattgggagataccagcgtaccagctataggcttagctatgggagtcgagaggataattgaacttcttaagaatgaaaactatcaaaataatcatctcattttgccttttgtagacgagcatggtggcaacaatattaatttcatcaaaattacaaataaaatcagagaaaaacataaagctttca

SEQ ID NO: 302529 - DNA, 1297 bp, Unknown
  Bacterial polypeptide expressing nucleotide sequence isolated from the Sargasso Sea
ttggacaaagagataaaacccgtgtcaaaagatatccaggccattcgtggcatgaacgactgtttacccgccgatactccggcatggcaatttgtagaacaggttttacgtaaaacagtgcgcaactatgggtacgaagaaattcgttttcctatagtcgaaatgaccgaattgtttaagcgttctataggcgaagtgactgacatcgttgaaaaagagatgtatacctttgccgatcgcaatggcgacagtctgaccttgcgccccgaggggactgcagtttgcgtacgtgccgccaatcagaatggtttgttgtacaaccaggagcagcgcctgtggtacatgggccccatgttccgccacgagcgtccacaaaaaggccgttaccgtcagttccaccagtttggtttagaagcttttggtatggcaggccctgacattgatgctgaagtgattttactcagtgcccgtttatggaaaagtttaggtttgtcgtctcatgtgactctggagctgaactctttaggctcgaaccaagctcgtgcggattaccgcgctgcgttagtcgcctatttagagcaacataaagaactgctggatgaagacagcttacgtcgcatgtacagtaacccgctgcgggtactggatagcaaaaatccagtgatgcaggacatgctgggtaaggcgccacagctgttagagtatttagatgatgaatccaaagccgactttgatggcctgcaaaagcgtttaaaagccgctggtgttgagtttgtgatcaatccacgtttagtgcgtggcctggattattacaacaaaacagtgttcgagtgggtcaccagcagcttaggttcacaaggcacagtctgcgccggtggtcgttacgatggtttagtggaacagctgggagggaaagctactcctgcagttggttttgccttaggtatggagcgactggtattattgctgcaaaccttagagctattgccagaagcccagcctcaaaccgatatttatctgatggccttaggcgagagcgcggaacttgctgcagtttctattgccgaaagcctgcgtaatgagttacctgagctgcgcttaatgacgcattgtggtggcggcaatttaaagaaacaaatgaaaaaagcggataagtctggtgccagtcttggtctgctattaggtgaaaccgaactggccgctggcgaaattacactgaaatggctcagagaagaaaaaccacaacaaaatattaaattgactgaattaagcagcgctctgaagcagctggtttaaa

SEQ ID NO: 302530 - DNA, 1222 bp, Unknown
  Bacterial polypeptide expressing nucleotide sequence isolated from the Sargasso Sea
tccgatctgctgccagataaacaaaaattttctaggcacattgaaagtatagctagtcaattatcttctctatacgggtattcaagagttgatactcctacttttgaagactcctctctgttcgttaggtcggtaggcgagggtacagatatagtagacaaggaaatgtactcctttgatgatagaggtggagatagtatgactcttaggccagaaggaactgcctccatatgccgtgcctatcttgaacatggtatgcataattttgctcagcctgtcaggatgcattatttttgctcagtatttaggtacgagagacctcaggcaggcaggtatcgtgaacaccaccagtttgggatagaggctattggagacccagatccatctatagatgttgaaatcattaaatttgcgcacgacttgattacaggcattggccttaatcaaattaatttgtttattaattcaattggggattcaaattgccgacctgcttatgtggaatcactcaaaaaatactacgagacttacagggatgagttgtgtaaagattgtttaacgcgtatagatcgtaatcctttgagattattggattgcaagaatgaagagtgctcgcaattgtctattgaagcgcctaaatcaataaattacttatgtgaagaatgtgaatctcattgggaatcggttctagattacctcaaagaattagaaatcccttataccattgaccataaattggtcagaggcttagattattatacaaaaactgtatttgagatccagcctaaagatgttggcggtcagtccactattttagggggtggtcgatatgatgctcttattgagcaaataggtggaagagctgttccagctatgggtttcgctacaggtattgaacgattgacattaaatttgattaaagagtcagtggatatacctgatatcaagtctcccaaatatctggttataaatgtcggagataaagctcgcatacgcgctatcaaaatagccgaccagatccgagaaaaaggaactggagctatggtagcgaatggcactagaggcttaagaggacaaatgaggcaagctaattcactgaatgtgccctttgtcataataataggagaatcagaattagaacgaaatgagttggttgtgaaggatatggccacggcagaacagaacatatgttctataagtgactttatgtctgcattatgat

SEQ ID NO: 302531 - DNA, 881 bp, Unknown
  Bacterial polypeptide expressing nucleotide sequence isolated from the Sargasso Sea
gtttggcctgcaaggcccggacatcgatgcagaactgattatgctgaccgctcgctggtggcgcgcgctgggtatttctcagcatgtcagcctggagctgaactcgatcggttcgcttgaagcccgcgctaactaccgtgatgcgctggttgcctacttggaactgcacaaagagaaactggacgaagactgcaagcgccgtatgtacaccaacccgctgcgcgttctcgactccaaaaacccggaagtgcaggcgctgctcaacgacgcgcctgcactgggcgactatctggatgacgactcgcgcgagcacttcgcgggcttgtgcaaactgctggagtccgcaggcattgcttacaccgtcaatcagcgtctggttcgtggtcttgattactacaaccgcaccgtatttgagtgggtcaccagcagcctgggctctcagggtaccgtgtgtgccggtggtcgttacgacggtctggtagagcaacttggcggtcgtgcaacgcctgccgtgggctttgctatgggtctggaacgacttgttttgttagttcaggcagttaatccggaatttaacgcagatcctgttgtcgatatatacctggtcgcttcaggggcggacacgcagtcggcagcaatgacgcttgcagaacgtctgcgcgatgaagttcctggtgtgaaactgatgacaaaccacggtggcggcaactttaagaaacagtttgcccgtgccgataagtggggcgcccgcgttgcactggtactgggcgagtccgaagtggctgacggtactgttgtagtgaaggatttgcgctctggtgagcaaacggcagtagcgcaggatagcgttgccgcgcatttgcgcactttactgggctaag

SEQ ID NO: 302532 - DNA, 1270 bp, Unknown
  Bacterial polypeptide expressing nucleotide sequence isolated from the Sargasso Sea
ttggaaaaaattcactctcttacaggaatgatcgatcttattggccacaagacgagcaaagaagatatttctgaaagaatattttatgcagaagaaattcttagagatatttttgaaagttattcgatttctgaaataagaactcctgctttagaaagttcaaacctattcaagagatcagttggagatgcttcagatattgttaataaggaactatattcttttcttgataaaaatgaaaaaagtataactcttagaccagaaggcacagctagtgtaataaggtcagttattgaaaagaaaatagataatgatactcataagctatggtatttaggaccaatgtggagatatgaacgcccgcaaaaaggcagatataggcagtttaatcaagccggtgttgaaattctaggttacccagaaggattagcagagctagaaattgtttcattaatttgttcaattaatagagcattaggaatagatgattcagtattaaaaataaatcatttaggaaataacgaaacaaaacaaaattactgcaaagctttagaagattttttaataccactgtcatcaaaacttgatgccaaagatttggaacgtcttaacaagaatccactaagagttctcgattcaaaaaatttaaatactcaagcaatcttaaaagatgcccctaaaataatcgattatctttcagaagatgctataagtattttaaataccataaaaaatacatattctaatgattgtaaaattgagattgatcataacctagttagaggattagattactatactggatttgtttttgaggctgtttcgtctagtcttggtgcacaagattcatatttaggtggggggaggtacgatgaattatgcaaacaacttggtggaaaaagcctaccagctataggaatggctattggcattgaacgccttgcttcattagcaaaaacatataaagacaacatgacaatggtttcttttataattttatctaacaaaattgaaccaaaagcatataaaatagcccacaatttaagatctataaataactcaattaatatagatgttcaactttctgatggaagtttgaaatcaaaattaagaagggcaaataaagataatgctgcttatgcattaattattggagaggatgagcttaaagctaaaaaaattattgttaaacctcttttagataaaagttctgagcaagttacactaggcttggatgaaattgatggctttattaaaaaacttaaataag

SEQ ID NO: 302533 - DNA, 1276 bp, Unknown
  Bacterial polypeptide expressing nucleotide sequence isolated from the Sargasso Sea
tttgactgagaaaatcaaatccattagaggaatgccaacactgcttccggcagagttaaagctttggcagtcagtcgaatcaaccgtcaagaaaattttatcgaattatgcttttcaggagataaggacgccgctccttgagagaacggaactctttcaaagaacaataggggagcaaacagatgtcgtttcaaaggagatgtattcgtttcttgatcgcaaagaacaatcactttctctcaggccggaggctacagctggagttgttagggcaggcatagagcatggtctttttcacaatcaaacgcaaaaattctggtctatgggccccatgtaccgttatgagagacctcagaaagggcgttatcgtcaattccatcaggtcaatatggaagcattcggatatgaaggaccaggaatcgatgctgaactcatccttctgacttctaggatatggagaaaactgggagtcgaagacattcaattggaactgaattcattgggaacagcagagtcaagaaaaggatatcgcaccatccttgttgaatattttaacgatcacacagactcgcttgatgaggactcgatcttacgattggaaaaaaatccaatgcggattttggatagcaagaatccagagatggctgatgtcattcattcagcacctaaaatgaatgatcacttggatcaagaatcagaagatcacttcaatggtttactcgaatatctagatggccatcgcattcaatatgttctcaacccccgactggtcagaggattggattattacacgaaaacagtatttgaatggacgacggataaacttggcgctcaagccacggtttgtggaggaggccggtatgatgatttggtcaaacaacttggtggcaaggatgtttttgcaatcggatgtgcaattggttttgaaagactggttgaactggttgaactatcaggtaaaaaagatcagaatgggcacccaaaaatttatctcgttgctgttggcgaccaggcagaagcaaagtcctcagagttggcagagatgattagagatcaatttgaggattgtgttcttgagctgaatcaagatggtggaagcttcaagcaacagtttaagcgggctgatcgtgcagaatctgatatcgctctcatcctaggtgatgaagagatcgagaatgatacgattggtataaagttaatgaaagaaggtggtgaccaagaaaccatctcgcaggataagcttctagaaagcatcgctgataaaatcggcgcctaa

SEQ ID NO: 302534 - DNA, 767 bp, Unknown
  Bacterial polypeptide expressing nucleotide sequence isolated from the Sargasso Sea
tttgactgacaaaatcaaatcgatcaggggaatgccaacactgcttccggcagagttaaagctttggcagtcagtcgaatcaactattaagaaaattttatcgaattatgcttttcaggagataaggacaccgctccttgagagaacggaacttttcaaaaggacgataggcgaacaaacagatgtcgtttcaaaggagatgtattcatttcttgatcgcaaagaacaatcactcactctcaggccagaggctacagctggagttgtccgggcaggcatagagcatggtctttttcacaatcaagcgcaaaaattctggtctattggtcccatgtatcgttatgagagacctcaaaaaggccgttatcgtcaattccatcaggtcaatatggaggcatttggatatgagggacctggaatagatgccgagctcattcttctgacttctaggatatggagaaaactgggtgttgacgacattcaattggaactgaattcattgggaacagcagagtcgagaaaaacataccgtagtatccttgttgaatattttaatgatcacattgaatcacttgatgaagactctattttgcgattggagaaaaatccaatgcgaattttggatagcaaaaaccctgagatgtccgatgtcattcattcagctccgaagatgaatgatcatttggatcaagaatcagcaaatcatttcaatcgtttactggaacatttagatgctcatgatattcaatatgttctcaatccacgac

SEQ ID NO: 302535 - DNA, 1342 bp, Unknown
  Bacterial polypeptide expressing nucleotide sequence isolated from the Sargasso Sea
atgactgaacaaaaacgcaagatcgagaagctcaccggcgtcaagggcatgaacgacatccttccgcaggatgccggcctttgggagttcttcgaagctacggtgaaatcgctgctgcgcgcatacggttaccagaacatccgcacgccgatcgtcgagcacacgcagctcttcacgcgcggcatcggtgaggtcaccgacatcgtcgaaaaagagatgtacagcttcaccgacgcgctgaacggcgagaacctgacgatgcgcccggaaaataccgcggccgtcgtgcgcgcgtcgatcgagcacaacatgctgtacgacggcccgaagcgcctgtggtacatcggcccgatgttccgtcacgagcgtccgcagcgtggccgctatcgccagttccaccaggtcggcgtcgaggcgctcggcttcgcgggccctgatgcggatgccgagatcatcatgatgtgccagcgcctgtgggacgacctcggcctgaccggcatcaagctcgagatcaactcgctcggccttgccgaagagcgtgccgcgcatcgcgtcgaactgatcaagtacctcgagcagttcgccgacgtgctcgacgaggatgcgaagcgccgcctgtatacgaacccgctgcgcgtgctcgacacgaagaaccccgcgctgcaggaaatcgcgcagaacgcgccgaagctgatcgacttcctcggcgacgagtcgcgcgcgcacttcgaagggctgcagcgcctgctgctcgcgaacaacattccgttcaagatcaacccgcgtctcgtgcgtggtctggactactacaacctgaccgtgttcgagtgggtgaccgacaagctcggcgcgcagggcacggtcgcagccggcggccgctacgatccactgatcgagcagctcggcggcaagccgaccgccgcatgcggctgggcgatgggcatcgagcggatcctcgaactgctgaaggaagaggatctcgcgcccgagcaggagggcgtcgacgtgtacgtcgtgcaccagggcgagaccgcgcgtgaacaggcgttcattgcggccgagcgcctgcgcgacacgggcctcgacgtgatcttccactgcagtgccgacggcgcgccggcgagcttcaagtcgcagatgaaacgggccgacgcaagcggcgccgcgttcgcggtgatcttcggtgaagaagaggttgcaaacggcacggtgggcgtgaaagcgctgcgcggtgcgggcggagatggggaaaagaacgttcagcagaccgtaccggtcgaaggcttgaccgaattcctaatcaatgcgatggttgcatccgccgaagacggcgacgactgat

SEQ ID NO: 302536 - DNA, 896 bp, Unknown
  Bacterial polypeptide expressing nucleotide sequence isolated from the Sargasso Sea
aatggctcaagttaaatctataaaaggcacacatgatattcttccagaccagactaaagattggcaagaattagaaatgcaagtccataaaacttcaaatctttatgggtacagtgaaattaggacaccgataatagaaaccgcatctctttttaatcgcggggtcggagaagagactgatattgtctcaaaagaaatgtattcatgggaagataaagacaagtcaatcatatcattaaggccagaattgacagctcctgttgttagatcttacatccaacataatttaggtgggcaatctcctttgcaaagattatactatatcggaccatcatttagaagggagaggccacaaaaaggcagacaacgacaatttcaccaatttggtgtagaagctataggtagtgctaatccagaacaagatgctgaagttatatctttgggctgggacattcttaagtcatttgggatcaaatctttggaactaaaattatcaagcataggctcaaaatcctgtagagaaaactttaaaagtgaattagtaaagtatctaaatcctttcatcccaaagttatcagaagttagtcaaagaagacttgaaaaaaatcccttgcgaattttagatacaaaaaataaagatgagatagaaatagttaaatcagcgccaaaaattgaacaattttatacgaaagatgatcagaactacttcttttcagtccaaaaatttttaaatgatttagaaatcccgttcaagattgacccgcttcttgtaagaggtttagattattacacccaaacgacttttgaaatatgttcagaaaatttgggcgcgcaagatgctttgcttggtggtggcaggtataacggtcttgtaggatcattgggtgaaaagatgc

SEQ ID NO: 302537 - DNA, 427 bp, Unknown
  Bacterial polypeptide expressing nucleotide sequence isolated from the Sargasso Sea
atgaagtttcgttctataaaaggcacttatgatgttttaccagatgtttccaataaatggaaaagcatagaatcatatattcataagaaccttaatcgcgctggttataatgaaattcgaacgcctatttttgaaaatacagaattatttaaacgaagcgttgggttagatagcgatgttgtttcaaaggaaatgtatagctggattgatcaaggtggaacagatctgactttaaagccagaatatacagcttctgttgttcgttcatatattcaaaataatcttggtgctagcctacctgtaagcaagctctattatattggtgatttattccgcagagagcgtcctcaaaagggtcgttatagacaatttcgacaatttggtattgaagcaatagggtctaaatatcctgagcaagattcagagg

SEQ ID NO: 302538 - DNA, 1007 bp, Unknown
  Bacterial polypeptide expressing nucleotide sequence isolated from the Sargasso Sea
gtggtacatcggcccgatgttccgtcacgagcgcccgcagcgcggccgctaccggcagtttcatcaggtcggcgtggaagcattaggcttcgcgggcccggacaccgacgctgaaatcatcatgatgtgccagcgcttgtgggacgaccttgggctgatgggcatcaagctcgaactcaattcgctgggtctcgcagaagagcgcgcggcacatcgcgtcgagttgatcgcgtacctcgaaaagcacatggacgtgctcgacgaggaggcaaagcgccgcctgtacacgaacccgctgcgcgtgctcgacacgaagaatccggcgatgcaggaagtcgcgcagaacgcgccgaagctgatcgattttctcggcgaagaatcgcgcgcgcacttcgaaggcctgcaacgcattctgaaggcgaacaacattccgttcacgatcaacccgcgtctcgtgcgcggtctcgattattacaatctgaccgtgttcgaatgggtgaccgacaagcttggcgcgcaaggtacagtggcagccggcggccgttacgatccgctgatcgaacagcttggcggcaagccgacgggcgcgtgcggctgggcaatgggtgtcgagcgtatcctcgagttgctgaaagaagagcaactcgtgccggaagatgaaggttgcgatgtctacgtggtccatcagggcgacgcggcacgtgagcaggcctttattattgccgagcgtttgcgcgatacgggccttgacgtgatcctgcattgcagcgcagacggccagacggcgagcttcaagtcgcagatgaagcgcgccgacgcaagtggtgcggccttcgcggtggtgcttggcgaagatgaaatcgccaacggcacggtcggcgtcaaaccgctccgtgatacaagttctaacggcggtaaaaacgagcaacataacgtgcccgctgaagacttgaccgaatttctaatcaatgcgatggttgcaaccgccgaagacggcgacgactgat

SEQ ID NO: 302539 - DNA, 883 bp, Unknown
  Bacterial polypeptide expressing nucleotide sequence isolated from the Sargasso Sea
tacgattcagttagaagtgatgttgaaattgtcgctttagcttgggatgtattgagtaaattaggaataaaagaacttaatcttgaaataaatacattaggtgatgtaagtgatagattaaattttcagaaatccttcctaaaatggcttgaaataaataaaaattctctagatttagattctcagaataggattactaaaaatcccttaaggattttggactctaaagatattcaaacaaagaaagctcttaaaaatgctccaagattatttaattttttgtctgaaaaaagtcataaaagatattcagaatttaaaaaacaattagaggttttaaaaataccttacgtagaaaattttaatctagtaagaggtttagattattacacccatacagcctttgaaattactagtggctctctaggctctcaagctactgtttgcggaggaggaagatacgacaatttagtaaaacaaatgggagggccaaatacccctgcaattggtttcgctattggtttagaaagattaattttactagcgggaaaagagctcgaagtccaaagaaatactgatatttatattattaatcagggctcgattgctgaaccattagctatggatctatcaagaaaattaagaaattatgatttgttagttgagttggatttaagtggatcttcattctctaaacaatttaaaaaggctaataaactaaaatctaaaagtattattgttattggtgatgatgaagcgactaaaagggagtttattataaggctctttgatcaatcaagtaatgggaataaagaagaggttatttctttagagaatgattttgaattagaaaagtggataaacaataacttacttgcaaagtgat

SEQ ID NO: 302540 - DNA, 1270 bp, Unknown
  Bacterial polypeptide expressing nucleotide sequence isolated from the Sargasso Sea
attggataagattcaatctttaaaaggcatgattgatttgattgctaatagatccgatccagacgattttgcagaatcaatatttagaactgaagatgctctaaaaaatatttttgtaaattttggctattctgaaattaggacaccaactcttgaagatgctgatctttttaaaagatctgttggagattcttcggatattgtaaataaggaactatattcttttttagataaaaatgaaaaaaatattaccttaagacctgaaaataccgcgggcgttatccgctctgtgattgaaaagaaaatcgatgtaaatacccataaattttggtatctaggaccaatgtggagatatgaaagacctcagaaaggcagatacagacagttcaatcaagcaggaattgaaattattggacatccagagggtgttgctgaattggaaataatttcaatgatttgctcaattaacaatgcgttaaatattaaaaattcagtaattaaaattaatcatcttggtaaccagggcactaaaaccaattattgcaatgctcttctagagtatttaaaacctttttcatctcaattagatcaattagatcaaagtaggctagaaaaaaatccattgagaattcttgattcacaaaatcaaaacactcaaaagatacttaaagacgctccaacaatcaaagattttctttcagatgaatcattaaaaatgctccagatgctaaaagatactttttcaaaagattgcaaaatagagattgattatggattggtgagaggcctagattattatactggtctagtttttgaagctatttcagatgaattaggtgcgcaggatgcatatttaggcggaggtagatatgataatttatctgagcaattaggcggtaaggatcttccatgtattggtatggctattggtattgagagactagcattgttgtctaatatagtcattgaagataaaacattgatatcttttataattttgtctagtaattttgaagaaaaagcatataaaatagcccacgacttaagaactatcaatcctgaaataataatagatgttcagcttgctgagggtagcctaaagtccaaacttagaaaggcaagtaaaaacaatgctaagtttgcaataattattggtgaggaagaaatagaaactaatacaataatcataaaaccgctaattgaaaaaaattcagaacaaacagtaatggatatcaacgagattagcagtttttttgaagatattacttaa

SEQ ID NO: 302541 - DNA, 1366 bp, Unknown
  Bacterial polypeptide expressing nucleotide sequence isolated from the Sargasso Sea
gatgtcatcaaaacctaatacacctaagggaacaagggatttttcttctgaccaaatagtaaaaagaaactatattctaaaaattctagtagactcatttaagtattttaattactctgaaatacaaactccatcgtttgaaaacctggagacgttaattggagaatatgaagatgatcaggatggtcaaatgttcaaaattatctcatccggtgaaaaaatattaagagcagacattgattctcttaataaaggtgaattaatcaaattctctaactctatttctgataaagctttaagatatgacctcactgttccacttgctagatatgtatcacagaatcttaataatattaattttccatttaaaagataccagactcaacttgtatggagagctgagaggcctcaaaggggaagatatagagaatttcttcaatgcgatgttgatgtagtaggcgatagcagttatcttcaggtagttgaaagtatccaattatgtgatatggtttttgataaattaggttttaaaaatcttaagttgagaattaatgatagaagaatattagaatctttatctaaaactgcaggtttagaaaattttgttgaatttgctatcattattgataaattggataaaataggtttagatgaagtgataaaactacttaaagataaaggggcaaatgatgattcaattaataatataaaaaatttgttttcattaagtgaatcgcctaaggataaaatacaaaaagtaataggtagttttgaatcaaacctatttgatgaattgtcaagtattatctctgcactttcaaaaattaaactaaatgttttagaaatagattttgacttatcattagctagaggaataaattactacaccggtatagttctagaagtatcttcacctgaaaattcatctattggatcaattgctgggggtggtcgatatgataatttaattcaacaggtaggtaaaaatatcgatctaagtggctttggactttcatttggatttgataggatttatttgattttggaagaattaaatcttttccctaataatattaataaccaaaagacttttctttttttaaattttgataataatatttcagaacaaattttaaattctatgtctaatcttagataccaaggaattatttgcgaattatacccatcaaatgtcaagattaaaaagcagcttgattatgcaaataaaaagaattttgattttgttattttaattggagaggaagaggtaaaaaatgattcgtttatattaaaaaatatgagctcaggagaacagaactcctataagatcgatactttagaagatcagattaaaaaacttatttaa

SEQ ID NO: 302542 - DNA, 1131 bp, Unknown
  Bacterial polypeptide expressing nucleotide sequence isolated from the Sargasso Sea
attttgaaaatacagaattatttaaacgaagcgttgggttagatagcgatgttgtttcaaaggaaatgtatagctggattgatcaaggtggaacagatctgactttaaagccagaatatacagcttctgttgttcgttcatatattcaaaataatcttggtgctaacctacctgtaagcaagctctattatattggtgatttattccgcagagagcgtcctcaaaaaggtcgttatagacaatttcgacaatttggtattgaagcaatagggtctaaatatcctgagcaagattcagaggttatatcaattgcgtacaatcttataacagggcttggtattaatgatattactttaaagctaaatagtatcggttcatcagaaacgagaaagaattacaaacaagctttgctaaagtttttaaaaccaaagtatgatcaattatcagaaacgagtagaaacagatttgattcaaatcctttacgaattcttgatacaaaaaataaatctgaaatagaattactaaaaaaggcgccgaaaatcactgaatatttatcaaaagaagatgatttgcatttcactgaggtaaaaacttatttaaatgatcttagtatacctttcacattagatacaaatcttgttcgagggctcgattattatacacgcacaacatttgaaatagcttctaatactcttggcgctcaagatgctatatgtggtggtggaagatatgataaacttgttggatcgcttggaggaaaaccgtcaccagctgttgggtttgcagcgggattagaaagattattattagcgatgggtgataaaaatgaactggctaataaagaaataaaaaaaatatatttgatcggtttaggagataaatctcgttctacaatgatgaaaattttgaataacattagaagttctgggtattatgttgagtttgactcgttaaggcgaagccttaaagctcagttaagagagtctaataaacttggtgcatctatcacaataattatcggtgaacaagagatggaagaacattgcgctcaaatcaaagatcttacaagtgggaatcaagaatctgttccatttgattcaattatttcatacatagaagacttaaaataaa

SEQ ID NO: 302543 - DNA, 1081 bp, Unknown
  Bacterial polypeptide expressing nucleotide sequence isolated from the Sargasso Sea
gccattagacctgaaatgactcctacagtagctcggatggttgctcaggtttatcgtgaagttcctaagcctataaggtggtattcgattccaaaccttatgaggtatgaaaggccccaaaagggaaggcttcgtgaacactggcagtttaatgtcgatatttttggtgaaaactctatttttatggagttagaagttttacaggtcgccgttgacctgtttgagcaatttggtgccaatcaaaagcactttgaaataagaatcaacaatagaaagcttattgatcacttcttttcaaactcattgtctttagatgaaaaccaatcactcaaactttataaattattagaccgtgtaaaaaaaataaaacctgaagcttttgaggaagagttggcttcttttaatttttcagaaaaggacaacgagcttttttctaactatttaaaaataagttctcataaggagcttgaaacatttctaggaaaaattgaatttccaattgaaagttgggattatagcgccttttttaaagttgttagtgagttggggctctctgattatatccattatgacccaacaattgtaagagggcttgattattatacagggcttgttttcgaaatctatgacaagcacccagataaccgaagagcactttgtggtggtggagcttatgaaggtctcatgagtatttttggtgaagatcaattgccgggtgttggttttgggctaggggatgtaactttaaaggactttttggaagtgcacaagcttcttccctcttttaatcaacaggctccgagtgtttttattgcgagcgaatcagaagggttagcatcttctgttatgaaaaccgcgcggtttttaagaaaagagaatttgagcacagttcatgaggcttcaaagctaaaatataaaaagatttttcaaagtgctaataaaatgggtgctaaaaatgtaatcattttgcagttgaatgattctgaagaggttcaattaaaagtaaaaaatatggcctctggagaccaaaaagttttttctatggaagaacttgagcaatgttcaagtttttgtcagtaag

SEQ ID NO: 302544 - DNA, 1240 bp, Unknown
  Bacterial polypeptide expressing nucleotide sequence isolated from the Sargasso Sea
gatggacttaattggccacaaaactgataaaaccgaaatagctgataaaattttttttacagaaaaaattctcagaaatatctttcaaaactattctctttcagaaataaggacacctgccttagaggatgagggcttatttaagagatccgttggagatagctcagatattgtcaataaagaactttattcatttctagataagaatgataaaagcatagttcttagacctgaaggaactgcaagcgttattagatcaatgatagaaaaaaagattgataacgatactcataaattatggtatctaggaccaatgtggcgatatgaaagacctcaaaaaggaaggtttaggcaattttatcaggctggcgtagaaatcttaggatatgaagagggtttagctgaacttgagattatgtccttaatttgtgccatcaacaaggaactagatattaaaaattcagttataaaaattaatcatttaggtaacaaggattgtaaaaagaattattgtaaagagcttataaattaccttaaacctatgtcagccaatcttgataaaaaagacttagatagattaaataataatccattgagaattttagattcaaaaaatcctgaaacacaaaatattttaaaggatgcaccagtaattgctgattatttacctaaagaatcaaaagacttgcttgaccttattaaggagacgttttcaaatgactgcaatattaaaatagactataaattagttaggggtcttgattattacactggttttgtctttgaagcaatatctgaagaacttggagcacaagatgcatatttaggtggtggaagatatgatgatctatgctcacagctaggcggaaaaagacttcctgcaataggtatggctataggcattgaaagactagctagtttgataaatgctcatgaaattaacaaaactttaatatctttcataattttatctagcaaaatagagcaaaaaacatataaaatagcccacaatctaagattgttaaatagtaagattaatctagatattcagctatcagatggtagcttaaagtcaaaattaagaagagctaataaagataatgcttcatatgctctaataattggagaggaagaattgaaatcaaacacagttattgtaaaaccgttattagataaaaattctgaacaatctactatgaatctaaatgaactagatgattttataaaatcattaacatag

SEQ ID NO: 302545 - DNA, 379 bp, Unknown
  Bacterial polypeptide expressing nucleotide sequence isolated from the Sargasso Sea
ctgcaagccatccgtggcatgaacgatattctgccggagcagacgcctgcctggcgctacctggaaagtaccctggtcagcctgctcgatggctacggctacaaggaaatccgcctgcccatcgtcgaatataccgagctgttcgctcgcggtatcggcgagggcaccgacgtggtcgacaaggaaatgtacaccttcctcgaccgcaacgaagagtccctgacactgcgtcctgaaggcaccgccggttgcgtgcgtgcggtgctcgagcatggtctgtccggcggtggccaggtgcagaaactctggtacgccggccccatgtttcgttacgagaagccgcagaagggccgctatcgtcagttccatcaggtggggg

SEQ ID NO: 302546 - DNA, 1246 bp, Unknown
  Bacterial polypeptide expressing nucleotide sequence isolated from the Sargasso Sea
attgaagattcaatcattaagaggcatgcctgatctatttcccgaggatttagagagatggcacatattcgaatcaaaactatctaaaatctttcattctttcaatacgcatgaaattcgaactccattgttagagtccacagaacttttctcaagatcagttgggagctcatctgatattgttaacaaagaactatactcatttttagatcgtaacgaagaaagtatcagcttaagacctgaaggttctgcgagcgtgattagagcaattattcaaaaaaaacaagagcatgagaagcataaactttggtatcagggaccaatgtttagatatgagaggccgcaaaaaggaagatttaggcagtttcatcaagtgggagttgaataccttggttttgaggaaggagtttcagaatatgaattaattagcatggttttacagattaataaattaattggcatttcagactatacgattaaaattaatcatcttggtgatcagctttctaaagaaagtttttgcaattcccttgttgcttttcttcagccacatataaatgaattgcatgaaaaagatcaagcgagattacgatctaatcctttaagagtcttagactctaaagaagaatctactcaggcattgctaaaaaaaggtccaaaattccaagattatatttcagaagattctaggaactttttacaaaatcttgtaaatacttacagcaatcattgtgatatacaggttgatcaatcactggtaagaggattggattattacacaggcattgtatttgaaactgtgtcagaaaaacttggagctcaagatgccatccttggaggtggaagatatgacaatctttccaagcaacttggcggaaaagacatgcatgcaataggtttcgctataggggttgaaagaataatcgagcttctcagcattcaaaatataaaacaaccattaaaagttggatttattattgctggagagcagattgacaaaaaaacatataaaatagccgatgatttaagaagtgctaataatagtattattcttgatacatttttaagtgagggaagtttaaaatctcagctaagaagagctaataaaaataattgtagttatgcaattattgttggagaagatgagttcaaaaatgatcaagtgatatggaaagaccttagtgatggcggagagcaagaacttcttacctcaaaagaagtcatagataaatatactaatctttag

SEQ ID NO: 302547 - DNA, 922 bp, Unknown
  Bacterial polypeptide expressing nucleotide sequence isolated from the Sargasso Sea
atgaaaattgcaccaataagaggaactcatgatttttttggtcagcaagttttaaaatatagagctattcaagacttaatcagtcattattctagaatttataattttgaagagattattactcccatttttgaatcaacagagttatttaaaaaaccattaggtgaaaatagcgatgtagtacttaaagaaatgtatacatttaaagataaaaatgaagattttataactctaagaccagagtacactacacctatgataagatcggctataagtaataatcttttagaaaaacttccaaaaaaattatatggcatagggcccatgtttagaagagagaggccccaaaaaggaagatacagacaatttaatcaaattaatttcgagatacttggaacccatgatatttcagcagatgtagaattaattattttagcaaataattttttaacaaatttacttcccgaaaaaaaaataaatttatttataaattccttaggagacaaggatactttatctaattttagtgaaactttgagaaaatattataaacaaaataaaaaaaaattaacggaggaatcacaaaataagatcatttctaaccctataagaattttagattcgaaagatcctgcggataaagaaattaatgtgaatgcaccaacaatatctgatttttattcaaatgaagctaaggaaaaattttctaatattcaaaaaattttaaaagatatgtctattgatttttctataaataaaagtttagtaaggggacttgattattattgtcatacagtttttgaattcaaaacactagatttgggatcgcaagatactttaattggtggcggcagatatgatggcttaacaagattgctaggtggtcctgatattccaggagtaggatgggctggaggaatag

SEQ ID NO: 302548 - DNA, 435 bp, Unknown
  Bacterial polypeptide expressing nucleotide sequence isolated from the Sargasso Sea
tatgaagaaactacaagcgatcagaggcatgaatgatatcctccctgatcagtctattatctggcaattccttgaaaaaactttctcaagagtggtcaggcgttttggttatcaagaaattcgatttcctgtggtcgagcaaacgcagctgtttaaaaggtcgattggagagataactgatatcgttgagaaagaaatgtactcattcgatgaccgtaatggagtaaatctgagtttgaggcccgagggcacagctgggtgtgtaagagcaggggagcagaatgggttgttttacaatcaacaaagaaggctctggtatcagggtcctatgttcaggcatgagcgaccacagaaaggacgttatcgtcaatttcaccaattcggagtggaagctctaggtatgcctggtcctgatattgatgttgaagttcttca

SEQ ID NO: 302549 - DNA, 1282 bp, Unknown
  Bacterial polypeptide expressing nucleotide sequence isolated from the Sargasso Sea
tttgaataacttaaaaaacctaagaggaacagtagatctatttcctgatcaattaataaagtggcaaaacgttgaaaaaattttattagagcagctttctagagcatccatcaaagaaataagaacaccaatattggaaatgaccgaattatttataagaggaattggtgaaggaacagatgttgtcagtaaggaaatgtatacatttcttgataggggggagagatcttgcactctaagacctgaaggaacagcctcagtcgcacgagcgttaatacaaaacggaatatcttctaatcctcttcaaaaactttggtacatgggtcctatgtttcgatacgaaagacctcaagcaggcaggcaaagacagtttcatcaattaggtgttgagtttataggacatgattcagttagaagtgatgttgaaattattgctttagcttgggatatcttaggtaaattaggaataaaagaactcaatcttgaaataaatacgttaggtgatactaatgacagatcaaattttcaaaaatcttttttaaaatggttagaaacaaataaagattctctagatttagattctcagaatagaatttctaaaaaccctttgaggattttggactcaaagaatattcaaactaaaaaagttcttgaaaatgcaccaagattatttaattttttatctgaaaaaagtcataatagatatttagacttaaaaagacagttagaggctttaaaaataccttatatagaaaattttaatcttgtaagaggtttagattactacactcattcagcttttgaaattactagtggggctctgggctcccaagctacagtttgcggaggagggagatacgacgatttaataaaacaaatgggagggccaaacactcctgcaattggtttcgctattggtttagaaagattaattttactcgcaggaaaagagcttgaaattccaagaaatactgatatctatatcattaatcaaggcttaattgctgaatcattagcaatggatttatctagaaaattaagaaattacgatttgttagttgagttagatttaagcggagcctcattctctaagcaatttaaaaaggcaaataaacttaaatctaaaagtattattgttattggtgatgatgaggcagttaatggggaatttattataaggctctttgatcaatcaggtaatgggaatgaagaggaggttatatcttttgagaatgatattaaattagaaaattggataaacaataacttacttgtaaagtga

SEQ ID NO: 302550 - DNA, 1228 bp, Unknown
  Bacterial polypeptide expressing nucleotide sequence isolated from the Sargasso Sea
atgagtgatttgaagactataagaggaatgccagatctatatggagaaaatatagaggctatttctatggttgaagaaacatgcttaaaaacttttaaaagttttaatttccaagagttcagaactccagttctggaaaacaaatctcttttcgataggtctgtaggagaatcttcagacattatgcaaaaagaagtatatgaatttaaagatagaaaagatgaattgttatgcttaaggcctgaaggaacagctggtttagtcagggctctaataaccaatggtttagacaatgatgaaattaaaaaattctattatttagggccaatgttcaggtatgaaaggccacagaagggacgaaaaagacaattttttcaagctggagttgagttgataggagatgaatcatccgatgcagatatagaaattatcctgattgcaaatacgatccttgaaaaattaaatatcaaatcaaagcttcaattaaattatcttggagatcaaaagagcctacaaaaatataatgaatacttgaaagaatatctgtcagaaacatcaaacttgccagaatatgtaataaaaaatccaattagagctttagattcaaaagataaagacattagaaataaaatgtctaaagcagaaagtattaagaactttttaagtaaaacccaattagaagaatttaaaaaaataaaatctaaactagatgagattggaattcaatacgaagagaatgctagccttgtaagaggattagattattacaatggtctagtttttgagtttctttctgatgatctgggtgcacaaaatgctattttgggtggaggcagatacgatgggcttattaaaaatcttggaggtagagatttatcagctacaggttttgctcttggtatagatagacttgcagatattgtgaaattatcatcgattgaaaaagacctatttataggttgtgttgataaagaatcacgaacttatgcccaagcattagggtacaaaattaggaaagataatagccttcttgtagttgagaactatcttggtaatgcaaatgttggcaaacaattgaaaaaagctgattctcagggctttaaatttgctatcatagtcggccaagatgagcttaaaagcaaaacacttaaattaaagaatttaagagaggataaacctgatcttgagctaaaagaaaaagatttattggagtattttgaatgttaga

SEQ ID NO: 302551 - DNA, 688 bp, Unknown
  Bacterial polypeptide expressing nucleotide sequence isolated from the Sargasso Sea
tttgaataacttaaaaaacctaagaggaacagtagacctatttcctgatcaattaataaagtggcaaaacgttgagaaaattgtattggaacagctttcgagagcatccatcaaagaaataagaacaccaatattggaaatgaccgaattatttataagaggaattggtgaaggaacagatgttgtcagtaaggaaatgtatacatttcttgataggggggagagatcttgcactctcagacctgaaggaacagcctcagtcgcacgagcgttaatacaaaatggaatatcgtctaatcctcttcaaaaactttggtacatgggtcctatgtttcgatacgaaagacctcaagcaggtaggcaaagacagtttcatcagttaggtgttgagtttataggacatgattcagttagaagtgatgttgaaattattgctttagcttgggatatcttaggtaaattaggaataaaaaaactcaatcttgaaataaatactttaggtgacactaatgacagatcaaattttcaaaaatcttttttgaagtggctagaaacaaataaagagtctttagatttagattctcagaatagaatcaataaaaatcctttaagaattttggactcaaagaatattcaaactaaaaaagttcttgaaaatgcaccaagattatttaattttttgtctgaa

SEQ ID NO: 302552 - DNA, 594 bp, Unknown
  Bacterial polypeptide expressing nucleotide sequence isolated from the Sargasso Sea
aatgagtaaagagcaaatacgttcaattaaaggcactcaagatattcttccagatcaatcgcataaatggcagaatctcgagaatagaattcattctataatgaagctctacaattacaaagagatccgaacaccggttttcgaaaaaacagagctctttaatcgtggagtgggtacggaaactgacattgtttccaaagaaatgtacagctggactgatcaaggtggagaaaatctaactttgaagccagaactaactgctccagtatcaagagctttcattcaacataatcttggcaatcagcaaccattaacaaaactatattatattgatgcctcattcagaagagagcgaccacaaaaagggcgctatcgacaatttcatcaatttggagttgaagcttttgggtctgagcactctgaaattgattcagaaataattgctatggcgatcactttattcaatcagataggggttaaagacctttccctcaatatcaattccataggttctgaaagctgcagaaaaaattatattgaacaattaaaaggatttttaaaaccgcattttggcgatttaactcaaaccagtca

SEQ ID NO: 302553 - DNA, 1213 bp, Unknown
  Bacterial polypeptide expressing nucleotide sequence isolated from the Sargasso Sea
atggaaaaaattaactctttgacaggaatgcttgatttaatatccagtaaatcagatcaaaatgaatttgcaaataagatattttctaccgaagagtctctgagggtgatttttgaaaatttttctctttgtgaaatcagaacacctgctctagaaaatacaaatctctttaaaagatcagttggagacacctcagatattgtaaataaggagctatacacatttttagacaagaatgaaaaaagtattagtctaagaccagaaggaactgcaagtgtcataagatcagttgttgaaaaaaaacttgatggacaacttcataaattatggtacctaggaccaatgtggagatatgagagacctcaaaaagggagatttaggcaattcaatcaagctggagttgaaattttaggatacgaagagggtgttgcagagtttgacttagtttctttgatttgcagcattaacaaagagttaaaaattcatgaaccaattttaaagattaatcatttaggagataaagatgcaaaaaaagaatattgcaaggctcttacagattttttaaaacccatggaaaatgatttagatgaaaaagatcaagaaaggcttaaaaagaacccattaagaattttagattcaaaaaatgaggaaataaaaaaaatattggtaaatgcaccatctatatcagattttcttccttcaagcagtatagatttgttaacgaaactaaaaaaaactttttcagatgattgcaatatacaaattgattacaacttagtcagaggtttggattactacacagggttggtttttgaggcaatctcctcagatttgggagctcaagatgcatatcttggtggaggcagatatgatagtttatgcaagaatttaggaggtaaagatttaccggcaattggtatggctattggaattgagagactgacgttgatttcaaattataagcataaaaataaaacatcgatatctttcataataatatctggtaatgaggagccaaaagcatataaaatagcgcacgacttgagggcacttaataaacaaattaatattgatgtccagttgtcatatgcaagtttaaagtcaaaacttcgtaaggcaaataagaataatgcttcttatgccgttattatcggagatgaagagttgacttcaaatactgcaattttgaaatcgctgaaagaaaaggatctga

SEQ ID NO: 302554 - DNA, 967 bp, Unknown
  Bacterial polypeptide expressing nucleotide sequence isolated from the Sargasso Sea
tatgactaaactacaagctattcgtgggatgcatgatattctgacgcatgaaacaccgaattggcaatttgtagaaaaaaagattcaatatattctaaaccagtatgcttataaagaaatacgtcttcctattttagaaaaaacagaattattcgaaaattcaattggtggtaatactgatattgtttccaaagaaatgtatagctttgaagacaagaataaaatgagtctgactttaaggcctgaaggaactgcaagttgtgtgcgtgcaggaattgaacatgggctatttcataataagacacaaaggctctggtatataggaccaatgtttagatatgaaagacctcaaaaaggaaggcagagacaatttcatcaattaggtattgaggcattcgggctcaagggaccggatgtagacgcagaacaaataatgatgagtaaccgtatatggaaagaactgaatataaaaaatatcaatcttgaaataaactctcttggtacaactgagtctcgcaaaaattatagaaaaattttggttgattattttacagataataaaaataagcttgatgatgatagtttagttaggctcgaaactaacccgctgcgtatactagatagcaagaactccgaaatgaaatctttgatagctaatgcgccaagcattagtgaataccatgattctgaatctaaagatcacttcgctcaattgacagagatattagaacatggaaatattaaatttactataaattcaaaacttgtaagaggtctagattactatggaaagacagtttatgaatggacaacaactgaattaggaacgcaagatactgtctgtgctggtgggcgttatgataatctaattgaaaaccatggatcagcatcaacaccagctgttggctttgcgataggtattgaacgtttattagaattaataaattttgaaaacacactagagaaa

SEQ ID NO: 302555 - DNA, 1264 bp, Unknown
  Bacterial polypeptide expressing nucleotide sequence isolated from the Sargasso Sea
aatgagtaaaagaccaatccgttcaatcaaaggaactcaggatattcttcctgatcaatcctttagatggcaagctctagaatcaattattcgcgatactatggataagtataattaccatgagattcgtacacctgcttttgaaaatactgcattatttttacatagtgtgggagaagaaactgatatcgtttctaaggagatgtatagttgggaggatcaagggggtgaaaatctgacgcttaaaccagaactcacagcaccggttgccaggtcttttattcagaataatcttggaggactaaatccaataaataaactttactatattgactctctctttagaagggaacggcctcagaagggtcgatatagacaatttcatcaatttggcattgaagcctttggctcagaattccctgagattgatgttgaagttattgctttggcaatgtccacattcaataatcttgaattgaacggactcactttggaattgaactcaataggatccaaggattgtagagataattttcgaaaagctattaaagaatatttaaaaccaaattttgataaattaagcgaaacaagccaaacccgatttaataaaaatcctctacgtatattagacacaaaatctcctgatgaaaaaagattgctaaaagatggaccaaaaatttcagattactggacatctgatgataaaaatcattttaatgaggtatgcgaacttttagataaaataaatattaaatttgaattatcaccgaatctagtgaggggattagattattatacaaggacaacgtttgaggttacttctgatctacttggtgctcaaaatgcaatttgtggcggtggtcgttacgatggcttagttgaacaattaggtggcaaaccaactcccggtattggatttgctgctggaatggaacgattattattggcagatcaaagaaattttgaaccgactaagtctcagatttatattgttggtcttggtgattctgttcgatcactaattgtaaatctagcagaagaattaagaaaaaataatttcagaacaaattttgatgtattaaggagatcaataaaatcacaaatgcgtgatgcaaataagcttgatgctcaatatgtaatcattattggtgaagaggaattatcaaaaaatattgctactataaaagacctatcaagtggtgaccagaaagaaattccatttgaatcaattttaaatcatataaaatctttacctttaaaataa

SEQ ID NO: 302556 - DNA, 763 bp, Unknown
  Bacterial polypeptide expressing nucleotide sequence isolated from the Sargasso Sea
catctcggagactctaatacgaaaaaattattttgtaaggcgcttgtagattatttaacaccaatgaaatctaatttagatgaaaaagatctattaagattagatagtaatcctctaagaattttagactcaaaaaatccaaatactatagagattttgaagaaggcgccctcaatttcagattatctgcaagatagttcaaaagatttattaaaatctatacaggaattattttctgacaaatgtgaaattcaaatagatttcaacttagtaagaggcttggattattatactggctttgtttttgaggcaatatcagaagatttaggtgctcaagatgcatacttaggcggcggaaggtatgataatttgagtgcacaacttggaggcaaagatctaccagctataggaatggctataggtattgaaagacttgctctcatttcatatcaagaaaataaaaatagaactttaatttctttcataattatttctagtaattctgaagcaaaagcatataaaatatcgcacgaacttagatcaattaacaaaaatattgatattgatgttcaattatctcaaggaagcttaaaatctaaattgagaagggctaataagaatggggctgcatacgcgttcatagtaggagacgatgagatagaatcagagacagtgattataaaaccactaaataaagaagattcagaccaatcttctatgaatttaaacgaaatagaaaactttattaaaaatttaagttaga

SEQ ID NO: 302557 - DNA, 1173 bp, Unknown
  Bacterial polypeptide expressing nucleotide sequence isolated from the Sargasso Sea
aatgactgatttgattgagactaaggcagatgaggatgtgttagccaataaagtatttcaaaccgaaaaaatattgaaagaaatttttactaattatgcgatgtctgaaatcagaacacctgctctggaaaatacaaatctttttaagagatctgtaggcgatacttcagatatagttaataaagaactctatactttctcagataaaaatgacaaaagtataacattgagacctgaaggaactgcaagtgttataagatctattattgaaaaaaaattagatggagaaactcataagttatggtatttagggccaatgtggaggtatgaaagacctcaaaaaggaagatacagacagttcaatcaggctggaatagaaattttaggttattcagaaggtgctccagaatttgaaatgatttctttgatatgtgaactcaatagaaaattacaaataagaaaaccgctcataaaaattaatcatcttggagactctaatacgaaaaaattattttgtaaggcgcttgtagattatttaacaccaatgaaatctaatttagatgaaaaagatctattaagattagatagtaatcctttaagaattttagactcaaaaaatccaaatactatagagattttgaagaaggcgccctcaatttcagattatctgcaagatagttcaaaagagttattaaaatctatacaggaattattttctgacaaatgtgaaattcaaatagacttcaatctagtaagaggcttggattattatactggctttgtttttgaggcaatatcagaagatttaggtgctcaagatgcatacttaggcggtggcaggtatgataatttgagtgcacaacttggaggcaaaaatctaccagctataggaatggctataggcattgaaagacttgctctcatttcatatcaagagaataaaaatagaactttaatttctttcataattatttctagtaattctgaagcaaaagcatataaaatatcgcacgaacttagatcaattaataaaaatattgatattgatgttcaattatctcaaggaagcttaaaatctaaattgagaagggctaataagaatggggctgcatacgcgttcatagtaggagacgatgagatagaatcaaatacagtgattataaaaccactaaa

SEQ ID NO: 302558 - DNA, 1240 bp, Unknown
  Bacterial polypeptide expressing nucleotide sequence isolated from the Sargasso Sea
atggatttagtaggcaaaaaggcagacaagagcgaagtgtctaatagaattttcttcacagagaaagttcttaaaaatatttttcaaagttattgtttatcagaaataaggactccagcattagaggatgaaaatctatttaaaagatctgtaggcgatacttctgatattgtaaacaaggaactatattcgttcctagataaaaatgataaaagaatagtgcttaggcctgaaggtacagcaggtgttattagatcaataattgaaaaaaagattgatggagatgctcatagattatggtatctgggacctatgtggagatatgaaaggccacaaaaaggaagatttagacaattttatcaagctggagttgaaattttgggtcatgaagagggcttagctgaattagaaatggtctctttaatttgttcaattaatacacaattagaaattaaaaatccagtaattaaaatcaatcatttgggaaataaggaatgtaaaaatttattttgtaaagagcttgtgagttatctaaaacctttttcatcaaaattagataaaaaagatctagaaagattggatcgaaatccattgcgaattttagattctaaaaactctgaaacacaaaatattcttaaggaagcaccaaaaatatctgactatctttctaaagagtctctagatttattaaatttaataagagatacattttcaaatgattgtaatattgaaattgaccatacactggttagaggattagattactatactggttttgtttttgaggctatttcccctgagcttggagctcaagatgcatatttaggaggcggcagatatgatcagctttgctctcaattaggtggcaaagatctcccagcaattgggatggcaatcggtatagaaagattggcaagtatagccaatacgagtgaaattaataaaactttagtatcttttataattttgtctaacaaaattgagcaaaaagcatataaaatagcgcacgatttaagatcagttaataaaaagcttaatctagatattcagctatctgatggtagtttaaaatctaaattaagaagagcaaataaggataatgcttcatatgctctaatagttggagaagaagagttaaaatcaaatacagttattgttaagtcattattagatgaaaattctgaacaatccaatatgaatattaatgaattgcatgattttataaaatcaattgtataaa

SEQ ID NO: 302559 - DNA, 1255 bp, Unknown
  Bacterial polypeptide expressing nucleotide sequence isolated from the Sargasso Sea
aatgaaagattttgaaaatatagaaattcaaaaaattgaatatatcagacaacattttattgaaactgccaatacttttggatttgatttaatggaaccatctccaattgaattgatgtcagttatagaagcaaaaagtggacctacaattcgtgatgatgtttattttttcaatgataaaggagaccgagaagtttcattaagatttgattttacaattggtctaacacgatatattgctggacaaaaatcaatgaaacttccagcaaaaatctctgcgtttggaggagtgtggcgatatgatgaaccacagaaaggaagatatcgatttttccatcaatgggatattgaaatatttggaaaacaaaatactgaaactgatgcagaaattattgagtttacctcaaaatttttctcaaatcttggtcttgaaaacatagttcttagtatctcgcacagaaaaatcactcaatcatacatctcatcaatttttgaatctgaaaattccgaggttatttcagatattcttcgtgctatagataaaattcagaaaaaatctgaacaggaaatcatatctgaatatgaaaaaaagggatattctaaagaaaaattagaaaaaataatagaattttcaaaattgaaaggatctccagatgaaatatctaaaaaattcgatgtaacccaatttgaaaactggactgaacttacatctctttttgaatcgttaaaaaatcgcaatgtaaataatattcaaattgattttggaattgttcgtggtcttgattattattcaggaatagtttttgaggcttttgataaaaacttcgatattggtgcattagtcggtggtggaagatatgataatttgccatctgtttttggtagagatgatcttggcgctacaggtgttgcaggtggtgttgaaaggataatacttgccttggaaaatcaaaattcatcattcttacaaaaaactaatcgtatttctgttttgtatgtaaatgaagatgtgaaattaaatgccatgaagattgcatctatcttaagagagaattctatccctactgatattgatctatctggtcgagcattaaaaaaacaaatggaacaatcaacaaactcaaaatttgttataattgtaggtccagatgaactttcaaaaaatatggttgttgtaagaaatatgtcagatagaactgaaaataaaattttaatttctgagttattagaacatgtaaaaaaactattaatgtaa

SEQ ID NO: 302560 - DNA, 949 bp, Unknown
  Bacterial polypeptide expressing nucleotide sequence isolated from the Sargasso Sea
atggttgatagtgtaagaggaataagagtattagacggagaagatgctaataaatatcttgaaataattaatatatttcataacgttgcacaaaagtatgattgcaggtatataaagttaccaaccatagagaaggacgaactttttacaagaacagtaggtgagaatacagacattgtaacaaaacaaatgttttcatttgctgataaaaaaggacgaaatttagtactcagacctgaaggcacagcgggtgtagtaagacatcatatagataagaattacaataacatgattaaatattattattctgaccaaatgtttagatatgaaagacctcaaaagggtaggtacagggaatttcatcaagttggtgctgagattataggttacgaaactggttcagtattagaaatattttcaattctacaattaagtaatgattttttggaaaattgtgtacctactaatacaaaatatagatttgagattaattcaataggcagtagtgacgatagaaaaagttataataaagagctaacagaatattttaaaaaaaatattactaaattatccgatgattctattaatagattagataaaaatccattaagaatactggattcaaaagataaaaatgacataactatttcgaaaaatgctcctaaaatatcagaatacagaagtgaaaaatctaataagaaatttagtgaactaacccaaaagcttaacgattctaaaattccatatttagaaaatcctcatcttgtgaggggtctcgattattataatgattttacatttgaaatagtccctgaaaatagcaaagggtctcaagatgcacttggtggtggaggtcaatatgacgatctatcaaatttattaggtggaaaagaaatcaatggcgtcggagtagcttttggtgtagataggattatggaattaagttaat

SEQ ID NO: 302561 - DNA, 805 bp, Unknown
  Bacterial polypeptide expressing nucleotide sequence isolated from the Sargasso Sea
gatgaataaatttccgccaatcaagggaatgcatgacaacttttctcccaaaactgatcagttaagatccttggaagctatactaataaacagtgctgaaaaacttggttacaacgaagtaagaacacctatccttgaaaacctaaaccttttcaaaaaaaccattggctctgattcagatatcgttgagaaggaaatgtttacattcaatacctcaaaggatgatgttattgctttaagacctgagggtacatgcgctactgcaagattcgttgcaaataatgatttaaatgatcaaattaataagttttggtacctaggccctttttttagacatgaaagacctcagaaaggaagatatagacaattccatcagtttggtgttgaattatttggttcaaagtctatgttttatgaagcagaactatttttgttaattaataagatttggaaaaatttagatttacaagttccaacatttgaagttaataatattggaacatatagagaaagagaagagtattcaataaagcttaaggatttttttaaaaaacacttagaaagctttgacgaaaacactcaaaaaaagatgatgagtaaccctttgagagttttagattcaaaagatccaaaaataaaaaatattatcgatgatataccaattattgaaaattatttatctagcaaaactaatgatcaatttaaaatttttttagaaaccttagatactttaggtgttaaatataaaataaactcacatcttgtaagaggtttggactattataatgatatagtcttgagataa

SEQ ID NO: 302562 - DNA, 862 bp, Unknown
  Bacterial polypeptide expressing nucleotide sequence isolated from the Sargasso Sea
gttgccaattattgaaaatacggatttattctcaagatcagtaggggaagaaactgacattgtgaataaagaaatgttcagctttgagagtaaaagcgggaaatctttatctcttagacccgagggaacagcaagctgcctaagagctgccattgaaatgggtcttaccgatttaggacctcaaagactttattatcatggtccaatgtataggtatgagagaccgcagaaagggagaaatagagaattttatcaattaagtatcgaagcttatggatttaagaaattcaatatcgaattagaaatgatcgatttatcttataaattgttttctcgtttaaatttattcgaaccaattttagaaattaattcattgggatcggaagtcagtcaaaaaaaattttctgatgctttaaaagagtatcttttacctcttaaagatcaactcgacctagatagtcaaaagagactatcattaaatactttaagaattttagattcaaagaatcctgaaactcaaaaattattaaaaaaaggaccaaaactttctcaatttattgaaactcattctctagagaaatttgaagaattaaaagaacgaatctccaaaaaaaacataccttttaccattaacgaaaatttagtcagaggattagattattacaatgatgtagtttatgaatggaaatccaatcaacttgggagtcaaaatactttttgtgctgggggaagatatgattccttatcaaaaaaattagggggaagagatatccctgcagcaggtttctcaattggtcttgatagacttatgctgacaatccctgatgactcttttaagaagtcaaagaaaaaaattatgatc

SEQ ID NO: 302563 - DNA, 745 bp, Unknown
  Bacterial polypeptide expressing nucleotide sequence isolated from the Sargasso Sea
atgtctaaaatacaaaccctaagaggtatgaatgacatccatcctaagcaagtaaaggagtggtcttatgtcgaagagattattaagtccttggtcgaatcttacggatatgaagaaatcagattcccagttgttgaaaaaacagaactatatacaaggtcaaacgaagctgcagacatcgtcaccaaagagatgtacaccttcagtgacaaaagtggagaaagcatttcattaagaccagaaggaactgcgggatgtgttagagcagccattgataatgatttattaagaactgataaaccaagactttggtattcggggccaatgttcagatatgaacgtccccaaaaaggcaggtcaaggcagtttcatcaattcagtgcagaagtgtttggattgagttctccggaaatagatgctgagctcataatgatttctgctcgattatggaaagagctagacatttttgaaggtttaagactggaaattaataacttaggagacgaacaaactagaaaatcttattcaaaagcactcgtagacttccttacaaaatttagcaaagaacttgatgaagaagccataagaaagttaactgaaaatccattgagaatactagactctaagtcgccggcaattcaagaaatacttaaagacgctcctttaattgaagattttactaatcaagactcaaaaaattatcaagcaaacttattagagattttagatgaattgggtattggct

SEQ ID NO: 302564 - DNA, 1261 bp, Unknown
  Bacterial polypeptide expressing nucleotide sequence isolated from the Sargasso Sea
aatgagtaaagagcaaatacgttcaattaaaggcactcaagatattcttccagatcaatcgcataaatggcagaatctcgagaatagaattcattctataatgaagctctacaattacaaagagattcgaacaccggttttcgaaaaaactgagctctttaatcgtggagtgggtacggaaactgacattgtttcaaaagaaatgtacagctggactgatcaaggtggagaaaatctaactttgaagccagaactaactgctccagtatcaagagctttcattcaacataatcttggcaatcagcaaccattaacaaaactatattatattgacgcctcattcagaagagagcggccccaaaaaggacgctatcgacaatttcatcaattcggagctgaagcctttggatctgagcactctgagattgattcagaaataattgctatggcgatcactttattcaatcagataggaattaaagacctttcccttaatatcaattccataggttctgaagactgcagaaaaaattatattgaaaaattaaaagaatttttaaaaccgcattttgatgatttaactaaaaccagtcaacaacgatttgagaaaaaccccttaagaattttagactctaaggcacctgatgaggttgaactaattaaaggtgcaccgctaatttctgaattctggacgcaggatgatagagatcattttaatgaactgtgcagttatcttgatgcaatggatatcaattataatatcgatcctaaacttgtaagaggtcttgattattattctagaacaacatttgaaattacatcctcttctttaggcgctcaggatgctatttgtggaggaggaagatatgatcaattggtggaaacaattggtggaaaaccaacgccaggtattgggtttgctgcaggtatggaaagaatattgatggcattagatggtgatgatgttcaaaataatataaaaatatttgtagtgggattaggaagcaaagctagaacggttgttgcaaaattaactaaagaattaagacaggaaaatttatcttgtgaatacgatatgcttcgaaggtctatgaaatcacaaatgcgtgaggcaaataaactaggcgctaagtatgtaattattattggggaaaatgaattgcaacaaaatcaagccgagctcaaagatttaacaactggcaaccaagaaaaggttggtttagactctatcgtgaaacatatgagttctttatcgttttaa

SEQ ID NO: 302565 - DNA, 1174 bp, Unknown
  Bacterial polypeptide expressing nucleotide sequence isolated from the Sargasso Sea
atggataaaataagctcaatcagagggatgcctgatgttttcgaatctgatacaaattatcttgcagaattaaacgaagtactaagtaaaatatttctttctcataatcttaatgaggtaaatactccaattttagaacaaacagaactatttgttagatccactggggtaacatcagatattgtaaataaagaaatttacagttttaatgatcgaaacgaacaaagcctctcattaagaccagagggaacagctggtgtagttcgatcaataatccaaaagaaacttgataatgccgagcataaactatggtatcaaggtcctatgtttagatatgaaagacctcaaaaaggaagatttaggcagtttaatcaggctggagttgaattgcttggatttgaagagggctcttcggatttagaaattatttcgatagtatgtgatatttttattgaattagagcttgaagattcagttttaaaaattaatcatctaggagataaagataccaaagaaaaatttttatcagaactgcttaagtatttgaaaagttacaaaggcgatcttaatgacaatgacaaagaaaaactaaataaaaatcctctgagattacttgattcaaaagatgttgatttaaaagaatttcttgataaagggccaaaaataatagattttctctcatctgaacaactaaatcttcttgataagattcaaagtatttttggtaaatatgttgaaattgagttagatagctccttagttagagggcttgattattatactggacttgtttttgaagcagcctcttcaaacttaggtgcgcaagactctttcttgggaggaggcagatatgatggcctatcaacagaccttggcggcaaagaaatgcctgctattggctttgctattgggcttgaaagattaaatctcataaagaagcacaagaatatcaaatccaataaagtaatttcttttgtcacaacctctagcaaaatgaatgctttagcatttaaaatagctcaacttttgagaagtcataattatgatattcgacttgaaacgaatttcactgatgcaagtctcaaagcaaaactaagaaaggcaagtaagctcggtgctaaatttgtctttataatgggagaagaagaatttgaatctgacactataacggtca

SEQ ID NO: 302566 - DNA, 1249 bp, Unknown
  Bacterial polypeptide expressing nucleotide sequence isolated from the Sargasso Sea
tatggataaaataagctcaatcagaggaatgcctgatgtttttgaatctgattcaaactatcttgcagaattaaatgaaattctgagtaaaatcttcctttctcacaatcttaatgaagttaatactccaattttagaacaaacagaactatttgttagatctacaggagtaacatcagatattgtaaataaggaaatttatagctttaacgatcgcaacgaacaaagtctctcattaagaccagaaggaacagctggtgtagtaagatcaataatccaaaagaaacttgataatgctgagcataaactttggtatcaaggtcctatgtttagatatgagagaccacaaaaaggaagattcaggcagtttaatcaagcaggagttgaattgcttggatttgaagaggggtcttctgatttagaaattatttcaattgtctgtgatatttttattgaattagagcttgaagactctgttttaaaaatcaatcatttaggagataaagaaactaaagaaagatttttgtcagaactgcttaagtacttacaaacctacaaaggtgagctcagtgacaatgacaaggaaaaacttaacaaaaatcctctaagattgcttgattcaaaagatattgatttaaaagagtttcttcatcaaggcccaaaaattatagattttctctctcccggacaactaaatcttcttgataagattcaaagcatttttggtaattatgttgaaattgagcttgatagctccttggtcagaggacttgattattatactggacttgtctttgaagcagtctcttcgaatcttggtgcacaagactctttcttgggaggaggtagatacgatgagttatcaaaagatcttggcggtaaagaaatgcctgctattggatttgccattgggctagaaagactaaatcttataaagaagcagaaaaataccaaatctaataaagtaatttcttttgtaacaacctctagcaaaatgaatgctttagcatttaaaatagcacaacttttgagaagtcataattatgatattcgacttgaaacgaatttcactgatgcaagtctcaaagcaaaactgagaaaggcaagtaagcttggtgctaaatttgtctttataatgggagaagaggaatttgagtcagacactataacagttaagtcatttgataaagatggttatcaagtaaatatgagttttgatgagattctagatttttataaagatatttaa

SEQ ID NO: 302567 - DNA, 479 bp, Unknown
  Bacterial polypeptide expressing nucleotide sequence isolated from the Sargasso Sea
tttgaataacttaaaaaatctaagaggaacagtagacttattgcctgatcaattaataaagtggcaaaatgttgagaaaattatattggaacagctttcaagagcatccatcaaagaaataagaacaccaatactggaaatgaccgagttgtttacaagaggaattggtgaaggaacagatgttgtcagtaaggaaatgtatacattcctcgataggggggagagatcctgtactctcagacccgaaggaacagcctcagtcgcacgagcgttaatacaaaatggaatatcgtctaatcctcttcaaaaactttggtacatgggtcctatgtttcgatacgaaagacctcaagcaggcagacaaagacagttccatcagttaggcgttgagtttatagggcatgattcagttagaagtgatgttgaaattattgctttagcttgggatattttaggaaaattaggaataaaagaactca

SEQ ID NO: 302568 - DNA, 1276 bp, Unknown
  Bacterial polypeptide expressing nucleotide sequence isolated from the Sargasso Sea
tttgactgagaaaatcaaatccatcagaggaatgccaacactgctaccggcagagttaaagctttggcaatctgtcgaatctgaaattaagaaaatcttatcaagctatgcttaccaagagattcggactccattattagaaagaacagaactctttcaaagaaccattggcgagcagacagatgttgtctctaaagaaatgtattcatttcttgaccgcaaagatcaatccttgtcccttagaccagaagcaacagctggtgttatcagagctggaatcgagcatggccttttttataaccaaacacaaaaattctggtcaatggggccaatgtaccgttacgagagaccacaaaagggtcgttatcgacaatttcatcaagtcaatatggaagcgtttgggtatgaggggcctggaattgatgctgaactcatcataatgacatcaagaatatggaaaaatctaggcattgatgccattcaactagagctgaactcattgggaacttcgaaatcaagaaaaaactatcgagcaactcttgttgagtattttaaagaccacattgactcattggatgaggattctttgttgagattggaaaagaatccaatgcggattctagatagtaaaaaccaagagatgtctgctcttattgattctgcaccaaaaatgaatgatcatttggatcaagaatccagagaccatttcaatgatttattagagcgactggatagtcatggaatcaattatagactcaaccaacgcttggtcagaggacttgattactacacaaaaacagtctttgaatggacaacagacaagctcggtgctcaggccacagtctgtggaggaggtcgatacgacgatttagtgaaacaattgggcggaaaggatgtcttcggaattggatgcgccattggctttgaaagacttgtggaactggttgaactatcggataaaaaagatcagaatagtcagccaaaaatttatctcgttgctgttggtgatcaggcagaagcaaaatcctcagagctcgcagaattgattagagatcgatttgaggactgcgtagttgagctcaaccaagatggcggtagtttcaagcagcagtttaaacgtgccgatcgttcagaatctgatattgcactgatcttaggagatgaagagatcgagaatgagacaattggcataaaggcaatgaaagaaggcggtgagcaagaaacaatctcgcaacacaagcttttagatagcatatctgaaaagataggaatctaa

SEQ ID NO: 302569 - DNA, 1087 bp, Unknown
  Bacterial polypeptide expressing nucleotide sequence isolated from the Sargasso Sea
atgacaagagtaaataaagttagaggtatgaatgacctcatccccgagcaaataggaaactggcaggttatagaaaatcagataaaaaaaatattccattcctatggctataacgagattagattccctttaattgaaaagacggagttattttctagaggagttggtcaatcaacagacatagttaacaaagaaatgtatacctttgaggataaaggtggagaaagtatgtctttgcgacccgagggaacggcaggctgcgtaagggctgctttagataatgacttaattagagttgattcaccgagactttggtacatggggcctatgtttagatacgaaagacctcaaaaagggagatcaagacaattccatcaggcaagcgcagagttttttggaatcaaagacccttttgctgatgccgagttacttttcctttccaagaaaatctgggaggttttaggaattagtgatcaagttgagctggaaatcaattccttaggggatcatcaaactagaagttcatataaggaagctcttaccaattattttagagattatcaaaaagaccttgataaagactctctcagacagttggatgaaaatcctttgaggatattagattcaaagaaccctgaaataagaactctattagaagatgctccaaaaataacacagtttctcgacccagagtctgtagatcaccattcaatacttttagagctgctgaattctaacggactgacttacagagaaaatccccaactagttagaggtttagattattacaataaaactgtttttgaatggaaatcttcatctttgggagctcaagacactatttgcggaggcgggaggtatgactccttggtagaagaattaggaggtaagccatgtccagctataggcttttctataggtttagagcgtttagtgttaatttcagaaaagattgatgagaacataaatagctctaaagtgatttcttttattgctttaggcgaagaagccatttctaaatcagttttgattgcagagcaattaaagaatgaattagtcgatgttcagatagttttaaaattttgaa

SEQ ID NO: 302570 - DNA, 793 bp, Unknown
  Bacterial polypeptide expressing nucleotide sequence isolated from the Sargasso Sea
aatcaatactttaggttcaaacgaagctcgcgctgcatatcgcgatacgctagttgaattcttaaaagagcgtgcggaccagctagacgaagattcactgcgccgtcttgaaacaaatccacttcgtgtactcgattcaaagaatcctgatgtacaagctgctattgccgatgcgccagcccttatcgatcaccttgatgaagaatctaaagtacactttgaaaccttatgcgcacgcttaacgcaagcaggcattgagtttgaaataaatcctcgtttagtgcgcggattagattactacaaccgcacagtgttcgagtgggtcacagatagcctgggagcccaaggtacagtttgtgctggaggccgttacgatggcttggtagagcagctgggtggcaaagcaacgccagcagttggttttgctatgggcattgaacgtctggtactgttgctaaccacgttaactgaagaaggtcaggacctgagcttcgctgacgtatacgtcacagcgatgggcgatgaggcacagtcttacgctattgaagtagctgaacaccttcgaaatacgcttcctaatacacgcataatgatgcactgtggcggtggcaactttaaaaaacaactaaagcgtgcagataaaacaggtgcacgtttagcgctgcttttaggtaatgacgaaatgcagtctcgtgaagtaggtgttaaaccactacgcgatggtcaagaacaagttacagtcagcttcgataccttatctgataaggttgcagagatgctgagcgcaaaataa

SEQ ID NO: 302571 - DNA, 1222 bp, Unknown
  Bacterial polypeptide expressing nucleotide sequence isolated from the Sargasso Sea
atgcctgatgttttcgaatctgatacaaattatcttgcagaattaaacgaagtactaagtaaaatattcctttctcataatcttaatgaggtaaatactccaattttagaacaaacagaactatttgttagatccactggggtaacatcagatattgtaaataaagaaatttatagctttaatgatcgaaacgaacaaagtctctcattaagaccagagggaacagctggcgtagttcgatcaataatccaaaagaaacttgataatgccgagcataaactatggtatcaaggtcctatgtttagatatgaaagacctcaaaaaggaagatttaggcagtttaatcaggctggagttgaattgcttggatttgaagagggctcttcagatttagagattatttcgatagtttgcgatatttttattgaattagagcttgaagacgcagttttaagaattaatcatctaggagataaagataccaaagaaaaatttttatcagaactgcttaggtatttgaaaagttacaagggtgatcttaatgaaaatgacaaagaaaaacttaacaaaaatcccctgagattacttgattcaaaggatgtagatttaaaggaatttcttgataaaggcccaaaaatcatagattttctctcgcccgaacagctaaatcttcttgataagattcaaagtatttttggtaaatatgttgaaattgagttagatagctcattggtaagaggacttgattattatactggacttgtatttgaggcagtctcttcaaacctaggtgcgcaagactctttcttgggagggggtagatatgatgatctatcaaaagaccttggcggcaaagaaatgcctgctattggctttgctatcgggcttgaaagattaaatctaataaagaagcataagaatatcaaatccaataaagtaatttcttttgtcacaacctctagcaaaatgaatgctttagcatttaaaatagcacaacttttgagaagtcataattatgatattcgacttgaaacgaatttcactgatgcaagtctcaaagcaaaacttagaaaggcaagcaagcttggtgctaaatttgtctttataatgggagaagaagaatttgaatctgacactataactgtaaagtcatttgatgaagacggctaccaagtaaacatgagttttgatgagattcttgatttttataaagatatttaaa

SEQ ID NO: 302572 - DNA, 730 bp, Unknown
  Bacterial polypeptide expressing nucleotide sequence isolated from the Sargasso Sea
atgaagtttcgttctataaaaggtacatatgatgttttaccaaatgtttccaataaatggaaaattgttgaatcacatattcatcaatacttaactcggtgtggatataacgaaattcgaactcctatatttgaaaatacagatttattcaaaaggagtgttggagaagacagtgatgttgtctcaaaagaaatgtatagctggattgatcaaggtggaactgatttaactttaaaaccggagtatacagcttccgttgtgcgttcatatatacagaataatctcaattctatatctccaatatcaaaactgtattatataggggatttatttagaagagaaagacctcaaaaaggtcgctatagacagtttcgtcaatttggcattgaagcgataggctctaaatttcctgaacaagatgcagaaataatcgctattgcatggaatattctttctgaacttggcattaaagacattacattaaatttaaatagcataggatcatcagaaacccgaaaaaaatatagaaatgtcttattggattttctaaaaccaaatattaatgaattatcagaatcaagcgcaaaacgattaaaaacaaatccacttagaattttagatactaaaaataaatctgaaatagaaattcttaaacaagctccaaagattacagaatatttatccgaagaggataaattgcattttgatgcagtacaacaaggattaaagg

SEQ ID NO: 302573 - DNA, 1489 bp, Unknown
  Bacterial polypeptide expressing nucleotide sequence isolated from the Sargasso Sea
gatgacttcagataataaaaaaaagataaaagctgaacgtcccagaggatttgaagatctttctggagaagatcttttattactagaaaaaatcacatcgacaattgagaaaacatataaattttatggatttgaaaaattagaaactagtattgttgaactttcaaatgtcattggctcttttttacctgatcaggatagacctaatgaaggtgttttttctttggaggatgatgatagcagatggttatcactaaggtatgatttaacatctggtttagctcgctatgtggctgaaaattatgatgccttgcctaaaccctatagaagatatcaatctggttgggtttttagaaatgaaaaaccaggtccaggtagattccgtcaattcatgcaagtggatgctgatacagtaggaagcaaaaacccattagcagatgctgaaatgtgcatgatgttttcagatgtttttgaaaatataggaattcaaagaaatgactatttaataagattgaataatagaaacttgttggacgctctattagatcaacttggattaaattctataaatgactctgatcagtatttaactgttatgcgttctatagataaacttgatagattaggtttttctggtgttactgagctccttggaaaaggtagaaaggataaatcaggcgatttcacaaaaggcgcagagcttaagactgaacaaatagataaaataattaatttcttaaagcagggcgataagagtcaaaagacagatagaaaatctgcactagaaaaattagaaaaggatttttgtgatagtgataaattctctgaagcagttatcgagctattggctatttcagatatcttagatggcgcagggtacaatgaagatagagttgctatagacccatcagtagtaagaggattaggatattacacagggccagtttatgaagcagatcttattttcccaaaaaataatgatttacaaaactttggttctgttggagggggaggtcgttacgacagtctcgtagaaagactgaaaggagtaaaagttccagctacaggaatttcaataggtgtgagtagattaatgacagccctaaaaattttggatcaaaaagttaataacaaaagtgatattgatgttgttgttttgttaatgaacaaagatgatcaagtttattattttaacttagcatcaaaacttagagatgaaggtttattagcagatttatatgttggtgatggaagtatgaaagcccaattaaaatatgctgataaaagaaatgccaaaattgctttaattataggtgatgatgaaatagagaataacaccgtaacaattaaagatttaaataaaggtgcagaattatctaaagatattagtaaaaatgaagaatggcgatcaagcaaagacactcaagtgaatgtccctcaatctgaaatgattaagatgataaaatctattttatctaaaagttcataa

SEQ ID NO: 302574 - DNA, 1255 bp, Unknown
  Bacterial polypeptide expressing nucleotide sequence isolated from the Sargasso Sea
tatgtcgaaagtaacaaagcccagaggtttcaatgatctggatccgagtgagtttgaccataaatcaaatctattaaatgaaataaaaaccatttttaatagttatttttttaaagagattgaaactcccatagtagagaagaaagagctctttatcagatctgttggagaagaaacagacatagtaaacaaggaaatgtttacttttcaagacaggaagggtgaggatttagttctcagaccagagggcacagcaggttgtctgaggtttgccattgattcaggtttgcttgatttaggtccaattaaactttcttacgcgggtccaatgtttagatatgaacgacctcaaaagggtcgatcaaggcaattttttcaagtaagcgcagaaacatatggcgtcagagggtttgaggcagatcttgagttgctgatgatggcaaatgaaattttccaaagatttggaataggcaatgtttcactaaatatcaactctctcggtgatgaggaatctcaaaaaaaatatgcttcagacttaaagaagtatttaagtgatttctctgaagctcttgatgaggatagcttgagaagacttgaaactaatcctctgagaatcttagattctaaaaatgaagaaactcaaaaagtgattaaagatgcgcccaaaatatcctcatttttaagtcaaaaatcagctgacaattatgagttgatcaaagaaggccttaatgatttaggaatatcgtataaagaagacgagaaattagtcagaggtctcgattactacaacgacctcgtttttgaatggacatctccagatctaggaagtcaaaacactttttgcggagggggaaggtatgacagattatccaaacaacttggtggaagagattgtccggctgctggtttctcgattggtctggatagacttgctttgattactaaagcaaacgaatcaacttcttcatcgtctcttcaaataatacttaccgatgaaagctatgtttcagatgggcttaagctctcacaaaagttaagaaaagataataaagatttaagagttttgttctctggttaccaatcttcactaaaaaatcagctgaaaaaagctgacaagaataatattgattttgcggttataatcggcccggaagaagtgaggtcaaaaaactattcactaaaaaaattaaaagatgatgaggatcaactcactcttgaatatgatcaactagttaaagagctcaaaaatgaatga

SEQ ID NO: 302575 - DNA, 1267 bp, Unknown
  Bacterial polypeptide expressing nucleotide sequence isolated from the Sargasso Sea
aatgaatcagatacgcaatattaagggcacccatgatatccttcctgaaaacagccataaatggcaagagcttgagtccattgttaaaaacgtatgctctcgattcggctatcaagagatccggacgccgatctttgaagaaacaggcctattttcaaggagtgtgggtgaagaaacggatattgtctctaaggagatgtatacatgggaagatagagatggtacctcacttaccttaagacctgaattaactgcgtcagtggtccgctcttttatccaacataatttaggaggtcaatctcctatacagcgccttttttacatgggacctttattccgacgggaaagaccacaaaagggtcgtcagcgacaatttcatcaatttggtgtagaagcatttggttcagctaatcctgaacaagatgcagagatcattgcaattgcatggcatatattgtcacaatgtggactgatagaaaatacagtattgaatctaaatagcataggctctggcgaatgcagaaatgcatatcgaaatgcattaaaggactatatttctcctcacttggatcaattatcagaaacaagccaaaaacgttttatcaataatccacttagaattttagataccaagtctgaaagagagcttgaccttcttaaggacgctccaaagatatctaattactatactgaagacgacgatacacaccttgagtcactaaaaaactttctagaggcaatgaacatcccttttacgatcaaccataggctcgttagggggttagattattataccaagaccgtttttgaattcaactcttctcaacttggagctcaggatgcaatgctcggaggtgggcgttatgatggcttagtggaagtgcttggcggaagacccaccccagggattggcttcgctgctggtatggaacgttttttaatagcaatggatgatcaggacagaggcaataatgatcccgttgtggatatttactttgtatgcctagatgaaaaaggcctccctctaacccttcaactttccaatgaacttagaaataatggatttaaagtgatctttgatcctctaagaagaagtatgaaatcacaattgagagatgcaaacagatctggtgcgcggttcgctttgatacttggtgaaactgaaatgaatgataatgcaataggtttcaaagacctaaagcaaggcactcaaaagaccattgcacaatcagaggtcacaaacttttttgataatttgacaaactga

SEQ ID NO: 302576 - DNA, 1324 bp, Unknown
  Bacterial polypeptide expressing nucleotide sequence isolated from the Sargasso Sea
cctgacattttttattaatttagcgaaaatcggacgagtcgatacagtggcaaaacagatccaagcgattcgcggaatgaacgacattctgccaactcaaagtcctctatggcaaaaagtggaagcggtactgcgtgcaagcgtggctgcttatggttacagtgagatccgcactccaatagtggaaaataccgatctttttaaacgctctatcggtgaagtaactgatattgttgaaaaagaaatgtataccttcgaggaccgtaacggtgacagtttaaccctacgtcctgaaggcaccgcctcaaccgtgcgtgcgggtaatgagcatggtctgctctataaccaagaacaacgcctgtggtacatgggcccaatgttccgccacgaacgtccgcaaaaaggtcgttatcgccagttccaccagtttggtgtggaagtctacggcattggtagcgccgatattgacgctgaagtgttgatgttatcggcccgcctatgggaaaaactcggcattagcgagcatgtgacgcttgagttgaacaccttaggcgaccctgctgagcgcgccgcttaccgtgaagccttgattgccttcttagagcaacacaaggacaaattagacgaagatagccagcgccgtatgtacagcaatccgctgcgggtactggactcaaaagatccccaagtgcaaagcattttagctgatgcgcctgcgctgatggattacttaggtgaagaatcttcacaacattttgcacaattgcgtgaactcctcgacgcagttggcatccaataccgagttaacccgcgcttagtccgtggtttggattactataatcgcacggtttttgaatgggttaccaatagcttaggctctcaaggcactgtacttgcgggcggtcgctatgatggtttagtcgctcaattgggcggtaaagatacgcctgccgtcggttttgcgatgggattagagcgcattgtgttgctgcttgaaaccttagagctgacccaagatatccccgcggctgttgatgtttacgtcgctgcgatgggggatagctgcttggttgaagccattaaagtggcacaggagttacgctcaaccttaccgacactgcgtgttatgagccactgcggcggcggtaacttcaagaagcaaattaagcgtgccgataaaagcggcgcacaagtagccttactcatcggtgaagaagaactcgccgaaggtgtggttaccgttaaatatttacgcaatgacaacgaacaacaacgggtcgctcgaaatgcactaagcgcatttttagctgaacttaccaaataa

SEQ ID NO: 302577 - DNA, 882 bp, Unknown
  Bacterial polypeptide expressing nucleotide sequence isolated from the Sargasso Sea
atcaggcaggaatagaaattttgggttatccagaaggtgctccagaatttgaaatgatttctttgatatgtgaactcaatagaaaattacaaataagaaaaccgctcataaaaattaatcatcttggagactctaatacgaaaaaattattttgtaaggcgcttgtagattatttaacaccaatgaaatctgatttagatgaaaaagatttattaagattagatagcaatcctttaagaattttagactcaaaaaatccaaatactttagagattttgaagaaggcgccctcaatttcagattatctgcaagatagttcaaaagagttactaaaatctatacaggaattattttctgacaaatgtgaaattcaaatagatttcaacttagtaagaggcttggattattatactggctttgtttttgagtcaatatcagaagatttaggtgctcaagatgcatacttaggcggtggtaggtatgataatttgagtgtacaacttggaggtaaagatctaccagctataggaatggctataggtattgaaagacttgctctcatttcatatcaagaaaataaaaatagaactttaatttctttcataattatttctagtacttctgaagcaaaagcatataaaatatcgcacgaacttagatcaattaacaaaaatattgatattgatgttcaattatctcaaggaagcttaaaatctaaattgagaagggctaataagaatggggctgcatacgcgtttatagtaggagatgaggagatagaatcaaagacagtgattataaaaccactaaataaagaagattcagaccaatctactatgaatttaaacgaaatagaaaaatttattaaaaatttaagttaga

SEQ ID NO: 302578 - DNA, 1153 bp, Unknown
  Bacterial polypeptide expressing nucleotide sequence isolated from the Sargasso Sea
tttgaccaatctcaagaatttaagaggaatggtagatcttttacctgctcagagtcagggctggcagaaggtcgaatcaattgcacttgaacattttagtcgagctgggcttcaagaaattagaacaccgattattgaacaaacagaattgttttcaaggggaattggcgaaaatactgatgttgtaggcaaagaaatgtatagtttcgacgatagaggtggtcgctcttgcacattgagacctgagggtacagcctctgtcgcgaggtcaattgttcagcatggattattaaataaaggccctcaaagactttggtatagagggccaatgtttagatacgagcgccctcaagcaggaagacaaaggcagttccatcaaataggagttgaatttgttggattagcttctgttatgagtgacgctgaagttatttcaataggttggaactttttaaaggatgttggtctaaatgatttgactttagaaattaatagtcttggaagtaatgaagatcgaaatattttcaaagaagagttgaaaggttggcttaatcagagatttgacttgttagatgaagattctcagaaaagaattaatgttaatcccttgagaatattagatagtaaaaataattctacaaaagaacttttatctgaagctccttctttaaacgactttttatctaatgagagtaaaactagatttgattatttacaggagttactcgttaatctaaagattccatatgaaattaattataatttggtacgagggcttgattattattctcatacagctttcgaaataacaagtgatcatttaggttctcaagctaccgtatgtggaggaggacgttacgatggcttgataggcgaacttggggggcctcaagctccttctataggttgggctattggaatggaaaggctgattattctagctggagataaaattttacagtcaaaatctccagatgtttatgtgattcataaaggtaaaaaagctgagcaacttgctttggaaattacttgtcagttaaggtcatctaacttaatgattgaattggactactcaggttcatctttttcaaaacaatataagcgagcagataaaagtagggctaaatgggccttagttataggtgaggatgag

SEQ ID NO: 302579 - DNA, 1270 bp, Unknown
  Bacterial polypeptide expressing nucleotide sequence isolated from the Sargasso Sea
aatgtctaagatacaaaccctaagaggtatgaatgacatccatcctaagcaagttaaggagtggacttttgtcgaggaagtcattaaatccgtcgttgaatcttacggatatgaagaaattagatttccagttgttgaaaaaacagaattatatacaagatcaaacgaagccgcagacatcgtcactaaagaaatgtataccttcagtgacaaaagtggagaaagcatctcattaagaccagaaggaactgcgggatgtgttagagcagctattgataatgatttattaagaactgataaaccaagactttggtattcggggccaatgttcagatatgagcgtccccaaaaaggcaggtcaagacagtttcatcaattcagtgcagaagttttcggattgagctctcccgaaatagatgcggagctcataatgctttctgctcgattatggaaaaagctagacatttttgaaggtttaaaactggaaattaataacctaggagacgaacaaaccagaaaatcttattcaaaggcacttatagacttcctaacaaaatttagcaaagaacttgatgaagaagctaagagaaagttaactgaaaacccattgagaatactagactctaagtcgcaggcaattcaagaaatacttaaagatgctcctttaattgaagattttacaaatcaagactcaaaaaattatcaagcaaacctattggagattttagatgaaatgggtattggctatagagtaaatccaagactagtcagagggttagattattataatcagactgtatttgaatggaaaacaaaccttttaggttcccaagatactttattgggtgggggcaggtacgacgacttggtcgaagagttaggcggtaaaccatgtccagctatcgggttttcaattggactggaacggttaatcttgttacttaatcaggaagataagataaaacttgaaacgaatttagatatttacttcatctgtttttctgaaagtacagcccaagaagctataatgtgcgcagagaaattgaaagacaatattccgtctcttagcatcaaaacaaacttaggtcttgaaagtgctggttcgcaatttaagaaggctgataaatcgggagctaaaatagctttggttataggtgaagaagaattaaaggataaaaaaataacttttaaagatttaaggtcaaactcagatcaagaaactttaacttttgaagagttggttgaaaaaataaacaaaataaagaattaa

SEQ ID NO: 302580 - DNA, 1267 bp, Unknown
  Bacterial polypeptide expressing nucleotide sequence isolated from the Sargasso Sea
attggataagataaattcacttacaggcatgccagatttaattggtcaaaagagcaatgaatcaaattcatccaacaaaatttttgaaactgaaattgcactaataaaaatttttgaaagttattctctcaatgaaataagaactccagcacttgaaaatgaatctcttttcaataggtctgttggagattcttctgacattgtaaataaagaactttatacatttttagataaaaataaaaaaaagatttctttaagaccagaaggtactgctggagtagctagatctataattgaaaaaaaattggacaatgagacacataggttttggtatttaggtccaatgtggagatatgaaaggccccagaaaggccgatataggcaattctatcaggctggcattgagttattgggatattcagagggattagctgagcttgaaatgatttcaatgatattatcaataaatgatgctcttggtattaaaaattcaaaaattaaaattaatcatttaggtaacaaagatgctaaagatcaattttgtgaagctctgaagaattatttagagccatttaatagcaagcttgaaaaacttgatctcgatagattaaataagaatcctctaagagtcctagactcaaaaagtgagcagactaaagatattttgaaagacgcacctaaaatgaatgaatttgtctccaaggaatctctagatttgcttaacctaatcaaaaatagtttttcagagcataatattgaaattgacttctcccttgtaagaggtcttgattattacactggttttatatttgaagctatttctgatgatttgggagcacaagactcatatcttggcggcggaagatatgacaatcttttcagtgatttgggtggaaaaaaactaccagctattggtatggcaattggaattgaaagattggctgaaatatcaaactactcagttgaaaataaaacattaatatctttcatagttttatctgacaaaattgagcaaaatgcatataaaatagcccacgaatttagatatttgaacaacaatataataattgaagttcagctttctgatgggagcttaaaatctaaattaagaaaagcaaataaagataaagcagattttgcaataattattggtgatgaagagttaaagaataaaacattagttttaaaatctcttaaagagaacgactcagatcaaaaaatattaagcatagaagatgcgaaaaaatttattagctcactaaattga

SEQ ID NO: 302581 - DNA, 1105 bp, Unknown
  Bacterial polypeptide expressing nucleotide sequence isolated from the Sargasso Sea
atgaatcaaataagaaatattaagggaacccatgatattctcccagaagactctcgaaaatggcaagagcttgaatgtattattaatgaagtttgctcccagtttggataccatgagatacggacaccgatctttgaagagactggccttttttcaagaagtgttggagaagagactgatattgtttctaaagaaatgtacagctgggaagataaagatgggacctcacttaccttaagacctgaactaacagctccagtggctcgagcttatattcaacataacctggcaagtaaatctccgctacagcggttattttacatggggcctctttttagaagagagagaccgcaaaaaggaaggcaacggcagtttcatcaatttggcgttgaagcatttggttcttcaaatcctgaacaggatgctgaggtaattgcaattgcatggcaaatattatttcgttgtgaccttattaaagatatttcactgaacctgaatagtataggctctaaagaatgtagaaatgagtatcgtaacgcactaaaagattttctttcgcccctattagaccaattatccgaaacgagtcaaaagcgattcttgaataatccacttcgaattctagatactaaatctgaaaaagagctagagctacttaaagatgcgccaaagatctcaaattacttctctgaggatgatcacactcattttgaatcactaaaaagttttttagaatcaatgaatattccatttagcattaatgataagcttgtgagaggattagactactacactaggacagtatttgaattcaactccactaagctcggagctcaagatgcaattcttggtggtggacgctatgatggccttgtagagacccttggtgggaaatcaactccgggtatcggtttcgctgctgggatggaacgttttctgatcgcgatggatgacgaaaaagtaactaattcaagtatagatatttattttgtatgtccagatgagtacggactttctaagactctacaactttcgaatcaactaaggagtagtggacttaaagtgatctctgatcctcttcggaggagtatgaagtcacagttaa

SEQ ID NO: 302582 - DNA, 949 bp, Unknown
  Bacterial polypeptide expressing nucleotide sequence isolated from the Sargasso Sea
aatggttgatggtgtaagagggataagggtattagacggtgaagaagctaataaatatcttgaaattattaatatttttcataacgttgcgcaaaaatacgattgcacctttataaaaattccaacaattgagaaagatgaactttttacaagaacagtaggtgagaatacagacattgtcacaaaacaaatgttttcatttcctgataaaaaaggtcgaaacttagtactcaggccagaaggaaccgctggtgtagtaaggcatcacatagataaaaaatataataagattaaaaagtattactattcggaccaaatgtttagatacgaaagaccacaaaaaggtaggtatagagaatttcatcaagtaggtgctgaaattattggttatgaaaatgattcgattgcagaaattttttcaataatacaattaagtaacgattttttagaaaattgtattccaactaatacaaaatatacatttgaaattaattcaatagggacaaatgaagatagaaaaatctacaatcaaaagctaaaagaatattttaagaagaacatagataatttatcagatgattctattaaacgattagataaaaacccgttgagaatattagattcaaaagataaaagtgacattgcagtttctcgtaatgctccaaaactttcagaattcagaagtgaagaatctaataaaaagtttaacgaacttattcagatgcttaaaaattctaagatcccatatttagaaaacccttttcttgttagaggtttagattattacaatgactttacatttgaaatagtccctgaaaacagtaaaggttctcaagacgcactaggtggtggtggtcaatatgacaacctttcaaaattactaggtgggaaagatatcaatggtgttggagtagcttttggtgtagatagaattatggaattaagttaa

SEQ ID NO: 302583 - DNA, 886 bp, Unknown
  Bacterial polypeptide expressing nucleotide sequence isolated from the Sargasso Sea
cgcagcgatgtggaagtgatcgctctggcctgggatctgctggctcagttgggcgttggtggcctcgagctggaaatcaacagtcttggtacgcctgaggatcggcaggcctaccgcacagcgctggtggcctggctggagcagcggctggatcaactggatgacgactcccgcgcccgactcagcaccaatcccctgcgcattctcgattccaaaaacaaggacacccaggccttgctcgagcaggcacccaccctggccgatgccctcagctcagagagccggcaacgctttgatgcggttcagcaggggctgaccgctctgggcattcccttctggctcaatccgcggctggtgcggggtctggattactacggccacaccgccttcgagatcaccagtgatcaactgggggcgcaggccaccgtctgcggaggtgggcggtacaacggtttgatcgctcaactgggtggagccccccctacgccggccatcggctgggccttgggtatggaaaggctgttgctggtgctggaggcggcggcgacggccgatccggatggggcagcggcgcggctggtggccacgtccgcacctgatgcctatgtggtcaaccgtggtgaaaaggcggaaaccatggcgctgaccctcacgcgcggtctgcgggctgctggtctggccgtggagctggatgggtcgggctccgccttcggcaagcagttcaagcgggcggatcgttgcggtgcccgttgggctctggtgctgggcgatgacgaagcagcccgggctgaggtgcggctcaagccactgcagcacgagggcgaggaccggtcctgggcagttgcggacattgccgcgatcgtggagacgctgcgcaccccttgag

SEQ ID NO: 302584 - DNA, 703 bp, Unknown
  Bacterial polypeptide expressing nucleotide sequence isolated from the Sargasso Sea
gtattttaatactcataaaaataaactatcagaagaaagtattaaaaaaattgaaactaacccattaagaatattagattcaaaaaacgaagaagacgtcgaaatttcactaacttcacctaaaatatttgaatacttaaccgatgaagctaaaaagcactacgaagatcttaaaagatcgttaaatatactagaaattgattttgaagaaaacgccaatcttgttagaggtcttgattattattgtaatacagtattcgaatacaaatcagacaatttaggaagtcaagatacattactaggtggtggaagatatgacggtttaataaaagtattaggcgggcctgatatacccggtattggatgggccgcaggtattgaaagaattgcattattaatggagtccgaaaaaaaaataagctcaactattcatattgctgtaacaaatgaaaaatttacagatttttttctttatctacaaaaatatttatctgaaaatagaatttcatattactggaattataaatacaatttaaaaaaatcatttacaaaagcaaatgcatcttcagcatcacatataattattattggagaaaatgagtttaatggtgatttttttactattaaaaatttaacgactggcgaacaaaaagaattaaagcttaatcaaatattaaatcatttgaatgataaatctagataa

SEQ ID NO: 302585 - DNA, 1207 bp, Unknown
  Bacterial polypeptide expressing nucleotide sequence isolated from the Sargasso Sea
ttctgcagaagaaccattaaaaaagttttcctgtcatatggatatgaagaaattattttccctataattgagaaaagtgaactattcactagatccaatgaatctgcggatattgttactaaagaaatgtatagctttaaagataaaagtggcgacagtatatctctgcgtccagaaggaactgctggttgtgtaagggctgctatagataatgatctcattagagttgattcaccaaggttatggtaccaaggccctatgtttcgatatgaaagaccgcagaaaggtagatctagacagtttcaccaatcaagtgctgaagtgtttggtataagatcagctgagatcgatgctgaattaataatcttatctgcaagaatatggaaagaattaggagttgaagaaaatataaatcttgagatcaataatttaggtgatgaaaagactcgtaaatcttatgcaaaatccttacaagattattttaaagcttacaaaaatgattttgatgatgactcgaaaaggaaactagatgaaaacccattaagaatcttagattccaaatctgattttattcaaggattgttgaatgatgctcccaagatatcagaatttatttctcaagattcacaaaatgagtttaatgagctaactgatctactaaaagtagcagacgtaaaattttctatcaaccagaaacttgttaggggcttagattattataatcagaccgtatatgaatggaagacaggactacttggtgcgcaagatacagtgtgtggtggcggtaggtatgataatttagtagaagaattgggtggtaaaccttgtcctgcaaccggcttctcgattggtatggaaaggttaattcttttaatcaaagccagttcagaattaaatttagataactcaaaattagatttattttttgtttgtttatctaaagaaggcattcaaaaagctataatgtatacagaatctcttagagaaagagtgaccaatcttaatgtaagaataaatatgggcttagaaggtgtaggatctcagttcaaaaaagcagataaatctggtgcaaaattcgctcttgttttaggtgacgatgaactgaagaataatactatctctattaaggacttaagaactaagtctgatcaggaaacattttcatatgaagatttagagaaaaggattgagaaaacctataaatagg

SEQ ID NO: 302586 - DNA, 1126 bp, Unknown
  Bacterial polypeptide expressing nucleotide sequence isolated from the Sargasso Sea
tgttgaaagaacagtaggagaagacactgatattgttgaaaaagaaatgtattcatttgatgataaaggtggagataatattagcctgagaccagaaaacactgctggtgtttgcagagcatttatagagaatggattgcataatactactttaccttcaagacttttttactatggtccaatgtttagatatgaaagacctcaatcaggaagatatagacaatttcatcagtttggaattgaatgcattggagacgattcaccagatgtagattttgaagttataaaaatagcttgggatatattgagtaatctaaattttaataatgtcctacttaacgtcaattctctaggagattctaaagatagatttatatatacggaagaattaaaaaaatattttagtaaatatcttaatgatttaccaaaagtagataaacttagatttgaaagatctccactaagaatattagactcaaaagaagatataacaataaaaatttctgaggaagcacccaaaacattagattttatttcttctgaaagcctagggcatcatgaaaacctaatattaaatttagaagaattacgttcacatgataagaaatttaattataagattaataatcgattagttagagggttagattattataataaaacggtttttgaatatacaagtgactctttaggccctcagggagttctactcggaggaggtagatacgatcctctaattaaaattctagggggtcaagatacacctgctgtggggtttgcaatgggaatagaaagagttgtaaatgaactaaagaagaatattgatgtacaaaaaaattatgttgatgcagtaataattgttactgatgaaaatctaagaattgaatcagttcaaatagcaaataatctaagaaatagtaatattagaacaataattgctcctaagaagtctataaaagctcagatgagatttgcaaataatataaattcaaaatcagcagtttttattggtaaaaatgaattagaaaatcaaaagttatccgtaaaattactccaaaccaaatctgaacaatttgaaatagatatagacgatatgaatcaactaaagaaaatcttaaattcttga

SEQ ID NO: 302587 - DNA, 1149 bp, Unknown
  Bacterial polypeptide expressing nucleotide sequence isolated from the Sargasso Sea
ccttcgacgtcaatgaaatcagaacccctttgttagaacctacagaactgttttcaagatcagtgggtaattcatctgatattgttaacaaagaactttattctttcttagatcgtaataaagatagtatcagtctcagacctgaaggttctgccagcatcatcagggcaattattcaaaaaaagcaggagcaagaaaaacataaattgtggtatcaaggacctatgtttcgatatgagagacctcaaaagggaagatttaggcagtttcatcaaataggagttgaatatcttggttttgatgaaggggctccagaccacgagttaatttctatgattctgcagataaatcaatcattaggcattagcgaatatactcttaaaataaatcatcttggtgatgcggatgcaaaagaaggtttttgtaaatctcttgtcagatttcttaagccaaatgctaatgaattgcatgaaaaagacaaagcaagacttgcttcaaatcctttaagaatattggattcaaaagaatcgtctacgataaaattattaaagaacgctcctaaatatcaagactttatatctgaagagtctaaagtatttttagaaggtcttgtgagcgcttttaaagatcaatgtgatattcagattgatcaatcattagtgagaggattagactactatactggtattgtctttgaaacagtttctaaagaacttggatcgcaagacgcttttcttggtggagggagatatgacaacctctcaaatcaacttggtggcaaagatatgcattctattggttttgcaattggtgttgaaagaattgtgcagctaataaacatagatgatttatctcaaaaaataaaagttggatttattgttagtgaagagcagattaataaaaaaacatataaaatagccaatgatttaagattagccaataattctattagtcttaatacttttttgagtaatggaagtataaaatctcaacttagaaaagctaacaaatctggatgtagctttgcagtaattattggcgaacaagaatcaaagaacaaccaagttatatggaaagatctgcgtgaaaaaggtgggcaagaaatactaagcgtgcaagagttgatcaaccaatatatcaatctttagg

SEQ ID NO: 302588 - DNA, 883 bp, Unknown
  Bacterial polypeptide expressing nucleotide sequence isolated from the Sargasso Sea
tctgccctggggcagtgccacggacggtgtcggccagcgtggtgcccatcagctgctggcggccaccctcagccgtggctgcggaccattcgaccatcgtcagctggcggatctggtagaggggcgaggcgccggcttgcgcagtgacgcccatgaagacgggttgctgatcagtctgcgctgcaccaccgaagacgcccaggagctgatgcccctgctcgactggatggtgacagcaccccatctggcgacggaacagctggaactggagcggtccttgagcctgcaggcgcttcagtgccagcgggaggaccccttccacctggcgatcgatcaatggcggcagcttgtttacggcagcacgggttacggccatgacccgctcggagtgagcgacgacctgcaacgactggatgcgaccgttctgcagaccctggccagacagctgacgacgggatgctccgtgctggccatcagcggaacctggccgtcatccctggaggacatgctgctgaagcggacgggcgaggggtggcaggacacgacagatgcaccaccccctccaccgatgcactggatgtccaatggcgacggcgacctggtgatgcagtccatcgacaccgagcaggtggtgctgatgctgggtcaaccctgctgtgcctatgggcatccggatgacctggctctgcggctgctgcagtgccatctgggctcaggcatgtcgagcctgctgttccgtcgtctgcgggaagaccatggtgtggcctacgacgtcggagcgcatcacccagcccgggcaggtgctgcaccgttcgtactgcacgcctccagcagcgccgaacgggctgaactgaccttgtcgctgttgcaccagagctggcac

SEQ ID NO: 302589 - DNA, 880 bp, Unknown
  Bacterial polypeptide expressing nucleotide sequence isolated from the Sargasso Sea
atccaggcccagaagaacgccacggacgcagcccgcgccgaggccggctagggtacagcgccttcctgccgggggggcccctggtggggaggtgaacactgcccagatccctgccgctcatctggccgggggcgcacgaccgttggcggcctctgccacgggccgtggtgagaccatgcccagccggcctgaccgagtgccagaggcccccgcgcccatccaggccagctgcccgccgcagcctggcccgcgccagagggacccgtcggcgccggagtccagccaggctgcctgcctgcgggccaccgagacaattcgcacgggcgccgacgcgcagggccttggtggaggcgcacccatgggccccctcagggcggcccaacatcgtgcccgcagacgacgaccccttctccgacaccatgcgcagtgggcccatcttcgacctcgtccagcccgccctcgccgaggcctgcggccatgtcgtcacggccgtgaccgtcaacaggatgacgccagaggacatgccagccatcgaggcccaccgggacctcggcaaccgtggcaccacccgctccatgcactggggcgagtaccagggtggcgccctcaccatccgcggccaggccaaggacgccccgggcctgcccatcctcgacaaggaagtctggcaccattacgacggccacgtcacccactgggtcacgccggtcacctcgggcacccggtacagcctcgtggcctacgacctcccgccgagaggctcaccgaggcacccggcacgccctcacggcctaggccctgtgccgccccgcctcacgccggcgcgccgagccccggcttccgccgctccggcgcctgcggcctcgtctccgcgccgtga

SEQ ID NO: 302590 - DNA, 285 bp, Unknown
  Bacterial polypeptide expressing nucleotide sequence isolated from the Sargasso Sea
catgagcgaggatttccggctgatttcggtggctgcattgctgacgcaggatggcgtggcggtgggcgatcggatcagactacgcggctgggtgcgtacgcggcgcgattccaaggcgggtctatcgtttgtgcagctgcacgacggctcctgcttcgagcctgcgcaggtggtggcgccgggcgaactagagaattacgccactgacgtgcagaacctaaccaccggctgttcgctcattgccgagggcgaggtggttgcctccgagggcaagggccagagtgt

SEQ ID NO: 302591 - DNA, 133 bp, Unknown
  Bacterial polypeptide expressing nucleotide sequence isolated from the Sargasso Sea
tcgtcgtttcggcacggtgacgcactccggcttcggtctcggtttcgagcgtcttattttgctttgcacgggcatggaaaacattcgcgacgtcatcccgtacccgagatggccgggcaactgcatcagttga

SEQ ID NO: 302592 - DNA, 469 bp, Unknown
  Bacterial polypeptide expressing nucleotide sequence isolated from the Sargasso Sea
atgagactaaaaagaaccaaaattatttctataaatgacagtcacaatgaaactgaagttcacgtttctggctgggtaaggacaaagagacaaagtaaaaatgtgtcttttgtgtcattaaatgatggttcaacaataaataatctccaaattgtttttgaaatgagtgattttacggaatcatttatagatgaaatatcaacaggttgttctctttctgttgtaggtaagcttttaaaaagtgaaggtaaaaatcaaaaatttgaaattcttgcctccaaagtagaaatattaggaaaagctcatcctgatgaatatccaattcaaccaaaaagacatacttttgaatttctcagagatgttgctcatttaagaccaagaacaaatacatttagtgcaatatttaggataaggcactccgtaatattttcaatccataaattttttaatgatagaggattttttaaca

SEQ ID NO: 302593 - DNA, 626 bp, Unknown
  Bacterial polypeptide expressing nucleotide sequence isolated from the Sargasso Sea
aatgaaaacaacaatagcacaattaaaagactttgagggtaaagaggtctcattaaatggatgggtttataatatgcgatccattggaaaaatctggtttttgattcttcgagatggaactggattggtccaatgtgtagtcgttaaagctgaaaccgaaaaggaagtttttgaattagagaacactttaacccaagaatcttccgtaacggttactggcactgttagatccgagccacgctctgttggtggatatgagataggagtaagtcaaattaaagttcatcaggttgcacaagaatatcctatatcccataaagagcatgggactgactttttgatgagcaatcgtcatttatggcttaggtctaaaaatcaaaatgcaattcttcgggttcgccatcaagtaattaaagccacaagagatttctatgataataatggttttacattaatggattcgcccatattaactgcaaattctgttgagggaacaagcacactttttgaattggattattttgatcgttccgcttatttaactcaaagtggacaactctatggtgaatctagtgcaatggcatttggtaaagtttatgtttttggtcccaccttcagagctgaga

SEQ ID NO: 302594 - DNA, 484 bp, Unknown
  Bacterial polypeptide expressing nucleotide sequence isolated from the Sargasso Sea
ctgtatcaagcgcgaacgaaaagagaggaggttacaaagctatccaataacccagtggtgaaaggcacgtggagaccaacagttgaactcaaatcgcgtctgagcttagcaaaggcctggcggatgattcgtggtgcgcaatcgggcacagctggattgggcttggtttggcaacgaaggaaggaggatatcgtagctgaggagagggcagagttactacgttcttatgaggatattgctgagcatgagaggtatctccattgcctctccaatgagttctttgccgaatgggttaagtggggcaattccctcgcaactgatcctcaatggacaagctggatcatgtcgggagaagatgacctatttcgtttcaatctcgctgccaccgaggatgtgctgcccactctgagtgtgctcaagtgttggaacaaaatcacagatgcaaggtgccatgtgtgtaagcgcaggctaacagctcactgaa

SEQ ID NO: 302595 - DNA, 771 bp, Unknown
  Bacterial polypeptide expressing nucleotide sequence isolated from the Sargasso Sea
gttggctgtcggtgctgatgttctgacggcgtctggtcagctgcgtattgcggacccggatgtgggtgagtcgttcttcaatgaggggacggtgccaggcacgcatggctctctgacgattacgccggatggtgcgtggacgtatgaggtggataacgctctgcctgcggtgcaaggtctgggcgaagaccagttcctgacggacacggtgacggtgacgtcggtggatgggaccgagcaggacattgagattacgatcacgggcacgaacgatgtgccggttatcggtggtgatgtatcgggttcggtcatcgaggatgatgcactgacggtatcgggccagctcgagattacggatgccgatgcgggtgaagcgttcttcaatgaaggtacggtatccggtacgcacggctccctgacgattacgccggatggttcctggagttacacggccgacaacgagttggccgaggttcagggtctgggtgaaggcgcccagcttacagacacggtgacagtgacgtccttggacggaaccgagcagagcatagagattacgattacgggcacgaacgacgtgccgtttgtgagcggtgagctgtctggttcggttgtcgaggatgaggtttttgcagcgtctggtcagctgagtattgcggatgtcgatgcgggcgaggcgttcttttatgaaggtacggtatccggtgcgcatggttctctgacgatcgatgcgtcaggtgcgtggacgtataaagtcgataatgaccaggc

SEQ ID NO: 302596 - DNA, 679 bp, Unknown
  Bacterial polypeptide expressing nucleotide sequence isolated from the Sargasso Sea
ttggcgattatactcaaaactttaattaaaataaggttaaaatatctccttaatctttttatctgtcttctttcagttcaatatattttttcccaagaaaataacttaggttataaggaagatcaattttatctaggggttagctattttatgcagataaaagatatagaagattttaaacaaaatgggttttcaggaaatttccaagcaggttttattaaagatatttctttagataaaaataatcagagggcacttggtttaggtcttggatttgaaaggaatagatttacctctaatatccaggcatcattaaattcagacaatcaagttgattatagacttgttattagccgttttcttgaatcaaagaatgagttaaattattcatcaattgtatttccaattgaacttagatttaggaattctactcctgatagatatgatttttggagaatatatactggttttaagtttaaaaggaattattatattaactcaaatccttcatatggtagatctttgaaaattaaagatagaagggaatggacacattcaatttatttaaattctgggtttaatacttggaatatatctttagaatatgatctaaattcattacttgaaggcacaaaaacagatataggaaatgaaattgatattaaatttttaaaatagg

SEQ ID NO: 302597 - DNA, 448 bp, Unknown
  Bacterial polypeptide expressing nucleotide sequence isolated from the Sargasso Sea
aaaagtatcggattaggatatactacagttacatcaatatttgaaaagacaggcactaatcttaaggagacaacaactcttaaaacaaatttctatgatctggcttttgggctaggtgaaaactactcatttatgtggggtgccggagttctttctggcttagagcatgaaagatatttggaatatactgataaaggaaaagatcagctctgggtcaacagtgacccggtaggacattctttattttttatgctggctcaccatggatttggttttgaaacactgctgggatatcgaatgaacttcataaagacagaattttacgatagcaatataccttcgcatatgggcaagtcacctgctgcaggaaaagacgtgagctatgaagataccaacataagtataacaacctcccaggttcaactgggaataggagttacattctgaa

SEQ ID NO: 302598 - DNA, 502 bp, Unknown
  Bacterial polypeptide expressing nucleotide sequence isolated from the Sargasso Sea
ctgacagcaatagagcaccttgaaagagaaaagatattaccaatcaagaaccttcccaaagcacaggatgtcagaagcttgggagttgtggtcgaggacattgtccttcctgccagttacacaatccagtggatggctgaacaactggctgaccgtctttacaagaaggtgatgcttcgtggaatccatccgggtcactgttcagttctttacgaccatgctgtcaaagacaaacttttccctggaaatcaaggagggatttcaacttttctccagatggtcaattccagtttgaggactattcctggagcaagccattcttcccacatgctacagctcacacagagtatcaaggagagccttctgttcgactgtaactgcggcagccacaacacttcaatctcacctttgactgtttctgggcagttgatgtctccttctgatgctgcagggacagtggagtataagacggaaaggcattctgaggtaaactttgaataac

SEQ ID NO: 302599 - DNA, 784 bp, Unknown
  Bacterial polypeptide expressing nucleotide sequence isolated from the Sargasso Sea
aatgaaaaatataagttacttattaagtttgttattaactttttcctatgtttcttttgcagacgaagcagttaaagatattcctaaagagtcagataaagtatcagaagatgtcgctgatgaagtggtagatgagaaagctgaagaagataaggagccaactattagtgaattcctggaagaaggagagtttgaagtctttgaggggatgatagatatatattatgaaacagaagaagatacttactacacaattatcgaagaagaaaatctcacaaaagaatttatttatttttactacattataagcggcgctcaagctggcggtgcaagtggtggagatatgggagatagttctgtattagagtttagaaaatttaaggatgacatagctctctataagaaaaatacaatctttaactatgatgactcaaacaatatctcaaaatctactttaactaacatactcgaatcatttgttggcagatttgaagtaaaaattgaagaagagggaaaatatttaataaatattgataagttatttcttggtgaaatgcttgttggacttaccccacctaaagaatatgcggagtactatagtcttattcttggaagaattgatgataaaaaaacctatatcagccgagtaaaaaattatcctaaaaatacttctatagaggtgacttatgggttctttaatcccagtcctaagggttccgtagatgcagtgccagatgcaagatattcaagtattgtagctaggcatatgtttgtagaaatgcca

SEQ ID NO: 302600 - DNA, 1051 bp, Unknown
  Bacterial polypeptide expressing nucleotide sequence isolated from the Sargasso Sea
aatgaaaaatatcagttatttgttaagtttattattagccttttcatatgtttcttttgcagacgaagaggttaaagaagctcctaaagagtcgaaagaagttgctgaagatgttgctgaagaaccagtggatgagaaatctgaagaagataaagagccaactattagtgaattcattgaagagggagagtttgaagtctttgagggaatgatcgatatttattatgaaacggaagaagacacttactacacaattgttgaagaagaaaatctctcaaaggaatttatttatttttactacattataagtggtgctcaggcaggtggagcaagtggtggagatatgggagacagttctgtattagaatttagaaaatttaaggatgacatagccctctataagaaaaatacagtctttagctatgatgactcaaataatatctcaaagtctaccttaacaaacatactggaatcatttgttggtaggttcgaagtaaagatagaagaggaagatagatacctaataaatatcgataagttatttctaggtgaaatgcttgttggtcttaccccaccaaaagaatatgcggagtattacagtcttattcttggaagaattgatgataaaaagacttatatcagcagagtaaaaaactatccaaaaaatacttcaatagaggtaacttatggttttttcaatccaagcccaaagggttcagtcgatgcagtgccggatgcaagatattcaagtatcgtagctaggcatatgtttgtcgaaatgccagatgataattatgagccaagggttgctgaccaacgagtaggatatttctcaacaaagattactgatttaagcacttatgattattttaagggcaaggatctaattaatagatggcgtttgataaaaaaggatccgacagcagagatttctgaaccaataaatcctattgttttctgggtagaaaactcaactcctgaagaaattaaaccatttgttgtcgaagcaattgagctttggaatattgcctttgaaaaagcggggatttaa

SEQ ID NO: 302601 - DNA, 655 bp, Unknown
  Bacterial polypeptide expressing nucleotide sequence isolated from the Sargasso Sea
aatgaagactgtaacgattaatcaattaagtgaatatgaaggtcaagatgtagaattaaaaggatgggtttataatactcgtaatgttggtaagctttggtttatcatctttagagatggtactgggctattgcaaggtgtcgtagttaaaggtgaggccactgatgaatcatttttgctagagaatgatttgaaccaagaagattctataatacttaatggaactgtacgcaaggaacctaggtcgattggtggctatgaattaggagtcaaagaaattgaagttgtaaaacatgtctcggatgaatttccaatctcacataaggagcatggtgcagattttttaatgtccaatagacatttatggcttcgatctaaacggcaaaatgcaataatgcggattagacaccaggttgtcagagccataagaaacttctttgataacaatggtttcacacttattgattctccaatatttactggtaatgcggtagaaggcactacaacactttttgaagttgattattttgaacggtctgcgtacttaactcaaagtggtcaattataccaagaagctggagcaacagcctttggaaaaacatattgttttggtcccacgtttcgtgccgaaaagtcaaaaactcgtcgtcattta

SEQ ID NO: 302602 - DNA, 580 bp, Unknown
  Bacterial polypeptide expressing nucleotide sequence isolated from the Sargasso Sea
aatgaaaaatattagaataaatcaagttaaaaatcataaagatgaacttgtaaaaattaatggttgggtttataactcaagaagaagtggtaaaatcggttttttaaccttaagagatggttttggtttacttcaatgtattgttgcaaaaaatgatattggtgatgaactttttgagaattttaaaagagtaacacaagaaacatctatttcagtttcaggtaaagttgttgaaaacgaaagggcaattggtggttatgaattgttgcttgaatcctttaaaataaatcatttaagccatgattatccaatcacaccaaaggaacatggtacagaatttctgatgtccaacagacacctgtggctacgttcaaaaagacaacattctattctaaaaataaggcatcaaataattaaaagtataagagatttttttgataataatgactttacacttgttgatacaccgatttttactcctaatgctgcagagggaacatcaacattattcaagaccgaatattttggaaaagatgcttttttagctcaaactggtcaattgtatggcgaggcatcagca

SEQ ID NO: 302603 - DNA, 280 bp, Unknown
  Bacterial polypeptide expressing nucleotide sequence isolated from the Sargasso Sea
gcaaacggtccgtgctatggaccttctcgtgccgggagttggtgaacttattggaggctctgaaagagaagagaagatggaccctcttttacgggccatagaagaaaaaggtatgagcagaaagcctcttgagtggtatttagaactaaggaagtgggggagttgtcctcatggaggctttggattgggttttgagagggccgtcatgtatattactggaatgagcaacataagggatgctattccatttccaagaactcccaatagtgttcagttttaa

SEQ ID NO: 302604 - DNA, 789 bp, Unknown
  Bacterial polypeptide expressing nucleotide sequence isolated from the Sargasso Sea
aatgaaaaatatcagttatttgttaagtttattattagctttttcctatgtttcctttgcagacgaagaagttaaagaagctcctaaagaatcggaagaagttgcagaagaagttactgaagaatcatctggtgaggaagctgaagaagataaagagccaactattagtgagttcatcgaggaaggagactttgaagttattgagggaatgctcgatatttattatgaaacagaagaagatacttactacacaattattgaagaaggaaatctctcaaaggagtttatttatttttactacattataagtggtgctcaagcaggtggagcaagtggtggagatatgggggacagttctgtattagagtttagaaaatttaaggatgacatagccctctataaaaaaaatacagtctttaactatgatgactctaacaatatctcaaaatctactttaacaaacatactggaatcatttgtcggcaggtttgaagtaaagatagaagaggaaggaagatacttaataaatatcgataagttatttctaggtgaaatgcttgttgggcttactccaccaaaagaatatgcggagtattacagtcttattcttggaagaattgatgataaaaagacttatatcagcagagtaaaaaactatccaaaaaatacttcaatagaggtgacttatggattctttaaccctagcccaaagggttcagttgatgcagtgccagatgcaagatattcaagcatcgtagctaggcatatgtttgtcgaaatgccagatga

SEQ ID NO: 302605 - DNA, 317 bp, Unknown
  Bacterial polypeptide expressing nucleotide sequence isolated from the Sargasso Sea
ggcattttacatgaagcgagataatgaaaatgaaaaattagccctgggtgttgatatgttagctcctgaagggtatggtgagattattggtggtggtcaaagggaagataatttgaaaatacttgagaaaagaattgaggaacacggattagataaaaaagattttaaatggtatttggatttaaggaagtttggatcggtaccacattctggatttggtttaggtattgaaagaacagttgcatggatagctggtataaaacatatacgtgagacaatcccattcccaagaacaatttctcgattagaaccatgac

SEQ ID NO: 302606 - DNA, 724 bp, Unknown
  Bacterial polypeptide expressing nucleotide sequence isolated from the Sargasso Sea
catgaagtcgcattgggttggggatgttctcgcaggtgctcatgacggtgagactgttgaactgaaaggatgggtatatcgttcagcgtcgaagaaaaatatttcttttttgaggttacgtgattcgacaggtaatgtccaatgtgttgcaaaaagggatataatcggcgatgatgcatttgaggcctttagttccgctttaatcgaatcaagtatgattattcgaggagaggttgttcctactgaacgccagcatggacacgaaatcttggttactagtgtggagatcgtgggttcagtcgattcccagcgtcccttcccaattggtgaaacagatatgcttcacacggatgaagagggggaattaatgtatggcggttcccagaattgcctcgataatcgccacctgtatcttcgaacgactcgtgctacgacaatgctcaaacttcgaagcagtgctttcggtgctatacatgattactttcgtagtcgtgaattcattgaatatcaggcaccaaacttcgtagctggagccgttgaagggggctctactctctttgaggtgccttattttgataagactgcatatctgacgcagtcatggcaactctatgccgaagctgcaatgcctgcattagaacgattgtacacaattgctccttctttcagggctgaagagtcacggacacgacgtcatttgacagagttttggcatgctgagatg

SEQ ID NO: 302607 - DNA, 735 bp, Unknown
  Bacterial polypeptide expressing nucleotide sequence isolated from the Sargasso Sea
aatgaaaaataaatcaataaataaattaaaagattttataggaaaagaagttcagctaaatggatggatttacaatctcagatccgttggaaaaatttggtttgcaatcgttagagatggtacaggttttgtccaatgcgttgttacaagtaatgatgtttcaactgatgtttttgaacttgaatccgctcttactcaagaatcatctgttactgtgacaggaattgttcaagaggattctcgttctgatttgggagttgagattctagtaaaagatatggaagtaattcatattgcagaagaatatccgattgctttgaaagagcacggagtaagctttttaatggataatagacacctttggttacgatcaaagaaacagtacgctataatgaaagttcgtcaaaatgtaattaaatcaattagagatttttttgatacaagagattttgtgttaattgactcacctatgtttactggaaatgctgttgaaggcactactacattatttgaaactgaatattttaatagatcagcttatttaactcaaagtggacagctatatcaggaagctggagcaatggcctttggaaaaacatattgttttggtccatgttttagagctgaaaaatcaaaaacgagaaaacatttaacagaattttggatggtagaaccagagatggcattttatgatttaaaaaataatatggatttgattgaggaatttattgttca

SEQ ID NO: 302608 - DNA, 778 bp, Unknown
  Bacterial polypeptide expressing nucleotide sequence isolated from the Sargasso Sea
ttgttaagtttattattagctttttcctccgtttcctttgcagatgaagaagttaaagaagctcctaaagaatcggaagaagttgtagaggaagttgctgaagaatcatctggtgaggaagctgaagaagataaagagccaactattagtgaattcatcgaagaaggagactttgaagttattgagggaatgctcgatatttattatgaaacagaagaagacacttactacacaattatcgaagaaggaaatctctcaaaggagtttatttatttttactacattataagtggtgctcaagcaggcggggcaagtggtggagatatgggagacagttctgtattagagtttagaaaatttaaggatgatatagccctctataagaaaaatacagtctttaactatgatgactctaacaatatctcaaaatccactttaacaaacatactggaatcatttgtcggcaggtttgaagtaaagatagaagaggaaggtagatacttaataaatatcgataagttatttctaggtgaaatgcttgtcggacttactccaccaaaagaatatgcagagtattacagtcttattcttggaagaatcgatgataaaaaaacttatatcagcagagtaaaaaactatccaaaaaatacttcaatagaggtgacttatggtttctttaatcctagcccaaagggttcagttgatgcagtgccagatgcaagatattcaagcatcgtagcaaggcatatgtttgtcgaaatgccagatgacaattatg

SEQ ID NO: 302609 - DNA, 847 bp, Unknown
  Bacterial polypeptide expressing nucleotide sequence isolated from the Sargasso Sea
ggaatgctcgatatttattatgaaacagaagaagacacttactacacaattattgaagaaggaaatctctcaaaggaatttatttatttttactacattataagtggtgctcaagcaggtggagcaagtggtggagatatgggggacagttctgtattagaatttagaaaatttaaggatgacatagccctctataagaaaaacacagtctttaactatgatgactccaacaacatctcaaaatctactttaacaaacatactagaatcatttgtcggcaggtttgaagtaaagatagaagaggaaggaagatacttaataaatattgataagttatttttaggtgaaatgcttgttgggcttactccaccaaaagaatatgcggagtattacagtcttattcttggaagaattgatgataaaaagacttatatcagcagagtaaagaactacccaaaaaatacttcaatagaggtgacttatggattctttaaccctagcccaaagggttcagttgatgcagtgccggatgcaagatattcaagcatcgtagctagacatatgtttgtcgaaatgccagatgataattatgagccaagagttgctgatcaacgagtaggatatttttcaacaaaaatcactgatttaagcacttatgattattttaaaggaaaggacctaattaatagatggcgtttgataaaaaaggatccgacagctgagatttctgaaccaataaatcctattgttttctgggtagaaaactcaacacctgaagaaattaaaccatttgttgttgaagcaattgagctttggaatattgcttttgaaaaagccaggatttaaa

SEQ ID NO: 302610 - DNA, 783 bp, Unknown
  Bacterial polypeptide expressing nucleotide sequence isolated from the Sargasso Sea
aatggaaaatatatcaataaataaacttaaaaattttataggtaaagaagtccaactaaatgggtggatttataatcttagatcagtgggaaaaatatggtttgctattgttagagatggtactggatttgttcaatgtgttgttaccagtaatgatgtttctaaagatgtatttggtttagaatcaacactcacccaggaatcatcagtaatagttaaaggccttgtccaagaagattctcgttctgatttaggagttgaaatcttagttaaagatattgaagtaattcatattgctgaagaatatccaattgctttaaaagagcatggagttagttttttaatggataacagacatctttggttaagatcaaaaaaacaatatgctatcatgaaagttcgacagaatataataaaatctattagagacttttttgatagcagagattttgtattaattgactctccaatgtttacagggaatgctgttgagggcactactacattatttgaaactgaatattttaatagatcagcatatttgactcaaagtggacaactttatcaggaggctggagcaatggcatttggaaaaacatattgttttggtccatgctttagagctgaaaaatctaaaactaggaaacatttaacagaattttggatggttgagcctgaaatggcattttatgatttaaaagataatatggatttaatcgaagagtttatagttcatattgtttctcaaagtattaaaagctgtaaagaggaattaaaaatttt

SEQ ID NO: 302611 - DNA, 217 bp, Unknown
  Bacterial polypeptide expressing nucleotide sequence isolated from the Sargasso Sea
aagagaagacgatcatgatactcttgtaaaaagaattgaagatcatggattacctctaagtgcatttaaatggtatttagatttaaggaaatatggttcggttactcattcaggttttggtcttggacttgaaagaacagtttcgtggatttgtggtatagatcacgttaggcagactatacctttcccaagaacaatgggaagattggagccgtaa

SEQ ID NO: 302612 - DNA, 685 bp, Unknown
  Bacterial polypeptide expressing nucleotide sequence isolated from the Sargasso Sea
atgaaaaatattagttatttgttaagtttattattggttttttcctatgtttcttttgcagacgatgaaagtatggaagcgcctaaagactcagaagaagttgttgaagatgttgctgaagatgcagtggatgaggaaactgaagaagatgaagataaagagccaactattagtgaatttattgaagaaggagagtttgaagtcattgagggaatgctcgatatttattacgaaactgaagaagacacttactacacaattattgaagaagaaaatctctcaaaggagtttatttatttttactacattataagcggcgctcaagctggcggagcaagtggtggagatatgggtgatagttcagtattagagtttagaaaatttaaggatgatttagcgctctataagaaaaatacagtttttaattatgacgattcaaataatatatcaaaatctactttaaccaatatacttgaatcatttgtcggcagatttgaggtaaaaatagaagaagaaggaagatatctcataaacattgataaattatttcttggagaaatgctagttggtctaacacctccaaaagaatttgcagaatattacagcttaatacttggaagaatagatgataaaaaaacatatataagcagagttaaaaactatcccaaagaatacctccattgag

SEQ ID NO: 302613 - DNA, 2434 bp, Unknown
  Bacterial polypeptide expressing nucleotide sequence isolated from the Sargasso Sea
aatgaaaaatatcagttatttcttaagtttattattagctttttcctatgtttcctttgcagacgaagaaattaaagaagctcctaaagaatcggaagatgttttagaggaagttactgaagaatcatctgatgaggaagctgaagaggataaagagccaactattagtgaattcatcgaggaaggagactttgaagttattgagggaatgctcgatatttattatgaaacagaagaagatacttactacacaataattgaagaaggaaatctctcaaaggaatttatttatttttactacattataagtggtgctcaagctggcggcgcaagtggtggagatatgggggacagctctgtattagagtttagaaaatttaaggatgacatagccctctataagaaaaatacagtctttaactatgatgactctaacaatatctcaaaatctactttaacaaacatactggaatcatttgtcggcaggtttgaagtaaagatagaagaggaaggtagatacttaataaatatagataagctatttctaggtgaaatgcttgttgggcttactccaccaaaagagtatgcagagtattacagtcttattcttggaagaattgatgataaaaagacttatatcagcagagtaaaaaactatccaaaaaatacttcaatagaggtgacttatggattctttaatcctagtccaaagggttcagttgatgcagtaccagatgcaagatattcaagcatcgtagctaggcatatgtttgtcgaaatgccagatgacaattatgagcctagagttgctgatcaacgagtaggatatttctcaacaaagatcactgatttaagcacttatgattactttaagggcaaggatctaattaatagatggcgtttgataaagaaggatccgacagctgagatttctgaaccaataaatcctattgttttctgggtagaaaactcaacacctgaagaaattaaaccatttgttgttgaagcaattgaactttggaatgttgcatttgaaaaagcaggatttaaaaatgctgtcgtagcaaaaatacagccagatgatgctgaatgggatgcaggtgatgttcagtataatgttattcgttgggcttcaactccctctccaagatattctggatatggtccaagtgttgctaaccctagaactggggaaatgatagctgctgatatagtccaagaatttaattccattagttatggctacaggctaagaaagatttggggttacgatgaagaaaatgatcctttaagacagtggattgtatctttaacacttcatgaaattggtcatactcttggtctgcgtcataattttaaagcaagttggttgtatggacctactgaaattcatgacaaaagcgtgactggtaaaaatcatattggctctgttatggattatgatccaatcaatattgcgcctgaaggtgttgagcaaggaaattacttcccaacggtgcctggtttttatgatatctgggctattacctttggttacactccagacatgactgaagaagaaagaaataatttgctagctcagtcaacaaaacctgaacttatatttggtaccgatgatgatgctatgggttcgcctgggagaaatactgatccaagaaataagcggtatgacatgtcaaaagatccaataacgtatacagttcaaagaattcaaacaattgacaagaaaattgctgagttaccagaaatctttaatgagcctggttcaacttactctgaactcaaaggcacatttgatagcctagttagggataaaggaaggtttcttgaatcagttgcaattcaaattggaggagtctattccaataggcttgttgtagggcaaaatgaaaatatgacgccttttgaggtggttccatatagcgaacaaaaaagagcgatggaagttcttaatactgaactatttgcaaatgatgcttttacatttgatccagaaatattgaaacttcttcaatcggaaaaaagagctgcaagttatggaaactctgataatgatccaaagattcatgaccttgttttaagaatgcagatgagttctcttagttttattcttcatccaagagtaatgaagagacttacggatagtgctcaatatggtaatgaatatctaccaaatgaagttctagaagacatctttaatggtatctttgtaccgagagaaattcctggtacattcaagatgaatctccaatcagcttatgttgatggcttaatcgcagcaatggatgatggaagttatgatgaaatatctagagcagctatctttagctcactgaataagattaagaactttacaaattctgcatatggtaatgatatggtgaagggtcactttgattatttaaattggaagataaacgacgcccttgattga

SEQ ID NO: 302614 - DNA, 744 bp, Unknown
  Bacterial polypeptide expressing nucleotide sequence isolated from the Sargasso Sea
aatgaaaacaacaatttctgaattaaaaaagcatgatggtaaagaagtgtcactaaatggatgggtatacaacatacgatctattggtaaaatatggtttttaatcttaagagatggaacagggcttgtgcagtgcgttgtggttgataaagaaacagacaaagaaacttttgagttagaaaatacattgactcaagaatcatctgtaacaattaatggcgtagtaagatcagagcctcgctctgtaggggggtatgaattaggggtaacaaagattaaaattcatcaaattgctgaagagtatccaatatccaataaagaacatggtgctgattttttgatgagcaataggcatctctggttaagatcaaagaaccagaatgcaatattgaaaattagacatcaagttataaaagctacgcgtgatttttttgataataatggatttgttttaatggactccccaattttaaccgcaaattctgttgaaggtacgagcacactatttgaactggattattttgatcgctctgcctatttaacccagagcggacagctttatggagaggcaagcgcaatggcgtttggaaaaatttatgtttttggaccaacatttcgtgctgaaaaatcaaaaaccagaaggcatttaactgaattttggatggtagaaccagaaatggcgtattgtgatttaagcgagaatatggaatgggctgaaaaacatgttagctatgttgttcagtg

SEQ ID NO: 302615 - DNA, 767 bp, Unknown
  Bacterial polypeptide expressing nucleotide sequence isolated from the Sargasso Sea
ctcgagtttctccgcaccaagatccacctccgcacgcgcaccaacaccatcgccgccatcgcgcggatccgttccgcgctgtcctacgccacgcacaccttcttcaacaagaacgggttcctgtacgtgcacaccccgctcatcacgcagagcgattgcgagggcgcgggcgagatgttccaggtcacgacgctcctgggcaaggcggacgacgcggcggcggcggaggcgccccccccgagcgccgcggacgtggacgccaagcgctccgcggtgaccgaggccggggaggcggtccgcgcggcgaaggaggcggcgaaggccgagggtggggacaaggccgcggtcaagcccgcggtggacgcgatgctgaagctcaagaaggagctcgaggagatggagcgcgcggcgaagaaaataggcggcttggcgaggaccgacgacgggaaggtggactacgccgaggacttcttcggcgagccgacgtttttgaccgtctccgggcagctcaacgtcgagacgtacgcgtgcgcgatgagctccgtgtacacgttcgggccgacgttcagggcggaggactcgaggacgacgaggcacctcgccgagttttggatgatcgagcccgagctcgcgttcgccgacctcaacgacgacatgcggtgcgccgaggactacgtccgcttctgcctcaagtacgtcctcgcgaactgccgcggcgacctcgagttcctgtccaagatgtacgacaagggcgcgatcgcgcgcat

SEQ ID NO: 302616 - DNA, 686 bp, Unknown
  Bacterial polypeptide expressing nucleotide sequence isolated from the Sargasso Sea
aatgagcattgcatcggtcgcttctgtatttaaaggtgagcacgcagttggttcgacagtcacagtccgtggctgggtcagaacccgtcgtgactctaaagctggcatctcttttttagctgtctatgacggctcctgctttaatcctattcaaggtgttgtgccaaatagcttagaaaattacgacaacgaagtgttaaagctgacagctggctgctctgtgatcgtaaccggtgagattgttgaatctcctggcgctggccaagcctatgagctgcaagttactcacgttgaagtcactggttgggttgaagatcccgacacttaccctatggcggctaagcgtcactcaatcgagcatttacgcgaattggcgcacttacgcccacgtaccaacatcattggtgccgttgcccgcgtacgtaactgtttgtctcaagcgattcaccgtttctaccacgaaaacggtttcgtgtgggtgtctacaccgctgatcaccgcatcagactgtgaaggcgcgggtgaaatgttccgtgtatcaacactggatatggaaaacctgccacgcactagcgatggtaaagtagattacgacaaagacttcttcggtaaagaggcgttcttaaccgtatcgggccagctgaacggcgaaaactacgcctgcgccctgtcaaaaatctatacct

SEQ ID NO: 302617 - DNA, 822 bp, Unknown
  Bacterial polypeptide expressing nucleotide sequence isolated from the Sargasso Sea
aaatcctgaagaatatccaattcaacctaaaaaacactctcttgaatttttaagagaaaatgctcatttgcgtgttcgtacaaatgcttttggagcaatcatgagagttcgttctgtgttatcatttgcagttcataattattttcaagaaagaggttttgtttatgtaaacacacctattattactggaagtgatgctgaaggtgctggtgaaatgtttaaagtgactagtctacctttcgataaaactcctagaacagaagaaggaacagtaaattataaagaagatttctttggtaaagaaactaacttaacagtttcaggtcaattagaagcagagacttatgctatggctttaggtcaagtatatacttttggaccaacttttagagctgaaaattcaaatacttctcgtcacttggcagaattttggatgattgagccagaggttgctttcaatgatttagatgcaaatatggatttggctgaagattttattcagtatgtaatcaaatatactttagaaaaatgtgctgatgatttagctttcttagagcaacgtttattagaggaagaaaaatctaaacctcaagctgaaagaagtgaaatgagcttgttgcaaaagctaaattttgtattagaaaacaacttcaaacgtgtttcatatacagaagctattgatattttaagaaattcttctccaaataaaaaaggtaaattcaattatattatcaaagaatggggtgcagatttacaaagtgaacacgaacgttatttggtagaaaaacactttaaatgtcctgtaattttgtttgattatcc

SEQ ID NO: 302618 - DNA, 709 bp, Unknown
  Bacterial polypeptide expressing nucleotide sequence isolated from the Sargasso Sea
attgagcctgagatggctttttataatctaagtgataacatggatttagctgaaaaatttgttaaatctattttaaattttattcttaaaaactgtgaagatgatctgaattttttatcagaaagactatttaatgaagaaaaaacaaaacctcaaattgaaagaagtgaattaaatttaattgaaaaaattaagtttgtagttaagaataattttataagggtctcatattcagatgcttttgatatactaaagaattccaacaaaaacaagaaaaagaaatttgaatttattatagatgaatggggtattgatttccaaagtgaacatgaaaggtatcttgttgaaaaacattttaaatcaccagtaattatacacgactatccatcaaaaataaaagcattttatatgagattaaatgatgacaaaaaaacggttggcgcaatggatgttttattccctggaattggggaaataattggtgggtctcaaagagaagaaagacttgaagtacttaggacaagaattaaggaaagtggtatagatgaagatgagatttggtggtatttagatctgagaaagtatggttcagttccacatagcggttttggacttggatttgaacgaattgttcaattttgcacaggaatgtctaatataagggatgttataccatatcctagatcaccgaaaaatgcttccttttagt

SEQ ID NO: 302619 - DNA, 115 bp, Unknown
  Bacterial polypeptide expressing nucleotide sequence isolated from the Sargasso Sea
gcacatgctggttttggggtgggctttgaaagactaatgatgctatttacaggaatatcgaatattcgcgatgtgattccttttcccagaacacctaaatctttagaattttaac

SEQ ID NO: 302620 - DNA, 668 bp, Unknown
  Bacterial polypeptide expressing nucleotide sequence isolated from the Sargasso Sea
aatgagagttagatctagtctagcttatgcaattcatagtttttttaatgaacaaggattttactatgttaatacacctattattacctccagtgatgctgagggtgctggagagatgtttaaagtctctactttagattttgagaatattgaaagaaacaagaaaaaagaaatagattattcaaaagatttttttggcaaaaagactagtttaacagtatctggtcagcttgaagcagaaacatatgctctaggattaggaaatgtttatacttttggtccaacttttagagcagaaaactcaaatacttcaagacatttatctgaattttggatgattgagcctgagatggctttttataatcttaatgataatatggatttagctgaaaaatttgttaaatccattttaaattttattcttaaaaaatgtgaagatgatcttaattttttatcagaaagactactaaatgaagaaaaaacaaaacctcaaattgaaagaagtgaattaaatttaattgaaaaaattaagtttgtagttaagaatgattttataagggtctcatattcggatgcttttgatatacttaagaattctaataaaaacaagaaaaagaaatttgaatttataatagataaatggggtgttgatttccaaagtgaacatg

SEQ ID NO: 302621 - DNA, 804 bp, Unknown
  Bacterial polypeptide expressing nucleotide sequence isolated from the Sargasso Sea
aattcagttgaaggtactacaacgctttttggagttgattattttgagcgatctgcatacttgactcaaagtggtcaattatatcaagaggctggtgcaactgcgtttggtaaaacatattgcttcgggccatgttttcgtgctgaaaaatcaaaaacacgtcgtcatctcacagagttttggatggttgaacctgaaatggcttttgttgagcttgatgagaatatgacttgggcagaaaacttggttgggtttatcattcaaagagttctaaaaaattgtatgatggaattaaaaaccttagaaagagatatttcaatacttgaaaaaattgtaccgccttttccaagaataacatatgatgaagcaataaaaattcttaaagagaacggaaacgattttaaatatggtaatgattttggtgctccggatgagactcttctttcagagcagtttgataagcccattatgattcatcgctggccagcagaaattaaaccattttatatgaagcgtgatgagaataataacgagttggcattaggtgtagatatgattgcacctgaggggtacggtgaaatagttggtggtggtgaaagagaagatgatttagatatattgactaaaagtataagatctcatgacctaccattagaaccatttcaatggtttttagatcttcgaaagtatggttctgttcctcattcaggatttggtctcggactagagcgtgtggtagcatggatttgtggaactaaacatattagagaaacaattccttttcctagaacaatggctaggctt

SEQ ID NO: 302622 - DNA, 682 bp, Unknown
  Bacterial polypeptide expressing nucleotide sequence isolated from the Sargasso Sea
tgaaggagagctaattcagagtatgggaaaaggtcaatcagtagaagtattggtaaagtccatactcgttcatggtgaagcagatcctgatacctatccaatacaagcaaaaaaacacagcttcgaatttttaagagaaaaagcccacttaagaattagaaccaacacattcagctcagtgatgagaattcgatctatcttatcgtttgccattcatcaattttttaatcaaaaagggttttattatatccatactccaataataactggtagtgatgctgaaggagcaggtgaaatgtttcgtgtaactgttttagatccaaaaaatcctaaattaaatgaccaaggaaatgtagattttaaaaatgacttttttggaaaggaaactaatctgacagtatcagggcagcttgaagctgaaacttattctcaaggtctaggaaatgtatatacctttggtcctacttttcgtgctgaaaagtcgaatactaccagacatctagctgaattttggatgattgaaccagagatggctttttttgatttaaatcaaaacatggatctcgcagaggagtttataaaatacactctaaatcatattttagaaaagtgtaaaaaagatttaacttttttggatcagagactgattaatgaggaaaagtcaaaaccacaaaatgagaga

SEQ ID NO: 302623 - DNA, 808 bp, Unknown
  Bacterial polypeptide expressing nucleotide sequence isolated from the Sargasso Sea
attcaaggaaatttaattgaaagcatagggaaaggccaaacttttgaaattgaaattatagatatagaaattcttggagaatctgaccctgataaatatcctattcagcctaagaagcatagttttgaatttttaagagaacaagcccatttgaggataaggacctcaacatttagtgctgtgatgaggattagatcaaaacttgccttcggagttcatcaattttttaatgaaaaagggtttaactatgttcacaccccaattattacatctagtgatgctgaaggagctggggaaatgtttcaagtaacaactttaaataataatcaaaaagaaaaaaaagagattgactactctgaagatttttttggtaagaaaactagtctaacagtatcaggtcaattagaagctgagacatatgcactaggtcttggtgatgtttatacttttggaccaacatttagagctgaaaattctaatacttcaagacacgcatcagaattttggatgattgaacctgaaatggcattttatgatctaaatgataatatggacttagctgaatctttcttaaaatatgttcttaaatatataatggatacatgtaaagaagatttaaaatttcttgatgaaagacttttaaatgaacaaagtcaaaaaccaaaaaatgaaagagatgaactaaatcttatagataaaatcaactttactataaataatgaatttacaagaatttcatattctaatgcttttgaaattcttaaaaactcgaactataataaaaagaaaaaattcaattatttaatta

SEQ ID NO: 302624 - DNA, 778 bp, Unknown
  Bacterial polypeptide expressing nucleotide sequence isolated from the Sargasso Sea
aacagaagaagtattggtaaggtctggtttttgattttaagagatggaaccggctttcttcaatgcgttgtagttgatggtgagagtgattctgaaagttttaaattagaacaaaatcttaatcaagaagattctgtttccctaaatgggattgtaaaaaaagaaccaagagctgtagggggttatgaacttggagtaaatagtatatctgtcgttaatcatacttcgaataaatacccaatttcaaataaggaacatggaacagattttcttatgtcaaatagacatttatggattagatctaaaaggcagaactctattttgaggattagacatcaaattataaaatctattagagatttttttgataataatgattttattttagttgattctccggttttcactggaaatgctgttgaagggactactactttatttgaattggaatattttgaaaaaaaagcgtatttaacacaaagtggacaattataccaagaagctggggctatggcgttcggaaaatcttattgctttgggccagtttttcgagcagaaaaatctaaaactcgcagacacttaactgagttttggatggtcgaaccagaaattgcttattgtgatcttgaccagaatatggattggatcgagtctctggttatctatattacagatgaagtaataaataaatgtacattagaaataaatgttttagacagagatttagagaagttgaagtgtgtaaaaaaaccatttcctcgaattaatatgatcaggg

SEQ ID NO: 302625 - DNA, 442 bp, Unknown
  Bacterial polypeptide expressing nucleotide sequence isolated from the Sargasso Sea
agtgatgctgaggggtgctggagagatgtttaaagtctctactttagattttgaaaatattgaaagaaacaagaaaaaagaaatagattattcaaaagatttttttggcaaaaagactagtttaacggtatctggtcagcttgaagcagaaacatatgctctagggttaggaaatgtttatacttttggcccaacttttagagcagaaaactcaaatacttcaagacatttatctgaattttggatgattgagcctgagatggctttttataatctaagtgataacatggatttagctgaaaaatttgttaaatctattttaaattttattcttaaaaactgtgaagatgatctgaattttttatcagaaagactatttaatgaagaaaaaacaaaacctcaaattgaaagaagtgaattaaatttaattgaaaaaattaag

SEQ ID NO: 302626 - DNA, 472 bp, Unknown
  Bacterial polypeptide expressing nucleotide sequence isolated from the Sargasso Sea
tttggataagaacaagaatgatataaatctaattacaacgggctcatcgattgaagtctttggaaagctagttaaaagcttaggaaagggacaaaaatttgaaatcttagttgacaaattaagtgtattaggaccatccaattccgaaaattatccaattcaacccaaaaaacactcctttgaatttttgcgggagaatgctcatttaagagttagaacaaaaacaattagctctgtcattagaatcagatctgaaatttcttatgcgatacataaattttttaatgataatgggtttttttacattcatacaccaataataactggatctgatgcagagggtgctggagaaatgtttagcgtaagtacactagataaaagtcatatccctcagagtcctgatggatcaattgatttttcaaaagatttttttggtaaagaaacacatttaactgtttcaggtcagcttgaa

SEQ ID NO: 302627 - DNA, 622 bp, Unknown
  Bacterial polypeptide expressing nucleotide sequence isolated from the Sargasso Sea
catgacgcatgcgcccgtagttgacgtacttaaaggtaagtacgccgttggcgaatcggtaaccgtaaagggttgggtaagaacacgccgcgactctaaagcggggttatcatttattgcactacacgacggtagttgcttcgatcctgtacaagttattgcgctaaattctctgtcaaattatgccgatatccagcgcttaacagcaggctgctcattatcggttaccggtacagtgaaagagtctcagggccaaggccaagccgttgaaattgacgcgactgacgttgaagttttaggttgggtagaaaaccctgatacctacccaatggccgctaaacgccacagcattgagtatcttcgcgaatatgcacaccttcgcccacgcactaacgttatcggcgcggtaactcgcgttcgcaactgtttgtcgcaggctattcatcgctttttccatgagaaaggttatttctggatctctacgcctattctaacggcaagcgatacagaaggtgcaggtgaaatgttccgcgtatcaacccttgatatgatgaatcttccacgcgacgacaaaggcaatgttgactactcagaagatttcttcggcaaagaaacctacctt

SEQ ID NO: 302628 - DNA, 613 bp, Unknown
  Bacterial polypeptide expressing nucleotide sequence isolated from the Sargasso Sea
gcatactgtgatttagaagaaaatatggaatgggcagagaaacacgttagttatgttgttcaatggtgtttagagcattgccaggaagaattaaaagtgctggagcgagatatttcatctttagaaaaagttataccaccatttcctagaattacatatgatgaggctgctaagattcttaaagataaaggcgctgattttcaatatggttctgactttggaggaactgatgaaactattatatctgaagagtttgatcgtccagttatgatccatcgttggccagctgagattaaagctttttatatgaaaagagaccctgagaatgaagacttagctttgggcgttgatatgatagctcctgaaggatttggtgagatcattggaggcggacaaagagaagatgatcatgataagctactaaagcgaattaatgaacatgaacttcctgttgaaccgtttcaatggtaccttgatctaaggaagtatggatcggtacctcattcaggatttggtttgggaattgaaagaactgtaggatggatttgtggaacgaaacatgttcgtgaaacaatcccttatcctcgtactatgcataggatagaaccttaat

SEQ ID NO: 302629 - DNA, 665 bp, Unknown
  Bacterial polypeptide expressing nucleotide sequence isolated from the Sargasso Sea
gctggaaaattatgaggaaatttccagactcagaaccggtgctgcattggaagtctggggaactctggtcgagtcccagggacgtggacaggatttcgaggtgcaatccgaacagatcctgattcggggaacggctcccggagaggaataccctctgcagaaaaaaggacataccctcgaatttctcagggacatcgcacaccttcgtccacggaccaacaccttaggagcggtgttccgtatccgaaatacgctcagccaggcgattcatcgatttttccaggataggggtttcctttacgtccacaccccgatcatcaccgcgaatgatgccgaaggggcaggtgaaatgtttcacgttacctcccttgatctggaacagcttccaaaaaccaaggctggaaaggttgattatgatcaggattttttcggaaccgatgtcagtctgaccgtttcagggcaattgggtgctgaggtattcgccttggccttcaccaatgtttataccttcggacctaccttccgtgccgagaactccaacacagcccgtcatctggcagaattctggatgatcgaaccggaaatggctttcatggaccttcagggcatgttggtccttaccgaagaattcctgcgtgaactgctgaaagaatgcctcgaccggc

SEQ ID NO: 302630 - DNA, 877 bp, Unknown
  Bacterial polypeptide expressing nucleotide sequence isolated from the Sargasso Sea
agggtgtgtaaggcagaaccacgatcagtaggaggatatgagcttggtgtaaaaaaaataacagttcatcaaatagcggacgaataccctatatctcacaaagagcatggtgcagattttctaatgagtaataggcatttatggcttagatcaaaaaatcagaatgcgattctaaaagtaagacatcaggtaataaaagctacacgtgatttttttgatgacaacgggtttactcttatggattctccaattttaacagcaaactcagtcgaggggacaagtacactttttgagctagattattttgatcgatcagcttatttaacccagagcggacagttgtatggagaggcgagtgccatggcatttggaaaaatttatgtttttggccccacttttagagcggaaaaatcaaaaacaagaagacatttaacagaattttggatggttgaaccggagatggcatattgtgatttggatgaaaacatggattgggccgaaaagcatgtaagctatgttattcaatggtgtcttgagcactgtaaagaagaattaaaaattttagaaagagataccggtaagcttgaaaaatcaattcctccatttccacgaattacctacgatgaagcggtagatattttaaaaaagcgtggagttgattttaaatacggtagtgattttggagcagcagatgaaactgcaatttcagaagaatttgatcgccctgtaatgattcatcgttggccatcagagataaaagcattttatatgaaacgagatactgaaaatgacaaactagctcttggtgtggatatgattgcacctgaaggatttggtgaaattgttggcggaggtcaaagagaagatgatcatgata

SEQ ID NO: 302631 - DNA, 488 bp, Unknown
  Bacterial polypeptide expressing nucleotide sequence isolated from the Sargasso Sea
aataagttatacagaagcttttgatattcttaagaactgtaagccaaatagaaagggtaaatttaaatatccagttaatgattggggtattgatttccaaagtgaacatgaaagatttttagtagaaaaacactttaaatgtcctgttgtagtttatgactatcctgcaaaaataaaagcattttacatgagacttaatgatgataagaaaacagtgagagctatggatattttatttcctggaataggtgaaattgttggtggttctcagagggaggaaagattagatgtcttaaaagaccgaattaaatctatggatattgatgagaaagaactttggtggtatttggatctaagaaaatttggctcagttaagcacagtggatttggacttggattggagaggcttattttatttataactgggatgggtaatattagagatgtaattcccttcccaagaacacctaaaaacgcagatttttaaa

SEQ ID NO: 302632 - DNA, 826 bp, Unknown
  Bacterial polypeptide expressing nucleotide sequence isolated from the Sargasso Sea
tctggaaacctatcgaatcgcaaatctaggacaaagcctactcaaccggaaaatccacctcaggggttgggtacggacccgcaggggatcgaagggattcagtttcatccagcttaatgacggcagtaatctcaatggtctccagatcattgccgatgagaagctggaaaattatgaggaaatttccaaactcagtactggtgctgcattggaagtctggggaactctggtcgagtcccagggacgtggacaggatttcgaggtgcaatccgaacagatcctgattcggggaacggctcccggagaagaataccctctgcagaaaaaaggacacacccttgaatttctcagggatatcgcacaccttcgtccacggaccaacaccttaggagcggtattccgtatccgaaatacgctcagccaggcgattcatcgatttttccaggataggggtttcctttacgtccacaccccgatcatcaccgcgaatgatgcggaaggggcaggtgaaatgttccacgttacctcccttgatctggaacagcttccaaaaaacaaggctggaaaggtcgattatgaccaggattttttcggaaccgatgtcagtctgaccgtttccgggcaattgggtgctgaggtattcgccttggctttcaccaatgtttataccttcgggccgacgttccgtgccgagaactccaacacagcccgccatctagcagaattctggatgatcgaaccagaaatggctttcatagaccttcggggcatgttggtcctgaccgaagaattcctgcgtgaactgcttaaagaatgccttgaccgg

SEQ ID NO: 302633 - DNA, 871 bp, Unknown
  Bacterial polypeptide expressing nucleotide sequence isolated from the Sargasso Sea
ttcaatctagaacaagaattaaatcaagaagattccgttattgtaaagggtaaagtaaaaaaagaaccgcgcgctattggcggatatgaattaggtgtcagtgaggtatgtgtgattaatcatacaacagaagaatatccaatatcaaaaaaagatcatggagctgattttttaatgtcaaatagacatctatggttgagatcaaagaggcagaattctataatgagagtccgacatcaaattgtaaaggctatacgagattattttgatgataatgggtttacactaattgactcacctattttcactggcaattcagttgagggaactacaacactctttggtgttgattattttgagcgctctgcatatctaactcaaagtggtcaactatatcaggaagctggtgcaacagcatttgggaaaacatattgttttggtccttgttttcgtgctgaaaaatcaaaaacgcgtcgccatcttacagagttctggatggttgagcctgaaatggctttcgttgagcttgatgaaaatatgacgtgggcagaaaatttagttggatttattatccaaagagttctagataattgtaaaattgagttagaaaccttggaaagaaatattgtagcactcgaaaatattgtgccaccatttccaagaataacatacgatcaggcagtgaaaattctcaaagagaatggaagtgattttgaatatggaaacgattttggtgctcctgatgaaactgttctctcatcgcagtttgacaaaccaattatgattcatcgttggccagcaaacattaaaccattttacatgaaacgagataaagataataatgagttagctttgggagtggatatgattg

SEQ ID NO: 302634 - DNA, 722 bp, Unknown
  Bacterial polypeptide expressing nucleotide sequence isolated from the Sargasso Sea
agaatttttgatgattgagccagaaatggctttttatgacctaaatgataatatggatttagctgaatcatttgtaaagtatattttaaaatatatattaacagagtgtgaggaagatttgagattccttgaagagagacttttaaaagaggaaagtcaaaagccacaaaatgagaggagtaatttgagtctaattgaaaagattaagtttactgtaaataatgaatttactcgtgtttcatatacagaggcatttgaaatactaaaaagctccaattataaccaaaagaaaaagtttaaatacctattagataattggggttccgatcttcaaagtgagcatgagagatttctagttgaaaagcattttaaatctcctgtaattatttatgattatccttcaaaaattaaagcattttatatgaggttaaatgaagatggtaaaacagttagagcgatggacgtattattcccaggtattggtgagataataggaggctctcaaagagaggaaagattagatatactcaaaaaaagaatgtctgacatgggtattgacgataaggaattgtggtggtacatagatctcagaaaatatggaactgttcctcacagtggatttggactaggttttgaaagaatggtaatgttttgtaccggtatgtcaaacataagagatgtaattccttatccgaggacaccaaaaaatgcatctttttaat

SEQ ID NO: 302635 - DNA, 928 bp, Unknown
  Bacterial polypeptide expressing nucleotide sequence isolated from the Sargasso Sea
catagctttgagtacctgaggagcgtcgctcacctgaggcctcgcaccaacacattcggggctatcgccagaataaggacgactctagcgaaagctattcacgactatttttttgataacgggtttcactggataaatacaccgctaatcaccgcgagcgattgcgaaggcgccggggaattgttccgggtcagcacgctcgatctgacgaacctgccagtgaaagatggcgccattgatttttctcaagacttttttgcagcagaatctttcctcacagtgtcggggcagttaaatgtagaggcatattgtctcgccatgtcaaaggtctatacatttgggcctacgtttagagccgagaattcgaatacctctcgacacttggctgaattctggatggtagagccagagatcgcatttgcgaatctagacgacaacgcagatcttgccgaagatctgttaactcacgcaataaaagaggtcctggaaaaaagggaagatgatgtaaccttttttaatcaacacattgacgacactgtgatcaacagaatgcgctctatcatcgacaacaaatttgaacgaatggagtacagtgaagccattaagatcctcaggcaaagcgcagtatcatttgaatttcccgtagaatggggtctagaccttcaatcagaacacgaacgttaccttaccgacaagcacattggtcggcccgtcattgtgttgaactaccccgctgaaatcaaagctttctatatgcgtctaaatgacgacgagaaaaccgtcgccgccatggacgtactagcacccggtattggagagattattggcggcagtcagcgagaggagcggctcgatgtaatggataaccggatgaacgacgaagccatgaagaaagaactatggtggtatcgtgatctgagaagatagg

SEQ ID NO: 302636 - DNA, 752 bp, Unknown
  Bacterial polypeptide expressing nucleotide sequence isolated from the Sargasso Sea
tgtgcgtaaagaacctaggtcaattggcggctttgaattgggaattaaagaaattaaagttgtcaaacatgttactgatgaatttcctatatctcataaagaacatggtgcagattttttaatgtcaaatcggcacctttggcttagatctaaacgacaaaatgcaattatgcgagtaagacatcaggttactaaagcaattagagatttttttgataacaatggttttactcttattgattctcctatttttactggtaatgctgtggaagggaccacaaccttatttgaggtagattattttgagcgttctgcgtatttgacacaaagcgggcagttgtaccaagaagcaggggcaacggcttttggtaaaacatattgttttggccccacatttcgtgctgagaaatcaaaaacacgtcgtcaccttactgagttttggatggtggaacctgaaatggcatatgttgatattgatgagaacatgacctgggcagaaaatttagtaggatacattgtagaacgtgttttagataattgtagtactgaattatcattgttagaacgagatacagataaattaaaagcagttattcctccatttcctagaatcacatatgatgaagcagtgaaactattaaatgataatggaagtgattttcagtatggaagtgattttggcgcgccagatgaaacattattatctgaaaagtttgataaaccttattatgattcatcgttggccttctgat

SEQ ID NO: 302637 - DNA, 760 bp, Unknown
  Bacterial polypeptide expressing nucleotide sequence isolated from the Sargasso Sea
aatgaaaaaaaatgtaagaatttcagatttaaaaaatcatattggagaaaaagtaacgttaaatggctgggtttataataaaagatcaagcggaaaaatttggtttataattattagggatggaactggttatactcaaggtgtaataataaaagaaaatgtgtcagatgaagttttcaatctcgagcaagcaattactatagaatcatctatttctatatcaggaatagttaaaaaggataaaagaagtgttgggggatatgaattagatataaccaatattaaagtgattcaaatttctgaagattatccaattagtaaaaaggagcatggtacagcattcctaatggataataggcatttgtggattcgttctaaaagacaaaatgcaatattgaagataagatctcaagtcactaaatctattcgagattattttgatagcaatggttttttcaatcttgataccccaatttttacatctaatgtttgtgaaggtacgaccacacttttcaaaaccgactattttggtcaaaaagcttttttatctcaaagtggccaactctataatgaagctaatattatgtcttttggaaaagtttattcctttgggccaacctttagggcagaaaaatcaaaaactagaagacatttaactgaattttggatggttgaaccagaaatagcattttgtaatttggaagaaaatatgaattggggagagggattaatttgtcatatagtaaaatgggttctagaa

SEQ ID NO: 302638 - DNA, 421 bp, Unknown
  Bacterial polypeptide expressing nucleotide sequence isolated from the Sargasso Sea
tgattaccctgtggaatggggtgtggatttacagtctgaacacgagcgttacttagctgaagtgcacgtaggtgctcctgtcattctgcaaaactatccaaaagacatcaaagccttttacatgcggatgaatgaagatggtaaaactgtggccgctatggatattctggcgcctggtattggtgaaattatcggtggcagccaacgtgaagagcgtttagagcagttggatgcgcgtatggatcagatgggtctgaataaagaagactacagctggtatcgcgacctgcgccgttacggcacagtacctcatgctggttttggtttaggttttgagcgtctggtgtcttatgtgactggtgtgggcaacgtccgtgacgtcattgccttccctcgtacaccgggaaatgctgatttctaa

SEQ ID NO: 302639 - DNA, 473 bp, Unknown
  Bacterial polypeptide expressing nucleotide sequence isolated from the Sargasso Sea
atttccaagaataacatatgatgaagctgtagatattctaaaaaaacgcggtattgattttaaatacggcagcgatcttggaggaggggatgaaactttaatttcagaagaatttgataaacctgtgatgattcatcgatggccttcagatattaaagcgttttacatgaaaagagataaagaaaatgacaaattagcacttggtgtagatatgattgcacctgagggatttggtgagattgtaggcggaggtcaaagagaagacgatcatgatacactgctttcaagaattaaagaacataaattacctatcgagccatttcagtggtatttagaccttagaaagtacggatctgtgccgcactcgggttatgggttgggaattgagaggacggtgggttggatttgtggaacaaaacacgtgagagaaaccattccatatcctcgaactatttatagaatagagccttaaa

SEQ ID NO: 302640 - DNA, 903 bp, Unknown
  Bacterial polypeptide expressing nucleotide sequence isolated from the Sargasso Sea
cacaccttcgtcacgaaccaacaccttaggagcggtgttccgtatccgaaatacgctcagccaggcgattcatcgatttttccaggataggggtttcctttacgtccacaccccgatcatcaccgcgaatgatgcggaaggggcaggtgaaatgttccacgtcacctcccttgatcttgaacagcttcctaaaaccaaggctggaaaggttgattatgaccaggattttttcggaaccgatgtcagtctgaccgtttccgggcaattgggtgctgaggtattcgccttggccttcaccaatgtttataccttcgggccgaccttccgtgctgagaactccaacacagcccgtcacctggcagaattctggatgatcgaaccggaaatggctttcatggaccttcaaggcatgttggtcttgactgaagaattcctgcgtaaacttctgaaagaatgccttgaccagcatgaagatgatctggccttcctgcagaagatgtatgataaagaactcatttccggactgaaacacatttgtgatactccttttgaaaccctgacctatactgaagcggtaaagatcctcgaggactccgggaaaagttttgaatttccagtggaatggggatgcgatctccagtccgagcatgaacgttatctgagcgaagtgcatgtgggaggacccctcaacctcatcgactacccaaaggacatcaaagctttttacatgaagcagaacccggatgaaaaaacggtcgcagccatggatgtcctctttccacgcctgggagaaatcgttggaggttcacaacgtgaggatgatggtgagtccctgctgcatttgatgcgtgaaaaagggcttccagaagaaacctaccagtggtacctggaactcaggcgttt

SEQ ID NO: 302641 - DNA, 934 bp, Unknown
  Bacterial polypeptide expressing nucleotide sequence isolated from the Sargasso Sea
gaaatgtttagtgtagtttctcttgataagactaaaataccactcgatgatgatggttcaatagatttttcaaaagatttttttggtaaggaaacgcacctgactgtttctggtcaacttgaggctgaggcattagctatgggcttaagtaaagtttatacttttgggcctacttttagagctgaaaattcaaatacctcgagacaccttgctgaattctggatgattgaacctgagatggctttttgcgatctagcagagaatattaatcttgcagaaaagttcattaaatatattataaaacacacttatgataagtgtaaaaatgatattgaatttctcgatgaaagattaacaaaagaagaaatgaatctacctaaagtcaaaagaagtgaattatcgctgaaagaaaaaatagagtttgttatcaataatgatttcgtaaagttaagctacagtgaggcatttgatattctcaaaaattgtaagcttaataaaaagaataagtttacttataaaattgagaattggggttgtgatttacaaagtgaacacgagagatttctagtcgaaaaacacttcaaatgtcctgtggtagtttatgactatcctgcaaaaattaaagcattttatatgaggctcaatgaagatggtaaaactgttagagcaatggatattttgtttccaggaattggtgagattgtaggaggatcacaaagagaagaaagactagatgtacttgaaaaaagaattgaagaattagatattgatgatgaagagttatggtggtatttggacctgagaaagtatggttctgttaaacacagtggttttggcttaggtttagaaagattgattctttttattactggaatgaataacattagagatgttattcctttcccaagaacaccaaagaatgctgatttctaaa

SEQ ID NO: 302642 - DNA, 745 bp, Unknown
  Bacterial polypeptide expressing nucleotide sequence isolated from the Sargasso Sea
tcaaatacttcaaggcatttgtctgaattttggatgatagagcctgaaatggctttttataacctaaatgataatatggatttagctgaatcgtttgttaagtcaatcttaaattttattctaaaaaactgtaaagatgatcttaattttttatctgaaagacttttaaatgaggagaaaacaaaacctcaaaatgaaagaagtgaactaaatttaattgaaaaaattcagtttgtaattgataatgattttgtaagaatttcatattcagatgcttttgaaattttaaaaaattcaaataaaaacaaaaaaaagaaatttgaatttattttagaaaattggggtattgactttcaaagtgaacatgaaagataccttgttgaacaacattttaaatcacctgtaattatatatgactatccctcaaaaataaaagcattttatatgaggttaaatgacgataaaaaaacagttagagcaatggatgttttatttccaggaattggagaaatcattggtggctcgcaaagagaagagagactcgacgttctcagaaaaaggattaaagaatgtgcaatagatgaagatgagatatggtggtatctagatttaagaagatatggatcagttccacatagtggttttgggcttggatttgaaagaattgttcagttttgtactggaatgtcaaatattagagatgttatcccatatcctagatctccaaaaaacgcatcattctagt

SEQ ID NO: 302643 - DNA, 664 bp, Unknown
  Bacterial polypeptide expressing nucleotide sequence isolated from the Sargasso Sea
aatgacagtcagtcaatcggaaacatatcgaatcggagatctcggacaaagtctactcaaccggaaaatccacctcaggggttgggtgcgaacccgccggggatccaagggattcagtttcatccagcttaatgacgggagtaatctctcaggtctccagatcattgccgatgagaagctggaaaattatgaggaaatttccaaactcagtgctggtgctgcattggaagtctggggaactctggtcgagtcccagggacgtgggcaggacttcgagctacaatccgaacagatcctgattcggggaacggctcctggggaagaataccctctgcagaaaaaaggacacacccttgaattcctcagggacatcgcacaccttcgtccacggactaacaccttaggagcggtgttccgtatccgaaatacgctcagccaggcgattcatcgatttttccaggataggggtttcctttacgtccacaccccgatcatcaccgcgaatgatgccgaaggggcaggtgaaatgtttcacgttacctcccttgatctggaacagcttccaaaaaacaaggctggaaaggtcgattatgaccaggattttttcggaaccaatgtcagtctgaccgtttccgggcaattgggtgctgaggtattcgccttg

SEQ ID NO: 302644 - DNA, 799 bp, Unknown
  Bacterial polypeptide expressing nucleotide sequence isolated from the Sargasso Sea
gcgcttggccttggcaatgtatatacttttggaccctcatttagagctgaaaattcaaatacttccagacatgcatcagaattttggatgattgaacctgaaatggcattttatgacctaaatgataatatgaacttagctgagtctttcttaaaatacattcttgagtttatgataagttcatgtaaagaagatctcaaatttcttaatgaaaggctatccaaagaacaaattcaaaaacccaaaaatgagagggacgagatgacccttctagaaaaaataaaatttacgattgataataaatttgttaggattacatactctgatgcttttgaaattcttaaaaactcaaactataataaaaagaaaaaatttaattttttaatagatgaatggggttctgattttcaaagtgaacatgagagatttcttgttgagaaacactttaaatctcctgtaattatatatgactatccatctaaaattaaggcattttatatgaggcttaatgatgataagaaaacagtaagggcgatggacgttttgtttccaggaattggtgaaataattggaggatctcaaagagaagaaaggcttgatatactaatgaaaaggataaatgaaatgggtattgatgaaaaagaattgtggtggtatattgacctgagaaaatatggtacagttccacatagtggatttggtctcggatttgaaagactagttatgttttgcactggaatgcaaaatataagggatgtaataccttatccccgaacacccaaaaatgcttcattctgat

SEQ ID NO: 302645 - DNA, 307 bp, Unknown
  Bacterial polypeptide expressing nucleotide sequence isolated from the Sargasso Sea
tatgaaaagagaccctgaaaatgataaattggctctaggcgttgatatgatagcgcctgaaggatttggtgagattattgggggtgggcagcgagaggatgatcatgataccttattaaaacgaatcaaagaacatgaactccctgttgaaccatttcagtggtatctagatcttagaaagtatggttctgtaccacattcaggttttggtttaggtctagaacgtactgttggttggatatgtggaacgaagcatatcagagaaacaattccatatccaagaacaatgtatcggattgaaccatag

SEQ ID NO: 302646 - DNA, 382 bp, Unknown
  Bacterial polypeptide expressing nucleotide sequence isolated from the Sargasso Sea
gacgaaaccgtactaatgatgcagtacgatgtaccgttgatcgtgactcattggcctgctgaaattaaagctttttatatgaagcgtgatgaaactaatacgctggctcttggaatggatgtacttgctccagaaggttatggagagattattggtggttcacaacgtgaggatgatttaaatctcatgcacgaacggatagaagaagaagggctagacaaagaagtgtttgagtggtataacgatcttagaaaatttggaaccgtacctcactctggttacggacttggtttagaacgaaccgttgcctggatttgtggattatctcatgttagagagacgatcccattcccgagaatgatgggtaggttgaagccataat

SEQ ID NO: 302647 - DNA, 950 bp, Unknown
  Bacterial polypeptide expressing nucleotide sequence isolated from the Sargasso Sea
tggtttttaattttgagagacggaacagggttattacagtgtgtagtagttgatggagaatgtgatttagaaagttttcaattagagcaaaatttgaatcaggaagattctgtcagtgtgactggtgttgtaaaaaaagaacctagagctgtaggaggttttgaacttggagtaaaaaatataaacgtcataaatcacacttcgaatgaatatcctatatcaaacaaagagcatgggacagattttttgatgtcgaacagacatttatggataagatctaaaaggcaaaattcaatacttagagtaagacatcaaatcattaaatcaataagagatttttttgataataatgattttattttagttgactctcctatttttactggcaatgctgtagagggaacaactacattatttgaacttgaatactttgaaaagaaggcttacttaacacaaagtggtcagctgtatcaagaagcaggggctatggcttttggcaaatcatattgttttgggccagtatttagagctgaaaaatctaaaactcgtcgtcacctcactgagttctggatggttgagcctgaaatgtcatattgtgaccttaatcaaaatatggattggatggaatcactagttacttacataattgatgaggtccttaagcattgtcaaagcgagttaaatatattagagagaaatatagataaattagaagctgtaaaatccccttttccaaggattacatatgatgaggcagtggatatattaaaacaaaataatattgattttacatatggcaaggattttggcgcatctgatgaaacgaccatatctaaccagtatgatagtcctgttatgattcacagttggccagctgatactaaagcattttatatgaaaagagatgaaatagataataatttagctttaggagtagatatgattgcgcc

SEQ ID NO: 302648 - DNA, 517 bp, Unknown
  Bacterial polypeptide expressing nucleotide sequence isolated from the Sargasso Sea
aatgagcattgcatcggtcgcttctgtatttaaaggtgagcacgcagttggttcgacagtcacagtccgtggctgggtcagaacccgtcgtgactctaaagctggcatctcttttttagctgtctatgacggctcctgctttaatcctattcaaggtgttgtgccaaatagcttagaaaattacgacaacgaagtgttaaagctgacagctggctgctctgtgatcgtaaccggtgagattgttgaatctcctggcgctggccaagcctatgagctgcaagttactcacgttgaagtcactggttgggttgaagatcccgacacttaccctatggcggctaagcgtcactcaatcgagcatttacgcgaattggcgcacttacgcccacgtaccaacatcattggtgccgttgcccgcgtacgtaactgtttgtctcaagcgattcaccgtttctaccacgaaaacggtttcgtgtgggtgtctacaccgctgatcaccgcatcagactgtgaaggc

SEQ ID NO: 302649 - DNA, 813 bp, Unknown
  Bacterial polypeptide expressing nucleotide sequence isolated from the Sargasso Sea
agaacatggtgctgattttttgatgagcaataggcatctttggttaagatcgaagaaccagaatgcaatattgaaaattagacatcaagtgataaaagctacgcgtgacttttttgataataatggatttgttttaatggactccccaattttaaccgcaaattctgttgagggtacgagcacactatttgaactggattattttgatcgctctgcctatttaactcagagcggacagctttatggagaggcaagcgcaatggcgtttggaaaaatttatgtttttggaccaacatttcgcgctgaaaaatcaaaaaccagaaggcatttaactgaattttggatggtagaaccagaaatggcgtattgtgatttaagcgagaatatggaatgggctgaaaaacatgttagctatgtagttcagtggtgtcttgaaaattgtcaagaagagttaaaaattcttgaacgagatacaagcatactagaaaaaactgttcccccgtttcctcgaatcacctatgatgacgctgttgatatattaaaaaaacagggtgttgacttcaagtatggtagtgattttggagggacagatgaaactgttatttctgaagaatttgatcgcccggtaatgattcatcgatggccatctgatatcaaggcattctatatgaaacgtgaccctgaaaatgataaactagctcttgggattgatatgatagctcctgaagggtttggagagattgtgggtggaggtcaacgagaagatgatcatgatacactattatcaagaatcaaagcgcataaattacctat

SEQ ID NO: 302650 - DNA, 460 bp, Unknown
  Bacterial polypeptide expressing nucleotide sequence isolated from the Sargasso Sea
cttaagaactgtaagccaaataagaagggtaaatttaaatatccagttaatgattggggtattgatttccaaagtgaacatgaaagatttttagtagaaaaacactttaaatgtcctgttgtagtttatgactatcctgcaaaaataaaagcattttacatgagactcaatgatgataagaaaacagtgagagctatggatattttatttcctggaataggtgaaattgttggtgggtctcagagggaggaaagattagatgtcttaaaagaccgaattaaatctatggatattgatgagaaagaactttggtggtatttggatctaagaaaatttggctcagttaaacacagtggatttggacttggattggagaggcttattttatttataactgggatgggtaatattagagatgtaattcccttcccaagaacacctaaaaacgcagatttttaaa

SEQ ID NO: 302651 - DNA, 537 bp, Unknown
  Bacterial polypeptide expressing nucleotide sequence isolated from the Sargasso Sea
cccagcacgtggacaaggacgccatcggtcgtctggagcgcttcgtcgcctccgacttcgcccagattgactacaccgatgccattgaagtgctgaagaactgcggcaagagcttcgagttcccggtctcctggggtatcgacctctcctccgagcacgagcgctacctggccgaagagcacttcaagtccccggtggtggtgaagaactacccgaaagacatcaaggccttctacatgcgcctcaacgacgacggcaagaccgtcgccgccatggacgtactggccccgggcatcggcgagatcatcggtggctcccagcgtgaagagcgtctggacgtgctggatgcccgtctggccgaaatgggtctgaacaaggaagactactggtggtatcgcgacctgcgccgctacggtaccgtgccgcactccggtttcggtctgggcttcgagcgcctggtggtttacgtgaccggcatgggcaacgtccgcgacgtgatccccttcccgcgcaccccgcgcaccgccgagttctgat

SEQ ID NO: 302652 - DNA, 907 bp, Unknown
  Bacterial polypeptide expressing nucleotide sequence isolated from the Sargasso Sea
gaacaagctcatcttaggatacgaacttcgacatttagctctgtaatgagaatcagatcaaaattagcttttagtattcatgactattttaacaaaaatggtttcaattatatacatactccaattataacatcaagtgatgctgagggagctggagaaatgtttaaggtaaccacattaggaaaagacgatctggaaaaaaaagatattgactattcagatgatttttttggcaaaaaaactagccttacagtctcagggcagctagaagcagaaacctatgctcttggcctagggaatgtttatacatttgggccaacttttagagcagaaaattccaatacttccagacatgcttcagaattttggatgattgagccagagatggccttttatgatctcaatgataacatggatttagctgaatcatttgtaaagtatattctaaaatatattttaaaaaattgtgaggaagatttaaaatttcttgaagaaagacttttaaaagaggaaagtcaaaaaccaaaaaatgaaaggagtgatttaaggctaatcgataagatcaagtttactgtgaataatgaatttactcgtgtttcatacacagaggcatttgaaatactaaaaaaatccaattataacaaaaagaaaaagtttaaattcttattagataattggggttccgatcttcaaagtgagcatgagagatttctggttgaaaagcattttaagtctcctgtaattatttatgattatccctcaaaaattaaagcgttttatatgagattaaatgatgatgataaaactgttagagcaatggatgttctatttccaggtattggtgaaataataggaggttcccaaagagaagaaagactagatgtactcaaaaaaaagaatgtctgaa

SEQ ID NO: 302653 - DNA, 660 bp, Unknown
  Bacterial polypeptide expressing nucleotide sequence isolated from the Sargasso Sea
ctgaaaaatttgttaaatccattttaaattttattcttaaaaactgtcaggatgatctcaattttttatcagaaagactattaaatgaagaaaaaacaaaacctcaaattgaaagaagtgaattaaatttaattgaaaaaattaagtttgtagttaagaataattttataagggtctcctattcagatgcttttgatatactcaagaattctaacaaaaacaagaaaaagaaatttgaatttataatagatgaatggggtgttgatttccaaagtgaacatgaaaggtatcttgttgaaaaacattttaaatcaccagtaattatacacgactatccgtcaaagataaaagcattttatatgagattaaatgaagacaaaaaaacggttggcgcaatggatgttttattccctggaattggagaaataattggtggatctcaaagagaagaaagacttgaagtacttaagaagagaattaaggaaagtggaatagatgaagatgagatttggtggtatttagatctgagaaagtatggttcagtgccacatagcggttttggacttggatttgaacgaattgttcaattttgcacaggaatgtctaatataagggatgttataccatatcctagatcaccgaaaaatgcttccttttagt

SEQ ID NO: 302654 - DNA, 697 bp, Unknown
  Bacterial polypeptide expressing nucleotide sequence isolated from the Sargasso Sea
aatggcattttatgacattgacgataatatggatttagctgaagaaatgctaaaatttattattaagtatgttcttgataattgtaattctgatttaatgtttcttgaaaatttggagttagattccgaaaagaatttacctcaaattaaaagaaatgaaaatcctcttatatatagattaaaagaagttattaaaaataaatttacaagagtaaaatatgacgaggcttttcaaatattaagaaattccaagccaaataagaggggcaaatttaatttcaaaattgatgaatggggtattgattttcagtcagagcacgaacggtatttagtagaaaagcattttaaaaatcctgtaatagtaagcgattatcctaaaaaaattaaagcattttacatgagatcaaatgatgataataaaacagttgcagctatggatgtattattccctgctgttggtgaaattattggtggttctcaaagagaagaaaggctagatatgttggaaagtagaatggaggaaatgaatatatcaaaaaaagaactttcatggtatctagatacaagaaggtttgggactgtaaagcactctggttttggccttggactcgaaagactaattcaatttattacaggtatgaaaaatataagagacgtaattccttttccaagaactccaggaaattgtaattattaa

SEQ ID NO: 302655 - DNA, 907 bp, Unknown
  Bacterial polypeptide expressing nucleotide sequence isolated from the Sargasso Sea
tgaggaaatttccaaactcagtactggtgctgcattggaagtctggggaactctggtcgagtcccagggacgtggacaggatttcgagctgcaatccgaacagatcctgattcggggaacggctcccggagaggaatatcctctgcagaaaaaaggacacacccttgaatttctcagagatatcgcacaccttcgtccacggaccaacaccctaggagcggtgttccgtatccgaaatacgctcagccaggcgattcatcgatttttccaggataggggttttctttacgtccacaccccgatcatcaccgcgaatgatgccgaaggggcaggtgaaatgttccacgttacctcccttgatctggaacagcttccaaaaaacaaggctggaaaggttgattatgatcaggattttttcggaaccgatgtcagtctgaccgtttccgggcaattgggtgctgaggtattcgccttggccttcaccaatgtttataccttcgggccgacgtttcgtgccgagaactccaacacagcccgccacctggcagaattttggatgatcgaacccgaaatggctttcatggaccttcagggcatgctggtcctgaccgaagaattcctgcgtgaactacttaaagaatgcctcgatcggcatgaagaggatctggccttcctgcagaagatgtatgatcaagaactcatttccggactgaaacatatttgtgatactccttttgaaaccctgacctatactgaagcggtaaagatcctcgtggaatctgggaaaagttttgaatttccagtggaatggggatgcgatctccagtccgagcatgaacgttatctgagcgaagtccatgtgggaggacccctcaacctcatcgactacccaaaggacatcaaagct

SEQ ID NO: 302656 - DNA, 859 bp, Unknown
  Bacterial polypeptide expressing nucleotide sequence isolated from the Sargasso Sea
tgataataatgattttattttagttgattctcctatttttactggcaatgctgtagagggtacaactaccttatttgaacttgaatactttgaaaagaaggcttacttaacacaaagtgggcagctgtatcaagaagcaggtgctatggcttttggtaaatcatattgctttgggccagtatttagagctgaaaaatctaaaactcgtcgtcatctcaccgagttttggatggttgaacctgaaatgtcatattgtgaccttaatgaaaatatggattggatggagtcattagttacttacataatcggtgaggtcctcaagcattgtaaaagcgagttaaatgtattagagagaaatatagataaattaaaagctgtaaaatccccttttcctaggattacatatgatgaggcagtaaatatattaaaacaaaatagtattgattttacatatggcaaggattttggcgcatctgatgaaacggtcatatctaaccaatatgatagtcctgttatgatccacagttggccagctgatactaaagcattctacatgaagagggacgaaataaataatgaattagctttgggagtagacatgattgcaccagagggttatggtgaaatagttggtggtggtcaaagggaagataatatagatgtattaattgaaacaataaggcatcatgatctcccattaaagccttttgagtggtatttagatttaagaaaatatggttctgttccacactccggtttcggacttggtttagagagatttgtagcatgggtatgtggtacaaaacatattagagagaccattcctttccctagaaccatggcaaggttagagccatag

SEQ ID NO: 302657 - DNA, 496 bp, Unknown
  Bacterial polypeptide expressing nucleotide sequence isolated from the Sargasso Sea
ctcgctagaaaatcaattccaccatttccaagaataacgtatgatgaagctgtagaaattttaaaaaaacgcggtattgattttaaatatggcagtgattttggaggaggagatgaaactataatttcagaagaatttgatcgacctgtgatgattcaccgatggccgtcagatattaaagccttttacatgaaaagagataaagaaaatcataaattagctcttggtgtagatatgattgcacctgagggatttggtgagattgtaggtggaggtcaaagagaagacgatcatgatacattgctttcaagaatcaaagaacataaattacctattgagccatttcagtggtacttagaccttagaaagtatggatctgtgccccactcaggctatggattgggtattgagaggacagtgggttggatttgcggaacaaaacacgtgagagaaactattccataccctcgaactatttatagaatagagccttaaa

SEQ ID NO: 302658 - DNA, 815 bp, Unknown
  Bacterial polypeptide expressing nucleotide sequence isolated from the Sargasso Sea
catgaaaacacttgagatcagacaggttctcacggatcgagcttggcaagctgatcaccttaacgagcacattcgcgtaactggatgggtgcgaagcagcagacactccaaggcgggcattagttttatcgaagtaaacgatggcagcagcttatcatcgatccaagtagtcgtgcctaaggaactggttaattatagcgagatcgaaaaaatcacgacaggagtctcaattacagtttcaggaatactcgttgagtcaatgggtaaagggcaagatattgaaatacaagcggaaaaagtaaaaatcctaggccccgtagaagaaccagaaaattaccccatagcaaagaaaaggcacacctttgaatatttgagaggattgcctcacttaagaataagaaccaatacatttggcgctatcgcaagaataagatcttcggtcgctaataaaattcataactatttttttgagaatggttttcactgggtcaacacaccgattatcacctcgagtgactgcgaaggagcaggcgaattattcagagttagcaccctagattacactgaaaaaaaagctgcggcgcttgattcagagtatgcagaagatttttttggaagagaaacatttttaacagtatctggacaattgaatgcagaggcttactgtttggcaatgtcaaaagtttacacttttggtccgactttcagagctgaaaactcaaacacatcaagacatctagccgaattctggatggtagagcccgaaatagcattcgcagatctagaggacaacgccacgctcgctgaggctctgt

SEQ ID NO: 302659 - DNA, 721 bp, Unknown
  Bacterial polypeptide expressing nucleotide sequence isolated from the Sargasso Sea
gcagagttttggatgattgagcctgaaattgcttttgctgacattcatgatgacatggatttaacagaaaattgtttaaaatatctttgtgattatgtgcttaagaactgttcggaagaccttcagtttcttaatgatagagaaatacaagaagaaaaacaaaagcctcaaaatcaaagaaatgaaatgtcattgattgatcgattaaaatttgttactgaaaatccttttaaacgaatcacatattctgaagcgattaaaatcttacttaactctaaaccacataaaaaaaagaaatttaaatttcctgtagaatggggcattgatttacaaagtgaacatgaaagatatttagttgaaaaagaatttaaatctcctgttattttaattgattatcctgcagaaataaaggctttctatatgagacaaaacgacgacaacaaaacagttgctgccatggatgttctttttcctggtattggagaaattgttggaggctctcaaagagaagagcgaatcgatgttttaagaaaaaaatgcgccgacttcaatattcctgaagaagagttgtggtggtatcttgaaacaagaaaatttggaagtgttcctcatgcaggctttggacttggattggaaagactagtcatgtttgttactggaatgactaacattagagatgttattccttttccaagaactcctcaaaatgctaatttttaga

SEQ ID NO: 302660 - DNA, 776 bp, Unknown
  Bacterial polypeptide expressing nucleotide sequence isolated from the Sargasso Sea
tacttttggtccaacttttagagctgaaaactcaaatacttcaaggcatttatctgaattttggatgatagagcctgaaatggctttttataacctaaatgataatatggatttagctgaatcgtttgtaaagtcaatcttaaattttattctaaaaaactgtaaagatgatcttaattttttatctgaaagacttttaaatgaagagaaaacaaaacctcaaaatgaaagaagtgaattaaatttaattgaaaaaattcaatttgtaattgataatgattttgtaagaatttcatattcagatgcttttgaaattttaaaaaattcaaataaaaacaaaaaaaagaaatttgagtttattatagataattggggtattgactttcaaagtgaacacgaaaggtatcttgttgaacagcattttcaatcacccgtaattatatatgactatccatcaaaaataaaagcattttacatgagattaaatgatgataaaaaaacagttagagcaatggatgttttatttccaggaattggagaaataattggtggctctcaaagagaagaaagacttgatatccttaaaaaaaggattaaagaaagtggaatagatgaagatgagatatggtggtatttagatttaagaagatacggatcagttccacatagtggttttggacttggatttgaaaggattgttcaattttgtactggaatgtcaaatattagagatgttatcccatatcctagatctccaaaaaacgcttcattctagt

SEQ ID NO: 302661 - DNA, 121 bp, Unknown
  Bacterial polypeptide expressing nucleotide sequence isolated from the Sargasso Sea
actgtaccacatgctggtttcggcctaggatttgaaagattaatgatgtttgttactggaatgactaacataagagatgttattccctttcccaggactcctaaaaatgcggagttttaat

SEQ ID NO: 302662 - DNA, 721 bp, Unknown
  Bacterial polypeptide expressing nucleotide sequence isolated from the Sargasso Sea
gaattttggatgatagagcctgaaatggctttctatgatatcaatgataatatggacttagctgaggatatgttaaaatatgtaataaagtatattcttgaaaattgtgaagatgatcttgtttttcttcaaaatttagagattaatgaagaaaaatctttacctcagattcaaagaaatgaaattccactaactgaaagactatctagtattttgaataaaaaatttgataggataacatacactgaagcattcgatatacttagaagctcaaagcctaataaaaaaaataaatttgaatttaaagttgatgaatggggtattgactttcagtctgaacacgaaagatatttagtagaaaagcattttaaaaatcctgttattgtaagagattatcctaaaaaaataaaagcattttatatgagatcaaatgatgatgaaaaaactgttgcggcaatggacgttctttttccttctgttggtgaaattattggtggttctcaaagagaagaaaggttggataagttatcaaatagaatggatgaaatggatatatcaaaagaagatcttagttggtatcttgatacacgaagatttggttcagttatccattctggtttcggtttagggttagaaaggttagttcaattcattacggggatgaaaaacattagagatgtaattccttttcctagaactccaggaaattgcaactattaac

SEQ ID NO: 302663 - DNA, 655 bp, Unknown
  Bacterial polypeptide expressing nucleotide sequence isolated from the Sargasso Sea
tcgtcgtcatctcactgagttctggatggttgagcctgaaatgtcatattgtgaccttaaacaaaatatggactggatggaatcactagttacttacataatcgatgaagtccttaagcattgtaaaagtgagttaaatttactagaaagaaatatagaaaaattagaagctgtaaaatctccttttccaaggattacatatgatgaagcagtaaatatattaaaacagaataatattgattttacatatggcaaggattttggtgcatctgatgaaacgcttatatctaatcaatatgatagtcctgttatgatccacagttggccagctggtactaaagcattttatatgaaaagggacgaaataaataatgatttagctttaggagtagatatgatcgcaccagagggttatggtgaaatagtaggtggcggccagagagaagataagatagaaatattaatcgaaacaatcaggcatcatgatcttccattaaagccttttgaatggtatttagatttaagaaaatatggttctgttccacactccggtttcggacttggtttagagagatttgtagcatgggtatgtggtacaaaacacataagagagaccattccttttcctaggactatggcaagattagaaccatag

SEQ ID NO: 302664 - DNA, 1105 bp, Unknown
  Bacterial polypeptide expressing nucleotide sequence isolated from the Sargasso Sea
ttgaaaataagaatatctgaattagttaatcatcttgacgaaaatgttaagatcaatggatgggtatataatattagatcgattggaaaaatatggtttctaatattgcgcgatggatcagggtatttgcaatgcgttacggtcaaaaatgatgttgatgatgaggtattcaagttggaagaaacattaacacaagaatcctcagtttcagtttttggcaacgttagaaaagagccaagatcagtaggtggggttgagttatcagtgtccaacataattgttcatcagctttcaaatgaatatccaatttcaaaaaaagatcatgggactgattttttaatgacaaatcgacatttgtggcttaggtcaaaaaaacaaaatgcaatattgaagattagacatcaagttataaaggcaacaagagacttttacgataataatggctttattcttgtagattctccaatactaacagcaaactcagttgaaggaacaagtactctctttgaattagattattttgatagatctgcatacttaactcagagtggacagctgtatggcgaatctagcgcgatggcatttggcaatatatatgtttttggaccaacttttagagcggaaaaatcaaaaactaggagacatttaactgaattttggatggtggagcccgagatggcatattgcgatttagagcaaaacatggattgggctgaaaagcatgtggaatatgttgtagggcactgtcttgagcattgtagaaatgaacttgagacgcttgaaagagatataaaaaagctagaaaatataacattgccatttcctagaataacatatgatgatgcagttgaaattttgaaaaataataatgtagattttgaatacggttctgattttggagctactgatgaaaccatcatatcaaaccagtatcaaaaaccggtaatggttcatagatggccagccgaatcaaaagcattttatatgaagcgagatccaaaaaatttaaatctagcgttaggtgttgacatgatcgcaccagaaggttacggagagatagttggtggaggtcaaagggaggatgattatgagattcttataaata

SEQ ID NO: 302665 - DNA, 670 bp, Unknown
  Bacterial polypeptide expressing nucleotide sequence isolated from the Sargasso Sea
tataaatcttgctgacaaatttattaggtatataattaagtatgtatatgataaatgcaaaaatgaaattgtttttctaagtggcagattggaaaaagaagaacaaaatattcccaaaaatgaaagaaatgattttaccttggaggaaagaataaactttgttataaataatgattttattagaataacatacagcgaggcatttgatatcctaaagaactctaaaccaaataaaaaaggaaaatttaaatttccattaaatgagtggggtgttgattttcaaagtgagcatgaaaggtttcttgttgaaaaatattttaaatgccctgtggttgtatatgattatccatcaaagataaaggcattttacatgagaatgaacgatgataaaaaaacagtaaaagcaatggatatactttttcctggcattggagaaattgttggaggttcacaaagggaagaaagaattgatgtattaaaggaaaggattaaatcgttaaatattgatgaaaaagaattatggtggtatctagatttgagaaaatttggaactgtaaaacatagtggctttggtttgggattagaaagacttattttatttatcacaggtatgggaaatatacgtgacgtaattccatttccaagaacacctaaaaacgcagaattctaa

SEQ ID NO: 302666 - DNA, 394 bp, Unknown
  Bacterial polypeptide expressing nucleotide sequence isolated from the Sargasso Sea
atgagccatttagcgatttcagagctattaaaaggcaatgttgcggtagacagccaagtaacaattaaaggctggatccgtactcgccgcgattcaaaagcaggaatatcatttttagccgttcatgacggttcgtgttttgatcctattcaagcggtagttcctaattcactaaataattatgatgaagttactagcttaacagccggttgttctgtatcggttactggtgttttagttcaatctgcgggcaaaggccaatcgtttgaaattcaagcgaatacggtcactgtattaggttgggtagaaaacccagattcatacccaatgtcggcaaaacgccacagcattgaatacttacgtgaacacgctcaccttcgcccacgtactaaca

SEQ ID NO: 302667 - DNA, 1267 bp, Unknown
  Bacterial polypeptide expressing nucleotide sequence isolated from the Sargasso Sea
tatgacaacattatctacaataaattctattcttaaaagtaataatctcaataaagaagttattgtccaaggctgggttaaaacatttagatctaatcgctttataaatttaaatgatggatcatgtattgaagatttacaatgcgtacttgattatgaaaatactgaaaagaatattttagataaaattaatacaggagcttcattaaaaattcaaggaaaagttcaagaaagccaaggacgtggacagaaatatgaaattgaagttgaaagtttagaagttttaggtgaaagtgacccagataagtttccaattcaaccaaaaaaacactcgtttgaatttcttagagagaatgctcacttgagagttagaacgaaaacaataagttctgtttttagaataagatctgaaatatcatatgccattcataaattttttaatgaacagggtttcttttatgttcatacacctataattactggaagtgatgctgagggtgctggagaaatgtttagagttactacattaaaagacaacaatattgatcactgtgaagatttttttggaaaggaaactaatctcacagtttctggacaacttgaagccgaagcgcttgcattaggtttaggtaatgtttacacttttggcccaacttttagagcagagaattctaatacatctagacatcttgctgaattttggatggtagaaccagaaatggcattttatgatttgaatgataatatggatttagctgaatctttcataaaaaaaattataactcatgtttactcaaaatgcgaaagtgatattaaatttttgaatgatagattagaaaaagaagaattaactaagcctaaagatcaaagatctgaactttcacttattgaaagaattgaatttgtaattaataatgattttaaaagaattagttatacagaagcatttgatattttaagaaactccaagcctaacaaaaagaaaaaatttaaatatccagtttctgaatggggaattgattttcaaagtgaacatgaaaggtttttagttgaaaaacattttaaatgccctgttattgtttatgattatcctgcaaaaattaaagctttttatatgagacttaacgatgatcaggatactgtaagagcaatggatatattgtttccaggaattggagagattgttggaggatctcaaagagaagaaagattggaagttctcaaagatagaatacaaaaacagggaaatgatgagaaagaattatgg

SEQ ID NO: 302668 - DNA, 1048 bp, Unknown
  Bacterial polypeptide expressing nucleotide sequence isolated from the Sargasso Sea
atggccaaacaacccagaataaccaccgtaaaagaaacattcgaagaagaattggtcgaaggaaccatgctacagctatgtggctgggtgagatccaagcgcacttcaaaaggcggtttttcttttgttcatcttaatgacggttcttgcttgagtaacctacaagtggttgcagacggcgaactcgaaaattacgaatccgaaattgaaaagctcggtgtggggtgttcaataagcgttgcgggcaagctcgttgcttctcaaggtaaggggcaggaccgtgagattcacgcaatcaaaatcgaggtgctcgggtgggtcgacgatccagaatcctatccaatcgccaaaaaaaaacactcgtttgaatttctaagaaccgtcgcccatttgcgaccaagaaccaatacctttggagcaattacccgaattcgaaacagactagctcaatcagtccaccgtttctttgatgagtctgggttttactgggttaacacaccgattatcacgtccagcgattgcgaaggcgctggcgatatgttcagagtctccactctcgatcaactccacagagaacaaacagacttctctgaagacttttttggctcagagacctttcttaccgtctctggtcaactaaatctcgaaacgcacgcctgcgctttaaaaaaggtatacaccttcggtccaacatttcgagcagagaattcgaatactagtcgacatctcgccgaattttggatgatcgagcccgaaatagcattcgcagatctccaagacaatgcccgattagctgaatcgctcttaaagacggccttcagtgacactctaagcaactgcatggaagacctcgaattcttcaacactcaagtcaattctaatgttatcgagcgattgcagagtctagtcgaaagtgaattcgcggtgatgtcttactctgacgcgattaaaacacttgagaactccggaaaaaaattcgaattcgatgtctcctggggttcagaccttcaatctgaacacgagcgtttcttaaccgaagaggtagtga

SEQ ID NO: 302669 - DNA, 1427 bp, Unknown
  Bacterial polypeptide expressing nucleotide sequence isolated from the Sargasso Sea
gatggtgcgcggacgaacgacggcgcgggcggtggcgacggcggcgtacggacgaccggaacggatcgcgcgcgtcaagggacgagacggaggggcgagccgagtgggggaggaattggagctgagggggtgggcgaggagcgtgcgaacgcagaaagggatggcgtttatcgatctgaacgatgggagcgcgatctcggggatgcaggcggtggtgaacgagggaagcgcggcgtgggaggtggcgaattcgggaagcgtctccacgggggcggcgctgcgcgtcaaggggaaactcgtggcgagtccgggggggaagcaagcggcggaactcgcggtggatgaactcgaagtgatcggtgcggcggattcggagacgtatccgttgcaaaagaagaggcacacgctcgagtacttgagaagcatcgcgcacttgcgaccgaggacaaacaccatcggcgccgtggctcgagtgagaaaccaattagcgtacgccacgcacaagttctttcaagagcatgggttcttgtacgcgaacacaccgatcgttaccgcttccgattgcgaaggcgcgggggaacagttccaagtgacgactcttttgaatggtttcgccgcggcggcggcggcgacgccggaagccatcgccgcggcggaagccgccgcaaaggagcaaggagaggtggtcaaggcggtgaaggaggcgaaaaaggcgggcgatgcgtccaaggaggacgtcgacggtgctgtcgcgaagcttctctcgctcaagtctgaggcggaagcgctcgccggtgcggcgggaggcgcgtcgttgccgaaaaaggatgacggttccatcgattactcgcaagactttttcggtaagccgtcctatttaaccgtctccggacagctcaacggtgaaatcatggcgtgcgccgtgaacgatatctacacgttcggaccgacgttccgtgcggaaaacagcaacacgtcgcgacacttggccgagttttggatggttgagcccgaactcgccttcgccgacttgaatgacgatatggattgtgccgaggcttacctcaagtattgcctcaaccacgtgctcgagaactgcgacgaagatctcgcattcttcgagaagaatatttcaaaggataacttgcgtgagcgtcttcgtagcgtggccacgcaagagtttgctcgcatcacgtacaccgaagcggtggaccacattctcaacgcgaagaagaagtttgagttccccatcaaatggggtgcggatcttcagagcgagcacgagaggtacatcaccgaagaagtcttcaaaaatcgaccggtcatcgttcgtgactatcccaaggatatcaaggcgttctacatgcgtttgaacgacgataacaaaactgtcgctgcgatggacgttctcgtcccgcgagtcggcg

SEQ ID NO: 302670 - DNA, 1438 bp, Unknown
  Bacterial polypeptide expressing nucleotide sequence isolated from the Sargasso Sea
tatgctaaatcattctgaaataaaaaatattttaaagaataaggatattggtaaagaagtatccgtatgtggctgggtaaaaacctttaggtctaatcgttttattaatataaatgatgggtcatgtattgaagatttacagtgtgtcattgaattagatagttttgataaaaaaactttatctcaaataaatactggagcttccttaaatttaaaaggtgaaattgtagaaagtcagggcaagggccaaaatgttgagattcatgtaaaaaatattgaaatactaggcataagccatccagataattatccaattcaaccaaaaaaacattcttttgaattccttagagaaaatgcacacctaagagcaagaacaaaaactattagctctgttttaagaataagatccgaagtttcatattcaatccataaatttttcaatgaaaacaatttctactatgttcatacaccaattataactggtagcgacgcggaaggtgctggtgaaatgtttaaagtaacaacgcataatctcaaagaaataccaaaagatgaaaataatgatatagatttttcaaaagatttttttggtaaagagactaatctaacagtttctggacaattggaagcagaagctatggcactagggatgggaaaggtttatacttttggaccaacatttagagctgaaaactcaaatacatcaagacatcttgctgaattttggatgatagagcctgaaatggcattttatgaattaagtgataacatagatttagctgaatcattcattaaatacattattaaagatgtatatgaaaaatgtaaaaaagaaataaattttttaagtgaaaggcttttaaaagaagaacaaaatcttccaaaggttgaaagaaatgaattaagtctaactgaaaggataaattttgttattgaaaataaatttataagaataagttatacagaagcttttgacattctcaagaactgtaagccaaacaagaagaataaatttaaatttccagttaatgattggggaattgatttccaaagtgaacatgaaagatttttagtagaaaaacactttaaatgtcctgttgtagtttatgactatcctgcaaaaataaaagctttttatatgagacttaatgatgataagaaaacagtaagagctatggatattttatttcctggaattggtgaaattgttggtggttctcagagggaggaaagattagatattttaaaagaccgaattaaatctatggatattgatgagaaagaactttggtggtatctggatcttagaaaatttggctcagttaagcacagtggatttggacttggattggagaggcttattttatttataacgggaatgggtaacataagagatgtaattccctttccaagaacacctaaaaacgcagatttttaa

SEQ ID NO: 302671 - DNA, 1402 bp, Unknown
  Bacterial polypeptide expressing nucleotide sequence isolated from the Sargasso Sea
atgagcattgcatcggtcgcttctgtatttaaaggtgagcacgcagttggttcgacagtcacagtccgtggctgggtcagaacccgtcgtgactctaaagctggcatctcttttttagctgtctatgacggctcctgctttaatcctattcaaggtgttgtgccaaatagcttagaaaattacgacaacgaagtgttaaagctgacagctggctgctctgtgatcgtaaccggtgagattgttgaatctcctggcgctggccaagcctatgagctgcaagttactcacgttgaagtaactggctgggttgaagatccagacacttacccaatggcggctaagcgtcactctattgagcatttacgcgaattggcgcacttacgcccacgtaccaacatcattggtgccgttgcccgcgtacgtaactgtttgtctcaagcaattcaccgtttctaccacgaaaatggtttcgtgtgggtgtcaacaccgctgatcaccgcatcagactgtgaaggcgcgggtgaaatgttccgtgtatccacactggatatggaaaacctgccacgcaccgacgatggcaaagtggactatgacaaagacttcttcggtaaagaggcgttcttaaccgtatcaggccagctgaacggcgaaacctacgcctgcgccctgtcaaaaatctacacctttggcccgacgttccgcgctgaaaactcaaacaccagccgccacttagcggaattctggatggttgagccagaagtggctttcgccaccttaagcgatatcgccagccttgccgaaggcatgctgaaatacgccttcaacgccgtgttagccgagcgtatggacgatctggaattcttcgcccagcacgtagataaaaccgtgattgaacgtctgcaatctttcgtatccagtgatttcgctcaagtggattacacagatgcagtagacattctgcaaaaatgtggccgtgagttcgagttcccagtgtcttggggtatcgacttatcctctgagcacgagcgttatctggcagaagaacatttcaaagccccagtggtggtgaagaactatccaaaagatatcaaagccttctacatgcgccttaacgaagacggtaaaaccgttgccgcgatggacgtgttagccccaggcatcggtgaaatcatcggtggttctcaacgtgaagagcgtttagacgtgctggatatgcgtttagaagaaatggatctgaacaaagaagattactggtggtaccgcgatctgcgccgttacggcacagtgccacactcaggtttcggtctgggcttcgagcgtttagtgtcttacgtaacgggcgtgtccaacatccgtgacgtgatcccattcccacgcgcgccacgcaccgcgaacttctaat

SEQ ID NO: 302672 - DNA, 757 bp, Unknown
  Bacterial polypeptide expressing nucleotide sequence isolated from the Sargasso Sea
atgaaaactgtaacgattgataaattaagtaactatgaaggcaaagatgtagaattaaaaggatgggtctataatactcgtaatgttggtaagatttggtttgtcatttttagagatggtacgggtctcttgcagggagttgttgttaaaggagaggcaactgatgaatcatttgctctagaaaatgatttgaatcaagaggactctgtgataattacagggactgtgcgtaaagaacctaggtcaattggcggctttgaattgggaattaaagaaattaaagttgtcaaacatgttactgatgaatttcctatatctcataaagaacatggtgcagattttttaatgtcaaatcggcacctttggcttagatctaaacgacaaaatgcaattatgcgagtaagacatcaggttactaaagcaattagagatttttttgataacaatggttttactcttattgattctcctatttttactggtaatgctgtggaagggaccacaaccttatttgaggtagattattttgagcgttctgcgtatttgacacaaagcgggcagttgtaccaagaagcaggtgctacggcttttggtaaaacatattgttttggccccacatttcgtgctgagaaatcaaaaacgcgtcgccaccttactgaattttggatggtggaaccagaaatggcatatgttgatcttgatgagaacatgacctgggcagaaaatctagtaggatatattgttgaacgtgttttag

SEQ ID NO: 302673 - DNA, 1147 bp, Unknown
  Bacterial polypeptide expressing nucleotide sequence isolated from the Sargasso Sea
gcggaagtgcttgagtccattcacacaggcgcatgcattgctgtccaaggagaattgttggcttcacagggaagcggacaaagctttgaaattaatgcacacaatattgaagtacttggcactgcatccccagatgagtaccctttgcagcctaagaaacactctttggaatttttgagagaaattgctcaccttaggtttagaacgaacacctttagtgcgattaacagggtaagacatgcggttatttttggaattcatgactattttaatgcgagaggattttacaacatacatacgcccatcatcactggttcagatgctgaaggagcaggtgaaacatttaaagtaagcagtcttgatttcaataatgtccccaaaacagaagaaggagaaattgacttcaaacaagattttttcggcaaagaaactaacctcacagtatcgggtcaactagaagcagaattggccgcaatggctttaggcaaagtatataccttcgggcctacctttcgtgcagaaaattctaacaccagccgacacctctcagaattctggatgatagaacctgaggttgcttttgccgaccttgatgagaacatggacttgggagaagatttattgaagcacctgatacgatatacactcgaacaatgcgccgatgaccttgactttttggacaagcgatatgctcaagaagaaagtcaaaaaaaagcaaatgaacgttcggaaatgggattaattgaacgcctgaaatttgtcacgagcaatgattttgtcagaatctcttatacggaggcaatcgatattttaagaaactcaaaacccaataagaagaaaaaatttgcgttccctataaatgaatggggcactgacttacaatctgaacatgagcgctatctggtggagaaacacttcaaaaaacctacaatactttttgattatccaaaggatattaaagcgttttacatgcgtcaaaatgacgatggtaaaacagtcagagccatggatattttatttccaggaattggtgaaattgttggaggttctcaacgtgaggaacggttggaacttttggaaaagagaatgcaagaaatgaatgtgccgaaagaagaattgtggtggtacctagacttaagaaaattcg

SEQ ID NO: 302674 - DNA, 1297 bp, Unknown
  Bacterial polypeptide expressing nucleotide sequence isolated from the Sargasso Sea
aatgaaaacagtaacaattaaaaatttaaaagattttgaaggacaggaagttaaaataaatggatgggtctataatagaagaagcatcgggaaagtgtggtttttgattttaagagatgggactgggttattacagtgtgtagtggttgatggagaatgtgatttagaaagttttcaattagagcagaatttgaatcaagaagattctgtaagtgtttcaggtattgtaaaaaaagaacccagagcagtaggaggtttcgaacttggagtaaaagatataaatgtcataaatcatacctctaatgaataccctatatcaaataaagagcatgggacagattttttaatgtcgaatagacatttatggataaggtctaaaaggcaaaattcaatacttaaaataagacatcaaatcattaaatcaataagagatttttttgataataatgattttattttagttgactctcctatttttactggcaatgctgtggagggcacaactacattatttgagcttgaatactttgaaaagaaagcttacttgacacaaagtggtcagctgtatcaagaagcaggggctatggcttttggcaagtcatattgttttgggccagtatttagagctgaaaaatctaaaactcgtcgtcatctcactgaattctggatggttgagcctgagatgtcatattgtgaccttaatcaaaatatggactggatggaatcactagttacttacataatcgatgaggtccttaagcattgtcaaagtgagttaaatgtattagaaagaaatatagaaaaattagaagctgtaaaatctccttttccaaggattacatatgatgaagcagtaaatttattaaaaaaaaataatattgattttacatatggcaaggattttggcgcatcggatgaaacgctcatatctaatcaatacgatagtcctgttatgatccacagttggccagctgatactaaagcattttatatgaaaagggacgaaataaataatgaattagctttgggagtagatatgatcgcaccagagggctatggtgaaatagtgggaggcggacaaagggaagataacatagaaatactaattgaaacaatcaggcatcatgatcttccattaaagccttttgagtggtatttagatttaagaaaatatggttctgttccacactcaggatttggactaggtttagagagatttgtagcatgggtatgtggtacaaaacatattagagagactattccttttcctaggactatggcaagattagagccatag

SEQ ID NO: 302675 - DNA, 1291 bp, Unknown
  Bacterial polypeptide expressing nucleotide sequence isolated from the Sargasso Sea
aatgaaaaatatatcaataaataaattaaaagattttataggaaaagaagttcagctaaatggatggatttacaatctcagatccattggaaaaatttggtttgcaatcgttagagacggcacaggttttgtccaatgcgttgttacaagcaatgatgtttctactgatgtttttgaacttgaatccagtcttactcaagaatcatctgtaactgttaagggaattgttcaaaaggattctcgttctgatttaggagttgagattctagtaaaagatatggaagtaattcatattgctgaagaatatccgattgccttgaaagagcacggtgtaagctttttaatggataatagacacctttggttacgatcaaagaagcagtacgccataatgaaagttcgtcaaaatgtaattaaatcaattagagatttttttgataaaagagattttgtgttaattgactcacctatgtttactggaaatgctgttgaaggcactactacattatttgaaaccgaatattttaatagatcagcttatttaactcaaagtggacagctttatcaggaagccggggcaatggcctttggaaaaacatattgttttggtccatgttttagggctgaaaaatcaaaaacgagaaaacatttaacagaattttggatggtagaaccagagatggcattttatgatttaaaagataatatggatttgattgaggaatttattgttcatattgtttctcaaagtattgaaaattgtaaagaagagttaaaaattctggaaagagatattacattgctcgagaaagtaaaatccccatttcctcgattaacttatgatgaagctgttaagctcttacatgataatgcccaagaatttaggtacggtagtgattttggagcaccggatgaagaattgattgcctcaaagtttgatagccctgtgatgatacatagctggcctcatgaaactaaagctttttatatgaaaagagacaattctgacaaacttgctttaggagtagatgttattgcgccagaaggttatggtgaaatagttggtgggggacaaagagaagatgatcacgatactttggttaagagaatagaagatcatggactgcctataagcgcatttaagtggtatttagacttaagaaaatatggttcagttactcattccggatttggattggggctggaaagaacagtttcatggatatgtggaatagatcatgtaagacaaaccattccttttccaagaacaatgggaagattggagccataa

SEQ ID NO: 302676 - DNA, 709 bp, Unknown
  Bacterial polypeptide expressing nucleotide sequence isolated from the Sargasso Sea
tttgggaaaaatttatgtttttggaccaacatttcgcgctgaaaaatcaaaaaccagaaggcatttaactgaattttggatggtagaaccagaaatggcgtattgtgatttaagcgagaatatggaatgggctgaaaaacatgttagctatgttgttcagtggtgtcttgaaaattgtcaagaagagttaaaaattcttgaacgagatacaagcatactagaaaaaactgttcccccgtttcctcgaatcacttatgatgacgctgttgatatattgaaaaaacagggtgttgatttcaaatatggtagtgattttggagggacagatgaaactgttgtttctgaagaatttgatcgcccggtaatgattcatcgatggccatctgatattaaggcattttatatgaagcgtgaccctgaaaatgacaagttagcgcttggaattgatatgattgctcctgaaggatttggtgagattgtgggtggaggccaacgagaagatgatcacgatatactattatcaagaatcaaagagcataaattacctattgaaccttttcagtggtatttagatcttcgaaaatatgggtctgtaccacattctggctatggattgggaattgagagaacggtaggctggatttgtggcaccaagcatgttagagaaacgattccttaccctagaactatttatagaatagagccttaa

SEQ ID NO: 302677 - DNA, 937 bp, Unknown
  Bacterial polypeptide expressing nucleotide sequence isolated from the Sargasso Sea
ctgcggacgccgtccgagacggcggtcggatcgacggtgatcgtcggtggatgggtgaagacgggacgggaggcggagaagggtgcgttgttgttcctcgccctgaacgatgggtccggaccgggtaatttgcaggtgatcgtgcgggaagacgtgtacgctctcggggatttgaagaccacggggacgagcgtcgtcgtcgagggcgagttgagagcgccgccggagtcggccaagggacaagcgatcgagatgcacgcgactaaaatattgatgtgcggtaagtgcgacggtgcggtgtacccgatctcgaagaagaagcagactcttgagtttttgcgagaaaagattcacttgcgaccgcggacgaataccatcgcgagcgtggcgcgagtgcgcagcgctctcgcgtacgcgacgcacaccttcttcaaccagaacggtttcttatacgtccacacgccttgcatcactcagagcgactgcgaaggggccggtgagatgttccaggtgacgacgctgttgagcgaagccgaaaaggctgaatccgcgcaaccggcggtcaagccggaagaactggacgcgaagcgcgcggaagtttccgagtgcggcagtggcatcaaggcgatgaaggagagcggtgcggagtccaaggatgtgaagaaggcggtgaagaagctggataaccttaagcaagagttgttggagatggagcgtgcggcgcgaaagattggtggcatccaacgcgcggaggacggcgccatcgattactctgacgacttcttcgcgggtaagtcttacttgaccgtgtccgggcaattgcaagtcgaaacgtacgcgtgcgctctgtccaacgtgtacactttcggcccgactttccgcgctgagaactccaacacgacgagacacttggccgagttctggatgatgaaccaga

SEQ ID NO: 302678 - DNA, 1330 bp, Unknown
  Bacterial polypeptide expressing nucleotide sequence isolated from the Sargasso Sea
tatggggaaagagtactggattggagatgttagggctggctcccatgacaccaaagaggtggttctcaaggggtgggtccatagggctcggggctcgaacaagatttggttcatcgttgttcgagactctacaggccacgtccaatgcgtggctaagagggacgtagtaggtgatgagtgcttcgaattgctcaggaacgccctaatcgaatctagtgtcgaggtaacaggtgtggtagagccaacagatcgagagcacggccatgagatccaagttacttcagccactgtggtcggtcccgtgaaccccgatcgccccttccccatcaccgaatcagcgatggaggactccgatggcggtgagaccgagttcctactggataacaggcacctctaccttcgaacgagccgaatgacgaccatgctgaagattagaagcaccgtattcggggcaatccactcatacttccgtgacagagacttcactgagtaccaggcaccaaacttcgttgcaggcgctgtggaaggtggaagtacactgtttgaagtcccatacttcggcaagaaggcatacctcacccagtcttggcagctctatgcagaggcagcgatgccagcactggagcgtctgtacacaatggcaccctcattccgagcagagaagagcaggacaaggaggcacctaacagagttctggcatgctgagatggagatagcatgggcttccaatgacgaggtgatggaacacggggaaggagtggtgcgacacgtcgcgagaaccctactagaagagaggtcagtggagctcgaggaattgggccgggatttgtccatggtagctagattcgcggaaagcgagtaccccaggatgcgctatgacgaggccattgaggcacttcagtcgaagggagtagaggtcgagtggggtcaggacttggactactccaaagagaagatactaacctctgacttcgaggtcccccacttcctcactcactacccgagggtggccaagccattctaccaccgtcccgatcctgaggacccgaaatacgtcctatgtcacgaccttctggctcccgagggctatggcgagataatcggagggggggagaggacatggtccgaggaggaaatactcgagagaattgacgaggagggaacccctcgtgagccgtacgaattctacatcgatatccggagatatggaggagtcccccacggaggcttcggattaggagttgataggctatgcacctggctttctggcgctgagcacatcagagaggccatcccgttcccaagggatagcagaagggtcactccatag

SEQ ID NO: 302679 - DNA, 1402 bp, Unknown
  Bacterial polypeptide expressing nucleotide sequence isolated from the Sargasso Sea
aatgagtattgcatcagtcgcttctgtatttaaaggtgagcacgcagtcggttctacagtcaccgtacgtggatgggtaagaactcgtcgtgactctaaagctggcatctcttttttggcagtctatgacggctcctgcttcaatcctattcaaggtgtcgtgccaaatagcttagaaaattacgacaacgaagtgttaaagctaactgctggctgctcggtgatcgtaaccggtgagattgtggaatctccaggcgcgggccaagcctatgagctgcaagtgactcaagttgaagtgactggctgggttgaagatccagacacttatccaatggcggctaaacgtcattctattgagcatttacgtgaattggcgcacttacgcccacgtaccaacatcattggtgccgttgctcgcgtacgtaactgtttatctcaagccattcaccgtttctaccacgaaaatggcttcgtgtgggtatctacaccgctgatcaccgcatctgactgtgaaggcgcaggtgaaatgttccgtgtatccacactggatatggaaaacctgccacgcaccagtgatggcaaagtagactacgacaaagatttcttcggtaaagaggctttcttaaccgtatcgggccaattaaacggcgaaacctacgcctgcgccctgtcaaaaatctatacctttggcccgactttccgtgctgaaaactcaaacactagccgtcacttagcggaattctggatggttgagcccgaagtggccttcgccaccttaagcgatatcgccagtctcgctgaaggcatgctgaaatacgccttcaacgcggtattagctgagcgtatggacgatttgcaattcttcgcccaacacgtggataaaaccgtaattgagcgtctgcaatccttcgtctcgagcgatttcgcccaagtggattacaccgatgcagtagatattctgcaaaaatgtggccgtgagttcgaattcccagtgtcttggggtatcgacttatcctctgagcacgagcgttatctggccgaagagcactttaaagccccagtggttgtgaagaactatccaaaagatatcaaagccttctacatgcgccttaacgaagacggtaaaaccgttgccgcgatggacgtattggctcctggcattggtgaaatcatcggtggttcgcaacgtgaagagcgtttagacgtgctggatatgcgtttggaagaaatggatctgaacaaagaggattactggtggtatcgcgatcttcgtcgttatggcacagtgccacacgcaggtttcggtctaggctttgagcgtttagtgtcttacgtcactggcgtatcaaacatccgtgacgtgatccccttcccacgcgcgccacgtaccgcaaacttctaa

SEQ ID NO: 302680 - DNA, 786 bp, Unknown
  Bacterial polypeptide expressing nucleotide sequence isolated from the Sargasso Sea
ttgaggtagattattttgagcgttctgcgtatttgacacaaagcgggcagttgtaccaagaagcaggtgctacggcttttggtaaaacatattgttttggccccacatttcgtgctgagaaatcaaaaacgcgtcgccaccttactgaattttggatggtggaaccagaaatggcatatgttgatcttgatgagaacatgacctgggcagaaaatctagtaggatatattgttgaacgtgttttagataattgtagtactgaattatcattgttagaaagagatgcagataaattgaaagcagttattcctccattccctcggatcacatatgatgaagcagttaaacttctgaatgataatggaagcgattttcaatatggaagtgattttggcgcgccagatgaaacattattatctgaaaattttgataaacctattatggttcatcgctggccttctggtatcaaagctttctatatgaagcgagatgaagaaaataatgaccttgcgctgggtgtggatatgattgcacctgaaggatacggagagatcattggaggaggacaaagagaagatgatttggatatattaattgataggatacgccatcatgatcttccactcgaaccatttaaatggtatcttgatttgagaaaatatgggtctgttccccactcagggtttggacttggtcttgaacgaacagtagcttggatatgtggtacaaaacacattcgtgaaacaataccttttcctagaacgatgtcgaggcttgaaccttgat

SEQ ID NO: 302681 - DNA, 703 bp, Unknown
  Bacterial polypeptide expressing nucleotide sequence isolated from the Sargasso Sea
aatgaaaactgttacaataaatagattagataaatatgttgataaagaagttgagataaaaggctgggtatataatagacgaagtatagggaaaatttggtttttgatattgagagatgggacaggactattacaatgcgttgtggttgatggtgagtgtgataaagatacattcaatctagaacaggaactaaatcaagaagattccgttattgtaaagggtaaagtaaaaaaagagcctcgcgctattggtggatatgaattaggagtgagtgaggtatgtgtgattaatcatacaacagaagaatatccaatatcaaaaaaagatcatggagctgattttttaatgtcaaatagacatctatggttgaggtcaaagaggcagaactcaataatgagggtccggcaccaaattgtgaaagctatccgtgattattttgatgataatgggtttaccctaattgactcgccgatttttactggtaattcagttgaggggaccacaacactctttgaggttgattattttgagcgttctgcatatttgactcagagtggtcagttatatcaagaagctggcgcaacagcatttggaaaaacatattgctttggaccatgtttccgggctgaaaaatcaaaaacgcgtcgtcatcttacagagttctggatggttgagcctgaaatggctttcgttgagcttgat

SEQ ID NO: 302682 - DNA, 781 bp, Unknown
  Bacterial polypeptide expressing nucleotide sequence isolated from the Sargasso Sea
tctgactgtttccgggcaattgggtgctgaggttttcgccttggccttcaccaatgtttataccttcgggccgaccttccgtgccgagaactccaacacagcccgacacctggcagaattctggatgatcgaaccggaaatggctttcatggaccttcagggcatgctggtcctgaccgaagaattcctgcgtgaactgctgaaagaatgcctcgaccggcatgaagaggatctggccttcctgcagaagatgtatgatcaagaactcatttccggactgaaacacatttgtgatactccttttgaaaccctgacctatacggaagcggtaaagatcctcgaggaatccgggaaaagttttgaatttccagtggaatggggatgcgatctccagtccgagcatgaacgttatctgagcgaagtccatgtgggaggacccctcaacctcatcgactacccaaaggacatcaaagctttttacatgaagcagaacccggatggaaaaacggtcgcagccatggatgtcctctttccacgcctgggagaaatcgttggaggttcacaacgtgaggatgatggtgagtccctgctgcatttgatgcgtgaaaaaggacttccagaagaaacctaccagtggtacctggaactcaggcgttttggaaccgccccgcattcgggcttcgggttgggactggaacgattggtccagttcgtaacaggcatgaaaaacatccgggacgtgatccccttcccaagggttccgggaaatgcccgtttctga

SEQ ID NO: 302683 - DNA, 945 bp, Unknown
  Bacterial polypeptide expressing nucleotide sequence isolated from the Sargasso Sea
gtgatgccgagggagcaggagaaatgtttaaagtacaaacattagagagtaaagatctagcaaaaaaaagtatagaccattcaaatgatttttttggcaaaaaaactagtcttactgtgtcaggtcagttagaggcagagacttatgctcttggcctgggaaaagtttatacatttggtccaacatttagagcagaaaattcaaatacatctagacatgcctcagagttctggatgatagagcctgaaattgcattctatgaccttaatgataatatggacttagctgaatcatttgtaaagtatatactcaattatgtattaaaaaattgtgatgaggatttaaaatttcttgatcaaagactctttaaagaagaaagtcaaaaaccaaaaaacaaaagaaatgatttaagcttaattgagaaaattaattttactattaataataaatttactcgagtatcatattcagaggcatttgatatattgaaaaactccaatcataacaaaaagaaaaagtttgaatatccaatagataaatggggttccgatcttcaaagtgagcatgagagattccttgttgagaagcattttaaagctccagttattatttatgattatccgtcaaagattaaagcattttatatgagattaaatgatgataataaaacagttagagcaatggatgttttatttcctggaattggtgaaataattggaggttctcagagggaggagagactagacatacttcaacagagaatggcagaaaacggaatagatgaaaaagagttatggtggtatttagacctaagaaaatatggaaccgcacctcatagcggatttggtcttggttttgaaagaatggtaatgttttgtacaggaatgtctaatattagagacgttatcccgtatcctagaacaccaaaaaatgcatccttttaat

SEQ ID NO: 302684 - DNA, 278 bp, Unknown
  Bacterial polypeptide expressing nucleotide sequence isolated from the Sargasso Sea
aatgccaaatataaaactaccagatggtaaggaaataaactttgataagcctattacagggttagatattgctgaaaagataagcaagacattagcgaaacaagctactgtaataagtataaatgatgaactaaaagacttagatcatttaatcaaaaatgatagtaaagttaaaatatttacttcaaaggatgctgagggattagatacaattcgacatgatacagcccatattacagctatggctgtacaggagttattccctggtactcaagtta

SEQ ID NO: 302685 - DNA, 541 bp, Unknown
  Bacterial polypeptide expressing nucleotide sequence isolated from the Sargasso Sea
atggcgaaactgcatgataaatatcaagagactgttgtcgctgaactgactaaaaagttcggttataccagtgtcatgcaagtccctcggattgagaaaatcaccctgaacatgggtgttggcgaagccgttgcagacaaaaaagttatggaacatgctgttcgtgacatgactgcaatcgctggtcaaaaaccagtagtgactgttgctcgtaaatcagttgctggttttaaaatccgtgaaggctaccctattggctgtaaagtgaccctgcgcggtgagcgtatgtgggaattcttagagcgtttagttgacatcgcaatcccacgtattcgtgacttccgtggtctgagcgctaaagcgttcgacggccgtggtaactacgcaatgggcgtgcgtgagcagatcattttcccagaaatcgattacgataaaatcgataaaattcgcggtatggatattgttatcactacctctgcgaattctgacgaagaaggtcgtgctttgttagacgcttttaacttcccattcaagaaataag

SEQ ID NO: 302686 - DNA, 283 bp, Unknown
  Bacterial polypeptide expressing nucleotide sequence isolated from the Sargasso Sea
atgactctaaaaaatcgctacaaagaatcaataagaccaaaacttttaaaggaccttggtcttaaaaatattcatcaagtacctaaagttgtcaaagtcaacgttaacagaggtcttggtgaggcagcttcaaattcgaaagctctagaagcctctttaaacgaaatggcaacaattacaggacaaaaggcccttgtaaccagggctaaaaaagctatcgcgggttttaaaattcgtgagggcatgccgattggttgtactgttactttgagaggagacagga

SEQ ID NO: 302687 - DNA, 151 bp, Unknown
  Bacterial polypeptide expressing nucleotide sequence isolated from the Sargasso Sea
tatgttgcatagagctttattcggatctttggaaagatttattggtattttaattgaaaattattctggaaaactacctttttggatatcgccacttcaaactatggtaataccagtatccgaagattttgataactatgcaaaagaagtt

SEQ ID NO: 302688 - DNA, 541 bp, Unknown
  Bacterial polypeptide expressing nucleotide sequence isolated from the Sargasso Sea
tatgactctaaaaaatcgctacaaagaatcaataaggccaaaacttttaaaggaccttggtcttaaaaatattcatcaagtacctaaagttgtcaaagtcaacgttaacagaggtcttggtgaagcagcttcaaattcgaaagctctagaagcctctttaaacgaaatggcaacaattacaggacaaaaggcccttgtaaccagggctaaaaaagctatcgcgggttttaaaattcgtgagggcatgccgattggttgtactgttactttgagaggagacaggatgtattcctttttggagagatttattaatttagctttaccaagaataagagacttcagaggagttaatcctaaaagtttcgatgggagagggaattataccgttggagtgaaagagcaattgatttttcctgaaatctcttttgataaaatagattcaataagaggtatggatataactattgtaactagtgcaaaatcagatcaagaaggtaaagctcttttgcaggagttaggaatgccttttagtaagaattaa

SEQ ID NO: 302689 - DNA, 507 bp, Unknown
  Bacterial polypeptide expressing nucleotide sequence isolated from the Sargasso Sea
aagaatttgggtataaatcccctatgcaagttccaaaactacaaaaagtcgtattcaatgttggagtaggagaatctctaactaattcaaatgctattgaatcagttgtaagaatgatttcaactatatctggacaaaaacctgttgttacaaaagcaagaaattcattagctggtttcaagattcgcgaaggtatgagcataggagttatggctactttgcgatctaagcgaatgtatgaatttgtagatagattaataaatgttgccctacctcgaattagagattttagaggtattcctacgaaatcctttgatggtagaggtaattattctttaggaattaacgagcaagtaatatttcctgaaatagattacgcccaaatagataaattaagatcttttcaggttactgttgtaacatcagcaaaatcagaccaagaggcattaagattattacagttgatgggatttcctttcatacaaaatcaaaatcgtcaaaattaac

SEQ ID NO: 302690 - DNA, 565 bp, Unknown
  Bacterial polypeptide expressing nucleotide sequence isolated from the Sargasso Sea
aatgccaaatataaaattaccagatggaaatactctaacttttgaaaagaaagttaatggattaaaaattgcagaaaaaataagtaaatcattagctaaacaagcattaattatggaagttgatggagaattaaaagatttattttttgaaataaataaagatagcaaagtaaaaattataacttcaaaagatcaagaaggtttagatgcgatgcggcatgatacaacgcatataatggcaatggctgttcaaaaattatttcctgacacaaaacttgctattggcccagctataaaagatggcttttattatgacttttcaagaaaagaaccgtttactcctgatgatttaattaagatcgaaaaaaaaatgaaagaaattgtagaaaaagatgagaaaacaaaaagagaagtttgggaaagaaaagaagctaaagatcattatcataaaataggagaaaattataaagttgaacttgttgacagtgtcccaaaagatcaagagatttcagtttactatcatggaaaatggtatgatttgtgtagaggtcccccatttattatc

SEQ ID NO: 302691 - DNA, 334 bp, Unknown
  Bacterial polypeptide expressing nucleotide sequence isolated from the Sargasso Sea
atgatttacgttgacatcggggagggcgagtctcacgagtatgcaagtggcatcagcgctggagaggtaatcaaaaacgtccatgggaggaagtcaggtgcagtggccgcattcgtaaacggggaggagagggacatgtccttcgcactcgatgagaattgcaagatagagccgatattgggcgattccgaggagggtctgtacatcctaaggcacagttgcgcacatcttctggctcaagcggtgactcagctttatccggatgccaaacccacaatcagaccgccgatagaacacggattctactacgacttcgcaatggatccaatcggag

SEQ ID NO: 302692 - DNA, 283 bp, Unknown
  Bacterial polypeptide expressing nucleotide sequence isolated from the Sargasso Sea
attgttcctatcgctagatcggcataatgaattttgtttcgaggttggcaagaggattagtgaagctggatttagagttgaggtgaatgattcaaacgataggatgaacgctaaaattagacaagcgcaactgcaaaagatcccctatatgcttgtggcgggtgatcgggaagttgaggctcagtccttgtcagttcgtacgaaaagtggtgacaatctcgatcccatgtcgattgaccaagtaattgataggttcatcaaacaggtagcagatcgatcttga

SEQ ID NO: 302693 - DNA, 838 bp, Unknown
  Bacterial polypeptide expressing nucleotide sequence isolated from the Sargasso Sea
aagcctttattattcgattatcaaattaaattttggaaatggatagcagattattatcactgctctttcggacatgtcatgagagcatcaattccttcaactttacttttggagagtgaaacaagaatgattatcaatagtgaggttaaaattgacaaaaattcactatcagatgaacagtttttgatttacgaagctcttgaaaagtcaatattaaaaattgatgatttgataaaaatatctggaaataaaaatccaatcaaattaattcaacctctaatagataacggatttattacatcatatcaaaaaattgaaaaaaaatataaatcaaaaattgaacgtgtatttaaaattaaaaatccgaaagagcttcaagcaaacttaagtttattaaagagatccccacaacaaactagatttattttatctctacatagttttgataataaaggtgaaaaatggatttccgcaaagaaagttttcaataaatcaaatacaaactcacaaatcgctaacaaacttctagaaaaaaaaataattgaggatagaaaagtcgaaatagatagaattacaaataaacataaaacctctatttctcttcaagatttatcacctgatcagtcaaaagcttttgatcaaattaaagatgagttattaaaaaaaaatattgtgttatttcaaggtgtcacttcttctggcaagactgcaatttatatgaagttaattaaagagattacagacaacggggggcaagttctttttttacttcctgaaatatctattacttcacaaatggttagtcgatttaataattattttgctggtattgttcagg

SEQ ID NO: 302694 - DNA, 313 bp, Unknown
  Bacterial polypeptide expressing nucleotide sequence isolated from the Sargasso Sea
ttttggctttcaccattgcaagctgtagttgctacaattacatctgatacagatgagtatgcttatgaggtacaaaaagcattagtatcaaaaggaattagggccgaaatagatacacgtaatgaaaaaattggttataaaatacgtgaacacagtaatagtaaagtgccagcaattattgctgttggaaaaaaagaagctgaagataaaacagtatctgttagaagaattggatcctctgaaacaaagacctttaaattagaagatattgttactagcttatctaaagaagcaaaatcaccaatagaataaa

SEQ ID NO: 302695 - DNA, 391 bp, Unknown
  Bacterial polypeptide expressing nucleotide sequence isolated from the Sargasso Sea
atgctgcatagagctttgtttggatcattagaaagatttataggtatattaattgaaaattatgcaggcaaacttccattttggctgtcaccatcacaagcagtagtatgtcctattgctgaagataataataactatgcaaaaaaattatttgaagatctttttaaagagagtataaaatgcgaggtggatttaagaaatcaaaaaattagttataaaattagggaacattctttagcaaaagtacctttgatattagtatgcggtaaaaaagaagaaaaagataaaaccgtaactgtaagaactttaggatctgaaaaacaagaaacatttaaaagagatgaaataatcaaacgtattgttcaatcaaataaaatgccagcaaactaag

SEQ ID NO: 302696 - DNA, 400 bp, Unknown
  Bacterial polypeptide expressing nucleotide sequence isolated from the Sargasso Sea
gatgagtaggttattagaagaatttaataaacacattaaacatgatttaaaatctaagcttgaattgaataatatttttgaagttccaaaaattaaaaaaattattttaaacatgggggtaggtgaaggtaaagatgactcaaaattaatagacagggctcttgaagatttaactctaatatcaggtcagaaagctgtaaaaacaaaatcaaaaaaggctatttcaggctttaaaattagggaaggaatgcctttaggggtaaaagttactctaagaaataaaattatgtatgaattccttgatagattagtaaatatcgcaattcctagaataagagattttagaggtttaaacattaatagttttgacggtaatggaaatttttctatggggtattaa

SEQ ID NO: 302697 - DNA, 808 bp, Unknown
  Bacterial polypeptide expressing nucleotide sequence isolated from the Sargasso Sea
agtagttttatagatctagctagtgaatatagtgaagacattgttacaaaagataatggcggtgatttagactattttgaaagagatattttcccagaagaatttgaaaaaggaatcgaggctcttgccttaaatgattatagtaagattattgaattagaggatacatttcatattctaaaagttactgaaataaacaaacaacaacctttgtcagaagatcagataaaagatgaagtaataaacgaattaatagaaactgaatctttagcattaatgaatgatgactttagtcttttagaggatttgatttttgacaatagttcgattgaagaaattgcatctaatatctctaaagaagctttagaatcagatttttttacaaaatctaattatgatttttatatagttaataatgagattaaggattatatattttccactgactcacaaatcaatcaaccatatgcaattgagcttgatgataagattatagtagtctctgttagttcggtcgctgatccaaagctacaatcctttgaagaggttgctgaagatgtggctgatttattgtcagaatctaaggctattgaaaaattagctttaatgaataatgaattgcaatctattaaaaacgatgaagataaaaagttttttgtcgatacgtataattatgttacacaggatacatttgttaatgttaaaagatattcctctcttttacctcaagaagttctaagtgaaatttttaataatgttcctgatacaacaatcagtactaatgccaataataaagatagctttatta

SEQ ID NO: 302698 - DNA, 259 bp, Unknown
  Bacterial polypeptide expressing nucleotide sequence isolated from the Sargasso Sea
catgattcctagacttaaagaacaatataataatgagttgaagacaaaaattatgtctaatttacagttaaaaaatataaatgaaattccaactcttgaaaaaattattatcaatattggtgatggtaaagcagcaactgatggcagagctttagaatctatggtggatgagttaactgcaatttcaggtcaaaaacctgttattagaagagcaaaaaaatctattgcaggttttaaaatccgagaaggtatgccaatt

SEQ ID NO: 302699 - DNA, 433 bp, Unknown
  Bacterial polypeptide expressing nucleotide sequence isolated from the Sargasso Sea
gtttatggtcctggaatgtctataattgattatagaataattcctaatattactagatcattaatttataatgaacaattaagtgtatatgattcaggaaatcaaactagaacatattgttatgtaactgatgctttgaatgggttcttaaaagttgtggtaaaaaatgaaaaatttggagtttataatattggtaacgataatggagaaatttcagtattagatttagtcaaaaaaactgaaaaagtaatgaatgaaaaaattaactataaaaaaacgccttatcctgctgaatatcctcctgatgaaccaaatagaaggtgccctgatcttacaaattcaaaaaaaaatttaaattatttccctatggtttcacttgatgatggccttaaaagacacctggattgggcaaaaaacaatttagaaaattgat

SEQ ID NO: 302700 - DNA, 329 bp, Unknown
  Bacterial polypeptide expressing nucleotide sequence isolated from the Sargasso Sea
tatgataagtgtaatttttccagatgattccgtaaagaaatttgacaaaggtgtcaaagttattgatgtagctaaaagtattagcgagggactagcaagaaaagttatttcagcatcttttaataacgaaactctcgaacttaactcaaaattagtcactgatggaaatattaagctgtttacatgggaggatgatgaaggaaaacaagcattttggcattcatcagctcatattttagctcaaacaataaaatttttctatcctaaatctaaattaacaattggtcctttcattgaaaatggtttttactatgatgttgattttggtg

SEQ ID NO: 302701 - DNA, 478 bp, Unknown
  Bacterial polypeptide expressing nucleotide sequence isolated from the Sargasso Sea
atggaaaaagaacctattactgttaatggtttagaaaaactaaaacaggaattaatattacttaaagaaaaaaagagaccagaaatagttgcggcaattgcagaggcaaggtctcatggagatttaaaagaaaatgcagaatatcatgctgcaaaagaacagcagtctcataatgaaggaagaattcaagaagttgagaatattatagcaagagctaacgtaattgatgtaaccaagatttctaatgatggaaaagttatttttggttcatctgtttttctacaaaatttagatacaaatgaaaaaataaattacaaaattgttggtaaagacgaggccgatttaaaacaaaagttactttattttaaatctcctataggaaaaggattaattggtaaaaacaaaggagatcttgtagaagtaaatacgccagcaggagtaaaaaactttgaaattattgatgtaaaatatatttaat

SEQ ID NO: 302702 - DNA, 184 bp, Unknown
  Bacterial polypeptide expressing nucleotide sequence isolated from the Sargasso Sea
gttaaaaaaatgacaccgagagatgaagtgatagcggagtttgaaaataggggcgagcaatacaagttaaaattgatagaagacatgcctgaagaggaagcaatggggctttactatcaccaggaatatatagatatgtgccgaggtccgcacgtacctaacaatagttttctagaaaatttta

SEQ ID NO: 302703 - DNA, 268 bp, Unknown
  Bacterial polypeptide expressing nucleotide sequence isolated from the Sargasso Sea
aatgccaaatataaaattacctgacggaaatacaatcagttttgaaaaaaaagttactggattgcaaatagcagagaagataagtaaatctctctcaaaacaagctttggtaattagtgttgatggaaatttaaaagatttaagttatgaaattgataaagactgctctgttaaaattcatacagcaaaagataaagaaggaatagaaacaataagacatgatacagcacatgttttagcaatggctgtacaagaactttttccagga

SEQ ID NO: 302704 - DNA, 799 bp, Unknown
  Bacterial polypeptide expressing nucleotide sequence isolated from the Sargasso Sea
gcaatggatccaatcggagacgaggagctccgtcaaatagagaagaggatgaaagaactggtgaagcagaacatcccgattgagagggaagagcttgacaatgagtcactcagggatatattctcctcgaatcccttcaaattggagataatggatgataaaatcggccatgatgtgggttcgtcggcttaccgtcagggagacttcatcgacctctgcaaaggccctcatgtctcactgacctcccaattgaggtggttcaagctaaccagcaccagccaggcatactggagggcggataaggacagggggtcgctggtcaggatttacggaatgtgctatccttccaaggatggtctgaaggaacgcgagaggcagatacaagaggctgcaaggagagaccacaagaagatagggaaggagatggggctctacatgattaacgagttgatagggaagggcctccctgtttggctaccgtacggcgaggtgctgaagtcggagatagagaacttcgcgatagagacagaggaggcatatgggtacgacagagtgactaccccggttcttgggaagaaggagcttttcgagacatccggccatctgccgcactacgcggaggggatgtacccgccaatgaagatggatgatggcgattactacctcaaagcgatgaattgtccgatgcaccacctagttttcacgaatagcaaaaggtcctacagggacctccccattagaatcgcagagtacggtactgtgtacaggaacgagttgtccggaacgctagcaggacttc

SEQ ID NO: 302705 - DNA, 100 bp, Unknown
  Bacterial polypeptide expressing nucleotide sequence isolated from the Sargasso Sea
cactgcacatcttatggctcaagcagtaaaggaattatttcccaaagcaaaagtaaccattgggtcctacaatagagaatggtttttattacgattttga

SEQ ID NO: 302706 - DNA, 529 bp, Unknown
  Bacterial polypeptide expressing nucleotide sequence isolated from the Sargasso Sea
atgagcagattattagaagaatataatagtaatataaaaaaagaattaaaatctaagttaggtctgcaaaatatatttcaagttcctaagttaaaaaaaatagttttaaatatgggtgttggagatggtaaagaagattccaagttaatcgataaagcgcttgatgatttaacacttatatcaggtcaaaaagctgttaaaactaaatccaaaaaagctatatcaggttttaaaattagagagggcatgccattaggcgtcaaagtaacattaagaaataaaatgatgtatgaatttcttgataggttagtaaacatagcgatcccaagaattagagattttagaggcttaagtacaaaaagttttgataataatggaaatttttcaatgggaattaaagagcatgtaatatttccagaaatcaactttgataaagtcgaaaaaataagagggatggatattactatttgtacttcaggaaaaaataataacgaggcacttgaattgcttaaaagttttaacatgcctt

SEQ ID NO: 302707 - DNA, 388 bp, Unknown
  Bacterial polypeptide expressing nucleotide sequence isolated from the Sargasso Sea
ttgcatagagcgttatttggttctctagaaaggtttataggaattttaattgagaactatgcaggaaaatttcctttttggatatctcctttgcaaaccatggtaatacctatttcagaagaattcaatgactacgcagttgaagtgtttaaaaaaataaaaaaagcagggatcagttctgcagtagatttaaaaaataataatttaaattataaaattagagatcattctttgtcaaaaataccagttttgttgatttgtggtaaaaaagaagttgactccaattcagtaacgattagaagattagactctaataaacaagaaaatatggacatagaccaattcttaaaaacattctctgctttaaataaagcatcttcaaactaag

SEQ ID NO: 302708 - DNA, 424 bp, Unknown
  Bacterial polypeptide expressing nucleotide sequence isolated from the Sargasso Sea
atgatttccgttgacatcggtgagggcgagtctcacgagtacgcaagtggcatcagcgctggagaggtaatcaaaaatgtccatgggaggaagtcaggggcagtggccgcattcgtaaacggggaggagagggacatgtccttcgcactagatgagaattgtaagttagagccgatattgggtgattccgaggaggggctgtacatcctaaggcacagttgcgcacatcttctggctcaagcagtgactcagctttatccggatgccaaacccacaatcggacctccgatagagcacgggttctactatgacttcgcaatggatccaatcggagacgaggagctccgtcaaatagagaagaggatgaaagaactggtgaagcagaacatcccgattgagagggaagagcttgacaatgagtcac

SEQ ID NO: 302709 - DNA, 112 bp, Unknown
  Bacterial polypeptide expressing nucleotide sequence isolated from the Sargasso Sea
gatgatacacagagcattgtttggatcgctcgaaagatttattggtattttaattgagaattacgcaggaaaatttccattttggatttcaccattacaaacagttgtgatt

SEQ ID NO: 302710 - DNA, 259 bp, Unknown
  Bacterial polypeptide expressing nucleotide sequence isolated from the Sargasso Sea
tgtaattgatatcaccaaaattgttaatgatggaaaagtgatatttggatcaacagtctaccttcaaaatttagatacaaatgaaaaaataaattacaaaattgttggtaaagacgaggcagatctaaaacaaaagcttctttattttcaatcgccaataggaaaaggtctcattggcaaaaataaaggagatcttgtagagataaatacaccagcaggggcaaaaaattttgagattatagacgtaaaatacgtttaa

SEQ ID NO: 302711 - DNA, 541 bp, Unknown
  Bacterial polypeptide expressing nucleotide sequence isolated from the Sargasso Sea
aatggtaaatttaaaacaaaaatacataaatgaaatcgttcctcatctgaaagattcacttggtttggtaaatgtgatggcagtgcctaggattacaaaaataactctaaacatgggtgtcggtgaagctgtgggtgataagaaagttatggaaaacgccttagcagatttagaaaaaatatcagggcaaaagcctgtagttactaagtcacgaaaatctatagctggttttaaaatccgtgaaggctggccaatcggttgtaaagtaactttgcgatctcaaaggatgtatgagtttttggataggctaatttccatcgcgattccgcgtattcgcgactttagaggtgtcagtcctaagtcctttgatggaaagggtaatttcgcaatgggagttacggaacagattattttcccagagatagattatgatcaaatagattctcttcggggtcttgatattactattactacaacagctagaacagatgacgagggaagagctcttctgagagcatttaatttcccattaaaggagtga

SEQ ID NO: 302712 - DNA, 356 bp, Unknown
  Bacterial polypeptide expressing nucleotide sequence isolated from the Sargasso Sea
catgactcttaaaactcgctataaagaaaccataagaccaaagcttttaaaagaccttggtcttaaaaatattcatcaagtccctaaggttattaaagttaatgtcaatagagggcttggagaagctgcttcaaattcaaaggcactagaagcttcattaaatgaaatagcaacaattacaggacaaaaagctttagtgactagagccaagaaagcgattgcaggctttaaaataagagaagggatggctattggttgtactgttaccttgaggggtgacagaatgtattcttttttagaaagatttataaatctagcattaccaagaattagagactttagaggtgttaatccta

SEQ ID NO: 302713 - DNA, 321 bp, Unknown
  Bacterial polypeptide expressing nucleotide sequence isolated from the Sargasso Sea
aatgattaaagttgaatgcaataatgagatacatgaattttcttctgaaattagtgtaaatgaagtcattaaaaaggtctatggaaaaaaatctagtgctatagcagctttagttgacaatgaacagaaagacttatcctatttattatatcaagattgtaaaatagagctaattaaagactgttcaaatgaagggctttacataatgaggcattcatgtgcacatcttttagcccaagccgttacagaattgttccctgatgcaaaaccaacaattggacccccgattgatgatggtttttattacgattttcatatgaa

SEQ ID NO: 302714 - DNA, 669 bp, Unknown
  Bacterial polypeptide expressing nucleotide sequence isolated from the Sargasso Sea
gtggcgggaaagaaatgtggatggactggcgcatggcggaatttggggtagcagctgtgccttgcggttctgcaccaagagaactttttgcccatagtcataagccaattagaagcttggacgattataaaggtatgaaagttcgtacggcaggtgcctgggctgaaattgcacaaaaactaggtgcatctacagttattttagcaggcgctgaagtttatccagctctagagagaaaagttgttgatgcaatcgaatggggaacaccaacccataacattgtgatgggcttcgagaaagtagcaaaatatatcgttgttccaggcgttcatcaaccaatcgctatgcatgagtgcgcagttaacaaaaaagtgtgggacggaatgtctgacatgattaaaaagcaaatcacggcaggcggtaaaatgatgacctgggatctttacatgaaacttggacatgacgatgcgccaaactggatgaagtacgttaatagcaagaaaaacgaaatcatagatcttccgcagtcatttaaggatgctgccaaaaaagcaaccgacgaatgggcagaagaaacaggaaagaaagcaaacgactggtttagaaaaatctgggcctctcaaaatgcttacaaagacgcttggtctcaagcgcaccgctatcgttaaa

SEQ ID NO: 302715 - DNA, 367 bp, Unknown
  Bacterial polypeptide expressing nucleotide sequence isolated from the Sargasso Sea
attacaggacaaaaggccttagtaactagggccaaaaaagctatcgcgggttttaaaattcgtgaaggaatgcctattggttgtactgtaactttgaggggagacaggatgtattcctttttggaaagattcataaatctagctttaccaagaataagagactttagaggagttaatccaaaaagtttcgatggaagagggaattatactgttggggtaaaagaacaattgatttttcctgaaatctcttttgataaaatagattcaataagaggtatggatataactattgtcacaagtgcaaaatcagatcaagaaggtaaagctcttttgcaggagttaggaatgccttttagtaagaattaaa

SEQ ID NO: 302716 - DNA, 892 bp, Unknown
  Bacterial polypeptide expressing nucleotide sequence isolated from the Sargasso Sea
gccctacaagaggaaatcgttcagatcgcgcgcaactccggcatgcgtctgatcggacctaattccatgggcgttatagatacacgtgcgcgcatgacactgaccatcaatgccttcctagaagatccagaattgaaatccggacgcatcggtgtcatctcgcaaagtggcaccgtcatcggtacgatgatgtcgcggggctccgcacgcggcatcggtttctccaacttggtatcaatcggcaacgagtgcgacgttggcgtcggcgagttattaggcttaatggtagatgatgctggaacggacgcagtactcttattcctcgagggaatccgggatgcggaggccctggcggctaacgcccggcgtgccttcgaggttggcaagccggtgatcgcttacaaactgggccgttctgacgtcggacgggagctggctgtatcacattccggcgcgatcgctggaccagatgcgtccgtggatgcgttctttcgccatcacggtatcctgcgagtcgatatgctggagactttattcgaactgccaccattaatcataaatgctcgaccgacccctggccaccgggtcgccgtcgtaaccaccacgggcggtgggtccgccatggtcgtcgatcgccttggcgcggctggactggagttggtcccgccatcaacccggttaaaagcccgaatggctgagttcggtcttgatcttggtaaccgccgtgtcattgatctgaccatggctggtacaggtaagggcgtttacggcgctgcattggacgtgcttttgaatgaagacaagttggacgccgtggttgccgtggtcggcacatcggcccaattccaccctgaagtcgcggttcagccaatcattgacgcgcctaagacgg

SEQ ID NO: 302717 - DNA, 910 bp, Unknown
  Bacterial polypeptide expressing nucleotide sequence isolated from the Sargasso Sea
tgggatatatcttggcttccactaggttttaaagtgatgaaaaaaattgaaaaagtaattcgagaggaacaaaatagtattggagcacaagagatgttaatgcctactatacaatctgctgatatatggaaagaaagtggtaggtatgaagattatggagaagaaatgcttagaatttccgatagacaaaagagggaaatgctttatggacccacaaatgaggaacaaatcaccgaaatatttagaacaagtgtcaaatcatacaaattattgcctcaaattttgtatcacatacagtggaaatttagggatgaactgagacctagatttggagttatgagatgtagagaattttatatgaaagatgcttactcattcgacctaaatgagcaggatgcagagttatcatataataagatgtttttttcttatctaaaaacattcaatcgtttaggattgaagtcaattccaatgaaagcagaaactgggccaataggcggggatttatcccatgaatttataattttagcagaaactggagaaagtaaaatttttgcagataaaagaattttcgatgtaccaattgaaaactataaaaatgaaagaaattctttaaaaaaaatgagggatgatttttctaaattttatgctgttacagatgaaaaatttaaatctgaagattttaataataacgtaaaaaaagataaccaattacaaaccaaaggcatagaagtaggtcatatcttttactttggagataaatattcaaaacccatgaattgttcagttgatagcaaagatggaaaaaaaatatttgtaaaaatgggttcatacggcattggagtatctaggttagtcgcagctataatagaagcgaaattttcaaatgaaaagatgaagggccaagaga

SEQ ID NO: 302718 - DNA, 468 bp, Unknown
  Bacterial polypeptide expressing nucleotide sequence isolated from the Sargasso Sea
cttggtccacagggatcgaggccagcgccttttgctcagcggcaatgtaatcggaaatccactccttcatcgacccgaatgtatcgcgaagacggccgaactccagccggaattgatcacagggatttccggctcgccgaatggactgtttttcgatagaccaacgcccatgcaggacgcgaaacacgaagtgcaacgcaaaacgattgaggaacgccaacaaatggacgagttgtcccgtatccgccattcttgcgcccatgtgctagcaacggctgtgctccgtctttggccagaggtaaaactagatataggcccgcccacagaggaggggttttattatgatttcgatctcgaacaccgctttagtccggaagatttcgagaagatcgaggctgagatgaagaaggtggtgaaggaaaatcaaacctttgatttttctgaaaaatctcgcgacgaagccaagga

SEQ ID NO: 302719 - DNA, 306 bp, Unknown
  Bacterial polypeptide expressing nucleotide sequence isolated from the Sargasso Sea
cttatcaaataattttattgagcattactgatagaaatattcaaaagtgtttaaagtttaatgaattaataaataataatggttaccgatcaaaagttgatatcaggaatgaaaaaataggatacaaaataagagaggcaactctcgggagagttcccttaattgcagttattggagataaagaagatgaaattgattcagtcgccttaagagctttgaatggaagaaatttaggaattttcaatttacccaatctttacaaattaattgatgaattaatagaaaaaaaagggagaacagaataat

SEQ ID NO: 302720 - DNA, 464 bp, Unknown
  Bacterial polypeptide expressing nucleotide sequence isolated from the Sargasso Sea
agtacctaaagttgttaaagtcaacgttaacagaggtcttggtgaggcagcttcaaattcgaaagctctagaagcctctttaaacgaaatggcaacaattacaggacaaaaggcccttgtaactagggctaaaaaagctatcgcgggttttaaaattcgtgagggcatgccgattggttgtactgttactttgagaggcgacaggatgtattcctttttggagagatttataaatctagctttaccaagaataagagacttcagaggagttaatccaaaaagtttcgatgggagaggaaattataccgttggagtgaaagagcaattgatttttcctgaaatctcttttgataaaatagattcaataagaggtatggatataactattgtcaccagtgccaaatcagatcaagaaggtaaagctcttttgcaggagttaggaatgccttttagtaagaattaaa

SEQ ID NO: 302721 - DNA, 500 bp, Unknown
  Bacterial polypeptide expressing nucleotide sequence isolated from the Sargasso Sea
tgcctcaacgaatcaaatggatttggtaatgggtagccgttttgggttgaagtatactgccagtgacagtcaggaacatactcctataattatccaccgtgcccctctgggtacgcatgaaagatttgtggctttcttgattgaacactatggaggagcattcccaacatggctggctcccgtgcaggtacgttttattccaatagcttcagcattcaacgaatacgcctatagcttgaatcaaaacttgtacaattctttaatacgcacagaagttgatgattctcatgactcattcagcaagaaaataaggaatgccgctcttgataagatcccaaatcttcttattgtgggagaaaaagaacaatcaaatcaaaatgttacttggcagcgatacggaacgaaaacacgagagtctttgtcattcgaagtcttttcttcaatgctcagtgaggaaataactaatcgccttgattggcgtaacgataaaaaaatataat

SEQ ID NO: 302722 - DNA, 265 bp, Unknown
  Bacterial polypeptide expressing nucleotide sequence isolated from the Sargasso Sea
atgcctaatattaaattaccagatggaaattcaattagttttgaaaaaaaggttactggacttcaaatagcggaaaagattagtaagtcgctttcaaaacaagcgttagtaattagtgttgatggaaatttgaaagatttgaattatgaaataaataaagattgttcagtaaaaattcatactgcaaaagataaagaagggatagaaacaataagacatgatacagcacatgttttagcaatggctgttcaagaactttttccct

SEQ ID NO: 302723 - DNA, 270 bp, Unknown
  Bacterial polypeptide expressing nucleotide sequence isolated from the Sargasso Sea
tatgactctaaaaaatcgctacaaagaatcaattagaccaaaacttttaaaggaccttggcctaaaaaatattcatcaagtccctaaagttgtcaaagtcaacgtcaacagaggtcttggtgaagccgcctccaattcaaaagctttagaagcttcttttaatgaaatggctacaattacaggacagaaagccttagtaactagggctaaaaaagctatcgcggggtttaaaattcgtgaaggtatgcctatgggttgtactgtaacttt

SEQ ID NO: 302724 - DNA, 541 bp, Unknown
  Bacterial polypeptide expressing nucleotide sequence isolated from the Sargasso Sea
tatgactctaaaaaatcgctacaaagaatcaattagaccaaaacttttaaaagaccttggtcttaaaaatattcatcaagtacctaaagttgtcaaagtcaacgttaacagaggtcttggtgaggcagcttcaaattcgaaagctctagaagcctctttaaatgaaatggcaacaattacaggacaaaaggccctagtaactagagccaaaaaagctatcgcgggttttaaaattcgtgagggcatgcctattggttgtactgtaactttgaggggagacaggatgtattcctttttggagagatttataaatctagctttaccaagaataagagactttagaggagttaatccaaaaagttttgatgggagagggaattacaccgttggagtgaaagagcaattgatttttcctgaaatctcttttgataaaatagattccatcagaggtatggatataactattgtcactagtgcaaaatcagatcaagaaggtaaagctcttttacaggagttaggaatgccttttagtaagaattaa

SEQ ID NO: 302725 - DNA, 547 bp, Unknown
  Bacterial polypeptide expressing nucleotide sequence isolated from the Sargasso Sea
aatgcttactagcaaagatcataaaagtggatctgatagaatttatgaggcactagaaaaatttgatccccaaaaaaaaataaaaaaaattattcacctacagggtgatttgcctaatgtttcaaaaaaattaatcgtaagtctggcagatataattaagaataataaatgtattgccactccagtagttcaagcagataaaactgagattttagatgaaaacattgttaaatgtgcagcatcttttaaaaacccaaaaccaaaaattggagagataggaaatgcactatattttagtagatgtccaattccttggggagatagtattaaatggcatcatcttggtatttatggttgggatagatctatacttgaaaaatatataaaactcaaaccatcaaatttagaaatgagtgaaaaattagagcagttaagagcgctagaagctggatttaacatcaaaatcttaattacaaatgagaaacctattggtatagatactattaatgatttaaaaaaatttaaaaagagtattaatgcttattag

SEQ ID NO: 302726 - DNA, 427 bp, Unknown
  Bacterial polypeptide expressing nucleotide sequence isolated from the Sargasso Sea
cgtcggtgaggcagttgcggacaagaaaattcttgataacgcagtgggtgatttgactttgatcagcggccaaaaacccattgtcacgaatgcccgaaaatctatcgctggctttaaaatccgtgaaggatggcctatcggttgtaaagtcaccttacggcgtgaccggatgtacgagttcttggaccgcttggtcagcgtggcgattccgcgcattagagatttccgaggttttagtccaagggcgttcgatggccgtggcaactatagtctcgggctgcgggagcagattgtgtttccggaagtcgactacgataaggtcgacaagctgcgaggcttgaacgtaactatcacgacttcagcacgcaccgacgatgaaggtcgggcgttgctgcgagcattcaattttccttttcggcccaactaa

SEQ ID NO: 302727 - DNA, 371 bp, Unknown
  Bacterial polypeptide expressing nucleotide sequence isolated from the Sargasso Sea
tatggataaagaaccaattactactgaaggattagaaaaattaaaaagtgaattaatttttttaaaagaaaaaaagagacccgaaattgttgcagccattgctgaagcaagatcacatggagatttgaaagaaaatgctgaatatcatgctgcaaaagagcagcaatctcataacgagggaagaattcaagaagttgaggatttaattgcaagagcaaatgtaattgatatcaccaagattagtaatgatgggaaggtgatatttggatctacagtctaccttcaaaatttagatacaaatgaaaaaataaattacaaaattgttggtaaagacgaggcagatctaaaacaaaagcttctttattttcaat

SEQ ID NO: 302728 - DNA, 391 bp, Unknown
  Bacterial polypeptide expressing nucleotide sequence isolated from the Sargasso Sea
tatgttgcacagagcgttatttggttctctagagagatttattggaattttaattgaaaactatgcaggtaagtttccattttggatatctcctttacagactatggtaatacctatttcagaggaatttaatgactatgcagtcgaggtatcaaataaaattaaaaattcaggtataagttctgcagtagatttaaaaaatcataatttaaattataaaattagagatcattctttagcaaaaataccgcttttattaatttgtggtaaaaaagaagttgactccaattcagtaacgattagaagattagactctaataaacaagaaaatatgggtttagatcaattcttaaaaacattctctgctttaaacaaagcatcatcaaactaa

SEQ ID NO: 302729 - DNA, 448 bp, Unknown
  Bacterial polypeptide expressing nucleotide sequence isolated from the Sargasso Sea
atgataagtataattttcccagatgattccgtaaaaaaatttgacaaaggtgtcaaagtaattgatgtagctaaaagtataagcgagggtttagcaagaaaagttatctcagcatcttttaataatgaaactcttgaacttgactcaaaattgaccactgatggcaatattaagctatttacatgggaagatgatgaaggaaaacaagcattttggcattcatcagctcatattttagctcaaacaataaaatttttctatccgaaatctaaattaacaattggtccttcaattgaaaatggtttttactatgatgttgattttggtgatgaaactatttcagaaaaagactttataaagattgaggcaaaatttcttgagttttcgcgaaatgatttcaaatttaaaatgaagagcatttcaaaaaaagaagctttagaattttata

SEQ ID NO: 302730 - DNA, 803 bp, Unknown
  Bacterial polypeptide expressing nucleotide sequence isolated from the Sargasso Sea
gatgctaatgccaacgatacaacctgccgagatatggaaagaaagtggaagatatgatgattacggagaagaaatgctaagaatttcggatagacaaaaaagagaaatgctttatggacctacaaatgaggagcaaattacagaaatcttcagatctagcgtaaaatcttacaaattattgccgcaaattttttatcacatacagtggaaatttagagatgaacttagaccaagatttggtgttatgagatgtcgtgaattttatatgaaagatgcttattcatttgatttatcagaaagtgacgctgttatgacttataataagatgttttatgcatatctaaaaacttttgatcgtttaggattaaaatctataccaatgaaagctgaaactgggccaataggaggagatctttctcatgaatttgtaattttagctgatactggtgagagcaagatatatgcagataaaaaaattttcgaaattcctataaataactatgagaataatgaatcttcattaaataaaatgagaaaagatttctcacaattttatgctgttacagacgataaatttaaaaaagaagattttgataaaagcgtagaaaaatctaaacaaattcaaacaaaaggaattgaagtaggtcatatattttattttggtgacaaatactctaaaccaatgaattgcagtgtagactctaaagatggaaaaaaagtatttgtcaaaatgggatcatatggaattggagtctcaagattggtaggcgcattaatagaagcaaaatatattaatgaaaaaa

SEQ ID NO: 302731 - DNA, 617 bp, Unknown
  Bacterial polypeptide expressing nucleotide sequence isolated from the Sargasso Sea
tttttccgccaatactccaaatggatggaaaataagtataatgcttgaggaaattggttatgaatacaaagtaactaaagttgatttaggaaaagacgaacaattcaaaccagaatttataaagattagtccttttggaaaaattccagtgattattgatagcgaaaatgacaaaagtgtttttgagtctggagcaatattaatgtatctgggagataaaagtggcaaattttataacaaaaaagataggttggttattaatcaatggttgatggctcagatgggaacagtcggtcctatgattggtcaacatcatcagtttcatcattataatcctggtaagagtgaatttggtgagcaaagatattttaaaattactaaaagaatttatggagaacttgatgcaagattaaaagaatctaaatttcttgcaggttcagattatacaatagcagacattgcaacttggccctggattgctagacatgaatggcatgacattggtttaaaaagttatagaaatttatcaagatggtatttggaaatagcagatagagaagcagttgttagggggtatagttttatggataaagaagcgaaagtaccaaaactttaaa

SEQ ID NO: 302732 - DNA, 202 bp, Unknown
  Bacterial polypeptide expressing nucleotide sequence isolated from the Sargasso Sea
tttttgataaacctggatactaatgaaaaaataaattataagattgttggaaaagatgaggccgatttaaaaaataaattactttattataaatcaccaattgcaaaaggattgattggaaaatcgaagggagactttgctgaagttgaaactccagctggaaaaaaaaaatttgaaataactaatgttaaatacgtttagt

SEQ ID NO: 302733 - DNA, 352 bp, Unknown
  Bacterial polypeptide expressing nucleotide sequence isolated from the Sargasso Sea
aatgaataaacttgatacaaattcgaatctctacaaaatcagacattcgcttgcgcatttgctggcacaggcagttctggaaatacgtcctagcgctaaacttggtttcgggcctccggttgaaaatggattttattatgattttgatctagatgaaccattgacgcctgaagatttgcccaaacttgaaaaacgtatgagacatattattaagtcaggacaggttttcgaacgagaagaattaggccaggagaaaatggttgaacttttgagcagggaaaatcagcattacaaaattgagcaggtcgaggatcttgttgcgcaaaacgaaataataagtatataccgcaat

SEQ ID NO: 302734 - DNA, 280 bp, Unknown
  Bacterial polypeptide expressing nucleotide sequence isolated from the Sargasso Sea
actgatagaaatattgaaaagtgtttaaagtttaatgaattgataaataacaatggttaccgatcgaaagttgatattaggaatgaaaaaataggatataaaataagagaggcaactcttgggagaattcctttaattgcagttattggagataaagaagaggagattgattcagtcgccttaagagctttgaatggaagaaatttaggaattttcaatttacctaatctttacaaattaatggatgaattaattgaaaaaaaagggagaacagaataat

SEQ ID NO: 302735 - DNA, 285 bp, Unknown
  Bacterial polypeptide expressing nucleotide sequence isolated from the Sargasso Sea
cttgcttgatcttgatactaagcgtcactcttgtgcccatgtgatggcaggcgccattcaatccatctggcccaaagctcaatttggggtcggcccaacgatagaaaatggattttattacgatgttttggttgaagaaaacattaccgaagaggatttggcaaaaatagaatctgccatgcgcaaaatcaaaaaaaagaaatatcgttttgaaaaatccatagtgcccaccgacgaggccatcgagaaaatgaagcaagataaccaacctttcaaagttgattt

SEQ ID NO: 302736 - DNA, 257 bp, Unknown
  Bacterial polypeptide expressing nucleotide sequence isolated from the Sargasso Sea
tgagtatgcctttagtctcaaagaaaaatttgatgaaatcaatttacgtgttgagcttgataatagaaatgaaaaaattggttataagataagagagcatagcaatgcaaaagttccactaatggcagtaattggtaaagacgagatggaagcaaatactatctctataagaaacttgagtgaaaataaaacaaatacctactcaattgatgaagcagttgtattattagaagctagctcaagcactccaagataga

SEQ ID NO: 302737 - DNA, 301 bp, Unknown
  Bacterial polypeptide expressing nucleotide sequence isolated from the Sargasso Sea
aatgactagactactagaagattacaaaaaaaatatttctaacgatttgatgaataaacttaagctaaataatagctttcaagttccaaaattaattaaaattgtactcaatatgggcattggtgatggcaaagaagactcaaaattaattgataaagcgcaagaagaattaactatgatatctggtcaaaaagcaatcaaaacaaaagctaaaaaagctatatcaggtttcaaaattagagaaggaatgccattaggggtgtcagttacattaagaaataaaatgatgtatgagttttgg

SEQ ID NO: 302738 - DNA, 391 bp, Unknown
  Bacterial polypeptide expressing nucleotide sequence isolated from the Sargasso Sea
atgttacatcgtgctttatttggatcacttgaaagatttataggtatactaattgaaaattattctggtaaacttccattttggattagtcctttgcaaactgttgtaatacctgtttctgatgaattcgatgaatattcaaaaaaagtaaataaacaattagtcgatgcaggtttttcatcggaagtagatcttaaaaatcataacttaaattataaaattagagatcattctttgtcaaaagtcccgatattattaatatgtggaaaaaaagaagttgactctaacagtgtaactattagaagattggattctaataaacaggaaaacatagaattgaaaaaatttataactatccatcaggctttaaacaaagctccttctttataag

SEQ ID NO: 302739 - DNA, 238 bp, Unknown
  Bacterial polypeptide expressing nucleotide sequence isolated from the Sargasso Sea
gactatgggggctatgaggtagagactccaatcatgtatgactcacttcatcctagcatggagagttatttttacagatttcctgcaaggcaatacaacattgatgcagatggaaaacaactattcttaagatttgcagcctgctttggacagtttttgatagcgcatgacatgcaaatttcttacaaaaatttaccataccgactctatgaaatgcctcgatatagctttagccgta

SEQ ID NO: 302740 - DNA, 204 bp, Unknown
  Bacterial polypeptide expressing nucleotide sequence isolated from the Sargasso Sea
tatttttagaaaacttagatactaatgaaaaaataaactacaaaatagtttgtaaaaatgaagcagatataaaacaaaaactaatatttttccagtctcctattggacgaggtttaataggaaaaaataaaaatgatctagtagaaattaatactccagcgggggttaaaaactttgagattaaagatgttaaatatatttaac

SEQ ID NO: 302741 - DNA, 215 bp, Unknown
  Bacterial polypeptide expressing nucleotide sequence isolated from the Sargasso Sea
aaaagttgatattaggaatgaaaaaattggatataaaattagagaggcaactctcgatagagtccccttaattgcagttattggagataaagaagaggaaattgattcagttgccttaagagctttgaatggaagaaatttaggaattttcaatttagcaaatctttataaattaatggatgaattaatagaaaaaaaagggagaacagaataat

SEQ ID NO: 302742 - DNA, 927 bp, Unknown
  Bacterial polypeptide expressing nucleotide sequence isolated from the Sargasso Sea
gatgtatcagcggcccaacaaacacattatccgcttactccggcgtttccggcgtccgattgcgttgtttatcgggctgcaggttgtgtggtttgctctgttagcgctttgggttacctggtttatccaccaacaagagagcatcggtaagctaagccaagccctcaacgagacgcccatagacggcaccaccggtatcgtggccctggttataggctgtattctattaggcgttattctcgtgggaactgccgttttattcacgatgaatcagattcaaagtggacttattaagcagcaaaaatcatttgtttcgagtgtaacccatgagcttcgctctccactgtcgagcattcaactaagctttgagactctgcagcgtcccaatcttcccgatgacatcaagtgtaagctgatggaaatggtcgacagagacatcgttaggctcagccaactgatcgatcgtatcctactctcgtcacgactcgaccgaggaattttagactatgctagtcaactagaaaccttcgccctaagggatgctatctataactgcgtggaaagaagcatgcatatggaccgcacacttaaggacaggctcgagatcacctgtcctgagagcttagaggtgcgaggtatcaaaatggcgttcaatatgatcgtcggcaaccttctcgagaatgcaataaagtactcacctaagggaactttgatcaaaatagaagcagggcgtcgcgagcacgagttctttcttcacgttaaggatcaaggttttggtttaaataagagggatcatcgtaagatttttgatatgtttcatcgcacccaacgagccgctcaaaaagctgtttcggggactggcctaggactgtttatcgttaagtctatggtcgactcacttggcggacgtgtgtgggtagagagtga

SEQ ID NO: 302743 - DNA, 266 bp, Unknown
  Bacterial polypeptide expressing nucleotide sequence isolated from the Sargasso Sea
aatgttaaatataactctaccagatggaaataagcttaactttgaaaaaaaagttacaggtttagaagttgctgaaaagatcagcaaatccctttcaaaaagtgctttactaataagtattgatggtaaattaaaggatcttaatacagttattgaaaaagactgctctgtcaaaatatttacttcaaaggataaagaaggtcttgagacaataagacatgacacagctcatgtcttagctatggctgtgcaagaactatttcctg

SEQ ID NO: 302744 - DNA, 532 bp, Unknown
  Bacterial polypeptide expressing nucleotide sequence isolated from the Sargasso Sea
aaaatccgctacaaagaatcaataagaccaaaacttttaaaggatcttggtcttagaaatattcatcaagtacctaaagttgtcaaagtcaacgttaacagaggtcttggtgaggcagcttcaaattcgaaagctctagaagcctctttaaatgaaatggcaacaattacaggacaaaaggctcttgtaacaagggctaaaaaagctatcgcgggttttaaaattcgtgagggcatgccgattggttgtactgtaactttgagaggagacaggatgtattcctttctggagagatttataaatctagctttaccaagaataagggactttagaggagttaatccaaaaagttttgatgggagagggaattataccgttggagtgaaagagcaattgatttttcctgaaatctcttttgataaaatagactcaataagaggtatggatattaccattgtcactagtgcaaaatcagatcaagaaggtaaagctcttttgcaagagttaggaatgccttttagtaagaattaaa

SEQ ID NO: 302745 - DNA, 541 bp, Unknown
  Bacterial polypeptide expressing nucleotide sequence isolated from the Sargasso Sea
atgactttaaaaaatcgctacaaagaatcaataagaccaaaacttttaaaggaccttggtcttaaaaatattcatcaagtacctaaagttgtcaaagtcaacgttaacagaggtcttggtgaggcagcttcaaattcgaaagctttagaagcctctttaaacgaaatggcaacaattacaggacaaaaggcccttgtaactagggctaaaaaagctatcgcgggttttaaaattcgtgagggcatgccgattggttgtactgttactttgagaggagaaaggatgtattcctttttggagagatttataaatctagctttaccaagaataagagacttcagaggagttaatccaaaaagtttcgatgggagagggaattataccgttggagtgaaagagcaattgatttttcctgaaatctcttttgataaaatagattcaataagaggtatggatataactattgtcactagtgcaaaatcagatcaagaaggtaaagctcttttgcaggagttaggaatgccttttagtaagaattaaa

SEQ ID NO: 302746 - DNA, 366 bp, Unknown
  Bacterial polypeptide expressing nucleotide sequence isolated from the Sargasso Sea
tattgattttagccgcattgtctgaccaacaagcggcagaactggaggatacggcaagaggcttaaatctggatgttcttcttgaagttcataatttacctgagttgagtcgggcattgaggctcaagagcaagatgattggaataaataatagaaacctaaagacgttggaagtggatttaaaaatgaccgaagaacttgctggaaaattacccaataatttcttggttatcagtgagagtgggttgtttaccccaattgatcttgctcgaatggcagaatttggagttaagtgttttttaattggggaggctttcatgcgagaggatgatgttgaactcgcagtaagaaaaattttagcataaa

SEQ ID NO: 302747 - DNA, 526 bp, Unknown
  Bacterial polypeptide expressing nucleotide sequence isolated from the Sargasso Sea
aatgtataaatatccaattggagtatttatttcaggtcgcggttcaaatttgatgtcaattataaaggcatctaaagataaaaattatcctggcgtaataaagttggtattttcagataatccttgtgcaaaaggtttagaattagcaaaagaaaataatatcgaatactttacgctggattataataattatgaaaataaaaatatttttgaaaaagaaattcttgctttaattaagccatataaactcgaattaatttgtttagcgggatatatgagaattctaacaaaaaattttattgattcttatccagataaaatactgaatatacatccatcattactcccaaaatacaaaggtctaaatacccatcgacgtgcaatagaaaataaagaaaatattacaggatgcactgtacattatgttaatcaaaacttagatgatggcaaaataatattgcaaagagaagttaagatagattacggtgaaaccgagaagacacttgccaataaggtccttgcggct

SEQ ID NO: 302748 - DNA, 541 bp, Unknown
  Bacterial polypeptide expressing nucleotide sequence isolated from the Sargasso Sea
tatgactctaaaaaatcgctacaaagaatcaataagaccaaaacttttaaaggaccttggtcttaaaaatattcatcaagtacctaaagttgtcaaagtcaacgttaatagaggtcttggtgaggcagcttcaaattcgaaagctctagaagcctctctaaacgaaatggcaacaattacaggacaaaaggcccttataactagggctaaaaaagcaatcgcgggttttaaaattcgtgagggcatgccgattggttgtactgttactttgagaggagacaggatgtattcctttttggagagatttataaatctagctttaccaagaataagagacttcaggggagttaatccaaaaagtttcgatgggagagggaattataccgttggagtgaaagagcaattgatttttcctgaaatctcttttgataaaatagactcaataagaggtatggatataactattgtcactagtgcaaaatcagatcacgaaggtaaagctcttttgcaggagttaggaatgccctttagtaagaattaa

SEQ ID NO: 302749 - DNA, 411 bp, Unknown
  Bacterial polypeptide expressing nucleotide sequence isolated from the Sargasso Sea
tatgactctaaaaaatcgctacaaagaatcaataagaccaaaacttttaaaggaccttggtcttaaaaatattcatcaagtacctaaagttgtcaaagtcaacgttaacagaggtcttggtgaagcagcttcgaattcgaaagctcttgaagcctctttaaatgaaatggcaacaattacaggacaaaaggctttagtaactagggccaaaaaagctatcgcgggttttaaaattcgtgaaggtatgccaattggttgtactgtaactttgagaggagacaggatgtattcttttttggagagatttataaatctagctttaccaagaataagagactttagaggagttaatccaaaaagttttgatgggagaggtaattacaccgttggcgtgaaagagcaattgatttt

SEQ ID NO: 302750 - DNA, 433 bp, Unknown
  Bacterial polypeptide expressing nucleotide sequence isolated from the Sargasso Sea
aatgatagaagtacaaatcaatgacaaagatacacacaaatatgcttcagggattaccgctggagagatattactgaatgtttatggtaaaagaaacggagcagtcgctgctattgtcgatggtattgaaagagacatgtcattcgtagtcaataataactgtaaaatcgagcctatcttagcagattctgaacaaggactgtatattctgagacattcttgcgcacacttgctcgcacaggcagtagttgagatgtatcctgatgcaaaacctactattggaccgccaattgaacatggattctactatgattttctcatggaaccaatcggtgatagtgaactcaaaaagattgagaaaagaatgaatcaactcgttcgagaaaatattgtgattaatagagaagagtatgggaatgaagaattaagagaa

SEQ ID NO: 302751 - DNA, 538 bp, Unknown
  Bacterial polypeptide expressing nucleotide sequence isolated from the Sargasso Sea
tatgactctaaaaaatcgctacaaagaatcaattagaccaaaacttttaaaggaacttggtcttaaaaatattcatcaagtacctaaagttgtcaaagtcaacgttaatagaggtcttggtgaagctgcttcaaattcaaaaagtttagaggcttctttaaacgaattggcaacaattacaggacaaaaggccttagtaactagggctaaaaaagctattgcgggttttaaaattcgtgaaggtatgccaattggatgtactgtgactcttagaggtgacaggatgtattcctttttagagagatttataaatctagctttaccaagaataagagactttagaggagttaatccaaaaagttttgatgggagagggaattacaccgttggagtgaaagagcaattgatttttcctgaaatctcttttgataaaattgactcaataagaggtatggatataactattgttactagtgcgagcacagatcaagaaggtaaagctctcctgcaagagttaggtatgccttttagtaagaat

SEQ ID NO: 302752 - DNA, 276 bp, Unknown
  Bacterial polypeptide expressing nucleotide sequence isolated from the Sargasso Sea
aatgctaaaagttacttttccagatggcgccaagaaagaatatgataaaggtatcactcccttagaaatagctcaaagcataagccattcacttgccaaaagacttttaagtgcatcttataataataaacaagttgaatcatctaccaaaatatttgaaaatggaaacatagagttttatttttgggatgatataaaaggtaaaaatgctttttggcactcttcagctcatctttttgctcaaattgttcttgaattatatcctgagtctaaata

SEQ ID NO: 302753 - DNA, 389 bp, Unknown
  Bacterial polypeptide expressing nucleotide sequence isolated from the Sargasso Sea
gttacatagagcgctgtttggatctattgaaagatttattggtatattaattgaaaattattcaggaaaacttcccttttggatatcaccacttcaaactatggtaataccagtatctgaagattttgataactatgcaaaagaggtaaatcaaaaaataaaaaaagtaggcattacttctgaagttgacctaaaaaatcataacttgaactataaaataagagaacattctttatcaaaaatacctattttacttatatgtggaaaaaaagaagttgacagtaatactgtaactattagaagattggattctaataaacaagaaaatatggaattaaatttattcttaaaaaaattctctgctttaagcaaagcaccctcaaactaag

SEQ ID NO: 302754 - DNA, 930 bp, Unknown
  Bacterial polypeptide expressing nucleotide sequence isolated from the Sargasso Sea
tttgtttacatctattggtgcaggagctactgctgttttctttcctagattttctgcatcaaacttctttaagtgggctcatgattgtggagcaacttgtgttaacatgctaggcgctgtagcagaatatcttttctcttcgaaacctagcgaatatgatcaaaaacataacgttagaatcatgctaggttctccagccccaagaaatttaatagattttcagaaaagatttaatgtaagagtaatagatggttatggttcgaccgaaatgggaatggttttgtggaaaaacccggaagaccctagagatagatcaatgggatatcccactgaaggtttctatgttgaactaagaaatcctgaaaaggttgaggaagttataagacctcattgggatccatacgttgattctgatccaccagattcagcaaagggaattctatatattaggccactggtagcaaatacgacactaaatgaatattttaaggatgaaagaaggacgagagaagcgtttgacgatgatggattctttaattctgatgacgtaatggcttgtggtactgatggaagatattattttataggaaggcacactagattaagagtgtctggtgaaaatgttgaccctgttgcggttgctgatcttgcactcgaatatccttctatacaggatgctatagctgtaggagtaaggcttccagatgtatctgatgatgaattaaagcttaatatcattttaaaagatggtgaaaaatatgatcatgcagagttttgcacatggatggcagaaaaagctatcattgcaatggttccaaggtttatagaaatttttgaagagggatttccagtcactgcaacacagaaagtaaaggttgcagagcttaaagaaatcactgacaaaacatgggatagggcagaatctgggct

SEQ ID NO: 302755 - DNA, 385 bp, Unknown
  Bacterial polypeptide expressing nucleotide sequence isolated from the Sargasso Sea
catagagcattatttggttctttagaaagatttattggtattttaattgaaaattactcaggcaaattacctttttggataacgccacttcaatcagtggtgatacctatttcaaatgatttcgatgaatatgcaaaaaatgtttatattgaactaaaaaaagctggtatctcaactgaagttgatctaaaaaatcataatctaaattacaaaattagagagcattcattaacaaaagtaccattactattaatatgtggaaaaaaagaagttgacaccaatacagtaactattagaagattggattctaataaacaagaaaatatggaattaaaagaatttctcaaaaaatactctgctttaaataaagcaccttcaatataag

SEQ ID NO: 302756 - DNA, 889 bp, Unknown
  Bacterial polypeptide expressing nucleotide sequence isolated from the Sargasso Sea
agttgcccggctacggccgcgcacatcatgccggccgcgccagcgccgatcactgcgatatcgaaggattccatggggccgcattgtacccgcgcgtctgcggcccctcgcccgcgctgctatactttcaggcttgccttttcatatttggacgccgggttggttcactcgcgcgcccgctcaaacccacccaacatgctcgttctcggcatcgaaagctcctgcgacgaaaccggtctcgcgctctacgacacagagcgcgggctgctcgcgcacgcgctgcattcgcaaattgcgatgcatcgggagtatggcggcgtggtcccggagctggcgtcgcgcgaccatatccggcgcgcgctgccgctgctcgaagaggtgatggaacgcgccggcgcggtacgcagcgacatcgacgcaatcgcctatacgcaggggcctggcctcgcgggggcgctgctggtgggcgcgagcgtcgccaattcgctggccatggcctgggacaagccgaccatcggcatccaccatctcgaagggcatttgctgtcgccgctgctggtggacgagccgccgccgtttccgttcgtcgcgctgctggtgtcgggcggccatacgcaattgatgcgcgtgacggacataggcgtctacgaaacactcggcgaaacgctggacgacgccgccggcgaagccttcgacaaaaccgccaagctgctgggtcttggctatccgggcggcccggaagtatcgcgaatggctgaattcggcacacccgggcgcagtcgtgctgccgcgtccgatgctacattccggcgacctcgatttcagcttcagcgggctgaaaaccgccgtcctcacgcacgccaagaaagcttggcggcgcgaatatctg

SEQ ID NO: 302757 - DNA, 835 bp, Unknown
  Bacterial polypeptide expressing nucleotide sequence isolated from the Sargasso Sea
tggacagtttttgatagcacatgacatgcagatatcttacaaaaatttgccatacagactctatgaaatgactcgatatagctttagacgtgaacagtctggagaattggtaggtcttagaagactgagagcatttacaatgcctgattgtcatgcattttgtaaagatattccacaggctatagaggagtttagaactcgttttgatttgtctagagatgttttgaaaaatgttggtattgaaaatgatgattatgaaatggctataagatttacagaagatttctacaatgaaaataaagaattaatcacagagattgtaaaaaaattagataaacctgtacttgttgaaatgtggaaagaacgattcttttactttgttttaaaatgggagttcaattatattgataatttaggaaaagcctctgcattgtccactgatcaaattgatgttgaaaatggcaatagatatggaattgaatttgttgatgaaaataataagacaatcaatcctattattttgcataattctccaagtggcgcaattgagcgtgtgatatatgctctacttgaaaaatgtgccaaagacgctaaggaaggtaaaaaaccaatgttccctctttggcttgcaccaacacaagttcgtataattccgttaaaagatgagtttatggaattttcacaaaatctatttgataaattaactgaaaaaaatattcgtgttgacattgatgatagaaatgaatcgattggaaagagaatacgtgaatctgaaaaggaatggattcgttatatacttgtaattggagacaaagaggttaattctaaaaatctt

SEQ ID NO: 302758 - DNA, 541 bp, Unknown
  Bacterial polypeptide expressing nucleotide sequence isolated from the Sargasso Sea
atgactctaaaaaatcgctacaaagaatcaattagaccaaaacttttaaaagaccttggtcttacaaatattcatcaagtacctaaagttgtcaaagtcaacgtaaacagaggtcttggtgaggcagcttcaaattcgaaagctctagaagcttctttaaacgaaatggcaacaattacaggacaaaaggccttagtaactagggccaaaaaagcgatcgcgggttttaaaattcgtgagggtatgccgattggttgtactgtaactttgagaggagacaggatgtattcctttttggagagattcataaatctagctttaccaagaataagagactttagaggagttaatccaaaaagttttgatgggagaggaaattacactgttggcgtgaaagagcaattgatttttcctgaaatctcttttgataaaatagattcaataagaggtatggatataactattgttactagtgcaaaatcagatcaagaaggtaaagctcttttgcaagagttaggaatgccttttagtaagaattaaa

SEQ ID NO: 302759 - DNA, 541 bp, Unknown
  Bacterial polypeptide expressing nucleotide sequence isolated from the Sargasso Sea
tatgaaaaatactgggcactatttcccccctgctaggcaaaatgtatattatggccgaaaattagaacttactttaaacgaaatcgcccaatcgctaggtgctcaaaacgttttatttgtaacgaactcgtctttagcaaatactgcattgtccgcttccatagttgagggtctaaagaagtttggcgttcatcaagtaacagggcttaaggcgcattccccgagaggcgatgtgaccagggtatgtaatgccatcgaaaagcacgctattaatttggtgatctccttcggaggaggttcggtttgcgacacaaccaaagtcgcgtgcctggcccataccaatgacttgagcgaaggtaattttgacttactcaattcgccagaaaaattaacaaatacaccgattccttttgtcgctatccccaccaccttatctgcgggagaatttacttgctttgcgggaatcacggacgagcaaatccctcggaaggaggtgttttggcatcccgatattgcacctcattccgtgatcttagatcct

SEQ ID NO: 302760 - DNA, 260 bp, Unknown
  Bacterial polypeptide expressing nucleotide sequence isolated from the Sargasso Sea
tccagaaggacttgaagttattcgacacacatgtgcacatgtttttggtcacgctttaaaacaaatttatccaaatgccaaaatggtaattggtcctacaattgataatggattttattatgacatctataattcagagagtatatctgaaaaagatcttaaattaatagagtctttaatgaaaaaactatctaaaaaaaattataagatacaaagagatgttgtaactagaaaaaaagccattgatgttttcaagaaac

SEQ ID NO: 302761 - DNA, 273 bp, Unknown
  Bacterial polypeptide expressing nucleotide sequence isolated from the Sargasso Sea
catgaaattaaaagagaactttaatactaaattaaaaaacacattaaaagaaaatttaaatttatctaatataatgcaagtaccaaaattagaaaaaataaccataaatatgggagtaggggaagcaattaatgataaaaaatatttaactaatgctttaaaggctatagaaagcttgtcaggacaaaaagctgtcgtaacaaaggcaaggagatcagaagcaggttttaaaattagagagggatggccagttggatgtaaggttacattacg

SEQ ID NO: 302762 - DNA, 214 bp, Unknown
  Bacterial polypeptide expressing nucleotide sequence isolated from the Sargasso Sea
aaagtcatttcagacttgaggaatgagaaaatcacttataaaatccgcgaccactctatacaaaagataccttatcaaattgtgataggtgacaaggagattgaagagggctcaattagtgtaagagaaagagagtctcaaaagcaatcttcaatgtcagagagtgacttctcaaaaatggttttgggaaaaataagatccaaggaggtctgat

SEQ ID NO: 302763 - DNA, 361 bp, Unknown
  Bacterial polypeptide expressing nucleotide sequence isolated from the Sargasso Sea
aatgggaaatattgtagttaaattacctgataatactgaaaaacaattacctcccgattcaactggcttggatttagctaaaagcattggtagtggattagctaaagcagctatagcgtacacgtcagatggcatacaaaaagacttactagatccgcttgataacaactctgtagtttccttaattacaatcaatagtaatgagggtattgaaataatgaggcatactttaactgctcaagttcttgcgctggctgtaaaaaacttatatccagactctaagcttgccatcggaccaacaattgataacgggttttattatgatttctctttcaaaaacacgttttctattgaagattta

SEQ ID NO: 302764 - DNA, 407 bp, Unknown
  Bacterial polypeptide expressing nucleotide sequence isolated from the Sargasso Sea
aaattctagacctgtaatgatacacagagcacctttaggtagtttagaaagatttgttgccattttaatcgaacatactggaggtaatttccccttatggctaatttcaaaacaaatagttttaattgctgttggcggaaatcatgaaaattacacagaaaaagtttcaaaattattagaaaagtccgaaattcgcgcagcttacgatactaggaacgagacagttggaaagaagattcgtgatgcagaacaaatgaaaataccatttatgggaattattggtgataatgaaattgaaaacgaaatagtatccataagagctcatggtggtaagattattggagaaatgaaaatcaatgaattagttgaatacattaaaaaagaagaaaaagaatcatataattaaa

SEQ ID NO: 302765 - DNA, 547 bp, Unknown
  Bacterial polypeptide expressing nucleotide sequence isolated from the Sargasso Sea
tatgattcctagattaaaagagcagtttaataccgagttaaagcaaaagattatgtctgatcttcaattgagaaatgtaaatgaaataccaagtcttgaaaaaataattatcaacatcggtgatggaaaagcagctacagatggtagggcacttgaatctatggttaatgaattaactgcaatttctggacaaaaacctgtaatcagaagagcaaaaaaatcaattgctggatttaaaattagagaaggaatgccaattggtacatctgttactttaagaggtgacagaatgtgggaattttatgacaggtttgtacaagttgttgtcccaagaatccgtgactttagaggttttaataaaaaatcgtttgatggaagcgggaattacacactcggattaaatgaacagttagtttttcctgaagttgaatatgacaaggttagagacatcagaggaatgaatattacaatttgtacttctgctaacgataacgaaaaaggttatgtattattacaatcgctaggatttccatttagggagaattaa

SEQ ID NO: 302766 - DNA, 1157 bp, Unknown
  Bacterial polypeptide expressing nucleotide sequence isolated from the Sargasso Sea
aatgtttttatcaaaactatttatacccatatcaaaagatatacccacagaggcaaagattaaatcgcaccaactaatgttgcgaactggaatgatacgacaggcctctgccggtatatattcttggcttccattaggttttaaagtgatgaaaaaaattgaaaaaataattcgagaggaacaaaatagtattggagctcaagaaatattaatgcccactatacaatctgctgatatatggaaagagagtggtaggtacgaagattatggagaagaaatgcttaggatttccgacagacaaaagagggaaatgctttatggacccacaaatgaggaacaaatcaccgaaatatttagaacaagtatcaaatcttacaaattattgcctcaaattttgtatcacatacagtggaaatttagggatgaactgagacctagatttggagttatgagatgtagagagttttatatgaaagacgcttactcattcgatctaaatgagcaggatgcagagatatcatataataagatgtttttttcttatctaaaaacattcaatcgtttaggattgaagtcaattccaatgaaagcagaaactgggccaataggcggggatttgtcccatgaatttataattttagctgaaactggagagagtaaaatttttgcagataagagaattttcgatgttccaattgaaaactataaaaatgaaagaaattctttgaaaaaaatgagggatgatttttctaaattttatgccgtcacagatgaaaaatttaaatctgaagattttaacaataatgtaaaaaaagataaccaactacaaaccaaaggcatagaagtaggtcatatcttttactttggagacaaatattcaaaacccatgaattgttcagttgatagtaaagatggaaaaaaaatatttgtaaaaatgggttcatacggcattggagtatctagattagtcgcagctataatagaagcgaaattctcaaatgaaaagatgaagtggccacgagaagtttctccatttgatgtagtgataattccggtaataaataaaaatgacaattcaaatgtcgaaaaagcaaaaatactttacaaatctctaattgagaaaggtatcgatgtgctgttcgatgatattgatgaaa

SEQ ID NO: 302767 - DNA, 547 bp, Unknown
  Bacterial polypeptide expressing nucleotide sequence isolated from the Sargasso Sea
atgataccaagattaaaagagcagtttaacactgaattgaaaacttcagttatggagcaacttagccttaataatgtaaatgagataccaacacttgataaaattattatcaacattggtgatggtaaagctgctacagatggaagagcacttgagtctatgattgatgagttaacagctatatcaggacaaaaaccagtaattaggcgtgcaaaaaaatcaattgcgggatttaaaatacgagaaggcatgccaattggtgtagcagtaactcttcgtggtgatcgtatgtgggaattttatgacagatttgttcaagtagttgttccaagaatcagagactttagaggttttaataaaaaatcatttgatggaaatgggaattatacactcggacttaacgagcaattagtttttccagaagttgaatacgataaagttcgtgatataagaggtatgaatattactatttgtacttctgctaacgataacaaccaaggttatgtattattacaatcgctaggatttccatttagggagaattaat

SEQ ID NO: 302768 - DNA, 1192 bp, Unknown
  Bacterial polypeptide expressing nucleotide sequence isolated from the Sargasso Sea
atggtagatatttggccttttcatggtactcgtccttataatcaagatgcaaaaaatttaattgctccatccactgatcatttaagtattgagaatatagaaatttttagaaaaaataattattggaattatttaaaagttttaaatcctgttggtcaattaaaagaaaaagattctttatttgaagcacgagaacattttattgaaatgaaagattacgatgttatcaaaaaagataatgaattaaatttttatatttatcaaattcaacttggttatcactctcaattaggatttttatctcttgcttccattagtgattttgaaaaaaatataattaaaccacatgaaaaaatatatgaaagtagaaaaattgaaagagctgatcaaatgatgaatattaacactcaaattggtccgatttatgtttcttacccatccgacgagaatattgctaatttactcttatctattacaaaaaattcgccaacatatgatttcgaaagttttgataaatcgattcatagattgtggtgtgttaatgataaagatttcattcatgaatttacaaatttaacaaaaaatattaaacatttatatatcgccgatggacatcatagaataggtgcaatgcagcatataaaaaaaattaatccattaattgaaagattcatgattgctgcttttccttcaaatgaatgtaaaatttttgattataatagagttataaaagatttaaatggcctatctaaagatcaatttattaaaaatttatcaaatgattttaaagttttaaaagtagataaagcgtataaaccattaactaagaatgagtttggaatgtatcatgataatcaatggtatatgcttgagtttaataattcattcacttctagtgactttattgatgcattggatataaatatattaaatcaattttgtttaacaaaaatgcttaatattaaagatgttaataatgatgaaagaataagatttatagcaggttgtcatgggctttctgctttagaaaaaaaagtagatgaaaatcctgatagtgtagctttttcaatctttccatctaatataacagatgttattagagttgctgataacaatttgactatgccacctaaatcaacttggtttgatccaaaacctcttgatgggttggttgtttatgagtttaattaga

SEQ ID NO: 302769 - DNA, 454 bp, Unknown
  Bacterial polypeptide expressing nucleotide sequence isolated from the Sargasso Sea
cttccggagcgatttgacctatcctacgtcgatcgtgacaacgtcaagcaacgcccgatcatgattcaccgcgccatcttcggatccctcgagcgattcttcggtattcttaccgagaactacgccggcgagttcccgttgtggctcgcccccgagcaagttcgcctgttgccggtgacggatgaggtgagcgattacaccgaaggtgtcgcgaagaagctccgcgatgccggcgtgcgcgtcgaaatttgcagcggccagcgtctcgccaagctcgtgcgcacggctgaaaagtccaagattccggtcatggcagtcgtcggacgagaagaggcggagaacaacactctcgctgtgcgcacgtacaaggatggcgatgtcggttctctctcggtggacgaagttttgagccgcatcgtgaccgctaacgcgacgaagggtgacaatttctaga

SEQ ID NO: 302770 - DNA, 1192 bp, Unknown
  Bacterial polypeptide expressing nucleotide sequence isolated from the Sargasso Sea
atggtagatatttggcctttccatggtactcgtccatatagtcaagatgcaaaaaatttaattgctccatctacagatcacttaagtatagagaatatagaaatttttaggaaaaataattattggaattatttaaaagtattaaatcctgttggccaattaaaagaaaaagattcattgtttgaagcacgagagcattttaaagaaatgaaagattatgatgtaattaaaaaagacaatgaattaaatttttatatttatcaaattcaacttgataatcattctcaattaggatttctatgtcttgcatctattgatgactttaaaaagaatataattaaaccacatgaaaaaatttatgaaagtagaaaaattgaaagagctgatcaaatgatgaatattaacacacaaattggtccaatttatgtttcttacccctctgaagataaaattgctaacttacttttgtctattacaaaaaactctccaacatatgattttgaaagttttgataagtcaatacatagattgtggtgcgttaatgataaaaattttattcaagaatttaaaaatagagcaaaaaatattaatcatttatatattgcagatggtcaccacagaatgggtgctatgcatcacataaaaaaaatgaatccattaaatgaaagatttatgattgctgcttttccttcaaatgaatgtaaaatatttgattataacagagttataaaagatttaaatggtctttctaaagaacaatttattaaaaatttatcaaatgattttaaaattttaaaaacagataaagcccacaaaccaactactaaaaatgaatttggtatgtatcacgataatcaatggtatattcttgaatttataaatccttttacttttaataattttattgatgctttagatataaatatattaaatcaattttgtttaacaaaaatgcttaatattaaagatgttaataatgatgaaagaataagatttatagcaggttgccatggactttccgccctagaaaagaaagttgatgaaaatcctgatagtgtagctttttcaatatttccttctacgataacagatgttattagagttgcagataacaatttgacaatgccacctaagtcaacttggtttgatcctaaacctcttgatggattggtagtttatgagtttaattaaa

SEQ ID NO: 302771 - DNA, 694 bp, Unknown
  Bacterial polypeptide expressing nucleotide sequence isolated from the Sargasso Sea
atgaaaactttactgacagtattcagtgtattagccataacagcggctcaggcggccactattgaacaaatcgatgccgcagctaacggtatggatctgaaacaacttagcctttacgctgcggatcaaagctcagattacaacaaagcttatgcgaactatcgtttatccattatggctggcattacaggccagaaagatcaggcagaacaagccttagatatggcgcagtcgacgctggagcaactcgccacagcagagcctgatgccgagagctttgccttgttagccagtgtttatggcatgcagattggcaataacccgataaaaggggctttctatgggcctaaatcgaataaagctatctcgcaggctgctggtttggacccagccaatccgcgggttgtgctggttaaagccatctctgcttacaataccccagctgcatttggcggcagtaaacaaagtgctattgagctgagcagcaaagctattgagctgtatgcacagccttgtcagcaaatttgctggggccatgccgaagcctacacctggcgtggcttagccaaacaggaactgggcgataaagcgggtgctattgctgactggactaaagcgaccgaggttgaaccctcctacggctgggctaagtttctgctgactcaacaacaaagttacagtcagaatcgttaat

SEQ ID NO: 302772 - DNA, 547 bp, Unknown
  Bacterial polypeptide expressing nucleotide sequence isolated from the Sargasso Sea
atgataccaaggcttaaagaaaaatataactcagaactttcaggagagattcaaaaagagctcaacttgtctaatataaatcaaatcccaaccttagagaaaattattataaatattggagacggaaaagcagctaccgacggaagagcactcgagtctatggttgatgaattaactgctatttctggtcaaaaacctgtagttaagagagctaaaaaatcaatagcaggatttaaaattagggaaggtatgcctattggaacatctgtgacgataaggggtgatagaatgtgggagttttatgatcgatttgttcaagtcgtagttcctaggattagagactttagaggttttagtactaaatcatttgacggtaaaggtaattattctttaggtttaaatgaacaattggtatttcctgaagttgagtacgataaagttcgagatattagaggaatgaatattacaatttgcacaactgctaacgataataatgaaggatatgtattattaaattccttaggatttccatttagggagaattaaa

SEQ ID NO: 302773 - DNA, 541 bp, Unknown
  Bacterial polypeptide expressing nucleotide sequence isolated from the Sargasso Sea
atggcgaaactgcatgattactacaaatccgatgtagtaaatgaactgtccaaacagttcggttacaagactatcatgcaagtccctcggatcgagaaaatcaccctgaacatgggtgttggtgaagcgatctctgacaagaaattgctggaaaatgctgctgccgatatggctgccatttccggtcagaagccgctgatcaccaaagctcgcaaatctgttgcgggcttcaagattcgtgaaggctacccgataggttgtaaagtaaccctgcgtggcgagcgtatgtgggagttcctggaacggctgatttgcatctccgtaccgcgtatccgtgacttccgtggcctgaacgctaaagcgttcgacggtcgtggtaactactccatgggcgtgcgtgagcaaatcatcttcccggaaatcgactatgacaaggtcgatcgcgtccgtggtctggatatcaccatcaccacttccgcgaataccgatgaagaaggccgtgctctgctggctgcctttaacttcccattccgcaagtaag

SEQ ID NO: 302774 - DNA, 203 bp, Unknown
  Bacterial polypeptide expressing nucleotide sequence isolated from the Sargasso Sea
ggccgaatttgcgcacgagaagattagctataaaatacgtgagcacacgctagaaaaggtgccgtacctactcgtggtcggcgacaaagagcgtgaagcccaaacggtagccgtgcgtgcccgtggtggtgtcgatctgggtgtgatgcctctcgataccttcattgagcgtctgcgtcaggacgtgcagtcgttcaactgag

SEQ ID NO: 302775 - DNA, 370 bp, Unknown
  Bacterial polypeptide expressing nucleotide sequence isolated from the Sargasso Sea
atttattggtattttgattgagaattacgctggttcatatcccgtctggctggctccagttcaagctgttgtggtgtcaatcaccgaaaatcaaaccgaatatacaaacaaaattatgaaaatattgaaaaaacagggttttagggtcgaagatgacttgagaaatgagacaatcgggcttaaaattcgcgaccacgctatgcaacgcgtgccgtaccagattattttgggtgcgcgtgaagaagaagagaataaggttgctgtacgcactagaaatagcgatgatcttggttcgatgacacttgaagattttatacaacgcttagaaggcgatatatcacgtcttgggcgtattgatttggaggaatga

SEQ ID NO: 302776 - DNA, 430 bp, Unknown
  Bacterial polypeptide expressing nucleotide sequence isolated from the Sargasso Sea
aatgggtgttggcgaagccgttgcagacaaaaaagttatggaacatgctgtccgtgacatgactgcaattgctggtcaaaaaccagtagtaactgttgctcgtaaatcagttgctggttttaaaatccgtgaaggctaccctattggctgtaaagtgaccctgcgcggtgagcgtatgtgggaattcttagagcgtttagttgacatcgcaatcccacgtatccgtgacttccgtggtctgagcgctaaagcgttcgatggccgtggtaactacgcgatgggcgtgcgtgagcagatcattttcccagagatcgattacgataaaatcgataaaattcgcggtatggatattgttatcactacctctgcgaagactgatgaagaaggtcgtgctttgttagacgcttttaacttcccattcaagaaataa

SEQ ID NO: 302777 - DNA, 389 bp, Unknown
  Bacterial polypeptide expressing nucleotide sequence isolated from the Sargasso Sea
gcttcacagagcattatttggttctttagaaagattcattggaatattaattgaaaactatgcaggaaaattacctttttggataactcctctacaatcagttgtgatacctgtttcaaatgattttgatgaatatgcaaaaaaagtttgtgaacaattaaaaaaatcaggaatatcagtagaggtagatcttaaaaatcacaatttaaactataaaataagagatcattctttatccaaggtacctatactgttaatttgtggaaaaaaagaagttgacactaactcagtaactattagaagattggattctaataaacaagaaaatatggaattaaaagaatttattaaaaaatattctgctcttaacaaagcaccctcaatctaag

SEQ ID NO: 302778 - DNA, 420 bp, Unknown
  Bacterial polypeptide expressing nucleotide sequence isolated from the Sargasso Sea
aggcagcttcaaattcgaaagctctagaagcctctttaaacgaaatggcaacaattacaggacaaaaggcccttgtaactagggctaaaaaagctatcgcgggttttaaaattcgtgagggcatgccgattggttgtactgtaactttgaggggagacaggatgtattcctttttggagagatttataaatctagctttaccaagaataagagacttcagaggagttaatccaaaaagtttcgatgggagagggaattataccgttggagtgaaagagcaattgatttttcctgaaatctcttttgataaaatagattcaataagaggtatggatataactattgtcactagtgcaaaatcagatcaagaaggtaaagctcttttgcaggagttaggaatgccttttagtaagaattaaa

SEQ ID NO: 302779 - DNA, 1249 bp, Unknown
  Bacterial polypeptide expressing nucleotide sequence isolated from the Sargasso Sea
caccagctaatgcttagaaccggcatgataagacaagcctcagcaggtatttactcttggttacctctaggatttaaagtaatgaaaaaaattgaaaaaattgttcgtgaagagcaaaatattataggtgcgcaagagatgttaatgccaacggtgcaatctgctgatatatggaaagaaagtgggagatatgacgattatggcgaagaaatgcttagaatatctgataggcaaaaaagggaaatgctttatggacctacaaatgaggagcaaataaccgaaatatttaaaacaagtgttaaatcatacaaattattgccgcaaattttatatcacatacagtggaaatttagagatgaattacgaccaagatttggtgttatgagatgtagagagttttatatgaaagacgcttattcattcgatcttagcgaagatgatgcagttttatcatacaataaaatgttttttgcttatcttaaaacttttgaaagattaggacttaagtcgattccaatgaaagcagacacaggaccaataggcggtgacctatcacacgaatttataattttggcagaaacaggagaaagtaaaatttatacagataaaagaatctttgatataccgattaataattataaaaacgaaaataattcactaaaccaaatgagaaacgatttttcaaaattctactctgtaaccgatgaaaagtttgattctaatgattttaataaaaaagtgaaaaaaaatgatcaacttcaaactaaaggaatagaggtaggacacatcttttattttggagataaatattctaaacccatgaattgttcagtggatggtaaggatggaaaaaaaatttttgttaaaatgggttcatatggcattggtgtttccagattagtagctgccataatagaagcaaaatttaataatgataaaatgaaatggccaaaagccatttccccatttgatgttgtaattataccagcaataaataaaaatgataattctaatatagaaaaatctagaaaaatttatagtttacttaaagaaaaagggattgatgtattacttgacgatgttgaggagaatatttcaaacaaatttaaaaaacacgaccttttaggtataccttatcaaattgttgttggatcaaaatcaacaaaagatcaatttgaatttaaagaagtaggtaaggatccacaggtattagaaattaataaaattattaacatattaaaaaaataaa

SEQ ID NO: 302780 - DNA, 541 bp, Unknown
  Bacterial polypeptide expressing nucleotide sequence isolated from the Sargasso Sea
atgactctaaaaaatcgctacaaagaatcaattagaccaaaacttctaaaggaccttggtcttaaaaatattcatcaagtacctaaagttgtcaaagtcaacgttaatagaggtcttggagaggctgcttcaaattcgaaagctttagaagcttctttaaacgaaatggcaacaattacaggacaaaaggccctagtaactagggccaaaaaagctatcgcgggttttaaaattcgtgagggtatgccaattggttgtactgtaactttgagaggtgacaggatgtattcttttttagagagatttataaatctagctttaccaagaataagagactttagaggagttaatccaaaaagttttgatgggagagggaattacaccgttggagtgaaagagcaattgatttttcctgaaatctcttttgataaaatagattcaataagaggtatggatataactattgtcactagtgcgaaatcagatcaagagggtaaagctcttttgcaagagttaggaatgccttttagtaagaattaaa

SEQ ID NO: 302781 - DNA, 541 bp, Unknown
  Bacterial polypeptide expressing nucleotide sequence isolated from the Sargasso Sea
gatggcgaaactgcatgaaatttataaagacaccgtagttccagaactgtttaaacagttcggctacacgagcgtcatgcaagtccctcggattgttaaaatcacactgaacatgggtgtgggtgaagcagtagctgataaaaagatccttgataacgcagtagcagatttaactgctatctctggccaaaagccattggttactaaggctcgtaaatcagtagctggtttcaaaatccgtgaaggctaccctattggtgcaaaagttacactgcgtggcgaacgtatgtgggatttcttagagcgtttagtatctattgctattcctcgtatccgcgatttccgcggtgtgaatcctaagtcgtttgacggccgtggtaactacagcatgggcgttcgtgagcaaatcatattccctgaaatcgattacgataaagtagatgcggtacgtggtttagatatcactatcactactacggctcgtactgatgatgaagggcgtgcattacttgccgcgtttaacttcccattcaagaaataa

SEQ ID NO: 302782 - DNA, 538 bp, Unknown
  Bacterial polypeptide expressing nucleotide sequence isolated from the Sargasso Sea
atggcgaaactgcatgataaatatcaagagactgttgtcgctgaactgactaaaaagttcggttataccagtgtcatgcaagtccctcggattgagaaaatcaccctgaacatgggtgttggcgaagccgttgcagacaaaaaagttatggaacatgctgttcgtgacatgactgcaatcgctggtcaaaaaccagtagtgactgttgctcgtaaatcagttgctggttttaaaatccgtgaaggctaccctattggctgtaaagtgaccctgcgcggtgagcgtatgtgggaattcttagagcgtttagttgacatcgcaatcccacgtattcgtgacttccgtggtctgagcgctaaagcgttcgacggccgtggtaactacgcaatgggcgtgcgtgagcagatcattttcccagaaatcgattacgataaaatcgataaaattcgcggtatggatattgttatcactacctctgcgaattctgacgaagaaggtcgtgctttgttagacgcttttaacttcccattcaagaaat

SEQ ID NO: 302783 - DNA, 265 bp, Unknown
  Bacterial polypeptide expressing nucleotide sequence isolated from the Sargasso Sea
atgcctcaaatacaattattagatggaaaaaaaatttcatttacaaaatctattagcggaatagaacttataaaaaaaataagtaaatctttagagaaagcagcattaattatggaagttgatggaaatctaaaagatttaagccatgaaattacaaaagattcgaaagtaaggattattacctctaaagacaaagaaggtttagaggttattagacatgatgctgctcatataatggcaatggcagttcaggaactatttcctg

SEQ ID NO: 302784 - DNA, 160 bp, Unknown
  Bacterial polypeptide expressing nucleotide sequence isolated from the Sargasso Sea
tatgccaataatcaccttacctgatggttcaaaaaaggttttcgaaaaatctgtaactattctagaaattgcccagagtataggcgctggattagctaaggcaacaattgctgggaaagtaaatgatgttcttcttgatgcaacaattccaaagatttag

SEQ ID NO: 302785 - DNA, 831 bp, Unknown
  Bacterial polypeptide expressing nucleotide sequence isolated from the Sargasso Sea
gatgaagttatctaattattttttacctgtattaaaagagtctcctaatgaggcggagattatttcacataaattgatgcttagagcgggaatgattagccaatcaagttcggggatatattcctggcttcctttgggtctcaatgttttaaaaagaatcgaaaatattgtcagagaagagcagaacaatgcaggtgttaatgagattcttatgtccactatacaaccagcagatctttggaaagagagtgggaggtatgaagattatggaaaagagatgttaaggattaaagatcgtcaagaaagagatatgttatatgggccaaccaatgaagagcaagttactgatatattcagaagatcagttagatcttataaagagttgccattgcttctttatcatattcagtggaagtttagagatgaactaaggccacgttttggtgttatgaggggaagagaattcttaatgaaagatgcctattcatttgatcttacgctagagaattctgaatcttcctataataaattttttgtttgttatttaaaaacttttgaaagattaggattaaaagcaattcctatggctgcagatactggacctattggcggagatatgtctcatgagtttattatcatctcaaatactggagaaagtgatatttactttgacaaaaatattcttagtgaaggtaaaaaaataaatgaaataaactatgatgatgatttgtctactatagtgcaaaatttcaaaaactattactcagcctctgatgacaaatttgatcaaaatgaatttgataaaaatgtaaagaaagattctcaaatgac

SEQ ID NO: 302786 - DNA, 1225 bp, Unknown
  Bacterial polypeptide expressing nucleotide sequence isolated from the Sargasso Sea
gagttgcccggctacggccgcgcacatcatgccggccgcgccagcgccgatcactgcgatatcgaaggattccatggggccgcattgtacccgcgcgtctgcggcccctcgcccgcgctgctatactttcaggcttgccttttcatatttggacgccgggttggttcactcgcgcgcccgctcaaacccacccaacatgctcgttctcggcatcgaaagctcctgcgacgaaaccggtctcgcgctctacgacacagagcgcgggctgctcgcgcacgcgctgcattcgcaaattgcgatgcatcgggagtatggcggcgtggtcccggagctggcgtcgcgcgaccatatccggcgcgcgctgccgctgctcgaagaggtgatggaacgcgccggcgcggtacgcagcgacatcgacgcaatcgcctatacgcaggggcctggcctcgcgggggcgctgctggtgggcgcgagcgtcgccaattcgctggccatggcctgggacaagccgaccatcggcatccaccatctcgaagggcatttgctgtcgccgctgctggtggacgagccgccgccgtttccgttcgtcgcgctgctggtgtcgggcggccatacgcaattgatgcgcgtgacggacataggcgtctacgaaacactcggcgaaacgctggacgacgccgccggcgaagccttcgacaaaaccgccaagctgctgggtcttggctatccgggcggcccggaagtatcgcgaatggctgaattcggcacacccggcgcagtcgtgctgccgcgtccgatgctacattccggcgacctcgatttcagcttcagcgggctgaaaaccgccgtcctcacgcacgccaagaagcttggcggcgcgaatatctgcgagcaggcgaaggccgatctggcgcgcggtttcgtcgacgcggccgtggaagtgctggcggcgaaatcgctggccgcgctcaaacggaccaagctcaatcggctggtggtggcaggcggtgtcggcgcgaaccgccaactgcgcgaagcgctttccgcggcggcgaagaagcgtaacttcttcgtgcactatcccgacctgtcgctgtgcacggacaacggcgcgatgatcgcgctggccggcgcattgcgattgcagcgctggcccgatcaatcggctaaagactacgcgttcaccgtgaagccgcgctgggatttgacctcgctcgcacgctga

SEQ ID NO: 302787 - DNA, 442 bp, Unknown
  Bacterial polypeptide expressing nucleotide sequence isolated from the Sargasso Sea
agattagatgcatcgtatgttgacaaagatggaactaaaaaagttcctgttatgctacatagagcgttatttggttctttggaaagatttgttggaattttaattgaaaactatgcaggtaagtttcctttctggatatctcctttgcagacaatggtaatacctatttcagaggaatttaatgattatgcagttgaagtatctaaaaaaattaaaaatgcaggcatcagttctgcagtagacttaaaaaataataatttaaattataaaataagagatcattctttagaaaaaataccacttttgttaatttgtggtaaaaaagaagttgactccaattcagtaacgattagaagattagactctaataaacaagaaaatatgggtatagataaattcttaaaaacattctctgctttaaataaagcatcatcaaactaag

SEQ ID NO: 302788 - DNA, 319 bp, Unknown
  Bacterial polypeptide expressing nucleotide sequence isolated from the Sargasso Sea
aagcttcctttttggttatctcctcaacaagttgttgtggcatcaattatttctgatgtaaatgattattcattaggaatcgtggaatctcttaaaaaagagggcattctggcagaagctgacctcaggaatgaaaagattagttataaaattagggagcatagtgatagaaaagttccaattattttagcaattggaaataatgaaaaaaaagataaaactgtttctattagaagaattggaagtactgatactgaggttgttgatctaaaagatgctataaaagaaattgccaaagaaaatttagctcttaattaat

SEQ ID NO: 302789 - DNA, 358 bp, Unknown
  Bacterial polypeptide expressing nucleotide sequence isolated from the Sargasso Sea
caaaaaccagtaataagaagagcaaaaaaatcaattgcaggattcaaaattagagaaggaatgccaattggtacatctgttactttaagaggtgacagaatgtgggaattttatgataggtttgtacaagttgttgtaccacgaattcgtgactttagaggatttaataaaaaatcgtttgatggaaacggaaattatacactcggattaaatgaacaattagtctttcctgaagttgaatatgacaaggttagagatatcagaggaatgaatattacaatttgtacttctgctaacgataacgaaaaaggttatgtattattacaatcgctaggatttccatttagggagaattaat

SEQ ID NO: 302790 - DNA, 633 bp, Unknown
  Bacterial polypeptide expressing nucleotide sequence isolated from the Sargasso Sea
ttttagtttgttttcaaggtttcataggctggtatatggtttcaagtggtttagttgatagaattgatgttagtcattttagattatctgctcatttgtttatagcttttttgattttatcttgtttaatttggtattatctaaatttaaaaaacagtgctaataaaaattttttaattaatgactcaaggttaaaatcaataaaatttttaatttttttcatttttttacagataatatttggagctttcgtttcgggtttagatgctggaatgatatatcaaacttggcctcttatgaatgagtcatattttcctagcgatgttaattttaaggactatagaaattttttagatttaaacgacagaagtgttgttcaatttatccatagaaatgtagcttatcttattttaatcatcattatttatataggctttaagataagagaattaaaaatgatacatttatacaaatcttattcgtatttattaggatttatctttatacaaataatattaggcgttttagctttaattagtaacttgcacatagctatagcttctatgcaccaaatttctagcatcttcttaataattttttcattaaacttttattttaaatccattaattaat

SEQ ID NO: 302791 - DNA, 547 bp, Unknown
  Bacterial polypeptide expressing nucleotide sequence isolated from the Sargasso Sea
catgattccaagactaaaaaaacaatatagaaatgtattaattgacgacttaaaaaaacaattaaatataaataatacaaatgcagtgccaaatttagagaaaatagtaataaatattggagatggaaaagcagcaactgatggtcgagcacttgaatcaatggttgatgaattaactgcaatatctggtcaaaaaccagtcatcaaaagagcaaaaaaatcaattgccggttttaagatccgagaaggaatgccaataggtgtctctgtgactctcagaggaaatagaatgtgggagttttatgatcgttttgttcaagttgttgtaccaagaattcgtgactttagaggatttagtaaaaaatcttttgatggcaatggtaatttttctcttggacttaacgaacagcttgtatttccagaagttgaatatgataaagttagggacataagaggtatgaacataactatttgtacaactgcgagtgataatcaagatggatatggcttacttaatgcacttgggtttccatttagagaggaataa

SEQ ID NO: 302792 - DNA, 223 bp, Unknown
  Bacterial polypeptide expressing nucleotide sequence isolated from the Sargasso Sea
actggaattagaccctctagattctgaccaaacttctgttcttagacagaaaatcagacattcagctgcccatgtcatggcggacgcagtcatgcaactattcccagacgcaaaaatggggattggccctcctacaaaggacggattctactacgatttcgaagtcactgacccatttaccccagacgatttaatcaaaatgaaaaaagaatgtctgaaataa

SEQ ID NO: 302793 - DNA, 478 bp, Unknown
  Bacterial polypeptide expressing nucleotide sequence isolated from the Sargasso Sea
tatggataaagaaccaattactactgaaggattagaaaaattaaaaagtgaattaatttttttaaaagaaaaaaagagacccgaaattgttgcagccattgctgaagcaagatcacatggagatttgaaagaaaatgctgaatatcatgctgcaaaagaacagcaatcacataacgagggaagaattcaagaagttgaggatttaattgcaagagcaaatgtaattgatatcaccaagattagtaatgatggaaaagtgatatttggatctacagtctaccttcaaaatttagatacaaatgaaaaaataaattacaaaattgttggtaaagacgaggcagatctaaaacaaaagcttctttattttcaatcaccaataggaaaaggtcttataggtaaaaataaaggggatcttgtagagataaatacaccagcagggacaaaaaattttgagattgtagacgtaaaatacgtttaa

SEQ ID NO: 302794 - DNA, 1036 bp, Unknown
  Bacterial polypeptide expressing nucleotide sequence isolated from the Sargasso Sea
aatgaaaagtagtctcttaaagttagggcttgcgagtgttattggcttcggagctgtaacaacctcccaagctgccactaagctcgatatggcgacgccatggggtggtggaattatgcttgagtatgtcgctcgaggagccgcagctaacatggaactcttcacttcaaacaacgtaaaagtggaagtttttcccggtggcacgcttggtaaagctcttaaagttacggatactgtaaaaaagggcgttgcgcagattggacataattggtccggatatgactggggtgtggataagacagccattttgtttggtggtttcgcaggctcaatgagctgggataaaatgatgcactggacattccgtggcggcggaaaagagatgtggatggactggcgtatggccgaatttggtgttgctgcagtaccttgtggttcggcacctagagagcttttcgcgcatagtcacaagccaataagaagcctggaagattataagggtatgaaagttcgtactgcaggtgcatgggcggaaatcgcacaaaaactaggtgcttctactgtaattttggcgggcgctgaagtttacccggcgctagaaagaaaagttgtcgatgccattgagtggggaactccaactcataacatcgtgatgggttttgaaaaagttgcaaaatatattgttgttccaggggttcatcaaccaatcgctatgcatgagtgcgcagtgaataagaaagtgtgggacggaatgtctgacatggttaaaaagcaaattactgcaggcggaaaaatgatgacctgggatctttacatgaagctcggacatgatgacgcgccaaactggatgaagtacgttaatagtaagaaaaacgaaatcatagaccttccacaatcgtttaaagatgctgcaaagaaagcaaccgatgagtgggcagaggaaacaggaaagaaagcaaacgattggtttaaaaaaatctgggcctctcaaaatgcttataaggacgcttggtctcaagcacatcgttatcgttaa

SEQ ID NO: 302795 - DNA, 547 bp, Unknown
  Bacterial polypeptide expressing nucleotide sequence isolated from the Sargasso Sea
atgattccgaggcttaaagatcaatatagaactcaattaattgacgaactaaagaaacaattaaatattgaaaacactaatgctgttccaaaactagaaaaaattgttataaatatcggtgatggaaaagctgctacagatggtagagcacttgaatcaatggttgatgaactaactgcaatatcaggccagaaaccagttataaaaagagctaaaaaatcaatcgcgggttttaaaattcgtgaaggaatgccaataggggtttctgtgacacttagaggaaatagaatgtgggaattttatgatcggtttgtacaggtagtagtcccaagaattcgagatttcagaggatttagtaaaaaatcatttgatggtaatggtaatttttctcttgggctgaacgagcaactggtatttccagaagttgaatatgataaagtcagagatatcagaggaatgaatataacaatttgtactactgcaaaagataattcaggcggatatgagttacttaactcacttggctttccgtttagggagaattaat

SEQ ID NO: 302796 - DNA, 856 bp, Unknown
  Bacterial polypeptide expressing nucleotide sequence isolated from the Sargasso Sea
aagtcaggggcagtggccgcattcgtaaacggggaggagagggacatgtccttcgcactcgatgaaaattgcaaggtagagccgatattgggcgattccgaggagggtctgtacatcctaaggcacagttgcgcacatcttctggctcaagcggtgactcagctttatccggatgccaaacccacaatcggaccgccgatagagcacgggttctactatgacttcgcaatggatccaatcggagacgaggagctccgacaaatagagaagaggatgaaagaactggtgaagcagaacataccgattgagagggaagagcatgacaatgagtcactcagagagatattctcctcaaatcccttcaaattagagataatggacgataaaatcggtcatgacgtgggttcgtcggcttatcgtcagggagatttcatcgacctctgcaaaggccctcatgtctcactgacctctcaattgaggtggttcaagctaaccagcaccagccaggcatactggagggcggacaaggacagggagtcgctggtcaggatttacggaatgtgctatccttccaaggatgggctaaaggaacgagagagacagatacaagaggctgcaaggagagaccacaagaagatagggaaggagatggggctctacatgattaacgagctgatagggaagggcctcccagtttggctaccgtacggcgaggtactgaaatcggagatagagaacttcgcgatagagactgaggaggcttatggttacgacagagtgactacccctgttcttgggaagaaggagctttccgagacatccggccatctgccacactacgcggaggggatgtacc

SEQ ID NO: 302797 - DNA, 535 bp, Unknown
  Bacterial polypeptide expressing nucleotide sequence isolated from the Sargasso Sea
catgccgatcgtaacccttccagacggatccaccagaagctataacgccccggtctcgccggcgaccatcgctgccgatatcggcccgggcctcgccacggcggccatgctggctgttgtcgacggccaggaatgggacatgaaccgcgagattgaggctgattcatcggtggcactgctgacggcaaaggacgacaccattctggccaccatccgacatgatgccgcgcatgtgatggccgaggcggttctcgagctgtatcccgagacgcaggtcactatcggcccgtcgatcgagaacgggttctattacgatttccatcgggaggcggccttcagtgatgaggaccttgccgccattgaggcgcgcatgcacgagatcgttgaccgtgacgagccgatcatccgcaatgtctggacccgtgacgaggcggtagccttctacaaacagaacaacgagccgttcaagatcgagcttgttgaggcgatcccggccggcgagacggttaccttctaccagcagggcgattcatcg

SEQ ID NO: 302798 - DNA, 650 bp, Unknown
  Bacterial polypeptide expressing nucleotide sequence isolated from the Sargasso Sea
tgatcttccccttcgtctggcagaatacggtacatgctatcgttatgaacagtctggggaattagctggattgctacgcgtgcgtggtatgaccatgaatgatgctcatatttattgtactcctgaccaggctaaatcagagtttatcaaagtcatggatttgcatacagaatattacaagatgttcggattgagcaatttctggctgagactttctctggctgaggaagataaaggtaaattcgtagatgaacctgaactatggcaaaaggccgaaactcttgtttcagaagtaatggaagaagtgggtattccctatgaagctgttcgaggtgaagcagcattttatggtcctaagatagattttcaggttacaaacgtggttggtcgtgaagaaactgcctcaacgaatcaaatggatttagtgatgggtaaccgttttggtttaaagtatactgcaagtgacagtcaagaacatactcccataattattcatcgcgcaccgcttggtacgcatgaaagatttgtagctttcctgattgaacattacggtggagcattcccatcatggctggctccagtgcaggtaaggtttattccagtggcttcagcattcaatgaatacgcctttgtcttgaaccaaaacttgt

SEQ ID NO: 302799 - DNA, 442 bp, Unknown
  Bacterial polypeptide expressing nucleotide sequence isolated from the Sargasso Sea
atgcaaccttatataaatattgataatgagaaaagaaatccagttatgcttcatagagcaattttaggatcctttgagagatttatcggaatcttaattgaacaatatgaggcaaaattcccaatttggcttgcgccttatcaaataattttattgagtattactgatagaaatattgaaaagtgtttaaagtttaatgatttaataaataataatggttaccgatcaaaagtagatgttaggaatgaaaaagtaggatataaaataagagaggcaactctcgatagagtccccttaattgctgttattggggataaagaagaggaaattgattcagtcgctttaagagctttggatggaacaaatttaggtattttcaacctacctaatctatacaaattaatggatgaattagtagaaaaaaaaggcagaacaaaataat

SEQ ID NO: 302800 - DNA, 303 bp, Unknown
  Bacterial polypeptide expressing nucleotide sequence isolated from the Sargasso Sea
tatgtatatatataaactgctagatggttccagcaaggaatttcaagataaaatcaacgggaccgaacttgcgaaatcaatatccccatcactattaaaaaaaacagttgctgtaaaagtaaacggtgaaatcaaagatctaacagatagtcttccaaataattctgatattgagtttgtgacaagagaacatccagaagcacttgatctcattcggcatgactgtgcccatgtactggcggaagcggttcaaattttatttcctgaaacccaagtcactataggaccagtcatcgaaaacgg

SEQ ID NO: 302801 - DNA, 314 bp, Unknown
  Bacterial polypeptide expressing nucleotide sequence isolated from the Sargasso Sea
attatggttatctccatcacaggtagtagttgctacaataacgtctgaatcagataattatgcttttgatgtaaaagatcaactaagtaaaaatgggttgcgcactgaggtggacattagaaacgaaaaaataggttataaaatacgtgaacatagtaatgctaaaatacctataattcttgcggttggaaaaaaagaagcagaagataaaactgtttctgtcagacgcttaggaagtcaaaaaacattagttgtaaagcttgatgaattaattagtgatttaaaaaaagaatctctttctcctattagttaat

SEQ ID NO: 302802 - DNA, 373 bp, Unknown
  Bacterial polypeptide expressing nucleotide sequence isolated from the Sargasso Sea
atgcccactattactcttcccgataattccaaaagaaaatttgataatccattaagtatcgacgatatcgctaaagatattggaccaggcttagcaaaggcaaccgttgcaggaaaagtgaatggtatgctcgtagacgcctcggatattatccaagaagattgtgatcttgagatagttactattcaggatgatgagggaattgagattgtaagacactcttgcgcgcatctttttgcccatgctcttaaacaaatatacccaaatgcacagatggctataggtcctgtaataaaagagggattttattacgacataaagcttgataaaaatcttacatatgaagatttagaaaccatgaaaaaagaatgaa

SEQ ID NO: 302803 - DNA, 684 bp, Unknown
  Bacterial polypeptide expressing nucleotide sequence isolated from the Sargasso Sea
tatgaaattaacacttccagataaaagtattagggaacttgaagcaggctctagtggatttgatttagcaaaagatattggtccaggacttgctaaagctgctgtagctataaatataaatggagaacagagagatctatttgatcctatatgtgaagatgcaaacgtttcaataattactataaattcagaagaaggtcttgaaataatgagacatacattaacagctcaagttttagctagagctattaaaaatatatatcctgattcagagcttgctattggacctacaattaaagatggtttttactatgacttcaaaacaaaagaagcagtatcaattgatgatttggacgatattgaaaaagaaatgacaaaaattattgattcaaaatcaaaaataacaaaaaaattattttcaaaaaaagatgcgcttaaagtttttacaggaaataaagaaccttataaaaaatttattattgaggattctgatcaaaacaatgatttccaattatattttcaagatgacaaccaatttgttgacctttgcaaaggacctcatctgccagatctaaattttataggttctttcaagttaactagggtctcaggtgcatattggaagggcgattcaaaaaatgaaatgcttacccgaatatatggaacagcatggacaaatgaaca

SEQ ID NO: 302804 - DNA, 479 bp, Unknown
  Bacterial polypeptide expressing nucleotide sequence isolated from the Sargasso Sea
caatgcggactcttcagctagatttaatcttgctgatcgtctagatgctcagtatgtcgcagaagatggaaataaatataacccagtcatgttccatagagcgattcttggttcttttgaaagattcataggtattttgattgagaactacagtgggaatcttcccttatggcttgctcccacgcaagtgacagtttgttcaattacagatgaagctgatgattatgtaaaagaaatatcagaaacgcttagaagtaaaaatattcgatgtaattcagatttaagaaatgaaaaaattagttataaagtcagagaacatagcgtctcaaaagtaccgataattgtcgctgtcggaaaaaaagaggtttcagatagaactgtttcagtaagaaggcttggcagtgatgatacatctatattttcctttgatgattttgctacttcagtagtgcaagaatctcttgccccaaataaataaa

SEQ ID NO: 302805 - DNA, 928 bp, Unknown
  Bacterial polypeptide expressing nucleotide sequence isolated from the Sargasso Sea
gttattttatctcctgatggaactatgactgaatttgataagtttgatttctctaaacataaaaaattagaaaagttagctaagtatgaatctgctaaaaatcgaaatgttgatgagcctcctcctcatgttgcactaatgaaaaaacttggaattgcagactatgaacctgcatctgatcatggaaatatgcgatttttcccaaacggccgtctgataaaatctctcttagagcaatatgttacaaacagagtaaaaaattatggtggttatgaagtagagactccaatcatgtatgattcacatcatcctagcatggagagttacttcaacagatttcctgcaagacagtataacattgatgcagatggaaaacaattattcttaagatttgcagcatgctttgggcaattcctgatagcacatgatatgcaaatttcttacaaaaatttgccatatagattgtatgaaatgactcgatacagctttagacgtgaacaatctggagaattagttggtcttagaagattaagagcattcacaatgcccgactgtcatgcattttgtaaagatatgccacaagcagtagatgaattcaaaaaacgttttgaattatcaagagatgttctacaaaatgttggtattgaaaatgatgattatgaaatggctatacgatttacagaggatttctacaatgaaaataaagaattaattcttgaaatggtaaaaaaattagataaacctgttttagttgagacgtggaaagaacggttcttttactttgttttaaaatgggaattcaactatattgataatctaggaaaagcttctgcattatctactgatcaaattgatgttgaaaatggtaatcgatatggaattgaatttgtagatgaaagtaattctacattacatcccaatcatttta

SEQ ID NO: 302806 - DNA, 499 bp, Unknown
  Bacterial polypeptide expressing nucleotide sequence isolated from the Sargasso Sea
aaatcatgaaaaattttcatcaaaacaaatcatttattttgatcccttagatcaatctaaatacacaccttatgtagtcgagacatctattggattagatagaatgtttttagcaatattttcaaattctttaataactgaaaaattagatggtggttcacaaagaattgtattaaaaattcctaaaatattagcaccaaataaatgcgcaatacttccgctagttaagaaagatggactttcagaatatgcgaataatattaaagataaattaaagataaagtttaaattaacctatgatgaaaaggatgctatcggaagaaggtatagaagacaagatgctcttggaacaccatattgtataactatagatcaccaatcaatcgaagataatacggttacagtaagagaaagggattcaatgaaacaagaacgtattaaggtagatttaatcgaagaatttttagtaaaatcattggatatctctaactggctttaa

SEQ ID NO: 302807 - DNA, 493 bp, Unknown
  Bacterial polypeptide expressing nucleotide sequence isolated from the Sargasso Sea
tatgcctaaagattttaaccagttaaatttcaaagaaaaacaaatatatttagataatttaagacattcttctgctcacgtcttggctgaggcagtaataaaacttttccctgatgcaaaattaactatcggcccaccaattgaagatggtttctactatgattttgatgttaaaaatgctttcactccaaaagatcttaagaaaattgaacaagaaatgagaagaataattaatcaaaatactgattttattgaacgagaggtaacaagagacgaagctatgttatctgtaaaagataacccatttaaaatcgaaatcttagaatcaatcccagaaaatgcaaaaatcactttatgtagtcactctgatggtaattttgaagatttatgtagagggggacacgtagataaaacaggcgatataaaagctcttaagcttatgtctacttctggtgcttactggagaggagatgagaataatcctatgctacaa

SEQ ID NO: 302808 - DNA, 382 bp, Unknown
  Bacterial polypeptide expressing nucleotide sequence isolated from the Sargasso Sea
ttggtctctagaaagatttgctggaatattaatgaacattacgcaggtcatttgccactttggttgtctccattgcaaattgttgtaacaacaattacttcagatgcagatgattatgcagaaaatatttataatcaatttaaagaaaaaggttttaaagttgaaaaagatattcgcaatgaaaaaataggttataaaatacgcgaacatagtgcttctaagattcctgttattattgtagtaggaaaaaaagaagaagaaaataatactttgtcattgagaagattaggaagcaatcaatctaaaatatataaagttgatgaagttctagatcagttatttaaagaagccatgtccccaattaatgtgaatatgaaatgaa

SEQ ID NO: 302809 - DNA, 322 bp, Unknown
  Bacterial polypeptide expressing nucleotide sequence isolated from the Sargasso Sea
gctgcccttctggttggcgccaagacaggtagtcgttgcctcgatcatctcggaagccaatgattatgtgcagaaagttgtcgatcaattgaacgcagtgggcgtccgcgccgaggccgatctgcgcaacgaaaagatcaactacaaggtccgtgagcattcggtcggcaaggtgcccgtgatccttgcctgcggtatgaaggaggtcgaagaaggcacggtttcggttcgtcgccttggcgagaagaaaaccagtgtcgaagccctcgacagcatgatcgaggacttgtcgaaagaggcgacaccgcccgaccttctgtaa

SEQ ID NO: 302810 - DNA, 481 bp, Unknown
  Bacterial polypeptide expressing nucleotide sequence isolated from the Sargasso Sea
cagtgtggaactttacaggtagatttaaatcttccatcaagacttggatcttcctatattgctagtgatggttctaaaaaaattcctgtaatgttacatagagctttatttggttccttagaaagatttattgcgattttaatagaacactatgctgggaaattaccattatggttaactcctttgcaggctgtagtgctaccaattacatcagaatttgataaatatgcaaaaaaaatatttgaacaatgtttgaaagcaggtataaacaccgaagtggatttaaaaaatcaaaaaataaattataaaattagagaacattcattgtctaaagtgcctcttttattaatttgtggtcaaaaagaagttaacgataacagtgttacaattagaagattgggatcagaaaaacaagaaacgctttcaattaatgaagcgattaaaaaaatatctgaaaaaaataaatttccaataaattaag

SEQ ID NO: 302811 - DNA, 331 bp, Unknown
  Bacterial polypeptide expressing nucleotide sequence isolated from the Sargasso Sea
aatgcctataattactttatcagatggaaaaaatattgaattcccaaaagaagttacaggtttagatattgcagaaaaaataagcaagtcattgttgaaacaagcattgataatgagtgttgatggtgagctaaaagatctttatttttcaataaaaaaagactgtttggtaaaaatttttaccgcaaaagatcctgagggtcttgaagttattagacatgatactgctcacattatggccatggctgttcaagaattatatcctggtacacaagtaactataggtccagtaatgaaaatggtttttactacgattttgctcgaaaggaac

SEQ ID NO: 302812 - DNA, 478 bp, Unknown
  Bacterial polypeptide expressing nucleotide sequence isolated from the Sargasso Sea
ggtggaaccctacaagttgattttaatttacctggaaggttaggtgcttcttatgtagacaaagatggaacaaaaaaagttccagtgatgttacatagagcattgtttggatcacttgagagatttattggaattttaattgagaattatgctggtaagtttccattttggatatctccgttgcaaacagtagtaattccaatctcagaagattttgaggaatatgcaagtagtgtttcaaaaaaaataaaagaagctgggatgagttcaatagttgatttaaaaaatcataatttaaactataaaataagagaacattctcttgcaaaagtccctattttattaatttgtggtaaaaaagaagttgacagtaactcggtaactattagaagattggattctaataaacaagaaaatatggaattaaataaatttttaaaaacattttctgctttaaataaagcgtcttcaatttaag

SEQ ID NO: 302813 - DNA, 457 bp, Unknown
  Bacterial polypeptide expressing nucleotide sequence isolated from the Sargasso Sea
ttaaatttaccaaaaagacttggcgcaacttttgtagataaggacggaacaaagaaaacaccggtaatgttacatagagctttatttggatcattagaaagatttattggaatcttaatcgaaaattatgcaggaaaacttccattttggctatcaccattacaagcggttgtgttacccatagccgaagagcacaatgattatgcaaaaaaaatatttgaagacctgttcaaagaaggtataaaatgcgaagtggatttaagaaatcaaaaaataaattacaagattagagaacactctttagctaaaacacctctcattttaatttgtggaaaaaaagaaatatctgagaaaagcgttacaatgagaaaactaggttctgaaaaacaagaaaaagttaaatttaacaaagctgttgaaaaattaaaaatgctaaacaatcttccaattaaataag

SEQ ID NO: 302814 - DNA, 270 bp, Unknown
  Bacterial polypeptide expressing nucleotide sequence isolated from the Sargasso Sea
ctgatactgatgattatgctattaaagttaaaaatgaattgatcaaaaatggtattagggctgatgtagatttaagaaatgaaaaaataggctataaaattcgagaacatagcaatagcaaggtccctataataattgctgttgggaaaaaagagtctcaagaaaaaacaacttcagttagaagaattggatcagcagaaacaaagacctttaaattagatgaaattgttattactttatctaaagaaacaaaatcacctatagaataaa

SEQ ID NO: 302815 - DNA, 843 bp, Unknown
  Bacterial polypeptide expressing nucleotide sequence isolated from the Sargasso Sea
aatccggtcaattatttggtctgatgagagtgcgaagcttacaaatgaatgatgcacatatctactgcactccaaatcagtttaaaaaagagtttatggatgtttgcagaatgtatttagagtactttgaattatttaatattgagaaatattctatgagacttagtcttcatgataaagcgggcttgggagagaaatatgtcaatgagcctgagctatggcttgagacagaacaatgggttagagaagctttagatgaaggtggttttaattatagtgaggtatcgggtgaggctgccttttatggacctaagattgatgtgcaggtttggagcgcgattgggaaagagtttactttagctacgaatcaggttgattttgtgatcccaaagagatttggtcttacctataagaatgagaatggagagcaaaagactcctatctgtatacatcgtgctccgctcagtactcacgagaggttcattgggttcttagttgaacattttggtgggaatttcccactctggcttgctccggttcaggtggcgattttacctgtatctgataaaacgaatgagtatgctagaaagataaatgaaaaattaatagattccgatatcagaacatttttggatgatagatcagataaaataggagctaaaattcgaaatgctgaaattaatagaattaatgtcatgctcattctaggtccaaaagaagaggaaaataatactgtttcggtcagaagaaaaatttctggagatttaggaactatagatcaagatatgttaatttcagagcttgttaaagaaataaaggataggagtttgactcatagctaaa

SEQ ID NO: 302816 - DNA, 490 bp, Unknown
  Bacterial polypeptide expressing nucleotide sequence isolated from the Sargasso Sea
aagagactggcaatgtggaactttacaagttgattttaatttacctgggagactagaggcttcgtatgttgacaaagatggaaaaaaaaaagttccagtaatgttacatagagctttatttggttctttagagagatttattggaatattaattgaaaattatgctggcaaattcccattttggatttcacctttacaaactgtagtaattccaatttcagaagagtttaatgattatgcaaaaaaagtttctgatcaaattaaaaaagaaggtatgagttcggttgttgatttaaaaaatcataatttaaattataaaataagagaccattcattagctaagataccaattttattaatttgtggtaaaaaagaagttgactctaactcagtaaccattagaagattggactctaataaacaagaaaatatggaactaaaaacattcttaaaaacattctctgctttaaataaagcattttctaaataa

SEQ ID NO: 302817 - DNA, 414 bp, Unknown
  Bacterial polypeptide expressing nucleotide sequence isolated from the Sargasso Sea
tgaaaaaagaaatccagttatgttgcatagagcattttaggatccttgaaagatttataggaatcttaattgaacaatatgaggctaaattcccaatttggcttgcgccttatcaaataattttattaagcattactgatagaaatattgaaaaatgtttaaagtttaatgaattaataaataataatggttaccgatcaaaagttgatattaggaatgaaaaaataggatataaaatacgagaggcaactctcgcgagagttcctttaattgcagttattggtgataaagaggaggaaattgattcagtcgcaataagagccttgaatggaagaaatttaggaattttcaatttaccaaatcttttcaaattaatggatgaattaatagaaaaaaaagggagaacagaataat

SEQ ID NO: 302818 - DNA, 289 bp, Unknown
  Bacterial polypeptide expressing nucleotide sequence isolated from the Sargasso Sea
tgttatttgttctatagccgaagaaaacaataattatgtaaaaaagttatttgaagatctatttaaagaaggtataaaatgtgaaatggatttaagaaatgaaaaaataaattataaagttagagaacattctcttgcaaaaattccattcattattgtttgtggaaaaaaagaagttgcggataatactgtgacagttagaaaattaggatccgataaacaagaaattatgaaaagagaagatttaatcaaaaatatgcttgcctcaaataagttgcctctaaattaa

SEQ ID NO: 302819 - DNA, 559 bp, Unknown
  Bacterial polypeptide expressing nucleotide sequence isolated from the Sargasso Sea
tatggacaaacaaagcaaccctaaactttacgccattcgccactctttagcccatgtgctagctcaggcggttcaaagtcaatttgcaggtacaaagcttgggtttggtcctccaacggatacaggactctattatgacttccactttgctgaaaaaagccccactgaaaaagacttcaaggccatcgaaaagcaaatgcgcaaaatcattaatgagaaacaaacatatacaaaaacctcgtgtacatatgagcaagctgtagaaagagccaccaaacagcaagaaccctacaaagtcacaaatatcaaaatgctggcacaaaatggggtcactgagtttactttcttcaaaaacggagaattcgaagatctttgcgaaggtcctcatgttgagcacacaggcgaattgcctgtaaaaggtttttgccttgaccgcattgctggagcctattggcttggtgatgagaaaaatgagatgctaacacgtatctatgtgttggcgtttgaaactccgcaagagctccatgacttcaaactgaaaaggcaaaaagccgaggct

SEQ ID NO: 302820 - DNA, 499 bp, Unknown
  Bacterial polypeptide expressing nucleotide sequence isolated from the Sargasso Sea
atgcccactattactcttcccgataattccaaaagaaaatttgataatccattaagtatcgacgatatcgctaaagatattggcccaggcttagcaaaggcaaccgttgcaggaaaagtgaatgggatgcttgtagatgcctcggatattatccaagaagattgtgatcttgagatagttactattcaggatgatgagggaattgagattgtaagacactcttgcgcgcatctttttgcccatgctcttaaacaaatatacccaaatgcacagatggctataggtcctgtaataaaagacggattttattacgacataaagcttgataaaaatcttacaaatgaagatttagaagccgtcgaaaaaagaatgaagcagcttgccaaaactaagtatgacgtagtgcgcgaggtagtttcaagaaaacaggctattgatacttttcaaaaaagaaatgagccttataaggttcatcttgcagaagaaatacccgatggag

SEQ ID NO: 302821 - DNA, 391 bp, Unknown
  Bacterial polypeptide expressing nucleotide sequence isolated from the Sargasso Sea
atgtttcatagagcgattctggggtcttttgagagatttataggtattttaattgagaactatagtgggaatcttcccttatggcttgctcctactcaagtaactgtttgttcaattacagatgaggctgatgattatgtaaaagaaatatccaaaatgctaagaagtaaaaatattcgatgtaactcagatttaagaaatgaaaaaattagctataaagttagagagcatagtgtctcaaaagtacctataattattgccgttggaaaaaaagaggtttcagacagaactgtttcaataagaaggcttggcagtgatgatacatctgtgttaacccttgatgattttacaacttcagtggtgcaagaatctcttgccccaaataaataaa

SEQ ID NO: 302822 - DNA, 466 bp, Unknown
  Bacterial polypeptide expressing nucleotide sequence isolated from the Sargasso Sea
aatgattacaattaccctcccaagcaacgataaaaaaaaatatgataaaccagtaacctctgctgaaattgcaaatgacatttcagaaaaacttaaatctgaagctttagtttcaatagtaaatggtgaactatgggacttagacaggcctatcgaagtagatagtaagattgcgatattgacaaaaaaaaacaaagaaactttggatgttataagacatgatgcggcacatatcatggcagaagcagttctagaattgtttcctgaaactcaagttacaataggcccttctattgaaaatggtttttactacgatttttacagagaaaagaaatttattttatctgatttagaaattattgaaaaaagaatgcatgatatcgttgacagagacgaaacaatctcaagagaagtttggtctagagaaaaagcaatagatcactttaaaaaaagcaatgaaaaattt

SEQ ID NO: 302823 - DNA, 238 bp, Unknown
  Bacterial polypeptide expressing nucleotide sequence isolated from the Sargasso Sea
ttcttcatatattgctagcgatggatcaaaaaaaattccagtaatgttacatcgagccttgtttggctctttagaaagatttattggaattttgatagaacattatgcaggaaaattaccattatggttagctcccttacaggtagttgtactgccaatcgcttccgaatttgataattatgcaaaaaacatatttgaacaatgtgttaaagcaggtataaacaccgcagtggattta

SEQ ID NO: 302824 - DNA, 580 bp, Unknown
  Bacterial polypeptide expressing nucleotide sequence isolated from the Sargasso Sea
tatgcccactattacattgccggataatactcaacgggaatatgaaaagcctttgacaatcatgcaggtagcgcaggatattggtccaggtttaggaaaagcagcgattgctggatatatggatgatgagctgcatgatgcctgtgaattaattgaaaatgatacccacttaagaattattacaaataaagatccagaaggtgttgagattattcgccattcttttgcacatctaatgggtcatgcagtaaaacagttatttccaaatgcaaaaatggccattggaccagtgatacaagatggcttctattatgatattgatacagagatacctctcactccagacgatctccaaaaaattgaatctcgaatgaatgaactcattaaaaaagattatgatgttattcgcgaagtagtttcgcatgacaaagcgatgcagacttttatcgaaagagatgagccttataaacaagaaataattgatgagatatcagataacgagattattaaactttactatcatgaggaatatacggacatgtgccgcggacctcatgttcaaatactcgtcaccttcgtc

SEQ ID NO: 302825 - DNA, 466 bp, Unknown
  Bacterial polypeptide expressing nucleotide sequence isolated from the Sargasso Sea
gcagtagatttaaatttaccaggtagattaggggcttcttttgtcgataaagatggaactaaaaaagtacctgtaatgttacacagagcattatttggatctttagaaaggttcataggtatcctcatagaaaattatgcaggtaagctgccattttggatatcacccttacaggcagtagttattccaatctctagtgattttgatgaatatgctaaaagtgtaactagtgaattaaaacagagtggtttgattgctgaggtggatgtaaaaaatcataatttaaattataaaattagagatcattctttaacaaaagtaccattgttattaatttgtggtaaaaaagaagttgacaccaacagtgtaactattagaagattggattctaataaacaagaaaatatgacattgaaagaatttataaaaaaatactccgatctaaataaagcaccttcaatttaag

SEQ ID NO: 302826 - DNA, 426 bp, Unknown
  Bacterial polypeptide expressing nucleotide sequence isolated from the Sargasso Sea
gatcttcttatgtttctagcgatggaacaaaaaaagttcctgtaatgctacatcgtgcactatttggttctttggagagattcattggaattttaattgaacattatgctggtaaactgccattgtggttagctcctttgcaggcggtcgttatcccaatagcagcagaatttgataattatgcaaaaaaaatatttgaacaatgtgttaaagcaggtataaacaccgaggtggatttaaaaaatcaaaaaattaattataaaattagagaacactcgttgtccaaagtaccactactacttatttgcggagagaaagaagttaaaaataaaagtgttacaattagaaaattaggatcagagaaacaagagacgcttttacttgaaaaagcgataatgcaaatatctaaaaaaataaatttttaat

SEQ ID NO: 302827 - DNA, 410 bp, Unknown
  Bacterial polypeptide expressing nucleotide sequence isolated from the Sargasso Sea
aatgcctgaaattaaattattagacggaaaaaaaatacccttttcaaaacctattgatggttttgagttaacagaaaaaataagcaaatctttaaggaaagaagctcttgtgatggaagtaaatggagaacttaaggacttaagttttaaaataagtaaggatagtgaggtaaaaattataacttcgaaagataagcaaggcattgaggttattcgccatgatgctgcgcatataatggctatggctgttcaagaactatttccaggaactcaagtcactatagggcctgtgattgaaaacggttttttctatgatttcgcaagaaaaaatcctttcactatggaagatttaaaaaaaattgagaagagaatgtcggacattattgaccgaaatgtaaaaacaaaaaggg

SEQ ID NO: 302828 - DNA, 523 bp, Unknown
  Bacterial polypeptide expressing nucleotide sequence isolated from the Sargasso Sea
aatgcctgatataaaacttttagacggaaaaaagataccattcacaaaatcaataaatggattcgagttagctaaaaaaattagtaaaactttagagaaagaagcattaattatggaggtagatggagaattaaaagaccttagctacctaattaaaaagaactctgtagttaaaattgttacctctaaagataaagaaggattagaagttttaagacatgatgccgcccatattatggcaatgtcagtacaagaactatttccaggtactcaagtaactattggcccagttatagagaacggtttttactacgattttgcaagaaaagatccatttactagtgatgacttaaaaaagatagaaaaaaaaatgtctgaaataattgatcgagacgtaaaaacaaaaagagaagtttgggagagaggcaaggcgattgcacacttcaaaaagattggagagaaatataaagccgagatcattgaaagtataccagctaatgaggaactatctatttatcaccat

SEQ ID NO: 302829 - DNA, 579 bp, Unknown
  Bacterial polypeptide expressing nucleotide sequence isolated from the Sargasso Sea
aagcagttcgtggtgaagccgcgttttatggacctaaaatagattttcaggttacaaatgtagttggtcgagaagaaactgcctcaacgaatcaaatggatttggtaatgggtagccgttttggattgaagtatactgccagtgacagccaagaatatactcccataattatacaccgcgccccactaggtacgcatgaaagatttgtggctttcctgattgaacactatggaggagcattccccacatggctggctcctgtgcaggtacgtttaattccggtagcttcatcattcaatgaatacgcccataatttgaatcaaaacttatacagttctttaattcgaacagaagtagatgattctcatgattcattcagcaagaaaataaggaatgctgccatcgataaaatcccaaatctccttattgtaggtgaaaaagaacaagcaaatcagtgtattacttggcagagatacgggagcaagacaagagagtctgtgtcattcgaagccttttcgtccagtctccaaggggaaataacaaatcgtctcgattggcgaaacaaagataaaatttaat

SEQ ID NO: 302830 - DNA, 403 bp, Unknown
  Bacterial polypeptide expressing nucleotide sequence isolated from the Sargasso Sea
aaagtaccagttatgttacatagagcattgtttggatcgctagaaagatttattggaatcttaattgaaaattatgctggaaagtttccattttggatatctccattacaaacagtagtaattccaatctcagaagattttgaggaatacgcaagtaaagtttcaaaaaaaataaaagatgccgggatgagttcagttgttgatttaaaaaatcataatttaaattacaaaatcagagaacattcccttgcaaaagtacctattttattaatttgtggtaaaaaagaagttgacagtaactccgtaaccattagaagattggattctaataaacaagaaaatatggaattaaataaatttttaaaaacattttctgctttgaatagagcatcatcaaaataag

SEQ ID NO: 302831 - DNA, 435 bp, Unknown
  Bacterial polypeptide expressing nucleotide sequence isolated from the Sargasso Sea
agagcctttctcagaggaggacttaaataaaatagaaaataaaatgaaagaaatagttgagagagacgaaaaaacaatcagagaagtttggtctagaaaaaaagcaatagatcattttaaaaagataggtgaaatatataaagcggaaattattgagagtattcccgaaggtgaagaagtttcaatttattttcatggtaaatggcacgatctctgtcgaggtccccacttgtcttcaacaggaaaaattggaaaattttttaaattaactaaagtttctggggcatactggagaggcgattcaaataatgaaatgcttcaaagagtatatggaacaagttggtctactaaaaaagatcttgatgattatttaaatagaatagaggaagctgaaaaacgagatcatagaaaattgggaaaaagcatggatctatt

SEQ ID NO: 302832 - DNA, 512 bp, Unknown
  Bacterial polypeptide expressing nucleotide sequence isolated from the Sargasso Sea
ttgtttacgagatgctattggcagagactggcaatgtggaactttacaagtagatttaaatttacccgcaagattagatgcttcttacgttgacaaagatggaactaaaaaagttcctgttatgttgcacagagcattatttggttctttagagagatttattggaattttaattgaaaactatgcgggaaagtttccattttggatatctcctttacagactatggtaatacctatatcagaagaatttaatgattatgccattgaggtatcaaataaaattaaaaattcaggtataagttcttcagtagatttaaaaaatcataatttaaattataaaattagagatcattctttagcaaaaataccgcttttattaatttgtggtaaaaaagaagttgactccaattctgtaacgattagaagattagattctaataaacaagaaaatatgggtatagatcaattcttaaaaacattctctgctttaaacaaagcatcatcaaattaag

SEQ ID NO: 302833 - DNA, 376 bp, Unknown
  Bacterial polypeptide expressing nucleotide sequence isolated from the Sargasso Sea
tatgaaaattagtcgtgatagcaaagagggtcttgatattattcggcatgattgtgctcatgttttagctgaagcagtacaaagcatatttccagaaacattggtgagtattggacccactattgaaaatggtttttattatgattttgcaagagaaaaaccatttacttctgaagatttaattttaatcgaaaagaaaatgcatgaaattatagcaaagggaaaaaaatttgaaaaagaagtttggaaaagagaagaggcaattaaatttttttcaaaaaaaggagagatttataaagttgaattaattaatgatattcctgcatcagaagaaattactatatacaaacaaggcgaatggttagatttatgcaga

SEQ ID NO: 302834 - DNA, 877 bp, Unknown
  Bacterial polypeptide expressing nucleotide sequence isolated from the Sargasso Sea
aaaacttcaactgccttagaatctgaatcgaaaattaaatcttattggtatattttatctcctgacggaactatgagtgaatttgacaagtttaatttctctaaacataaaaaattagaaaaattagcaaagtatgaatctgctaaaaatcgaaatgttgatgaacctcctccacacgttgcattaatgaaaaaacttgcaattgcagactacgaacctgcatctgatcatggaaatatgagatttttcccaaacggccgtctaataaaatctctcttagagcaatatgttacaaacagagtaaaagattatggtggctatgaggtagagactccaatcatgtatgattcacatcatcctagtatggaaagttacttcaacaggtttcctgcaagacagtataacatagatgctgatggaaagcaactattcttaagatttgcagcatgctttggtcagttcttaatagcacatgatatgcaaatttcttacaaaaatttaccatatcgattgtatgaaatgactcgatatagctttagacgtgaacaatctggtgaattagttggtcttagaagattaagagcatttacgatgccagactgtcatgcattttgtaaagatatgccgcaagcagtagatgaattcagaaaacgttttgagttatcacgagatgttctacaaaacgttggtattgaaaataatgattatgaaatggctatacgatttacagaggatttctacaatgaaaataaagaattaattcttgaaatggtaaaaaaattagataaacctgttttagtcgagatgtggaaagaacgtttcttttactttgttttaaaatgggagttcaactatattgataatctaggaaaggctt

SEQ ID NO: 302835 - DNA, 217 bp, Unknown
  Bacterial polypeptide expressing nucleotide sequence isolated from the Sargasso Sea
gttagggctgatgtagatttaagaaatgaaaaaataggctataaaattcgagaacatagcaatagcaaggtccctataataatcgctgttggaaaaaaagagtctcaagaaaaaacaacttcagttagaagaattggatcatcagaaacaaaaacctttaaattagatgaaattgttactaccttatctaaagaaacaaaatcacctatagaataaa

SEQ ID NO: 302836 - DNA, 480 bp, Unknown
  Bacterial polypeptide expressing nucleotide sequence isolated from the Sargasso Sea
aatgtggaactttgcaagttgatttaaatttacctggtagacttggagctacatatgtttctaaagatggcagcaagcaagttccagtaatgcttcacagggcactatttggttcattagaaaggtttataggaatattaattgagaattatgctggtaaaatgcctttttggctaactcctcttcaaactgtagttatacctatttcaagcgactttgatgaatacgcaaaaaatgtttatcaaaaactaaaaaaagtagggatctcatctgaagtagaccttaaaaatcataatttaaattataaaattagagatcattcattaaccaaggttcctttgcttttaatttgtggaaaaaaagaagttgacactaacacagtaactattagaaagttggattcaaacaaacaagaaaatatggaattaaaagaatttctaaaaaaatattctgctttaaataaagcaccttcaatttagt

SEQ ID NO: 302837 - DNA, 229 bp, Unknown
  Bacterial polypeptide expressing nucleotide sequence isolated from the Sargasso Sea
ttgaaaacagtggtgttaaaatatgctgacagaccagaagtaagagtgggtgaagataaagtctgggataaagccgaggcatctttattagaggcagtcaaagcaacgaaattagaatacagcataaataagggagaaggtgccttttatggtccaaaaatagaatttgtgttaagagatgctattggtagagattggcaatgtggaactgtacaagttgatttaaact

SEQ ID NO: 302838 - DNA, 214 bp, Unknown
  Bacterial polypeptide expressing nucleotide sequence isolated from the Sargasso Sea
atgccagttattactttacctgacggtagtcagcgttcgtacgacaatcctttatctgtattagacgttgccaaagacataggccctggtttagcgaaagcgaccatcgccggtaaaatcaatggtcaattggtagacgcttgtgagctgatcacctctgatgcttcattaagtattgtcacagccaaagatcaggaaggcctggaaattatac

SEQ ID NO: 302839 - DNA, 402 bp, Unknown
  Bacterial polypeptide expressing nucleotide sequence isolated from the Sargasso Sea
aagttccagtaatgctgcatagagcattgtttggctcacttgaaagatttataggaattttgatagaaaattatgcaggtaaatttcctttttggatttctccattacaaacagttgtgataccgatttcagaagagtttgatgattatgcaattgaagtttcagaaaaaataaagaaagctggaatgagttcttttgctgatttaaaaaaacacaatttaaacaataaaattagagatcattcacttgcgaaaatacctattttgttaatttgtggtaaaaaagaagttgacagtaactctgtaacgattagaagattggattctgataaacaagaaaatatggatttaaatttattcttaaaaacattctctgctttaaataaagcatcttcaaattaag

SEQ ID NO: 302840 - DNA, 259 bp, Unknown
  Bacterial polypeptide expressing nucleotide sequence isolated from the Sargasso Sea
tatgagattaaaaagaaattagatgatgttggtattagaagcgaattagatttaagaaacgaaaaaattggatacaagattagagagcattctagtcaggctattcctataattgtaattataggaaatcaagaaaaagacaatcaaagtgtagcagttagatacttaggctcaaaaaaacaagaatttttgagtctaaaagaatttattgaaaatattgttgacaaatgcttgccgcctgacttggctaagccttaaa

SEQ ID NO: 302841 - DNA, 412 bp, Unknown
  Bacterial polypeptide expressing nucleotide sequence isolated from the Sargasso Sea
gatggatccaggcaaaaaccagtcgtgattcacagggcaatgttaggttctttagagagatttttaggagttctaatagaacatttatcaggtaatttccctacatggctttcacctgtacaggcaatcataataccaataactgataagcatctagactattcatatgatatttataaacaatttaagtcaaaaaacattaggatagaggttgatgaatcaagcgagcgaatgaatgcaaaaataagaaatgcccaactaagaaaaatcccttatatgtttattattggagataatgagatgacttcaaaaaccgtgtcggttagaacaagaaatggtaaagaaactagttccattagtagggaagatattttagaaaaagtaaattcggaaattttaaacagattttgat

SEQ ID NO: 302842 - DNA, 443 bp, Unknown
  Bacterial polypeptide expressing nucleotide sequence isolated from the Sargasso Sea
aagattagatgcttcttatgttgataaagatggtactaaaaaagttcctgttatgttgcaccgagcattatttggttctttagagagatttattggaattttaattgaaaactatgcaggtaagtttccattttggatatctcctttacagacaatggtaatacctatttcagaagaatttaatgattatgcagtcgaggtatcaaataaaattaaaaattcaggcataagttctgcagtagatttaaaaaatcataatttaaattataaaattagagatcattctttagcaaaaataccgcttttattaatttgtggtaaaaaagaagttgactccaattcagtaacgattagaagattagattctaataaacaagaaaatatgggtttagatcaattcttaaaaacattctctgctttaaacaaagcatcatcaaactaag

SEQ ID NO: 302843 - DNA, 487 bp, Unknown
  Bacterial polypeptide expressing nucleotide sequence isolated from the Sargasso Sea
agattggcaatgtggtacattgcaagttgatttaaatttacctgaaagactaggagcaacttatgtcgcaaaagatggtaacaagaaagttcccgttatgcttcatagagcattgtttggttcattagaaagatttataggcatattaattgaaaactatgctggtaaacttcctttttggctcgctcctcttcaaacagttgtaataccaatttctaatgattttgacgattatgcaaaaaatgtttataaacaaataaaaagagaaggaatatcctcagaagtagatcttaaaaaccataatttaaattataaaattagagatcattcattaacaaaagtacctttgcttttaatttgtggaaaaaaagaagttgacactaactcagtaactattagaagattggattcaaacaaacaagaaaatatggaattaaaagaatttctaacaaaatactctgcttttaataaagcaccttcaatttaa

SEQ ID NO: 302844 - DNA, 508 bp, Unknown
  Bacterial polypeptide expressing nucleotide sequence isolated from the Sargasso Sea
ttaagagatgcaatcggaagagattggcaatgtggaactttacaagttgatcttaatttaccagaaagattaggtgcttcgtttgtagatagtgatggaaacaaaaaggtaccagttatgttacacagagctttatttgggtcattagaaagatttataggaattttaattgaaaattattctggaaaattaccattttggctttgcccagtccaaactatagttatcccaatctcaaatgattttgatgaatatgcaaaactagtaaataatgaattaaaaaaagtaggtttaagttctgaagttgatttaaaaaatcataatttgaattacaaaattagggaacattcattaactaaagtcccaatgttacttatatgtggaaaaaaagaagttgacagcaacacagtaactattagaagattggattctaaaaaacaagaaactatggaattaaaagaattcttaaaaaaatattctgctttaaataaagcaccttcaatttaag

SEQ ID NO: 302845 - DNA, 337 bp, Unknown
  Bacterial polypeptide expressing nucleotide sequence isolated from the Sargasso Sea
aatgataaatataacatttcctgataaatcagtaagaaaatatgattcaagtatcactggtcatgatttagctaaatcaataagcaatagtcttgcgaaagatgctatttgcattgaaattgacggtgaattgagagacctatcatatgtaattgaaaatgatgcagactgtaaagtttataccaaagatgatcaatattctttagatacactacgacattcaacagcacatgttttggcacaagctgtcttaaatctttatccaggaactgagtttgcagttggaccttccattgatgatggtttttactacgatttcctctttaaagaaatatta

SEQ ID NO: 302846 - DNA, 379 bp, Unknown
  Bacterial polypeptide expressing nucleotide sequence isolated from the Sargasso Sea
tttaggatcctttgagagatttataggaatcttaattgaacaatatgaggcaaaattcccaatttggcttgcgccttatcaaataatcttattgagcattactgatagaaatattgagaaatgtttaaaatttaatgaattaattaataataatggttatcgatcaaaagttgatattaggaatgaaaaaataggttataaaataagagaggcaactctcggaagagttcctttaattgcagttgttggagataaagaagaggaaattgattcagttgccttaagagctttgaatggaaaaaatttaggaattttcaatttacctaatctttataaattgatggatgaattaatcgaaaaaaaaggaagaatagaataa

SEQ ID NO: 302847 - DNA, 529 bp, Unknown
  Bacterial polypeptide expressing nucleotide sequence isolated from the Sargasso Sea
tggacctaagattgaatttgttcttagagatgcaattggaagagactggcaatgtggaacattgcaagttgattttaatttacctggaagattaggtgcatcttatattgataaagatggtacaaaaaaagttcctgtaatgttgcatagagcattatttggttcattagaaagatttattggaatattaattgaaaattatgctggcaaacttccgttttggatttctccattacaaacagttgttataccaatttcagaagattttggtcactatgcaattgaagtatgtaaaaaactaaaaagtgatggaataagttcaatcgttgatttaaaaaatcacaatttaaattataaaattagagaacattcattagcaaaagtgccacttttattgatttgtggtaaaaaagaagttgacagtaatagtgtaactattagaagattggattctaataaacaagaaaatatgaaattagatctatttttaaaaaaatattctgctcaaaacaaagcatcttcaaattaa

SEQ ID NO: 302848 - DNA, 210 bp, Unknown
  Bacterial polypeptide expressing nucleotide sequence isolated from the Sargasso Sea
tctagttttaagtatttataaagatttcggatttgaaaatgtatcaattaaattttctgaccgtcctgaaaaaagagtcggcaacgatgatgtatgggacaaatctgagactgctcttcgtgaggcaatggaagctacaggattagaatatactttaaatccatgtgaaggagcattttatggtccgaaactagaatttattctcaacga

SEQ ID NO: 302849 - DNA, 400 bp, Unknown
  Bacterial polypeptide expressing nucleotide sequence isolated from the Sargasso Sea
tatgaaattaacattgccagataaatctgttaaagaactgccaaaaggtgtgacaggtcttgatgttgctatgtctattggtcctgggctcgctaagagtgcaattgccgtcaatattgacggagaacagaaggatttaagtgatccaataaatgctgattgttcattatcggttatcacgctggattcagacgaagggcttgaaatcatgcgacatacaacagctgctcaagtgctcgcattggcaattaagagcatttatcctgactcaaaattggcaattggaccaactattgaaaatggcttttactatgattttcatacagaggattctatatctacagaagatcttcctcgaatagaggaagaaatgagaaaaattattaaagagaaatcagaa

SEQ ID NO: 302850 - DNA, 357 bp, Unknown
  Bacterial polypeptide expressing nucleotide sequence isolated from the Sargasso Sea
tatgcccactattactcttccagataattcccaaagaaaatttgataatcctttaagtattgacgatattgctaaagacattggcccgggcctagcaaaggcgaccgttgcaggaaaagtgaatgggatgctggtagacgcctcggatattatccaagaagattgtgatcttgaaataattactattcaggatgatgagggaattgagattgtaagacactcttgcgcgcatctttttgcccatgctcttaaacaaatatacccaaatgcacagatggctataggtcctgtaataaaggatggattttattacgacataaagctcgataaaaatcttacaaatgaagatttagaagc

SEQ ID NO: 302851 - DNA, 478 bp, Unknown
  Bacterial polypeptide expressing nucleotide sequence isolated from the Sargasso Sea
tatgagtgataaaattactattacatttcctgatggaaatttcagaattgttaaaaaaggaattaatggttttgaaattgctgaagaaatttcaaaatctctagcaaaagaatctattgctataaaaataaatagttcaatttttgatcttaagacaagaattgaaaaagatgctaagattcaaataattaaaaaaagcgatgaagaggctcttgatattattagacatgattgtgctcatgttatggctgaggctgttcaatcattatttcctgaaacacaagttactataggtccttctattgagaatggtttttattatgactttgcacgaaaagaaccttttacactttcagacttacctaaaattgaaaaaaaaatgcatgaaattatcaatataggtgaaaaatttacaagagaagtttggtcgcgagaagaggctataaaattttttaaagctaaaggtgaagatttataa

SEQ ID NO: 302852 - DNA, 307 bp, Unknown
  Bacterial polypeptide expressing nucleotide sequence isolated from the Sargasso Sea
gtagtggtgtgttctatagttgattcaactaatgattatataaatgaaattaaaaagaaattagataaatctggtattagatgtgaaatagacctaagaaatgaaaaaataggttacaaaattagagaacattctaatcaagcgatccctataattgtagtcataggaaaacaagagcaagaaaataaaagtgtagctgttaggtatttaggttcaaaaaaacaagagtttttaaatttaaatgaatttttagaaaatatagtaaataaatgtactcctccagatttgcttgatgagtatagttaaa

SEQ ID NO: 302853 - DNA, 283 bp, Unknown
  Bacterial polypeptide expressing nucleotide sequence isolated from the Sargasso Sea
atgaataaaccaaatacaaattcagatctctataaaataaggcattcgcttgcgcatgttctagctcaggcagtgctggaaatacgtcccaaagcaaaacttggattcggaccgcctgttgataacggattttattatgattttgaacttgcggatccattgactcctgaagatttgcctaaacttgagaagcgaatgcggcatattcttaagtcaggacaggtttttgagcgtgaagaactggaccaagaagccatggttaaacttttgagaggggtaaatc

SEQ ID NO: 302854 - DNA, 688 bp, Unknown
  Bacterial polypeptide expressing nucleotide sequence isolated from the Sargasso Sea
tatgatcgacgtacttttaccaaatgggcaatcaaaaaaatataataacccgatttcaccttttgaaatagctaaagaaatttcaagttcccttgcaaaagaagcattaatagcaaaggttgacgatgatttatgggatttaaacagattaattcatagtaattgtaaaataaaaattttaactaataaagatcctgagacattatctgtattaagacatgatgctgctcacataatggcagaagctgttttagaactatatcctgatacacaaataacaattggccctgccattgaaaatggtttttattatgatttttatagattagaaagttttattttagatgatttaaataaaatagaaaaaagaatgcatgaaattgtaaaacgcaacgaaaaaattcatcgtaaagtttggaaaaaacaaaaagccatagaattttttaaaaaaaatggtgaaaatttcaaagttgaattggttgaagaaataccagaggaagaagaagttactttttattctcaaggaaaatttatagatctgtgtcgaggaccacattttacatcaaccagtaagttaggccacgcttttaaattaatgaagcttgctggttcatattggagaggagatagtaataaccaaacacttcaaagatatatggaacagcattttttgaacaaaaagatttag

SEQ ID NO: 302855 - DNA, 457 bp, Unknown
  Bacterial polypeptide expressing nucleotide sequence isolated from the Sargasso Sea
tttaaatttaccaggcagactaggagcttcatttgtagatagtgatggaaacaaaaaagttccagtcatgcttcatagagcattatttggatcattagagaggtttattggaattttaattgaaaattattctggaaaattgcctttttggctttgtcctattcaaacaatagttattcccatctcaagtgattttgatgattatgcaaaacaagtaaacagtcaattaaaaaatgtagggctttcttctgaagtagatttaaaaaatcacaatttaaattataaaattagagaacattcattaactaaagtccctatgctacttatatgtggaaaaaaagaagttgacagcaacacagtaactattagaagattggattctaaaaaacaagaaactatggatttaaaagaattcttacaaaaatactctgctcttaataaagcaccttcaatctaa

SEQ ID NO: 302856 - DNA, 212 bp, Unknown
  Bacterial polypeptide expressing nucleotide sequence isolated from the Sargasso Sea
tgcttattggaggggtgactcaaaaaatgaaatgcttcaaagaatatatggtactagttgggctactcaaaaagatttagatgaacatcttaaaagaatagaagaagcagaaaaaagagatcatagaaaattaggaagagaaatggatttatttcattttagagaagaaagtccgggatctgttttctggcacgaaagaggctgggggttat

SEQ ID NO: 302857 - DNA, 271 bp, Unknown
  Bacterial polypeptide expressing nucleotide sequence isolated from the Sargasso Sea
atgccaataattaccttgcctgatggttcaaaaaaggttttcgaaaaatctgtaactattctagaaattgcccagagtataggtgctggattagctaaagcaacaattgctgggaaagtaaatgatgttcttcttgatgcaacaattcctataaatgaagattccaaagttgtaatcatcacatcaaaagataaagaaggaattgaaataataagacattctttcgctcaccttattggtcatgcagttaaacaaatttactctgatatta

SEQ ID NO: 302858 - DNA, 433 bp, Unknown
  Bacterial polypeptide expressing nucleotide sequence isolated from the Sargasso Sea
atggtttcaataaaacttcctgatggttcaaaaaaaaaattttctggctcaataaaaggtgacaaacttgcaaaaagtataagtccaagtttatcaaaatcggcaattgcaatttctgttaacggtcaattaaaagatctagattttgaaataaataaagattcggatgcgcaaattataactaaagaaagtgaattaggaattgaaatattaagacatgatacagcgcatgttatggctgaggcagtaaaaattctatatcctgatgtgcaagttacaattggcccacctatagaaaatggattttattatgatttttcaagaaaagtgccttttgttcctgaagatttaattaaaatagaaaaaaaaatgttagaaataattaataaaaatgaatcttttgaaagagaagtttgggataggaaaaaggcaa

SEQ ID NO: 302859 - DNA, 459 bp, Unknown
  Bacterial polypeptide expressing nucleotide sequence isolated from the Sargasso Sea
atctaaatttgccaggtcgtctgggagcatcttttgttgataaagatggatcaaagaaagttccagtaatgttgcatagagctttatttggatctcttgaaagatttattggtatattaattgaaaattattctggaaaacttcctttttggatatcaccactacaaactgtagttatcccagtatcatcagattttgataattatgcaaaagaagtaaataaaaaaataaaaaaagaaggaattacctcagaagttgacctaaaaaatcataatttaaactacaagataagagagcattctttatcaaaaataccaattttactaatatgtggaaaaaaagaagttgacagtaatactgtaactattagaagattggactctaacaaacaagaaagtatggaattgaatttatttttaaaaaaattttcagctttaaataaagcaaatttaaattaag

SEQ ID NO: 302860 - DNA, 388 bp, Unknown
  Bacterial polypeptide expressing nucleotide sequence isolated from the Sargasso Sea
tttgccagtaattacttttcctgatggttcaaaaaaaacatttaagaaaaatgtttcaccattaaatatagctgaagatatatcaaattctttaaagaaaaatgctgttatagcaaaagtcaatgatgagttttgggatttaaatagagaaatcttacgagactcagatgtttccattctgagaaaaggggacaagaaaattttagaaattttaaggcatgactgcgcccatattttagcagaagcggttttggaaatttatccagagacacaagtaacaattggtccagttattgagaatggtttttactatgacttttacagagaagaaccattttcctcggaagatttaattgttattgaaaaaagaatgcatgaaatcgttgac

SEQ ID NO: 302861 - DNA, 604 bp, Unknown
  Bacterial polypeptide expressing nucleotide sequence isolated from the Sargasso Sea
ctgcacgaagacaaaaaaatagtgattgaactttcggacggttctttgaggaactatccgtacggaataacaggcttggagatagcagaagaaatatcgtcttctcttgcaaaaaagtctctggcgtgctctataaatggctacctaacagacctttcaacaaggctaactgaagattgctctcttacattacataccgcaaaagataccgaaatagcactcgaattaattcgacatgattgtgcccatatcttagctagagcagtccaagagatctggccagatgtgaaagtaactataggtccagttattcaagatgggttcttttacgactttgataaggaagatcccttttctgagaatgatatagagaaaattgagaagctaatgagatcgataatagcaaagaaagaccttgtgaaaaaagaaacgtgggatcgtaaaagagccttggagttttacaaagaaaaaaatgaaccctataaagttgagctgattcaagatattcctaccgatcaggatataaagatgtactggcatggagactggcaagatctctgtagaggtccacatttagttaacacagggcaggttcctgcagatg

SEQ ID NO: 302862 - DNA, 314 bp, Unknown
  Bacterial polypeptide expressing nucleotide sequence isolated from the Sargasso Sea
catgcctcaaattcaattattagatggaaaaaaaattccctttacaaaatcaatcaacggttttgatctaacaaaaaaaattagcaaatctttagaaaagacggctcttattatggaggtcgacggtcaactgaaagatttaagtcatgaaattacaaaagattctagcgtaagaattattacctcaaaagataaagaaggcttagaagttctaagacacgatgcagcacatatattggctatggcagttcaagaattatttccaggaacacaagttactattggtcctgttatacaagatggattctactatg

SEQ ID NO: 302863 - DNA, 455 bp, Unknown
  Bacterial polypeptide expressing nucleotide sequence isolated from the Sargasso Sea
aaatttacctgaaagattaggagctacatttgtagacaaggacggaagtaaaaaggtgccagtcatgttacacagagcactcttcggttcgttagaaagatttattggaattttaattgaaaattatgcaggaaaacttccattttggctatcaccttcacaagttgttgtattacccatagcagaagaacacaacgagtatgcaaaaaaaatatttaaagaactcttcaaagaaggtataaaatgcgaagtggatttaagaaatcaaaaaattaattataaaattagagaacactctttatcaaaagttcctttattattgatttgcggaaaaaaagaaatgaaagataaaagtataactatcaggaaacttggatcagaaaaacaagaaacacaaaattttgataaagccatagaaaaaataagatcattaaacaaccttccaattcattaag

SEQ ID NO: 302864 - DNA, 426 bp, Unknown
  Bacterial polypeptide expressing nucleotide sequence isolated from the Sargasso Sea
ttgttgataaagatggatcaaaaaaagtaccagtaatgcttcatagagctctatttggatcattagaaagatttattggaattctcattgaaaactacgcaggcaagcttccattttggattagtccacttcaaatagttgtcatccctgtctcagatgaatttgataaatatgctacacaagtagctgataaacttagaaatgttggattaaattgtgaagttgatttaaaaaatcacaatttgaattacaaaataagagaacattcactatctaaagtaccagttttactaatttgtggtaaaaaagaagttgacagtgatagtgtaactattagaaaattggataataaaaaacaagaaaatatgaagcttaaagattttatcaaaaagtactctgctctaaatcaagcatccctcaattaag

SEQ ID NO: 302865 - DNA, 391 bp, Unknown
  Bacterial polypeptide expressing nucleotide sequence isolated from the Sargasso Sea
tatgtttcatagagcgattctggggtcttttgagagatttataggtattttaattgagaactatagtgggaatcttcccttatggcttgcacctactcaagtaactgtttgttcaattacagatgaggctgatgattatgtaaaagaaatatctgaaatgctaagaagtaaaaatattcgatgtaactcagatttaagaaatgaaaaaattagctataaagttagagagcatagtgtctcaaaagtacctataattattgctgttggaaaaaaagaggtttcagacagaactgtttcaataagaaggcttggtagtgatgatacatctatgttatcccttgatgattttacaacttcagtagtgcaagaatctcttgccccaaataaataa

SEQ ID NO: 302866 - DNA, 662 bp, Unknown
  Bacterial polypeptide expressing nucleotide sequence isolated from the Sargasso Sea
aaaaaagtatattaatgatccagatttatggattgaaacagaagatattgttagaaataccttgaaagatggcaatataaatttcaaagaaatccctggagaagcagctttttatggtccaaaagtagatgttcaggtatggagcgcaataggcaaggaatttactttggctacaaatcaggtagattttgcaatacctaagcgatttggattaacctttactgatcaaaacggtaaagatcaaactccattatgcattcatagagctccattaagtactcacgaaaggtttgttggtttcttaattgagcattttggcggtgattttcctgtttggttgtcaccggtacaaattgcgatattaccagtgtcggaaaaggttaataagtatgcattcgacctaaaagctagatttaataaattcagctttagatcttatgttgatgaacgccctgataagattgggtcaaagattagagcagcggagttaaaaaaggttccaatcatgctagtcgttggtgaaaaagaagcatcaagcgacactgtttcacttagaagaagattcattggggatcagggtactttaaccgttgaaaaaattattgaagatatatcagaagaaataaataaaaggagactaccctatcggaaaagcgaataaa

SEQ ID NO: 302867 - DNA, 217 bp, Unknown
  Bacterial polypeptide expressing nucleotide sequence isolated from the Sargasso Sea
gatttcaatctccctgagcgttttgatatgccatatgttggaagcgacggccagaaatatcatccaatcatgattcatcgagcattgcttggttcggtggaaagattctttggaattttagtggaacattttgctggtaaattcccattatggcttgctcccgttcaggtttgcgtgatgccgattaatctaaaacaacatgattatgcagattctg

SEQ ID NO: 302868 - DNA, 436 bp, Unknown
  Bacterial polypeptide expressing nucleotide sequence isolated from the Sargasso Sea
tgcatcatatgtagataaagatggcactaagaaagttcctgttatgttacatcgtgcattatttggatcacttgagagatttataggtattctgattgaaaactatgctggaaaatttccattttggatatctccactacaaacagttgttatacctatttctgaagacttcgaagaatacgcaaaaaaagtttccgataagataagagaagctggtattacatcaatggttgatttaaaaaatcataatttaaattataaaataagagatcattcattagcaaaaatacctcttttaataatttgtggtaaaaaagaagttgacagtaactcagtaaccattagaagattggattcaaataaacaagaaaatatggaactaaactcatttctaaaaaaattttctgctttaaacaaagcaccttcaaatatttaa

SEQ ID NO: 302869 - DNA, 733 bp, Unknown
  Bacterial polypeptide expressing nucleotide sequence isolated from the Sargasso Sea
gacggcaatgaattaagttatgatgatggaataacaccatttgaaattgccgaaaaaattagtcctgcgctggcaagagatgttttgagcgttgaatataatgatgaaattattgaaaccaaaacaaaactttttattgatggcaacctaaaattttttaaatgggatgacaaacaaggcaaaaaggctttttggcattcaactgcacaccttttagcacaggttatacttgatttatatcccaattcaaaattaaccattggaccacctattgaaaatggtttttattatgatgttgattttcaaaattcgacattttctgaaaatgatttttctaaaattgaaaacaagatgattgaggaggccagaaaggatcattctttcaacatgagaaaagtttcaaattcaaatgcgctcagttattataagaaacagaaaaatgaatacaagtgcgaattaataaaaggtcttggtgatgaaaaaataactttttgtgatcatgctaattttactgatttatgcaaaggaggtcatataccatcaacaaaattcataaagagtgtcaaactattaaatactgccggtgcatactggagaggtgatgaaaataacaaacaactcactagaatttatggaataagctttccaaaagaaaaattattaaaagaatatcttcagttaatagatgaggcaaaaaagagagatcatagagttttaggaaaaaaattaggtt

SEQ ID NO: 302870 - DNA, 233 bp, Unknown
  Bacterial polypeptide expressing nucleotide sequence isolated from the Sargasso Sea
tttgtttaaagaaggtataaaatgtgaaatggatttaagaaatgaaaaaattaattataaaataagagagcattcgttagcaaaaattccatatattatagtttgtggcaaaaaagaagtttcagaaaatactgttacagttagaaaacttggttccgataaacaagaaacaattaaaaaagagaaactcatcaagaatatgctagatttaaacaagttacctttaaactaag

SEQ ID NO: 302871 - DNA, 976 bp, Unknown
  Bacterial polypeptide expressing nucleotide sequence isolated from the Sargasso Sea
aatcatgtatgactcacatcatcctagcatggagagttattttacagattttcttgcaaggcaatacaacattgatgcagatggaaaacaactattcttaagatttgcagcctgctttggacagtttttgatagcacatgacatgcaaatatcttacaaaaatttaccatacagactctatgaaatgactcgatatagctttagacgtgaacagtctggagaattggtaggtcttagaagactaagagcattcacaatgcctgactgtcatgcattttgtaaagacattccacaagctatagaggagtttagaactcgttttgatttgtctagagatgttttgaaaaatgttggaattgaaaatgatgattatgaaatggctataagatttacagaagatttctacaatgaaaataaagaactaatcacagaaattgtcaaaaaattagataaacctgtacttgttgaaatgtggaaagaacgattcttttactttgttttaaaatgggaattcaactatattgataatttaggaaaagcttctgcactatcgactgatcaaattgatgttgaaaatggaaataggtatggaattgaatttgttgatgaaaataataagacaatcaatcctatcattttgcataattctccaagtggcgcaattgagcgtgtgatatacgctctacttgaaaaatgtgctaaagacgcaaaggaaggtcgaaaaccaatgtttcctctttggcttgcacccacacaagttcgtataattccgttgaaagatgagtttatggaattttcacaaaatctatttgataaattaactgaaaaaaatattcgtgttgacattgatgatagaaatgaatcgattggaaagagaatacgtgaatctgaaaaggaatggattcgttatgtacttgtaattggagacaaagaggttaattctgaaaatcttagtgttcgtgatagaactcaaagt

SEQ ID NO: 302872 - DNA, 553 bp, Unknown
  Bacterial polypeptide expressing nucleotide sequence isolated from the Sargasso Sea
tttgcaggaattctcaaaagggataacacctcttgaaataatgcatgacactaaagggatttctaaagactcaattatttgtaaagttgatggcgtattaacagatttgtctgctgaattattaaatgattgcgaccttcaatttatggatgcgaaaagtaaagacggtcatagcgttttacttcatagcactgcacacctaatggctcaggcagtaaaaagattataccctaaaacaaaagtaactattggaccatatttagaaaatagattttattatgattttgatgttgaaacaccatttttagaagaagatttatccaaaattgaaaaggaaatggtcaaaatttctgaggaaaatcttatgataactcatgaaattaaatcaagaaaagatgctttaagctattttgataaaattaaagaaaattataaagtagaaatcattaatgatttagataaaaatgagatcctaaaagtgtattcacagggcgagttttcagatctttgcagaggtcctcatgtaccatcaactggggtaattaagcatttt

SEQ ID NO: 302873 - DNA, 636 bp, Unknown
  Bacterial polypeptide expressing nucleotide sequence isolated from the Sargasso Sea
gatgattgaaataacttttccagacggcgccgtaaaagaatataaaaaaggtataacacctattgaaattgctagaagcattagtaattccctagccagaaaccttttgtcagtatcattcaataaaaaacaaattgaatcaacttcaatattagaaggaagtggtagcattgaatttcacttttgggaagatccgaaaggtaaaagtgctttttggcattcatcagctcatttatttgctcaaatagttaaagaattatatccaaaatcaaaattaacgataggaccaccaatagaacatggattttattatgatttggatttaggggatcaaacaatctcagaaaatgattttgaaaaaattgaaaagagaataatagaagaagctagaaaagatcataaattttcaattagagaatcctcaaaggaagatgcaataaacttttacaaaaacaataaaaacgaatacaaaattgaattaattgaaaaattggatgatgaaaaaattacattctgtgatcatgcaaatttttcagacctgtgtaaaggtggacatattccatcaactggtcatataaaagcaataaaacttcttaatgttgctggtgcctattggagaggagacgaaaaaaacaa

SEQ ID NO: 302874 - DNA, 700 bp, Unknown
  Bacterial polypeptide expressing nucleotide sequence isolated from the Sargasso Sea
atgtttaaagttaagattgaaaataaagcatatgatgttaagccaaaaacatctattgaaaattttgtcaaagatagtcttgatgatgtatcttgtgtagctgcgagattaaatggaaagaaagtagatttaagttttttgattgaggataactatacattagagctcattaagccatcagatactgaaggtctagaaattataaggcatacatgtgctcacgtttttggacatgctttaaaacaaatttatccaaatgctagaatggttatcggtccaacaattgataatggtttttattatgatgttcttacatcagagagtatctctgagaaagatcttaaatctattgaaactcttatgaagaaactttctaaaaagaattataaaatacatagagaagttgtaagtaagaaaaaagcaattgaaattttcacagagcgtaaggaggattataagataaaacttatcgaggatattcctgatgatgaaattatagctatatattatcatgaggaatatatagacatgtgtagaggtcctcatctgactagtaccaaacaccttaatttttttaaattaatgaaggtttcaggttcatattggaaaggagactccaataatactcaattacaacgtgtttatgggactgcttgggacactaaagaaaatttaaagtcatacttaaataaactagaag

SEQ ID NO: 302875 - DNA, 449 bp, Unknown
  Bacterial polypeptide expressing nucleotide sequence isolated from the Sargasso Sea
gccagaaagattaaatgcttcatatgttgataaagatggaacaaagaaagttccagtgatgttgcatagagctttgtttggttcacttgaaagatttattggaatattaatagaaaattatgcaggaaaatttccattttggatttctccattacaaacagtggttattccaatttcggaagacttcgagaactatgctaaaaaagtatctgaaaaaatcaaagaagccggtatgagttcaattgttgatttaaaaaaccacaatttgaattataaaattagagaacattcattagcaaaagtccctcttttattaatttgtggtaaaaaagaagttgacagtaactctgtaaccattagaagattggattctaataaacaagaaaatatggaactaaagacatttttaaaaacattctctgctttaaacaaagcatcttcaaactaag

SEQ ID NO: 302876 - DNA, 223 bp, Unknown
  Bacterial polypeptide expressing nucleotide sequence isolated from the Sargasso Sea
tattttaaactaacaaaagtttcgggtgcttattggaggggtgactcaaaaaatgaaatgcttcaaagaatatatggtactagttgggctactcaaaaagatttagatgaacatcttaaaagaatagaagaagcagaaaaaagagatcatagaaaattaggaagagaaatggatttatttcattttagagaagaaagtccgggatctgttttcggcacgaaag

SEQ ID NO: 302877 - DNA, 450 bp, Unknown
  Bacterial polypeptide expressing nucleotide sequence isolated from the Sargasso Sea
tatgctcatcatcactctaccagataattccaaaagaaaattcgataatccattaagtatcgacgatattgctaaagatattggccctggcttagctaaggctaccgttgcgggaaaggtgaatgggatgctggtagatgcctccgatattatccaagaagattgcaacctagaaatagttactattcaggatgctgagggtattgagattgttagacactcatgtgcacacctttttgctcatgctcttaaacaaatatacccaaatgcacaaatggctataggtcccgtaataaaagacggattttattacgacataaaacttgataaaaatctatcgaatgaggatttggaagtcatcgaaaaaaggatgaagaaacttgccaaaactaagtatgatgtggtgcgcgaggtagtttcaaaaaaccaggctattgatacttttcaaaa

SEQ ID NO: 302878 - DNA, 532 bp, Unknown
  Bacterial polypeptide expressing nucleotide sequence isolated from the Sargasso Sea
tttatggtcaaaaatagaatttgttttaagagatgcaattggaagagattggcaatgtggaactttgcaagtagatttaaacttaccaggtagattaggcgcctcatttgttgatagcgatggaaataaaaaagttcctgtaatgcttcaccgagctttatttggatcattagaacggtttattggaattttaattgaaaattattcagggaaattacctttctggctttgtccagttcaaacaatagtaattcctatctcgagtgattttgatgattatgcaaaagaagtaaatagccagttaaaaaaagcagggatttcctctgaagtagatttaaaaaatcataatttaaattataaaataagagaacattcattaactaaagttccaatgttactaatatgtggaaaaaaagaagttgacagtaacacagtaactattagaagattggactgtaaaaaacaagaaactatggatttaaaagaattcttaaaaaaatactctgctcttaataaagcaccttcaatctaa

SEQ ID NO: 302879 - DNA, 370 bp, Unknown
  Bacterial polypeptide expressing nucleotide sequence isolated from the Sargasso Sea
ctggtaagtaaaaaagaagctattaaactttttgatgaaagagatgagttatataaagtaaaaataattaaatcatctgatcaagaggataactttcaaatttattgtcaagataatacagactttattgacttatgttatggaccgcatttacataatttgaaatcaactggagcttttaagttgacaaaagttgcaggagcctattggaaaggggactcaaaaaatgaaatgcttcaaagaatatacggaactgcatggaaaaatgaagaagatctaaataatcatttgaattttttaaaggaagcagaaaaaagagatcataggttaattggtaagcagatgaatctttttcattttcaagaagaag

SEQ ID NO: 302880 - DNA, 472 bp, Unknown
  Bacterial polypeptide expressing nucleotide sequence isolated from the Sargasso Sea
cttgcaagttgatttcgttttgcctgatcgtctcgatgctgaatatgtcgccgaagatggcagtcgccagcgtcctgtgatgttgcaccgtgcgatcttggggtcgctcgaacgctggattggtattctgatcgaacaatattcaggcaaaatgcctgtttggttatcgcccgtgcaatgtgttgtcgcaccgatcaccgaagtggccaatgagtacgcccaagaggttgcggataagttcaaagccgctgggatgcgtgtcgaaaacgatatgcgtaatgaaaaaattggctataaagtgcgtgaacattccgtcgctaaagtgccgtttatcatcgctgttgggggcagggaggctgaaagccggactattgcccttcgccgtttaggaagcgataagcaagaaacccttagccttgatgatgcgctggcacaactaggcctagagattttaccgcctgatctggcataa

SEQ ID NO: 302881 - DNA, 835 bp, Unknown
  Bacterial polypeptide expressing nucleotide sequence isolated from the Sargasso Sea
tggttaatttctgctcatgtttctaaaattggtgatgtttttctactagagggtagattgcttgaatctgaaaccggaagagtaattaatgcagtaagctatgattttgaactttcaatagagggtttgtacacacgaggaatgcataatttttctgaattgattatgtctaaacgtataccgcttgaagtgcacaagcgtcaaaatctaatttattttaaaacaaatcctagcggcgctatggttagagttggaaaggataccctaaatggcgtaacaccattagcaattgatcgagtggttgttgagagtcgaccaattataatctttaaagaagactatcagccattcaaagtcaagcaattgccggatgataattccgatattatctatattgacttaaagctaaaagttcctaaggttggtaatgtggtatttaatcaaccaattccagaagatatcgcaattgtaagtagtgatggaaaaagttctctgcttattgaagaaggtttaaaatcttatagagacttacctattggtaattacaaactagattctgatttatatgtaattagaaacaatagatttcgtattcaacatcgaaagacaacaaagtcatctccaattttttatcccaaaaaagaaattaatgagagaagggattattatcactccagaaggatgatttatttacaaattttaggaggaagtcttctgtatcgttcttatatatccttacgatcctcctatctttataatcaatatagtacaaatattgaaaattccgatgaaaggcaccgcaaaattgaaaatcttgatcaacaaaagccggtct

SEQ ID NO: 302882 - DNA, 457 bp, Unknown
  Bacterial polypeptide expressing nucleotide sequence isolated from the Sargasso Sea
tatgccaaaaataaaattaccagatggatcagtaaaagaattcgacaaaccaattaattttgatgaacttgcatcttcaattggatcggggttagctaaagcaactgttgctggtatgcttaatggaaaacttgtagatgcatctgagcttattgaatcagattctgatgtaattttaatcacaaatagtgatgaagatggagtagagataattaggcattcatgcgcccatttgtttggtcatgctttgaaacaattatatcctaaggcaaaaatggctataggaccaacaatagaaaatggtttctattacgatattgatcttgaggagtcattaagtgagaatgatttagaaaaaattgagttaagaatgaaagaattagctcaaacaaattatgatgttgttagagaagttgtaacaagaaaaaaggcgcttgatacatttgagaatagaaat

SEQ ID NO: 302883 - DNA, 457 bp, Unknown
  Bacterial polypeptide expressing nucleotide sequence isolated from the Sargasso Sea
ttgaatcttcctgaaagattaggggccacatatgttgcaaaagatggaagcaaaaaagttccagtaatgcttcatagagcattatttggatctctagagagatttataggaattttaatagagaactatgctggcaagctacctttttggataacccctcttcaaacagttgtaataccaatttctaatgattttgatgattatgcaaaaaatgttcatcaacaattaaaaaaagtaggtatttcatctgaagtagatcttaaaaatcataatttaaattataaaattagagatcattcactaacaaaggttcctttgcttttaatttgtggaaaaaaagaagttgacactaacacagtaactattagaagattggattctaataaacaagaaaatatggaattaaaagaatttctaaaaaaatactctgctttaaataaagcaccttcaatttaag

SEQ ID NO: 302884 - DNA, 496 bp, Unknown
  Bacterial polypeptide expressing nucleotide sequence isolated from the Sargasso Sea
attggtagagattggcaatgtggaacacttcaagtagatttaaatttgcctggaagacttggtgcatcatttgttgataaggatggggcaaaaaaagttcctgtcatgttgcatagagctttatttggatctcttgaaagatttataggtatattaattgaaaattattctggaaaacttccattttggatatcaccacttcaaaccatggttattccagtatcagcagaatttgataattacgctaaagaagttaataaaaaaataaaaaaacaaggaattacatctgaggtagatttaaaaaatcacaacttaaattacaaaatacgtgaacattctttatcaaaaatacctatattgttaatatgtggaaaaaaagaagttgactccaatacagtaactattagaagattggattctaacaaacaagaaagtatggaattaagtctatttttaaaaaaattttctgctttaagtaaagcacctttaaactaag

SEQ ID NO: 302885 - DNA, 1018 bp, Unknown
  Bacterial polypeptide expressing nucleotide sequence isolated from the Sargasso Sea
atgtttctttcaaaactttttatacctatctcgaaagatcttccagcagaagcaaaaattaaatcacatcaattaatgcttagaacaggtatgataaaacaatcttcagcgggtatttattcttggcttccacttggttttaaagttatgaaaaaaattgagcaaattgtcagagaggaacaaaatgcaattggagctcaagaaatgttgatgccaacaatacaatcatctgaaatatggaaagaaagcggaagatatgacgattatggtgaagagatgttaagaattaaagatcgtcaaggtagggaaatgctttatggaccaactaatgaggaactaattacagatgtattccgagcaagtgttaaatcttataagtctctacctcaacttctatatcacatacagtggaaatttagagacgaaataagaccaaggtttggagttatgagatgtaaagaattttatatgaaagatgcatactcttttgatctttcagatgaagaggcaaataaatcttacaataaaatgtttttttcttatttaaaaacgtttaacagactaggtttaaaagctataccaatggctgctgatacaggtcctattgggggagatctttcacatgaatttgtaataattgcagagactggagaaagtaagatttacgctgataaaaatattattgatatcaatcttaaccagtatgaactaaatgatggctctttaagtaaaatgagagaagatataagcaaaatatatgcagtcactgatgaaaaatataaaaaaacagattttgataatcacgttaaaaaagaaaatcaaatgataaccaaaggaattgaagtaggtcatattttttattttagtgataagtattctaaacctatgaattgtttaattgatgataaagatggaaaaaaaacgtcagttaaaatgggttcatatggaataggtgtttcaagattggttggtgcaattattgaggcaaattacaccaaagatataatggaatggccta

SEQ ID NO: 302886 - DNA, 538 bp, Unknown
  Bacterial polypeptide expressing nucleotide sequence isolated from the Sargasso Sea
aatgccgaatattactttaccagacggaaaaaaattaagttttaaaaacaatgtaactggatatgaagttgctgaaaaaattagtaagtcactttcaaaacaggctcttattgtaagtgtggatggagcgttgaaagatttaagtttttcaattaaaaaagactcttctgttaaaatcataactagtaaagataaagatggtcttgatgtaataagacatgatgcagctcacataatggcaatggctgttcaagaattatttccgggaactcaagttactataggtcctgttatcgaggacggctttttctatgattttgcaagaaaggaaccatttacaaaggatgatttaaaaaaaattgagaagaaaatgtcagagattattgacagagatgtcaaaacaaaacgcgaagtatgggacagagataaagcaatagcacattttaaaaaaattggtgaaaagtataaagctgagattatcgagagcattcccgaaaatgaggaactatcaatttaccatcatggagatacctggcac

SEQ ID NO: 302887 - DNA, 1094 bp, Unknown
  Bacterial polypeptide expressing nucleotide sequence isolated from the Sargasso Sea
tatgagaatactacaactccattgtgataatatctcgtatgaagcaacaaaaaaagagataaaatctgctgaagatatagagcctaaacctgtttcaattgatgaagttgtagtctgttttgttgccgtagaaaatggcgataacaatgatgtaggattggatgcaatctctcaaattaaagaatcaatgcaaaaaattggctgtaaaaaattattgttatatccttatgctcatttgagttctgacttggctgctccttctactgcattatccattttgaaactaatggaatctgaatctcaagacttggaagttagtcgtgcaccatttggttggactaaatcatataatgtcaaagtaaaaggtcatccgttagctgaaagttccaaagtgattacagctggtgataaaaaagaaaaaacttccactgcattagaatctgaatcaaaaatcaaatcttattggtttattctatctccagatgggtctttaactgaatttgacaagtttaatttctctaagcataagaaattagaaaaacttgcaaaatacgaatctgataaaaaccgtaatgttgacgaacctcctccacatgtagcattaatgaaaaaacttgcaattgctgattacgagcctgcatctgatcatggaaatatgagattttttccaaacggccgtttgattaaatctctcttagagcagtatgtgacagataaggtaaaagactatgggggctatgaggtagagactccaatcatgtatgactcacaccatcctagcatggagagttattttaacagatttcctgcaaggcaatacaacattgacgcagatggaaaacaattattcctaagatttgcagcctgttttggacagtttttgatagcacatgacatgcagatatcttacaaaaatttgccatacagactctatgaaatgactcgatatagctttagacgtgaacagtctggagaattggtaggtcttagaagactgagagcatttacaatgcctgattgtcatgcattttgtaaagatattccacaggctatagaggagtttagaactcgttttgatttgtctagagatgttt

SEQ ID NO: 302888 - DNA, 1039 bp, Unknown
  Bacterial polypeptide expressing nucleotide sequence isolated from the Sargasso Sea
aatgttaagaatcaaagatcgtcaaggaagagaaatgctttacggtccaactaatgaagaactgattacagatatctttagatcaagtgttaagtcatataaatctcttccccaaatgctttaccacatacagtggaaatttagagatgaaattagaccaagatttggagttatgaggtgcaaagagttttatatgaaagatgcatattcttttgatttatcagatgaagaggctaaaaaatcctataataagatgttttactcttacttaaaaactttcgaaagattaggactaaaagcaattcctatggcagcagacactggaccgataggaggagatctttcacatgaatttgtaatacttgcagaaacaggtgaaagtaatatttatgcagataaaaatatttttgaaatagatttaaaaaattataagttcgatgatcagtcgctaaaaaaaatgcgcgaagactttactaaagtttatgcggtcaccgacgaaaaatttaaagaaggtcaatttaataaattagttaaaaaagaaaatcaaatgaaagctaaaggtatagaagtaggacatattttttattttagtgataaatattcaaaaccaatgaattgtttaatagatgataaagacggaaaaaaaacatctgtaaagatgggatcttatggaattggagtttctagattagttggagcgaccatagaagccaattacaatgacaatgtaatgaaatggcctaaatctatttctcccttcgatgttgttattattcccagtgtaagtaaaaacaataaagaaaaccttgaaaaatctgagaaaatttacgaagaactaaaaaaacaaaatattgacgtattgttagatgatgttgatgaaaatatgtcaaacaaattcaaaaaacatgatttaattggaattccttaccaaattattatcggcacaaaatctgacaatgataagtttgaatttaaggagcttaactttaaaagcgaaatgttaagtctagataaaatcaaactaaaattaaagatttaa

SEQ ID NO: 302889 - DNA, 1141 bp, Unknown
  Bacterial polypeptide expressing nucleotide sequence isolated from the Sargasso Sea
atgtttctttcaaaactttttatacctatctcgaaagatcttccagcagaagcaaaaattaaatctcatcaattaatgcttagaacgggtatgataaaacaatcttcagcgggtatttattcttggcttccacttggttttaaagttatgaaaaaaatcgagcaaattgtgagagaggaacaaaatgcaattggtgctcaagaaatgttgatgccaacaatacaatcatctgaaatatggaaagaaagcggaagatatgacgattatggtgaagaaatgttaagaattaaagatcgtcaaggaagggaaatgctttatggaccaactaatgaggaattaattacagatgtattccgatcaagtgttaaatcttataagtctctacctcagcttctttatcacatacagtggaaatttagagacgagattagaccaaggtttggtgtgatgagatgtaaagaattttatatgaaagatgcatactcttttgatctttcagatgaagaggcaaaaaaatcttacaataaaatgtttttttcttatttaaagacatttaatagactaggtttaaaagcaataccaatggctgctgacacaggccctatcggaggagatctttcacatgaatttgtaataattgctgagactggagaaagcaagatttatgctgataaaaaaatttttgatattaatcttaatcagtacgagttgaatgatagatctttaagtaaaatgagagaagattttagtaaaatatacgcagtcacagatgaaaaatatgaaaaaatagaatttgatagtcgcgttaaaaaagaaaatcaaatgataaccaaaggaattgaagtgggtcatattttttattttagtgataagtattctaaacctatgaattgtttaattgacgataaagatggaaaaaaaacatcagtaaaaatgggttcctatggaataggtgtttcaagattagtcggtgcaactattgaagcaaattacaccaaagatacaatgaaatggcctaaatcaatatcaccttttgatgttgtaataatcccaagcattactaaaaacaataaggaaaacttagaaaaagctgaaaaagtttataaaaaacttaaaaaacaaaatattgacgtattgttag

SEQ ID NO: 302890 - DNA, 463 bp, Unknown
  Bacterial polypeptide expressing nucleotide sequence isolated from the Sargasso Sea
tatgagtgataaaattataattacatttcctgatggtaacaaaaaagatttaaaaaaaggagttagcggttttgaaattgctgaatcaatttccaagtctttggcaaaagaatctattgctataaaaataaataataaaattgttgatctttctagaaaaattgaaaaagattcagaggttcagataataaaaaaaaatgatgaagaggcactaaatataattaggcatgattgtgctcatgtgatggcggaggcagtacaaacattatttcctggaacacaagttacaataggcccagcaatagaaaatggtttttattatgattttgcaaaagaagttccattcacaacttctgatcttgaaaaaatagaaaaaaaaatgcatgaaattattagcaagggagaaaactttactcgcgaaatatgggatagaaaagatgcaattgattattttgataataaa

SEQ ID NO: 302891 - DNA, 262 bp, Unknown
  Bacterial polypeptide expressing nucleotide sequence isolated from the Sargasso Sea
atgccaataattaccttgcctgatggttcaaaaaaggttttcgaaaaatctgtaactattctagaaattgccaagagtataggcgctggattagctaaagcaacaattgctgggaaagtaaatgatgttcttcttgatgcaacaattcctataaataaagattccaaagttgtaatcatcacatcaaaagataaagagggaattgaaataataagacattctttcgctcaccttattggtcatgcagttaaacaaatttact

SEQ ID NO: 302892 - DNA, 589 bp, Unknown
  Bacterial polypeptide expressing nucleotide sequence isolated from the Sargasso Sea
atgaaaataactttgccagataatagttcgagagaattgcctgagggatcttcaggctatgatcttgcaaaagatattgggcctggtcttgctaaatccgctattgctgtaactattgatggtgttcaaaaagatctatatgacgtcatagattctgatgcatctgtttcaataattacaattgatagcgatgaaggtgttgaaattatgcgccacactcttactgctcaggtattagcaagggcgattaaaaatctttacccagaatcaaaattagctataggtcctacagttcaagatggtttttattatgatgttgaatccgatgagtctatatcttctgatgatctaagtaagattgaagaagaaatgaaaaaaatcattaaaaccaaatcagcaattactaaaaaattagtttcaaaaaaagatgctttaaagatatttaaatcaaacaaagaaccatataaagaaattattattaatgagtcagatcaagatgatgattttcaactttattatcaggatgacgaggagtttgttgatttatgtagaggtccgcatctaccaaatttaggatttattggttcat

SEQ ID NO: 302893 - DNA, 314 bp, Unknown
  Bacterial polypeptide expressing nucleotide sequence isolated from the Sargasso Sea
cctttttggctttcccggcaaagctgttgtgtgtcctatagctgaagagaacaatgaatatgtaaaaaagttatttgaagatttattcaaagaaggtataaaatgcgaaatggatttaagaaacgaaaagataaattataaagttagagagcactctttagcaaaagttccttttataattgtctgtggtaaaaaagaagttgcagaaaatacagttacagttagaaaattaggttctgataaacaagaaataatgaaaagagaagatttaataaaaaatatgcttgcctcaaataagttgcccttaaattaag

SEQ ID NO: 302894 - DNA, 134 bp, Unknown
  Bacterial polypeptide expressing nucleotide sequence isolated from the Sargasso Sea
gccttcaggagctttacacggacttttacgggttagagcttttacacaagacgatgcacatatattttgttcagaagaccaaattactaaagaatgtttaaatgtaacaaatttgattttaaaaaatttataaa

SEQ ID NO: 302895 - DNA, 1098 bp, Unknown
  Bacterial polypeptide expressing nucleotide sequence isolated from the Sargasso Sea
tatgcttgaagaagcagaaaagcgagaccacagaaaacttggtagagagatggacctattccattttcaggaggagggaccgggatctgttttttggcacaaaaagggttggaagttatttactgagttaattgattatatgaaacgtaaggggatgaatgctgggtacctggaagtcaatacacctgatatgttggacaggtcattatgggaaaaatcaggacattgggaaaaatttggagagaatatgtttacttgtactactccagatgaaaaaatctttgcactaaaaccaatgaattgtccaggtcatgtacagatatttaaaaatggtctaaagagctaccgtgacttaccaataaaatatgctgaattcggtaaagttcatagatatgaaccatcaggtgcattgcatgggctgatgagagttcgacattttacacaagatgacgggcatatttttctgactgaggagcagataaaagaagaatgtattagagtccatgagttgattttatcaatatacaaagactttggttttgaagacatagtcgtaaaattttctgacagaccagaaaagagggttggagaagatgaaatttgggataaggctgaaaaggcactcatagaagcggtagagtccacaaaccaaaaatttgagctaaaccctggtgaaggggctttttatggccctaagttagagtacgtattacgcgatgcaataggaagagattggcagtgtggcacgcttcaagtcgactttaatctgcctggaaggctcggttcattctatattggaagtgacggtgagaagcatgttcctgtaatgctacaccgagccatatttggatctttagaacgatttacaggaatactaattgagcattatgctggccgcttacccctgtggatatcaccaactcagatagtaattgttacaatcaattctcaatgtgatcagtatgcaaacaatgtacttgagagatgtgttattagtaatttaagggctgaaacagatctccgtaatgaaaaaataagctataagattaaagagcatatttcagttaagattccaaatattatttgttataggtcaaa

SEQ ID NO: 302896 - DNA, 719 bp, Unknown
  Bacterial polypeptide expressing nucleotide sequence isolated from the Sargasso Sea
caaggcccagttgcagcggatctacggcacggcctgggaaacccccgaacaactggccgagcacaaacgccgcaaggaagaggccttgcgccgggatcaccgccgcatcggaaaagacctggatctgttctcaatcgaggatgaagctggtgctggattggtgttctggcacccccgtggcgcccgcatgcgtctgctgatcgaggagttctggcgccaggctcacttcgaagggggctacgagctgctctacacgccccacgtggccgacatcagcctctggaagacctccggccacctcgatttctacgccgagagcatgttcggccccatggaggtggacgagcgggagtaccagctcaagccgatgaactgcccgttccacgtgctcacctacgccagcaagctgcgcagctaccgggaattgccgatccgctgggccgagctgggcacggtgtaccgctacgagcggccgggcgtgatgcacggcttgatgcgtgtgcgcggctttacccaggacgatgcccacgtgttctgcctgcccgagcagatcagcgacgagatactgaagatcctcgacctgactgagcggattctctccaccttcgatttcaacacttacgagatcaacctctccacccgcccggagaagtccatcggcgatgacgccgtctgggacctcgccaccaagggcctgatcgaagcactggaacgcaagg

SEQ ID NO: 302897 - DNA, 823 bp, Unknown
  Bacterial polypeptide expressing nucleotide sequence isolated from the Sargasso Sea
aagatgaaggagctagccaaatcctctcaagaaattttccgtagtgaaatatctgctaaagatgcagttactttattcaaaaatatggatgaagattataaggtcgaaataattgaacaaattaatccagacgatgtaattagtacgtatcaacaatctgattttgttgacttatgcagagggcctcatgtatcaaatacctccaaaataaaatactttaaacttttatcaacttctggcgcctattggagaggcgatgaaaataataaaatgcttcaacgtatttatggaactgtattttcaacaaaagaagcgttgaaagagcacctacaaaatcttgaagaggcaaaaaggagggatcatcggaaaattggtaaagaaatgaaattatttacatttgatagtgatattgggccaggattgcctttgtggcttcctaatggcacaataatgattgaagagttagaaaaactcgctaaattcactgaaagaaaagctggctttagtcaggtaagaacacctcacttaaccaaaggtacaatttatgaaaaatctgggcacttagatcattacaaggaatctatgtatccaggcatggaaattgatggtgttgattattatgtaaagccgatgaactgcccgcatcatcataagattttttcttcattacctagaagttatcgcgacatgcctatcagattatcagaatatggaacatgctatcgctatgaaaaatccggtcaattgtttggtctgatgagagtgcgaagcttacaaatgaatgatgcacatatctattgcactccaaatcagtttaaaaaag

SEQ ID NO: 302898 - DNA, 647 bp, Unknown
  Bacterial polypeptide expressing nucleotide sequence isolated from the Sargasso Sea
acccgaagtgagagttggtgaagatgaagtatgggacaaagcagaagcatccttgcttgaagcagtgaaagcatcaaagttagaatatagtattaacaagggagaaggagcattctatggtcctaaaattgagtttgttctaagggatgcaattggtagagattggcagtgtggaactttgcaagttgatttaaatttacctgaaagattaggagcctcttatgttgataaagatggaactaagaaaattcctgtaatgttgcacagagcactatttggatctttagaaagatttattggaatcttaatagaaaattatgcaggtaaatttccattctggatatcacctttgcaaacaatggtaattcctatttcagaagaatttaatgactatgcaattgaaatatctaagaaaattaaaaatgtaggtataagttcttctgttgatttaaaaaatcaaaatttaaattataaaataagagatcattcgttagctaaaatacctcttttgttaatttgtggtaaaaaagaagttgactccaattctgtaacgattagaagattagactctaataaacaagaaaatatggacatagacacattcttaaaaactttctctgctttaaacaaagcatcctcaaactaag

SEQ ID NO: 302899 - DNA, 889 bp, Unknown
  Bacterial polypeptide expressing nucleotide sequence isolated from the Sargasso Sea
caagaaaaacagtatttttcaaaagaatttattagcgataaagaagctttaaaaattttctctaatcaacaatttaaacaagaattaataaatactgcggataaaggtgagggtgtaggtgaaggtcaagtatcaacatataaaaacaaagattttattgatctttgtaaagggcctcatattccaaacacaggatatttaaaacattttaaattaacaaaattagcaggcgcttattggagaggtatagaaacaaatccacaacttcaaagaatttatggaactgcatggttcactaaagatgatttaaataaatatctaacacgtcaaaaagaagcagaaaaaagagatcatagaaagttaggaagagaattaaaattatttactactgctgatgaattagggccaggccaatatttatggcaaccaaatggttctatacttagaaaccaaattgaagaatttagtaaatcagcacatataaataacggatatgaatttgtaaacacacctcacattggcagatctatactttgggaaacatctggacatttagatcactataaagaaggaatgtacccggctttaacaactgaggatactgacgatgattattatttgaaaccaatgaactgtccgtttcatattcttgtatataaaaatgacataagatcgtatagagaacttcctattaggtatttcgaattaggttctgtttatagaatggaaaaaacaggtgttctgcatggtttattacgagcacgtggttttactcaagacgatgctcatatatttacaacaatagataatttaaatgatgagattcttaatctgttaacattttctatcaaacttttaaattgttttggctttactgaaattgaagctg

SEQ ID NO: 302900 - DNA, 775 bp, Unknown
  Bacterial polypeptide expressing nucleotide sequence isolated from the Sargasso Sea
atgccagatattacattaccagacggaaaaaaaattaattttgaaaaaagtatttcgggatttgaggttgcagaaaaaattagcaaatctctatcaaagcaagctttattaataagcgttgatggagaattaaaagacttaaatcatagtatttacaaagactcttcaattaagatatttacatcaaaagataaagaagggttagagactataagacatgatactgctcacatactcgctatggcagttcaagaattatttccggggacacaagttacaatagggccagttattgaagatggcttttattacgattttgcaagaaaagaaccttttacaacagaagatttagaaaaaattgaaaacaaaatgaaagaaatagtagatcgagatgaaaaaacttacagagaggtttggaaaagaaatgatgctatcgaacattttaaaaaaaagggagaaatgtataaagctgagataatagaaagtattccagaaggtgaagatgtgtccttatattttcatggagattggcatgatttatgcagaggccctcatttaagttcaactggcaaaattggcaaatattttaaattaacaaaagtctcaggtgcttattggagaggcgattctaataatgaaatgttgcaaagagtctacggaacaagttggtctacgcaaaaagagttagatgattatttaaatagaatagaagaagccgaaaaaagagatcacagaaaaattggtaaagaaatggatttgttccattcagagaaga

SEQ ID NO: 302901 - DNA, 919 bp, Unknown
  Bacterial polypeptide expressing nucleotide sequence isolated from the Sargasso Sea
aatgttgcaaagagtatatggaacaagttggtctacgcaaaaagagttagatgattatttaaatagaatagaagaagcagaaaaaagagatcatagaaaaattggaaaagaaatggatttatttcatttcagagaagagagccctggttcagtattttggcaccaaaaaggatggaacttatttcagaaacttatttcttatatgagaatgaagcaagaaactgcaggatatcaggaaattaatactccagaaattttggatcggtcactctgggagaaatctggacactgggaaaaatttggtgcaaacatgtatacatcaactacacctgatgaaaaagtttttgctataaaaccaatgaattgtcctggctgtgtgcaagtttttaatcaaggtttaaaaagttatagagatttaccacttaaaatgtcggaattcggaaaggttcataggtatgagccttctggagctctacacggattattacgtgtaagagcattcacccaagatgatgcacatatcttctgtacagaggaacaaatcacacaggaatgtttaagtgtaacaaacttaattttagaaatttataaagatttaggatttgaagatgtaattttgaaatattctgatcgaccagacttaagagttggggatgataaagtatgggataaatctgaagcggcattattggaggctataaaagcaacaaaattagagtactctataaataaaggcgaaggggctttttatggtccaaaaatagaatttgttttaagagatgcgattggaagagattggcaatgtggaactttacaagttgatttaaacttacctggcagattaggtgcttcatttgttgatagtgatggaaacagaaaagttcctgttatgttgcacagagcactattggatctttag

SEQ ID NO: 302902 - DNA, 919 bp, Unknown
  Bacterial polypeptide expressing nucleotide sequence isolated from the Sargasso Sea
agtttcaggagcatattggcgaggagactcaaaaaatgaaatgcttcaaaggatctatggaacttgctggagtacaaaaaaagatctcgaagattatttacataaattggcggaagctgaaaaaagggaccatcgaaaacttggaaaagaaatggacttatttcacttcagagaagaaagtcccggatctgtattttggcatgaaaaaggatggatattgttccaaagacttgttgagtacatgcgtatgaaacagcgtcttgcagggtacaaagagattaatacacctgaacttttagataaaacgctatgggaaaaatctggtcattgggacaaattcggagagcacatgttcacttcagagactcccgatgaaaaaacatttgcggttaaacctatgaattgcccaggatgtgttcaagtatttaatcaaggtttaaaaagttatagagatttaccattaaaactctctgagtttggaaaggttcatagatacgaaccttctggtgctttacatggacttttaagagttagagcttttacccaagatgatgcacatattttttgtactgaagatcaaatcacacaagagtctttagcagttacaaatttaattttagaaatttacaaagatttgggattcaaagatgtaatattgaaatattctgacagaccagaaaaaagggtcggagatgatattgtttgggataaatctgaagctgctttgcttactgctataaaacaatcaaaattaaaatatacagtgaataaaggtgaaggcgcattttatggtccaaaaatagaatttgttttgactgatgcgattggtcgtgattggcagtgtggaacacttcaagttgatcttaacctaccatctagactgggtgcaacttatgtatcaaatgatggatctaaaaaa

SEQ ID NO: 302903 - DNA, 528 bp, Unknown
  Bacterial polypeptide expressing nucleotide sequence isolated from the Sargasso Sea
aatgccaaatataaaactaccagatgggaattctttaaaatttgatacaaaaattacaggatttcaaatagctgaaaaaattagcaaatctctgtccaaacaggctttaataattagtgttgatggaaatttaaaagacttacattacgaaatagataatgactgttcagtcaagatttatactgcaaaggataaagaggggttagaaactataagacacgatacagctcatgtattagctatggcagtacaagaactttttccaaagacacaggttacaattggaccggtaattgataatggattttactacgactttgcaagaaaaattccatttaccgaagaagatttgcgcaaaatagaaaataaaatgttggaaattattgaaagagatgaaccaacacgtagagaagtttggaaacgtgataaagcaattgaacattttaagaaagcaggcgaaatttataaagcagaaatcattaaagacattccaaaggatgaagaattatcagtttattttcatgaaaa

SEQ ID NO: 302904 - DNA, 807 bp, Unknown
  Bacterial polypeptide expressing nucleotide sequence isolated from the Sargasso Sea
ttacatggcctgttaaggtaagagcttttactcaagatgatgcacacatattttgtaccgaagatcagataacagatgagtgcattacagtaacaaaattaattttagatatttataaagatttgggtttcaacaaagtttttcttaaatactcagatagaccagaaaaaagagtaggcgacgatgctgtttgggataaatcagaaaaagctcttcttgaggcaattaaaaaaactaaattggagtatactgttaataaaggagagggagcattttatgggccaaaaattgaatttgttttacgcgatgctataggtcgtgattggcagtgtggaacgcttcaggttgatttaaatttaccaaaaagacttggtgctacttttgtagataaagatggaacaaagaaaataccagtaatgttacacagggcattatttggatccctagaaagatttattggaatcttaatcgaaaattatgcaggaaaacttccattttggctatcaccattacaagcggttgtgttacctatagccgaagagcacaatgattatgcaaaaaaaatatttgaagacctctttaaagaaggtataaaatgcgaagtggatttaagaaatcaaaaaataaattataagattagagaacactctttagcaaaaactcctcttattttaatctgtggaaagaaagaaatatctgataaaagtgttacaatgagaaaactaggttccgaaaagcaagaaacaattaaatttactaaagccgttgaaaagttaaaaatgttaaataatcttccaattaaataag

SEQ ID NO: 302905 - DNA, 868 bp, Unknown
  Bacterial polypeptide expressing nucleotide sequence isolated from the Sargasso Sea
ccaagttttatcaaaggtttaaaaagtatcgagaatttaccacttaaaatgtcagaatttggaaaggttcataggtatgacccttcaggtgcacttcatgggttattgcgtgttagagctttcactcaagatgatgcacatattttttgtactgaggaacaaattactgaagaatgtttaactgtaactaatttaattttggaaatttataaagatttaggatttgaagaagtaattttaaaatattctgatagaccagaattaagagttggtgacgatcaggtttgggataaatcagaggccgctttattagaagcaattaaagcaacaaaattagaatattctattaataagggcgaaggagctttttatggtccaaaaatagaatttgttttaagagatgcaattggaagagattggcaatgtggaactttgcaagtagatttaaacttaccaggtagattaggcgcctcttttgttgatagcgatggaaataaaaaagttcctgtaatgcttcaccgagctttatttggatcattagaacggtttattggaattttaattgaaaattattcagggaaattacctttttggctttgtccagttcaaacaatagtaattcctatctcgagtgattttgatgattatgcaaaagaagtaaatagccagttaaaaaatgcagggatttcttctgaagtagatttaaaaaatcataatttaaattataaaataagagaacattcattaactaaagttccaatgctactaatatgtggaaaaaaagaagttgacagtaacacagtaactattagaagattggattctaaaaaacaagaaactatggatttaaaagaattcttaaaaaaat

SEQ ID NO: 302906 - DNA, 844 bp, Unknown
  Bacterial polypeptide expressing nucleotide sequence isolated from the Sargasso Sea
atgcctaatattaaattaccagatggaaaatcaattagttttgaaaaaaaagttacaggattacaaattgcagagaaaattagtaaatcgctctcaaaacaagccttagtcattagtgttgatggaaatttaagagatttgaattatgaaatagacaaagattgtactgttaaaatccatacagcaaaagataaagaaggactagaaactataagacatgatacagcgcatgttttagcaatggctgtacaggaactttttcctggtacgcaagttactattggaccagtaatcgataatggattttattatgacttcgcaagaaaaaaaccatttacagaagaagatttacgaaaaattgaaaaaaaaatgttagaaattgtagaaagagatgagcctactcatagagaagtttggaagcgagataaagcagtcgaacactttaagaaagcaggagaactttataaggctgaaataattaaagatataccaaaagaagaagaagtttcagtttactttcatggaaaatggcatgatttatgtagaggtcctcatttaatgtctactggaaaaattggaaaatattttaaacttatgaaagtttcaggagcttactggagaggtgactctaaaaatgaaatgcttcaaagaatttatggaacaagttggtcaactcagaaagaattagacaattatttaaatatgattgaagaggctgaaaaaagagatcatagaaaattagggaaagaaatggatttatttcattttagagaagaaagtccagggtcagttttttggcatgaaaaaggttggaatttatttcaaaaattaatttcatatatga

SEQ ID NO: 302907 - DNA, 989 bp, Unknown
  Bacterial polypeptide expressing nucleotide sequence isolated from the Sargasso Sea
aattgaagatggtttttattatgatatttcttataaagatacctttactcctgatgatcttatcaaaattgagaaaagaatgaaagagttagttaacagagattataatgtaggtgttgaaatagttagtccagagaaagcaacggaaatttttactgatagaggtgaatttttcaagctagatatagttaaaaatatccctgaaaatgaaatcataaagttatacaaacatcaagaatatattgatatgtgcagaggtcctcatgtgccaaatacaaggcatctaagagtatttaagctaatgaaagtatccggggcttattggcgcggagactctaacaatgaaatgctacaaagaatatatggaacagcttggaaaagctctaaagaattaaaagaatatatctctagaattgaagaggctgagaaaagagatcatagaaaattagggaaaaagtattcactttttcactcacaagaagaagcacccggtatggttttttggcaccctaaagggtggactatttatagaattttagaagattttattcgtgaaacgattacaaaatatgattatcaagaagttaaatctccgcaagtagtagatagaagtctttgggagaaatcaggccattgggataaatttaaagaagatatgtttactacaacttcagagaacagggaatatgcaataaaacctatgaattgtccatgccacatacaaatattcaatcaaggtttaaaaagctatcgagatcttccgattagactttctgaatttggttcttgtcatcgcaatgagccttctggtgcactgcatggcttaatgagagtaagaaattttgttcaagatgatgcacacatattttgtaccgatgaacaaatccaagaagaagtccaaaattttattgatttggtatttgaggtttataaaacctttggctttgattcaattcttattaagctctcaacaagaccagtaaaaaagg

SEQ ID NO: 302908 - DNA, 880 bp, Unknown
  Bacterial polypeptide expressing nucleotide sequence isolated from the Sargasso Sea
atgccagatattcagcttctagacggaaaaaaaataccttttaataaaaagattaccgggtttgatcttgttaagaagattagcaagtctcttgaaaaaaaagcattaattatggaagtggatggtaaattaaaagacctaagttttgaaattaccaaaaattctaaagtgaaaataattacagcagacgataaagatggcttagatgtaattagacatgacgcagctcatatcatggcaatgtcagttcaagaactttatccaggaacacaagttacaattggacctgttattgaaaatggattttattatgattttgctagaaaagaaccttttacttctgaagatctcgacaaaattgaaaaaaaaatgtcagaaataatagatagagatgtcaaaactagaagagaagtttggaaaagagacaaggcaattaaacattttaaaaagattggtgaaaaatataaagctgagattatagcgagtattcctaaaaacgaagaactttctatttatcaccatggtgacacctggtatgacttatgtagagggccacatttagcttcatctggaaaaattggtaaagcttttaagctaactaaagtttcaggagcttattggagaggagactctaataacgaaatgcttcaaagaatttacggaacttgctggagtagcaaagatcatctaaaattatatttagacaggctagaggaagcagaaaaaagagaccacagaaaattaggcaaagaaatggatctgttccattttagagaagaaagtcctggatctgtattttggcatgaaaagggttggattttatttcaaagattagtggagtatatgagatttagacaaagactagatggctataaggaga

SEQ ID NO: 302909 - DNA, 892 bp, Unknown
  Bacterial polypeptide expressing nucleotide sequence isolated from the Sargasso Sea
aaggagctgccaattcgctgggccgaattagggacggtttaccgctacgagcgtcccggtgtcatgcacgggctgatgagggtgcggggcttcacccaggacgatgcccacgtgttctgcctgcctgaacagatcagcgacgagatcctaaagatcctcgacctcaccgagacgatcctttccacctttgatttccgcaattacgagatcaacctttcaaccagacctgagaagtcaattggtgatgacgccgtctgggacctggccaccaaagggctcaccgaagctcttcagcgcaaaggctgggattacaaaatcgatgaagggggtggtgccttttacggccccaaaatcgacctgaaaattgaggatgccattgggcgcatgtggcagtgctcaacgattcagctggacttcaacctgcctgagcgtttcgccctggagtacgtcgcagccgatggctcaaggcagcgtccaatcatgatccacagggccatcttcggctcactggaacggttcttcgggatcatgaccgagaactacgccggtgatttccccttctggctagctgcagagcaaatccgcttgctgcctgtcaccgatgaggtgatgggttatgcggaagagatccaaagcgaactcacagctgctggaatccgcagcctcatcgatcgcagcggagagcgtctcggcaagttgatccgcttgggagagcaacagaagatcccagtcctggcggtcattggcgcccaggaagcagagcagggcaccttgagcctgcgtagccgccggcagggtgatcttggctccgtcgcacgaagcgaggtactggatgcagccacctcggccaatgccgcccgcgctgcagtgctggaactgagccgctcttaac

SEQ ID NO: 302910 - DNA, 988 bp, Unknown
  Bacterial polypeptide expressing nucleotide sequence isolated from the Sargasso Sea
agctatcccagagaaagaagatgtctcaatttattttcatggagattggcatgatctttgtagaggtccccacctatcctcaacaggtaaaataggaaaatattttaaactaacaaaagtttcgggtgcttattggaggggtgactcaaaaaatgaaatgcttcaaagaatatatggtactagttgggcaacccaaaaagatttagatgaacatcttaaaagaatagaggaggcagaaaaaagagatcatagaaaattaggaagagaaatggatttatttcattttagagaagaaagtccaggatctgttttctggcacgaaagaggctgggcgttatttcaaaatttaattaactatatgagacataggcaggatacagctggttacaaagaaattaatacgccagaggtattagatagacaattatgggaaaaatcaggccattggggtaaatatggtgacaacatgtacacatccgaaactccggatgaaaaggtgtttgcaataaagcctatgaattgcccaggacatgttcaggtatttaatcaaggactaaaaagttatcgagatcttcctttacgatatgcagaatttggaaaagttcatcgatatgaaccttcaggagcattacatggtctacttagagttagagcttttactcaagatgatgcacatattttttgttctgaggatcaaattacaagtgagtgtttaattgtcactaatttaattttagatatttataaagaccttgggtttgaaaatgtaattcttaaatatgcagatagacccgaagtgagggttggtgaagatgaagtttgggataaagcagaagcatccttacttgaagcagtgaaagcatcaaagttaaaatatagtattaacaagggagaaggagcattctatggtcctaaaattgagtttgttctaagggatgcaattggtagagattggcagtgtggaactttgcaagttgatttaaattta

SEQ ID NO: 302911 - DNA, 1024 bp, Unknown
  Bacterial polypeptide expressing nucleotide sequence isolated from the Sargasso Sea
ggctcctggagcggtgttttggcatcctaagggttggacattattccaatcgctaataaattatatgcgaaacagacaagacaaggcaggttacgtagaaactaatacacccgacatgatggataagtctctatgggaaaagtctggtcactgggacaaatttagtgacatgatgtttagaactgaagcaaaagacgataaaatttatgctatcaaaccaatgaattgccctggtgctgtagaaatttttaaacaaggattaaaaagttatagagacttaccttttctattatctgaattcggaaaagtacatcgttatgaaccgtctggtgctcttcatggattaatgagggtgagagcattcacacaagatgatgcacatatattttgtacagaagatcaaattacacaagagagtaaaacggtatgtgatttgatacttagtatctataaggactttggtttcgataatgttagaatcaaattttctgaccgtcctgaaaaacgcgtaggggatgatgctatttgggataaagctgaggctgcattaatgcaagccatggaagcaacaggtcttgagtacacactcaacccaggagaaggtgcattttacggtccaaaattagagtttgttttacgtgatgcaattggcagagactggcaatgcggaacactgcaagtagatttaaatttacctggaagattgggtgccacttatattggagaagatggtaataaaaaaatacctgtcatgttgcatagagctctatttggttccttagagagattcaccggcattctaattgaacattatgctggccatcttccattttggctttcaccattgcaagctgtagttgctacaattacatctgatactgatgagtatgcatatgaggtacaaaaagtattagtatcaaaaggaattagggccgaaatagatacacgtaatgaaaaaattggttataaaatacgtgaacacagtaatagtaaagtgccagcaattattgctgttgggaaaaaa

SEQ ID NO: 302912 - DNA, 842 bp, Unknown
  Bacterial polypeptide expressing nucleotide sequence isolated from the Sargasso Sea
atataaaattaggcattcagctgctcacgtaatggcagatgtggttaaaactatgtatccgaatgttaaattggctattggtccacctactgaagatgggttttattacgattttttaatagatacccctttctcagatgatgatttgaagaaaatcgaaaaacagatgaaaaaaattatagctcgaaatcttccattcgaatattctgaatattctagagaagatatgctagaaattaataaagatgaacctctgaaaatagagataatcaaagaaattcccgaaggggactctataacaacatataaacatggtgattttgaggatttatgtgcaggacctcatgttgaatcaaccggtaaaattccagctttcaagcttttaaatgttgcaggagcttattggagaggtgatgaatctaggccaatgctacaaagaatttacggtacagcatgggaatcaaaagaagctcttcaaaagcatgtagaacgtatagaagaagctcgtaaaagggaccataggacattagggaaaacactagatttatattctattcacgaagaaattggacctggtttaatagtgtggcatccaaaaggggctagagttaggaatctttttgaagatttttggcgtacagaacattataaaagagggtacgatcttgtttatactccaaatataggtagatcagttttgtgggaaacaagtgggcatttggatttttatagtgaagacatgtttgctccttcggtaaatgatgaccaagattattatttaaaacctatgaattgccctttcgcatataatgtactatcggtcttctttgagaagttataga

SEQ ID NO: 302913 - DNA, 900 bp, Unknown
  Bacterial polypeptide expressing nucleotide sequence isolated from the Sargasso Sea
ccaggatcagtcttctggcatcaaaaaggttggaatttatttcaaaaattaatttcttatatgagagcaaaacaggataaagccggttacaacgaaattaatacacctgagattttagatagatctctttgggaaaagtcaggacattgggagaaatttggggttaacatgtatactactactactccagatgaaaaggtatttgcaataaagccaatgaattgccctggatgtgttcaggtgtttaaccaaggtttgaaaagctatagagatttaccattaaagatgtcagaatttggaaaggttcacagatatgagccctctggttctttgcatggcttactaagagttagagcattcacacaagacgacgcacatatattttgtactgaagatcaaattacccaagaatgtttgtcggtaacaaatttaattctagaaatttataaggatttaggtttcgaaaatataattttaaaatattcagatagaccagaagttagagtaggagaagaccatgtttgggacaaatcagaaaaggctttattaaaagcaattaaacaaacagatttagaatatagcattaataaaggtgagggagcattctatggtcctaaaattgaatttgttcttagagatgccattggaagagattggcaatgtggaactttacaagttgatttaaatttaccaggaagattaggtgctagctatgttgataaagatggttcaaaaaaaattccagtaatgctgcatagagctttatttggatccttagagagatttattggaattttaatcgaaaattactcaggaaaacttcctttctggctttctccattacaaacaatggtcatacctatctctgacgattttgataattacgcaaaaaaagtaaac

SEQ ID NO: 302914 - DNA, 865 bp, Unknown
  Bacterial polypeptide expressing nucleotide sequence isolated from the Sargasso Sea
aaaaagggagaaatatataaagctgagataataaaaagtattccagagggagaagatgtgtctttatattttcatggagattggcatgatttatgcagaggtcctcatttaagttcaactggtaaaattggaaaatattttaaattaacaaaagtttcaggtgcttactggagaggcgattctaataatgaaatgctgcaaagagtgtatggaacaagttggtctactcaaaaagaattggatgattatttaaaaagaatagaagaggccgaaaaaagagatcacagaaaaattgggaaagaaatggatttatttcatttccgagaggagagtcctggatctgtattctggcatcaaaaaggatggagtttatttcaaaaactcatttcatatatgagaattaagcaagaaattgcaggatatcaggaaataaatactcccgaaatattagatcgctccctatgggagaaatcaggtcattgggaaaaatttggagcgaatatgtatacctctacaacacctgatgaaaaagtttttgccataaagccaatgaattgcccaggttgcgttcaggtttttaatcaaggcttaaaaagttatcgtgatttaccattaaaaatgtcagaatttggaaaggttcataggtatgaaccatctggagcgcttcatggattattaagagttagagctttcactcaggatgatgcacatattttttgtaccgaggaacaaattaccgaagaatgtttaactgtaactaatttaattttggaaatttataaagatttaggatttgaagacgtaattttaaaatattctgatagaccagaattaagagttggtgacgaccaggtttgggattaat

SEQ ID NO: 302915 - DNA, 418 bp, Unknown
  Bacterial polypeptide expressing nucleotide sequence isolated from the Sargasso Sea
atgcccaatattactctacctgatggaaaaaaattaaattttgaagaaagtgtttcaggtttagaaattgcagaaaaaatcagcaaatctctttcaaagcaagctttacttattagtgtcaatggagtgttgcaagacttagattctaaaattaaagaagatgctaaagttacaatatttacatctagagataaagaagggctcgagacaataagacatgacactgcacacatcttagcaatggcggtacaagaactatttcctggtacacaagttactattgggccagttattgatgatggtttttattatgattttgcaagaaaagaaccttttactgaggaggatttaaaaaaaatagaagttaaaatgagagagattgttgatagagatgaaataactaagaaagagattggaa

SEQ ID NO: 302916 - DNA, 975 bp, Unknown
  Bacterial polypeptide expressing nucleotide sequence isolated from the Sargasso Sea
cctggatggttcaaaaaaggttttcgaaaaatctgtaactattctagaaattgcccagactataggcgctggattagctaaagcaacaattgctgggaaagtaaatgatgttctccttgatgcgactattcctataagtagagattccgaagttgtaatcatcacatcaaaagataaagaaggaattgaaataataagacattcatttgctcaccttattggtcatgcagttaaacaaatttactctgatattaagatggcgattgggcctgtaattgaagatggtttttattatgatgttttctctgaatacagatttactcctgaagatttaataaaaatcgaaaacagaataaataaattaataaaaacgaactatgacgttcaaattttacaagtttctaaagaagaggcaattaaaacttttaaagaaagagatgagacttttaaattaagaataattgaagaaattcctgaagaagggctcataaatttatacaaacacgaagaatatatcgatatgtgtagagggcctcacgtacccaatactagacatttgagacactttaaattacttaaattatcaggttcatactggagagggaatagtgaaaatgaatcattacagagaatatatggaactgcatgggcaaaagaaaaagaactcaaagattatttaacaagaattgaagaagcggaaaaaagggatcatagaaaacttggtaaaaaacattcactatttcatatacaagaagaatctccaggaatgattttttggcatccaaatggatggacaatttaccaagtactggaaaaatacataagagaaatactcaaaaaaaatgattatttagaaattaaaaccccacaagctgttgataaatctctttgggaaaaatccggtcattgggaaaaatttagagacgatatgttcactactgcatcagaaaatcgaacttatgcaattaaaccaat

SEQ ID NO: 302917 - DNA, 908 bp, Unknown
  Bacterial polypeptide expressing nucleotide sequence isolated from the Sargasso Sea
aatatatacatcaaaagataaagaagggttagaaacaataagacatgatacagcgcatgtactagcaatggctgtacaagaactttttcctggaacacaagtaactattggaccagtaattgataatggattttattatgactttgcgagaaaagaaccatttactgaagatgatttaagaaaaatagaaaaaaaaatgttaaaaattgtagaaagagatgaacctacacacagagaagtatggaaacgtgaaaaagctattgaacactttaaaaaagctggagaaatttataaggctgagataataaaagatattccaaaagaagaagaggtttctatttactttcatggaaaatggcatgatttatgtagaggacctcatttgatgtctactggaaaaattgggaaatattttaaacttacaaaagtatccggtgcttattggagaggcgattcaaataatgaaatgttacaaagaatttatggaacttcttggccatctcaaaaagaacttgatgattatttgaaaagagttgaggaagctgaaaaaagagatcatagaaaattaggaaaagaaatggatctttttcattttagagaagaaagcccaggagctgtattctggcatgaaaaaggttggaatttatttcaaaaacttattgattatatgagagctaagcaaaaaaatgctggctataaagaaataaatacacctgaaattttagatagatctttatgggaaaaatcgggacactgggaaaaatttggagaacacatgtatacttcaacaacaccagatgacaaagtgtttgcaattaaaccaatgaactgtccgggttgtgtgcaagtttttaatcaaggtttaaaaagttatagagatttaccattaaaaatgtccgagtttggaa

SEQ ID NO: 302918 - DNA, 574 bp, Unknown
  Bacterial polypeptide expressing nucleotide sequence isolated from the Sargasso Sea
tatgaagatcacgctccctgataaatccgttcgcgaatatgaaggcccgttgacggtatacgatgtagcatcagatatcggtccgggacttgccaaggcaaccttgggcggtgaggtcgatggggtgttggtcgacgccacacaccggatagaggaagacgccaaactgcgcatcattacagggaaagatgaggaagggctcgagatcatccgtcattcctgtgcccaccttcttgcccaagcagtcaagcaactttttcccgaggcacaggtcaccatcggccccgtgattgaagatgggttctattacgacttcgcctacggtccaggtttttccgaggatgatcttggccgcattgaggaaagaatgcaagcgcttgcgaaagcgggggcctcggtagaaaggctcaccatggggcgcgaggaggcggtgacctactttcgggaacagggggaggaatacaaggccaagattattgaggagatccccgctgacgagacactttcgctttatcggcagggagatttcacagatctgtgccgtggcccgcatgtccctgatgttggggcgcta

SEQ ID NO: 302919 - DNA, 881 bp, Unknown
  Bacterial polypeptide expressing nucleotide sequence isolated from the Sargasso Sea
tatggtcaataaaattaatattacttttcctgatggtgtttcaaaaaagtttgacaaagggattacaggaattgctatagctgaaaatatttcaaaatcattagcaaaagaatctgtggctattaaattaaatgacgaaatagtcgatctttctaaaaatattgaaaatgattccaatattaaaataattaaaaaacaagacgatgatgctttaagtattatacgccacgattgtgcacatgtaatggctgaagctgttcaagaattatttccaggaacacaggttaccataggtccagcaattgaaaatggtttctactacgactttgctagggaagcgccttttacaacaaatgatttagaaaaaattgaaaaaaaaatgcatgaaataattaacaagggtgaaaaatttgttagggaaatttgggagagaaaagatgctattgaatatttttcaaaaaaaggtgaaaaatataaaactgaactaatcaatgatttgcctaaagacgaaataatatcaatatacaaacaaggccggtggcttgatttgtgtaaaggacctcatatgccaaccacaaagtatataggaaaagcattcaagctaatgaaagttgctggggcttattggagaggaaattcaaataatgaaatgcttacaagaatatatggaactgcttggagaaatgaaaaggaactatcagaatatcttaaacaacttgatgaagcagaaaaacgtgatcatcgtaagattggaaaagaaatgaatttatttcattttccagaagaagcgccaggggctgttttttggcatcccaaaggctggtcattatttcaatcacttataaactacatgagaaatgcgacagataaagaagaatatg

SEQ ID NO: 302920 - DNA, 930 bp, Unknown
  Bacterial polypeptide expressing nucleotide sequence isolated from the Sargasso Sea
agaagaagatttacgaaaaattgaaaaaaagatgttagaaattgtagaaagagatgagcctacacatagagaagtttggaatcgagataaagcagtcgaacactttaagaaagcaggagaactttataaggctgaaataattaaagatataccaaaagaagaagaagtttcagtttactttcatggaaaatggcatgatttatgtagaggtcctcatttaatgtctactggaaaaattggaaaatattttaaacttatgaaagtttcaggagcttactggagaggtgactctaaaaatgaaatgcttcaaagaatttatggaacaagttggtcaactcagaaagaattagacaattatttaaatatgattgaagaggctgaaaaaagagatcatagaaaattagggaaagaaatggatttatttcattttagagaagaaagtccagggtcagttttttggcatgaaaaaggttggaatttatttcaaaaattaatttcatatatgaggtccaagcaagatgatgccgggtataaggaaattaatacaccagaaatattggatcgatcattgtgggaaaaatcaggtcactgggaaaaatttggtgcaaacatgtatacttcgacaacacctgatgaaaaagtatttgcaattaaaccaatgaattgtcctggctgtgtccaagtttttaatcaaggattaaaaagttatagagatttgccacttaaaatgtcagagtttgggaaagtccatagatatgaaccatctggtgctttgcatggactcttaagagtaagagcttttacacaagatgatgctcatattttttgttctgaagatcaaattacacaagaatgtttaaatgtaacaaatttaattttagaaatttataaagatttaggttttgaaaatgtaattttaaaatattctga

SEQ ID NO: 302921 - DNA, 805 bp, Unknown
  Bacterial polypeptide expressing nucleotide sequence isolated from the Sargasso Sea
tttgatgcaggatcagaaaataaagaatttgcaattaaaccaatgagctgtcctggacatatacaagtatacaatcatggattaaaaagctatagagatttgccgttaaaatatgcagagtttggtaaagttcatcgtaatgaaccatcaggaacgttacatggtcttttaagattgagagcattcactcaagacgatgctcatatcttttgcactattcatcaagtagaggatgagattggacaattgatagataacatatatgatatttataatatatttggttttagagatatctttgtagaattatcaacaagacctgaaaaaagagtgggtgatgatcgtatctgggatatatctgagagtgcattgaaaaaaactttagagtcaaagaatgtcaaatggaagattaatgaaggagacggtgccttttatggacctaaaatagatttttctttaaaagattctattggaagagtttggcaacttggaactatacagcttgatttttcaatgcctgagagattgagtgccacttatgtcaatgaagaaggtaataaaatcgcaccagtaatgattcatagagctatcctaggatcgctagagagatttgtcggaattttaattgaggaatattcaggaaacttccccttgtggctctctcctcagcaaattcaaataataaatattacctctgctcaagatgattattgtatagagttaagagataaattacgtagcgtaaattttagagttgatactgatttaagaaatgaaaaaattaatttaaagatacgagaaaata

SEQ ID NO: 302922 - DNA, 679 bp, Unknown
  Bacterial polypeptide expressing nucleotide sequence isolated from the Sargasso Sea
aatgccgataataacattacccgacggaaacaatattgattttcctaataaagttactggactagaagtagctgaaaaaattagcaaatcgttagctaaacaagccatggtcataagtgttgatggtgaacttaaagatcttgattttctaattaaaaatgattgttctgtaaaaattattacctcaaaaaatcctgagggcttggaaactataaggcatgacacggctcatattttagctatggctgttcaagaattatttcctggtacacaagttacaattggacccgtgattgaaaatggattttattatgactttgctagaaaagaaccatttacagaggatgatcttgttaaaattgaaaataaaatgaaagagattgtcgataggaatgaaacaacaaaaagagaagtttgggatagaaacaaagcaattagccattttaaaaaaaaaggagaaatttataaagccgagctaattgaagcaatacctgaaaatgaagatgtatcaatttattttcacggagaatggcatgatttatgtagaggcccacatttatcctctacaggtaaaatagggaaatattttaaacttacaaaagtatcaggagcatattggagaggagactctaataatgaaatgttgcaacgaatatatggtacgagttgggcaactcaa

SEQ ID NO: 302923 - DNA, 991 bp, Unknown
  Bacterial polypeptide expressing nucleotide sequence isolated from the Sargasso Sea
caagagttatttcctgaaacacaagttactattggtccagctattgaaaatggtttttattatgattttgcaagagatgaaccctttactcttgctgatcttccaaaaattgaaaagaagatgcatgaaataatacaaagaaataaaaattttgttagagaagtgtggtctaaagaagaagcaatcaaacattttaaagataggggtgagaactacaaagttgaattaataaatgatttacccgatagtgaggaaattagtatttacaaacaaggtgattggctagacttatgcagaggccctcacatggtttctacaaaacagattggtaaagcatttaaattaatgaaagttgcaggtgcttactggcgaggagattcatcaaacgcaatgctcacaagaatttatggtacagcttgggcaacagaaaaggatcttgaacaacaccttttacaaattgaagaagcagaaaaaagagatcaccgcaaacttggaagagaaatggatttattccattttcaggaagaggctcctggagctgtgttttggcaccctaagggttggacattattccaatctttaataaattatatgcgaaacagacaagacaaggcaggttatgtagaaactaatactcctgacatgatggataagtctctatgggaaacctctggtcattgggacaagtttagtgacatgatgtttagaactgaagcaaaggatgataaaatttatgctgtcaaaccaatgaattgtcctggtgctgtagaaatttttaaacaaggattaaaaagttaccgagatcttccatttttattatctgaatttgggaaagttcatcgttatgaaccatcaggtgctcttcatgggttaatgcgtgttcgagcatttacacaagatgatgcacatatattctgtacagaagatcaaattacacaagaaagtaaaacagtatgtgatttaatacttagtatttataaagaattttggt

SEQ ID NO: 302924 - DNA, 787 bp, Unknown
  Bacterial polypeptide expressing nucleotide sequence isolated from the Sargasso Sea
ggtttcacacaagatgacgcgcatattttttgccaggaagaccagattgaaagtgaaactaaaaaatttataaattttctttcaggcgtatataaagatctaggttttcccaaatttgcagtgaagttctctgacagaccaaaaaaccgggcaggaagcgacgatgtatgggataaagctgaaggtgctttaaaatctgcaacaacttctgctgggttcgattttgaattgaatccaggtgaaggagcattttatggcccaaaactagaatttgtccttaccgatgcaatcggtcgtgactggcaatgcggaacgctgcaggttgacttcgttttaccagaccgtttggacgcaaattttatcggtgaagatggccaaaaacatcgaccagtaatgcttcatcgtgcagtgttaggttcttttgaaaggtttattgggatcttgattgaaaactttgccggtagactaccgttctggctagccccaagacaggtggttgtagcgtccatagtcactgatgcaaacgaatactgtactgaaatagtcgatgcattaaaaatagttggcattagagccgaaagtgatcttagaaacgaaaagattagctacaaagttcgagagcattctgtagcaaaagttccaaccattctggccattggaagcagggaggtcgaagagagaacaataaccgtgcgcacattaggtgaaaagcaaacaaaaacaatcaattttgagcaggttattctagaactgcaaaaagagggtatccctccagatatgagataag

SEQ ID NO: 302925 - DNA, 929 bp, Unknown
  Bacterial polypeptide expressing nucleotide sequence isolated from the Sargasso Sea
tggtttttattatgatgttttttctgaatacagatttacacctgaagatttagtaaaaatcgaaaccagaattaataaattaataaacacaaactatgacgttgaaatcttacaagtttctaaagaggaggcaattaaaacgtttaaagaaagagatgagacttttaaattacgaataattgaagaaattcctgaagaagggctcataaatttatacaaacacgaagaatatatcgatatgtgtagagggcctcacgtacccaatactagacatttgagacactttaaattacttaaattatcaggttcatactggagagggaatagtgagaatgaatcattacagagaatatatggaactgcatgggcaaaagaaaaagaactcaaagattatttaaaaagaattgaagaagctgaaaaaagggatcatagaaaacttggtaaaaaacattcactatttcatatacaagaagaatctccaggaatgattttttggcatccaaatggatggacaatctaccaagtactggaaaaatacataagagaaatactcaaaaaaaatgattatttagaaattaagaccccacaagctgttgataaatctctttgggaaaaatccggtcattgggaaaaatttagagacgatatgttcactacagcatcagaaaatcgaacttatgcaattaaaccaatgaattgtccatgccatatacaagtatttaatcaaggtttaaaaagttataaggatttacctattcgtcttgctgaatttggttcttgtcacagaaatgagccttctggtgcactgcacggcttaatgcgagtaagaaactttactcaagatgatgcgcacatattttgcacagaagagcaaattcaagaggaggtatcaacttttatagatcttgttttcgaggtttataaaactt

SEQ ID NO: 302926 - DNA, 502 bp, Unknown
  Bacterial polypeptide expressing nucleotide sequence isolated from the Sargasso Sea
aatgccaaatattaaactaccagatggaaactcaattagttttgaaaaaaaagtaactggattacaaatagcagaaaaaattagtaaatctctttcaaaacaagctttagttattagtgttgatggaaatttaaaagatttgaattatgaaatagataaagactgctcagttaaaattcatacagctaaagacaaagaaggattagaaacaataagacatgatactgcacatattttggcaatggctgtccaggaactatttcctggtactcaagttactattggaccagtaattgataatggattttattatgattttgcaagaaagatatcatttacagaggaagatttaagaaaaattgaaaaaaaaatgctagaaattgtagagagagatgaacctactcatagagaagtttggaagcgagacaaagctgtagagcattttaaaaaagcaggagaaatttataaagcagaaataattaaagatatccaaaagagaaga

SEQ ID NO: 302927 - DNA, 877 bp, Unknown
  Bacterial polypeptide expressing nucleotide sequence isolated from the Sargasso Sea
acttcaacaacaccagatgaaaaggtgtttgcgattaaacctatgaactgtccaggctgtatagaagtttttaatcaaggccttaaaagttataaagatttgccactaaagatgtctgagtttggaaaagtacatcgttatgaaccttcaggggcattacatggattgttgagggtaagagcattcacacaagatgatgctcacatattttgtactgaagatcaaattacaaaagagtgtttaatagttacagatcttattttagaaatttataaagacttaggttttgaaaatgtgattttaaaatactcagatagaccagaaaaaagagttggagacgatagtatttgggataaggctgagagtgctttgttaaaggctgtaaaagcaactaaattagaatatagtataaacaagggtgaaggtgcattctatgggcctaaaatagaatttgttttaagggatgcgataggaagagattggcaatgtggaacattacaagttgattttaatttacctggtagattaggtgcatcatatatagacaaagatggaacaaaaaaagttcctgtgatgttacatcgagctttatttgggtctcttgaaagatttataggtattctgattgaaaactatgctggaaaatttccattttggatatctccgttacaaacagttgttatacctatatccgaagatttcgaagaatacgccaaaaaagtttccaataagataagagaagctggtattacatcaatggttgatttaaaaaatcataatttaaattataaaataagagatcattcattagcaaaaatacctcttttaataatttgtggtaaaaaagaagttgacagtaactcagtaaccatagaag

SEQ ID NO: 302928 - DNA, 948 bp, Unknown
  Bacterial polypeptide expressing nucleotide sequence isolated from the Sargasso Sea
tatttaaatcttatcaaagaagctgaaaaaagagaccatagaaaacttggaaagcaacttgatttatttcattttcaagaagaagctccagggtctgttttctggcatgcaaaaggatggactttattcagaacattgatcgattacatgagacatcgccaggaggaagctggctatgaagaaattaatacccctgatattatggataagtccttatgggaactttcagggcatttagaaaaatttggagacaatatgttcaccactgaagcaagggaagatagagtttatgcattaaagccaatgaattgtccagggtgtgttcaagtatataagcagggattgaaaagttaccgagatttgccattaagggttgcagaatttggtaaagtgcacagatatgagccatctggcgcactacatggtttgatgcgagttagagcatttactcaggatgatgcgcatatattttgtacagaggatcaaattactgaagaaagtaaaaaagtttgcgatcttgttctcagtatttataaggattttggatttgataaagtttcaattaaattttctgatagacctgagaaaagagttggcagtgatgcaatatgggacaagtccgaagaagctcttcgacaagccatggaagctacaggattagattattcattaaatcccggtgaaggggccttttacggtccaaagcttgaatttatccttaaagatgcaataggtcgtgagtggcaatgtggtactttacaggttgatttaaatatgcctgaaagattaggaggacattttattgcagaggatggacaaaaatataatccagtaatgctacacagagcactctttgggtctctagaacgttttacaggaattttaattgaacattatgctggtgcgctaccactatggctttcaccagtacaagcaatagtaacacaa

SEQ ID NO: 302929 - DNA, 793 bp, Unknown
  Bacterial polypeptide expressing nucleotide sequence isolated from the Sargasso Sea
aatgcctaatataacactacctgatggaaaaaatctaaacttttcaaaagaagtcacaggattagaaatcgctgagaagataagtaagtcattatctaaacaagctttgataatgagcgtaaatggagaactaaaagatttgtatttttctataaataaggattctttagtaaaaatttttacttctaaagatcccgagggattagaagttattaggcatgacgctgcacatattatggcaatggctgtgcaagagttataccctggtacacaagtgacgattggaccagtaattgaaaatggtttctattacgattttgcacgaaaagaaccatttactgaggatgacttaaaaaaaattgaaaaaagaatggcagaaataattgataaagatatcaaaacaagaagagaagtttggaaaagagaaaaagcaattgatcatttcaaaaaaatcggagaaaaatataaagctgaaataatagagagtattcctcaagacgaggagctatctgtttattatcatggtgaaacgtggcatgatttatgcaggggtcctcaccttttatcttctggtaaaattggtaaggcttttaaattaacaaaagtcgcaggagcttactggcgtggagattcaaaaaatgaaatgttacagagaatttatggaacaagttgggcgtcaaaaaaagatttagatgattacttaaatagaatccaagaagctgaaaaaagagatcatagaaaacttggaaaagaaatggatttatttcattttagagaagaaagcccagggtct

SEQ ID NO: 302930 - DNA, 271 bp, Unknown
  Bacterial polypeptide expressing nucleotide sequence isolated from the Sargasso Sea
atgccagttattactttacctgacggcagtcagcgttcgtacgacaatcctttatctgtattagacgttgccaaagacataggccctggtttagcgaaagcgaccatagcaggcaaaatcaatggccaattggttgatgcctgtgagctcattaccgctgatgcttcattaagtattgtcaccgccaaagatcaggaaggcctggaaattatccgccactcctgcgctcacttattaggtcatgcgattaagcagttgtggccaaatacca

SEQ ID NO: 302931 - DNA, 877 bp, Unknown
  Bacterial polypeptide expressing nucleotide sequence isolated from the Sargasso Sea
aacggaaatcgctgaaaaaattagcaagtcattagctaaacaagccatcgttatgagtgtcaatggtgaacttaaagatctaaatcatttaattgacaacgattgttctgtaaaaatttttacttcaaaaaatcctgaaggcttggaaactataagacacgatacagctcatattctagctatggctgttcaagaattatttccaggcacacaagtaacaattggaccagtgattgaaaatgggttttattacgactttgctagaaaagaaccatttacagaggatgatctagttaaaatcgaaaataaaatgaaagagattgttgatagaaatgaaataacaaaaagagaagtttgggaaagaaataaagcaattagccattttaaaaaaaaaggagaaatttataaagctgagctgatcgaagcgatacctgaaaacgaagatgtatcaatttactttcacggagaatggcatgatttatgtagaggtccacatctctcttccacgggtaaaatcggaaaatattttaaactcacaaaagtatcaggagcatattggagaggagactccaataatgaaatgttgcaaagaatatatggaacgagctgggcaactcaaaaagatttagatgaatatttaaaaagaatcgaagaagctgaaaaaagagatcatagaaagcttggtaaagaaatggacctatttcattttagagaagaaagtccaggatcagtattttggcacgaaaagggatgggctctatttcaaaaattaatcaactatatgagaagcagacaagatgctgctggttatagagaggtaaacacaccagaaatattagatagacaactatgggaaaaatctgggcattgggaaaaa

SEQ ID NO: 302932 - DNA, 977 bp, Unknown
  Bacterial polypeptide expressing nucleotide sequence isolated from the Sargasso Sea
aattggaaagtattttaaacttacaaaggtttcaggcgcatattggagaggtgattcaaaaaatgaaatgttacaaagaatttatggaacatcttggccatctcaaaaagaacttgataactatttaaaaatgattgaagaagctgaaaaaagagatcatagaaagctagggaaagaaatggatttatttcattttagagaagagagcccaggttcagttttttggcatgagcggggatggaatctttttcaaaaattaattgactatatgagattaagacaaaaaaaagcagggtacaaagaaattaatacacctgagattttagatagaggtttatgggaaaaatcaggccattgggaaaaatttggtgaacacatgtatacttctacgacgcctgatgaaaaaatttttgcaattaaacctatgaattgtccaggttgtgttcaagtttttaatcaaggattaaaaagttatagagatttacctcttaaaatgtctgaatttggaaaagtacatagatatgagccctcaggtgctttacatggattaatgagagtaagggcttttactcaagatgatgcacatattttttgtactgaagatcaaattacacaggagtgtttatcagtaacaaatttaattttagatatttataaagatttaggttttaaaaacgttattttaaaatattcagatagaccagaagtgagagttggtaatgataaagtttgggacaaatcagaatcagctttactagaagcagttaaagaatcaaaattagaatatagtatcaataaaggcgaaggtgctttttatggtcccaaaattgaatttgttttaagagatgcaataggcagagattggcaatgtggaactttacaggtggatttaaatttgccagagagacttggtgcatcatatgttgataaggatggatcaaaaaaaatttcagtaatgctacatagagcattatttg

SEQ ID NO: 302933 - DNA, 870 bp, Unknown
  Bacterial polypeptide expressing nucleotide sequence isolated from the Sargasso Sea
caactcagaaagaattagaaaattatttaaatatgattgaagaggctgaaaaaagagatcatagaaaattagggaaagaaatggatttatttcattttagagaagaaagtccagggtcagttttttggcatgaaaaaggttggaatttatttcaaaaattaatttcatatatgaggtctaagcaagatgatgccgggtataaggaaattaatacaccagaaatattggatcgatcattgtgggaaaaatcaggtcactgggaaaaatttggtgcaaacatgtatacttcgacaacacctgatgaaaaagtatttgcaattaaaccaatgaactgcccaggctgtgttcaagtttttaatcaaggattaaaaagttatcgagatttgccactaaaaatgtctgagttcgggaaagttcatagatatgaaccatccggtgctttacatggacttttaagagtaagagcttttacacaggatgatgctcatattttttgttctgaagatcaaattactcaagaatgtttaaatgtaacaaatttaattttagaaatttataaagatttaggttttgaaaatgtaattttaaaatattctgatagaccagaggtacgtgttggcgatgataaagtttgggataaatcagagaaagcattattagaagcaattaaagcttctaaacttgaatatagtgtaaacaaaggggaaggtgcattttacggacccaagatagaatttgtattaagagatgccattggtagagattggcaatgtggaacactccaagtagatctaaatttgcctggaagacttggtgcatcatttgttgataaagatggatcaaaaaaagtaccccgttatgttgcataga

SEQ ID NO: 302934 - DNA, 625 bp, Unknown
  Bacterial polypeptide expressing nucleotide sequence isolated from the Sargasso Sea
ccgtgctgaagctgacctggccgttgcgctggaagaaaacaacatcccgtttgagttccaactgggtgagggcgcgttctacggtccgaaaattgaatttaccctgtatgactgcctcgatcgtgcatggcagtgcggtactgtacagctggacttctccctgccgtcccgtttaagcgcctcttacgttggcgaaaacaacgaacgtcaggtgccggttatgattcaccgtgcaattcttgggtcgatggaacgtttcatcggtatcctgaccgaagagttcgctggcttcttcccgacctggcttgcgccggttcaggttgtggtcatgaacatcaccgattctcagtctgaatacgttaacgaattaacgcagaaactacaaaatgcgggtattcgtgtaaaagcagacttgagaaatgagaagattggctttaaaatccgcgagcacactttacgtcgtgtcccttacatgttggtctgtggcgacaaagaggtagaagcaggcaaagttgccgtgcgcacccgtcgtggcaaagacttgggcagcctggacgtaaatgaagtgattgagaagctgcaacaagagattcgcagccgcagtcttcaacaactggaggaataa

SEQ ID NO: 302935 - DNA, 859 bp, Unknown
  Bacterial polypeptide expressing nucleotide sequence isolated from the Sargasso Sea
atgcctaatattcatcttttagacggaaaaaaaatctcattcaaaaattcaattgatggatttgagctagctaaaaaaattagtaagactttggaaaaaaacgcattaataatggaagttgatggtcaattaaaagacttaagccatcaaataacaaagaactctaaagtaagaattattacaacaaaagacaaagaaggtttagaagttttgagacatgatgctgcgcatataatggcaatggcggttcaagagcttttccctggaactcaagtaactattggtcctgttattgaggacggtttttattatgactttgcaagaaaagaaccgttcactagtgaagatttaaagaaaatagaaaaaaaaatgtcagagttaattgataaagatttaaaaaccagaagagaagtttggaaaagagacgcagctattgccaacttcaaaaaaataggtgaaaaatataaagcagaaataattgagagcattcctaaaaacgaagaactctcagtttatcatcatggggacgcatggcatgatttatgtagagggccacatttaccttcctcaagcaaaattggaaaagcttttaaattaactaaagtatcgggtgcgtattggcgaggtgactcaaataatgagatgttacaaagaatttatggtacatgctgggcctcaaaaaaggaattggatgactatctacacagattagaggaagctgaaaaaagagatcacagaaaactaggaaaagagatggatctttttcattttagagaagagagcccaggatcagtattttggcatgagaaaggctggttgttatttcaaaggttggttgagtatatgagaacgaaacaac

SEQ ID NO: 302936 - DNA, 874 bp, Unknown
  Bacterial polypeptide expressing nucleotide sequence isolated from the Sargasso Sea
aaggtattttgaattaggatcagtttatagaatggagaaaacaggagtactccatggattgttacgcgcacgtggattcactcaagatgatgcacatatatttacaactattgataatttaaatgacgaaattcttaatttgttgaccttttcaattaaactcctaaactgtttcgggtttactgatatagaagctgatttatcaacgaggccaaaagactctattggattggataaggattgggaaaatgctacaaatagtttggaagaagctttaaaccaacaaaaattatcatataagatagctcaaggagaaggtgctttctatggtcctaaaatagatttgcatataaaggacgctattggaagaagatggcagttaacaactatacagatagattttgcgcaacctaacaatttttcattagagtatgttaactctgaaaataagaaagttagacctgtaatgattcacagagccctattaggttctattgaaagatttacaggaatattgatagaacattacgctggtgaattccctggatggttagctccaaatcaaataaatatattaacaattggaaatgtaaacgaatatttagattttatagtttcgaaacttagtaagtatcgtttaagtatcgatgatagaaatataagattaggtgaaaaaatacatgaatctcgtaaaaataaagtaccagtaactctaattattggagaaaaggatgctaaaaataaatcagtagctattaactacttagatggaagtgaagagcaagatattgaattgagtgaaggtatcaaatcgataaataagaaactaaagaagcctgtttttaaatctgatgaaggatggaataaatattga

SEQ ID NO: 302937 - DNA, 664 bp, Unknown
  Bacterial polypeptide expressing nucleotide sequence isolated from the Sargasso Sea
tgtgatcaatttctcaacgcgcccaaaagaacgtattggatcggatgaagactgggatcgcgccgaggaagctttacaaaaagtactggaacgcataggtatgaaatgggtgcttaatgccggagatggagcgttttatgcgcccaagcttgattttattctcactgatgcaattggtcgtgagtggcaatgtggtaccattcaagttgatatgaatatgccaacccgtctggagatgagctatgtaggcgaggatggccaacgccatacaccacacatgatccaccgcgctattcttggctctgtcgagcgttttattggcgttttgattgagcattatgcgggcaaattcccgctctggcttgccccagtacaggttgttgtagctaccatcactggggataatgaaggctatgcttataaagtgaaagatgctctaataaaagtaggtattcgagctgaactggatttacgtaatgagaaaatcggttataaggtgcgcgagcattccagcaaaaaagtgcccgttattttcgtattgggtaagcaggaaagctcagagaagagcgtagccattcgccgcctcggttctaagaataatgaaagtatgagcatgaaaaatgccatagctgtaatgaaaaatgaagcaacgccacctctttaa

SEQ ID NO: 302938 - DNA, 479 bp, Unknown
  Bacterial polypeptide expressing nucleotide sequence isolated from the Sargasso Sea
aatgccacaagtaatactattagacggaaaaaaaatatctttttcaaaatcgattagtggatttgaattaacaaaaaaaattagcaaatctttggagaaatctgctttgattatggaagtaaatggagaactaaaagatttaagtcatgaaataaccaaagattcaaaagtgagaataatcacaactaaagacaaagaaggtctagaagttatacgccacgatgctgcccatataatggctatggcggtgcaagagctctatcctggtacgcaagtgactattggacctgttattgaaaatggattttattatgacttcgctagaaaagaaccattcactagtgaagatttgaataaaatagaaaaaaaaatgtctgaaataattgatagagatgtgaaaacaagaagagaggtatgggaaagaaataaggctatttctcactttaaaaaaattggggaaaaatacaaagcagaaataa

SEQ ID NO: 302939 - DNA, 987 bp, Unknown
  Bacterial polypeptide expressing nucleotide sequence isolated from the Sargasso Sea
aaaaatttggagcaaatatgtatacttccacaacaccggatgagaaaatatttgctataaaaccaatgaattgtcctggatgtgtccaagtttttaatcaaggtctaaaaagttatagagatttacctttaaaaatgtctgagttcggaaaagttcatcgatatgaaccatcaggagcattgcatggtttattaagagtaagagcatttactcaggatgatgcacatattttttgtactgaagaccaaataactgaggaatgtttgtcagtaactaatttaattttagaaatttatagagatttaggttttaaaaatgtaattttaaaatactcagatagaccagaggtacgagttggtaatgataaaatttgggataaatcggaagctgctttacttaaggcaatcaaagcttctaaacttgaatacagtattaataagggagaaggtgccttttatggtccaaagattgaatttgtattaagagatgcaattggacgagattggcaatgtggaaccttacaagttgatttgaatttacctgaaagattaggagcttcatttgttgataaagatggttcaaaaaaaattcctgtaatgttacacagagcactttttggatctttagaacgttttattggaatacttatcgaaaactactctggaaaattaccattttggatagcgcctcagcaagtcatggtaataccagtatctgaagaatttgataattatgcaaaaaaagtttctaaagaaattaaaaatgctggcatcaattcagagatagatttaaaaaatcataatttaaattataaaattcgtgaacattcacttgcaaaaataccaatattgcttatttgtggaaaaaaagaagttgacagtaatagtgtaactattagaagattagattctaataaacaggaaaacatggaactaaaaacatttctaaaaaaattttcagccctaaacaaggcaccttcaaattaag

SEQ ID NO: 302940 - DNA, 604 bp, Unknown
  Bacterial polypeptide expressing nucleotide sequence isolated from the Sargasso Sea
ggctcttactaaagctctcgataataagaatctaaaatgggaactacaaccaggtgaaggtgctttttatggtccaaaaatagaattctcgttaaaagattgtcttaatagagtctggcaatgcgggactattcaggttgatttctctatgcctattagattggatgcaacttttgtagatattgaaaatgaaaaaagaaatccagttatgcttcatagagcaattttaggatcctttgaaagatttatcggaatcttgattgaacaatatgaggcaaaattcccaatttggcttgcgccttatcaaataattttattgagcattaccgatagaaatattgaaaagtgtttaaagtttaatgaattaataaacaacaatggttaccgatcaaaagttgatattaggaatgaaaaaataggatataaaattagagaggcaactctcgggagagttcctttaattgcagttattggagataaagaagaggaaattgattcagtagctctaagagctttagatggaacaaatttaggaattttcaatttacctaatctttataaattaatggatgaattaatagaaaaaaaaggcaggacagaataa

SEQ ID NO: 302941 - DNA, 925 bp, Unknown
  Bacterial polypeptide expressing nucleotide sequence isolated from the Sargasso Sea
aactttcttgaagaggctgcaaagcgagaccacagaaagcttggcagagaaatggctttattccatatgcaggaagaagctcctgggatggtcttttggcatccaaatggatggacaatttacagcacccttcagaattacatgaagagaaagttggacaaagcaaagtatttggaggtaaaaacgccacaagtggtagataggaaactttgggaagcatcaggtcattgggacaagtatcaagaacacatgttcattgtggaagttgacgaggacggagctcgtgaaaagagaacaaatgcgttgaaacctatgaactgtccatgtcacgttcaaatatataatcagggacttaaatcatacagagatttaccactcagaatggcggagtttggatcttgccatagatacgagccatctggagccatgcatggaattatgcgtgtaaggggctttgttcaggacgacgcgcatatcttttgtacggaatctcagattgaaagtgagacaaaagtcttcattgatttactttccgatatttataatgatttaggttttgattcttttcatgtaaaattttcggacaggccaacccatagagcaggtgacgatccaacctgggataaatctgaaaaagcacttttggaagcgacgaaagcggcaggatgtgaatatactttaaaccctggagagggtgcgttttacggacctaaattagaattcgtattaaccgacgcaatcggaagagaatggcaatgtggaacccttcaggttgacttcgtactgcctgagcggttagatgctagctatatcgatgagaccggagtaaaatctagacccgtaatacttcaccgagcaatccttggctcttttgaacgatttataggtatcttgctagaagaaaattcgggaaaactgccgctat

SEQ ID NO: 302942 - DNA, 967 bp, Unknown
  Bacterial polypeptide expressing nucleotide sequence isolated from the Sargasso Sea
atacataagaggaatacttaaaaaaaatgattatttagaaattaaaaccccacaagctgttgataaatctctttgggaaaaatctggtcattgggaaaaatttagagacgatatgttcactactgcatcagaaaatcgaacatatgcgattaaaccaatgaattgtccatgccatattcaagtatttaatcaaggtttaaaaagttataaggatttacctattcgtcttgccgaatttggttcttgtcacagaaatgagccctctggtgcactacacggcctaatgagagtaagaaactttactcaagacgatgcacacatattctgtacagaagagcagattcaagaagaggtatctacttttatagatcttgttttcgaggtttataaaacttttggttttgatgaaatcattatcaaattatcaactcgtcctgaaaaaagggtaggtagtgaagatatttgggataaatcagaagatgctcttaccaaagctcttgataataagaatctaaagtgggaactacaaccgggagaaggtgctttttatggtccaaaaatagaattctcgttaaaagattgtcttaatagagtctggcaatgcggaactattcaggttgatttctcaatgcctattagattggatgcaacttatgtagatattgataatgaaaaaagaaatccagttatgctacatagagcaattttaggatcatttgagagatttatcggaattttaattgaacaatatgaggcaaaattcccaatttggcttgctcctgatcaaataatcttattgagcattaccgatagaaatattcaaaagtgtttaaggtttaatgaattaataagtgataaaggttaccgatcaaaagttgatataaggaatgaaaaaataggatataagataagagaggcaaccctggggagagttcctttaattgcagttatggagataaagaagaag

SEQ ID NO: 302943 - DNA, 451 bp, Unknown
  Bacterial polypeptide expressing nucleotide sequence isolated from the Sargasso Sea
ctgggcgcagagtatgtcagcgagaataatgatcggcagcacccggtcatgctgcatcgagccatcctcggttcgttcgagcgtttcattggcattctgatcgagcattacgagggcgctttcccggcctggcttgcgccggcgcaggcggtgatcatgaatatcaccgacaagcaggccgcttttgccgctgaagtcgaaaaaacgctcgtccaaagcgggtttcgtgccaagtgcgacttgagaaacgaaaagatcggctttaaaatccgcgagcatactttgctcaagactccttatctcttggttatcggggatcgggaggttgagacacgatccgttgctgtgcgcacccgtgaaggcgtcgatctgggctccatgcccctcgagcagttcgcgcagatgttgacacaggcggtttcccggcgtggtcgccaagaattggagtaat

SEQ ID NO: 302944 - DNA, 967 bp, Unknown
  Bacterial polypeptide expressing nucleotide sequence isolated from the Sargasso Sea
atgaaaataactttgccagataatagttcgagagaattgcttgagggatcttcaggctatgatcttgcaaaagatattgggcctggtcttgctaaatctgctattgctgtgactattgatggtgttcaaaaagatctatatgacgtcatagattctgatgcatctgtttcaataattacaattgatagcgatgaaggtgttgaaattatgcgccacactcttactgctcaggtattagcaagggcgattaaaaatctttacccagaatcaaaattagctataggtcctacagttcaagatggtttttattatgatgttgaatccgatgagtctatatcttctgatgatctaagtaagattgaagaagaaatgaaaaaaatcattaaaaccaaatcagcaattattaaaaaattagtttcaaaaaaagaagctttaaagatatttaaatcaaacaaagaaccatataaagaaattattattaatgagtcagatcaagatgatgattttcaactttattatcaggatgacgaggagtttgttgatttatgtagaggtccgcatctaccaaatttaggatttattggttcatttaaattaacaaaagtatctggcgcatattggaagggtgattcaaagaactcaatgctaacaagaatttatggaacagcatttagtaatgacaaagatttacaaaatcatttagatagcatagaagaggcgttaaaaagagatcatagaaaacttgggaaagagatggacttgtttcactttcaagatgaagctccagggatggttttttggcatcctaatggctggactgtttacagaaagctacgaaattttgttagagatagactaaaagaaaataattatattgaagtcaatacccctcaagtgatagatagaaaattatgggaagcttctggtcattgggacaaatatagagaaaatatgtttatacagagat

SEQ ID NO: 302945 - DNA, 1117 bp, Unknown
  Bacterial polypeptide expressing nucleotide sequence isolated from the Sargasso Sea
ttttaaaaaaaagggtgagatttataaagccgaaatcattggaagtatccctgaaaatgaagaggtatcagtgtattttcatggagactggcatgatttatgtagaggtcctcacttaagttctacgggtaaaattgggaagaattttaaactcacaaaagtctcaggtgcgtattggagaggagactctaataatgaaatgttacaaaggatttatggaacatcttggtcgtcacagaaagaattagatgaatatttaaaaagaattgaggaagcagaaaaaagagatcataggaaattaggaaaagaaatggatctatttcattttagggaggaaagtccaggatcggtattttggcacgaaaaaggatggagtctttttcaaaaactcattgcctacatgagaatgaagcaagattatgcaggctacaaagaaattaatactcctgaaattctcgatagatcattatgggaaaagtctggtcattgggaaaaatttggaacaaatatgtatacttctaagacgcctgatgaaaaaatttttgcaattaaaccaatgaattgccctgggtgtgttcaagtttataatcaaggtttaaaaagttatagagatttacctctaaaaatgtcggaatttggaaaagttcatcggtatgaaccttctggagcacttcatggattgttacgcgtaagagcatttacacaagatgatgcacatatattttgtactgaagaacaaattacagatgagtgtttaactgtaactaatttaattttagaaatttataaagatttaggatttgaaaatgtaattttaaaatattctgatcgtccagaagtaagagtaggtgaagatgcagtttgggataaatcagaagcagccctattggaagcaattaaaaaaacaaaattagaatatactattaataaaggagaaggtgctttttatggtccaaaaatcgaatttgttttaagagatgcaattggaagagattggcaatgtggaactttacaagttgatcttaacttgccaggcagacttggagcatcatatgtggacaaagatggagctaaaaaagttcctgtaatgctacatagagcgttattggctcttaga

SEQ ID NO: 302946 - DNA, 928 bp, Unknown
  Bacterial polypeptide expressing nucleotide sequence isolated from the Sargasso Sea
cataagattttttcttcattgcctagaagttatcgcgacatgcctgtcagattatcagaatacggaacatgctatcgctatgaaaagtccggtcaattatttggtttgatgagagttcgaagcttacaaatgaatgatgcacatatctactgcactccaaatcagtttaaaaaagagtttatggatgtttgcagaatgtatttagagtattttgaattatttaatattgagaaatattccatgagacttagtctgcatgacaaagagggattaggagagaaatacgttaatgagcctgagctatggctagagacagaacaatgggttagagaagcattagatgaaggcggttttaattatagcgaggtatcgggtgaggctgccttttatggacctaagattgatgttcaagtttggagcgcgattggcaaagagtttacattagctacgaatcaggttgattttgtagtgccaaagagatttgatttatcgtataaagatgagaatggtgagcaccagaccccaatctgtatacatcgtgcacccctaagtactcatgagagatttatcggattcttaattgaacattttggtggaaattttccactctggcttgctcccgttcaggtggcggttttaccagtatctgataaaacgaatgagtatgctagaaagataaaagaaaaattaatcgatgccgatatcagaacagttctggatgataagtcagataaaataggagctaaaatacggaatgctgaaattaatagaattaatgtaatgctcattatcggtccaaaagaagaggaaagtaatactgtttcggtcagaagaaaaatttctggagatttaggaactatagatcaagatatgttaatatcggagcttgttaatgaaataaaggataggagtttgactcatagctaaa

SEQ ID NO: 302947 - DNA, 469 bp, Unknown
  Bacterial polypeptide expressing nucleotide sequence isolated from the Sargasso Sea
atgcctacaataacattaccagacggaaacaatataaatttttcaaaaaaagttaccggagctgaggtagctgagaaaataagtaagtctttagctaaacaagcaatggttataagcgttgatggtgaacttaaagatttagattatttaatagataaagattgttcagtaaaaatttttacttctaaaaatccagaagggttggaaacaattagacatgacacagctcatattttggcaatggctgttcaggaattgtttccaggtacacaggttacaattggtccagttattgaaaatggattttattatgactttgctagaaaagaaccattcactgaagatgatttattaaaaattgaaaataaaatgaaagaaattgttgatagagatgaaattaccaagagagaaagttgggagagaaataaagctattgatcattttaaaaaaaaaggtgaaatttataaat

SEQ ID NO: 302948 - DNA, 427 bp, Unknown
  Bacterial polypeptide expressing nucleotide sequence isolated from the Sargasso Sea
atgccaaatattactctacctgatggaaaaaaattgaatttctcagagccaatatctgggatccagatagcagaaaaaataagcaaatctctattgaaacaagctttaattatgagtgtaaatggagaattaaaagatttagatcaaaaaatttctgaagattctaaagttaaaatttttacatctaaggatcaagaaggtctagaaacaataagacatgatactgcgcatatattagcaatggcagtacaagaaattttcccaggaactcaagtgacaataggaccagttattgaagatggtttttactatgactttgctagaaaggagccatttacaaaagaagatttagaaaaaatcgagaaaaaaatgaaagagattgttgatagagatgaaaaaacgtctagggaagtttggaaaagaaatg

SEQ ID NO: 302949 - DNA, 929 bp, Unknown
  Bacterial polypeptide expressing nucleotide sequence isolated from the Sargasso Sea
attgtatattacctcagggcattatgaaaagtatggtgaagatagttttcagcctatacttactccaaatgatagcgaaatatttatgcttagaccaatgaattgcccacatcattgtgaaatatttaattctaaaccactaagttacagagatttaccatacaggatggcagaatttggaacagtatacagatatgaacaaagtggagaattacatggattaagcagggtaagaggatttactgttgatgatgctcatattttttgtacaactgaccaggttgattcagaatttaaaaatactattgacttagttttatatgtatttaaatcattagggttcagtgatttttatgctcaagtttcattaagagatccagataacccagataaatacataggaacagatgaaaactgggaaattgctgaacaagcaattttaaattcagcaaaagaaaaggacttaaattataaagttgaatatggagaagctgctttttatggacctaagcttgattttatggttaaagatgcacttggcagaagctggcaattaggtactatacaggtagattacaacctacctgaaaggttcgatctcacatataaaggaaaaaataatgaagatcttagacctgttatgcttcatagagctccatttggtagcatggaaagatttgttgcaattcttttagaacatacaggcggattatttccactatggcttgcatcaactcaggtggagatcctaattgtaagtgagaactttaaaaattatggccaaaaagttttaaatatcttagaaaatcacgaaattcgcgcgcacttagatgatagaaatgagactgttggaaagaaaattagagaatctgagataaataaggttccttttatgattattgttggggaaaatgaagtaataaatgaat

SEQ ID NO: 302950 - DNA, 844 bp, Unknown
  Bacterial polypeptide expressing nucleotide sequence isolated from the Sargasso Sea
aaagacctggatttgtatcttcaaagaatagaagaggcagaaaaaagagatcatagaaaaataggtaaagaaatggatttatttcattttagagaagaaagtcctggctctgtattttggcaccaaaaaggatggaacttatttcaaaaacttatttcttatatgagaatgaagcaagaaactgctggatatcaagaaataaatactccagaaatattggatagatcactttgggaaaaatctggtcactgggaaaaatttggtgcaaatatgtacacttctactacacctgatgaaaaagtttttgctattaaacccatgaattgtcctggttgcgttcaagttttcaatcaaggtttaaaaagttatagggatttaccattaaaaatgtcggaatttggaaaagttcataggtatgaaccttctggagctcttcacggattattacgcgtgagggcatttactcaagatgatgcacatattttctgcactgaacaacaaattacacaggaatgtctaagtgtaacaaatttgattttagaaatatataaagatttaggatttgaagatgtaattttgaaatattctgatcgaccagacttaagagttggggatgataaagtttgggataaatcggaagcagcattattggaagctataaaagcaacaaaattagagtactctattaataagggtgaaggtgctttttatggtcctaaaatagaatttgttttaagagatgcaatcggaagagactggcaatgtggaactttacaagttgatttaaatttaccaggcaggttaggcgcatcatttgtagatagagatgaaacaagaaagtacc

SEQ ID NO: 302951 - DNA, 909 bp, Unknown
  Bacterial polypeptide expressing nucleotide sequence isolated from the Sargasso Sea
aactttgataagcctattacagggttagatattgctgaaaaaataagcaagtcattagcgaaacaagctacagtaataagtataaatgatgaactaaaagacttagatcatttaatcaaaaatgatagcaaagttaaaatatttacttcaaaggatgctgagggattagatacaattcgtcatgatactgctcatataactgctatggccgttcaggagttgttccctggcacacaagtcactattggacccgtcatagaaaatggtttttattatgattttgctaggaaagaaccttttacagaagatgatttaaaaaagattgaagaaagaatgaaagaaatagttgatagagatgttccaactaaaagggaagtctggccaagagataaggcaatatctcattttaaaaaaataggagaattttataaagcagagattatagaggacatccctaaagatgaagatgtttcaatttattttcatggtgattggcacgatctatgtagaggtccacatctttcatcaacaggaaaaattggaaaattttttaaactaaataaagtttcaggggcttattggagaggagattcaaacaatgaaatgcttcagagaatttacggtacgagttgggcctcacaaaaagagctagacgattatttggaaagaatagaagaagcagaaaaaagagatcatagaaagctaggtaaagaaatggatttatttcattttagagaagaaagtcctggcgctgtattttggcatgaaaaaggatggtctttgttccaaaagttagtcaattacatgagggcaaaacaaaaagttgcaggatacaaagaaattaatacgccagaaatattagatagatctttgtgggaaaaatcaggacattgggataagtttggcgag

SEQ ID NO: 302952 - DNA, 691 bp, Unknown
  Bacterial polypeptide expressing nucleotide sequence isolated from the Sargasso Sea
cttaaagatttagattatttaatagataaagattgttcagtaaaaatttttacttctaaaaatccagaagggttggaaacaattagacatgacacagctcatattttggcaatggctgttcaggaattgtttccaggtacacaggttacaattggtccagttattgaaaatggattttattatgactttgctagaaaagaaccattcactgaagatgatttggtaaaaattgaaaataaaatgaaagaaattgttgatagagatgaaattaccaagagagaagtttgggagagaaataaagctattgatcatttcaaaaaaaaaggtgaaatttataaatctgaattaattaaagctatcccagagaaagaagatgtctcaatttattttcatggagattggcatgatctttgtagaggtccccacttatcctcaacaggtaaaataggaaaatattttaaactaacaaaagtttcgggtgcttattggaggggtgactcaaaaaatgaaatgcttcaaagaatatatggtactagttgggcaactcaaaaagatttagatgaacatcttaaaagaatagaggaggcagaaaaaagagatcatagaaaattaggaagagaaatggatttatttcattttagagaagaaagtccaggatctgttttctggcacgaaagaggctgggcgttat

SEQ ID NO: 302953 - DNA, 430 bp, Unknown
  Bacterial polypeptide expressing nucleotide sequence isolated from the Sargasso Sea
aatgccgataataacattacctgacggaaacaatattaattttacaaataaagttacaggactcgaagtcgctgaaaaaattagtaaatcattagcaaaacaagccatggtcataagtgttgatggtgagcttaaagatcttaattttctaattgaaaatgattgttctgtaaaaatttttacttcaaaaaatcctgaaggcttggaaactataaggcatgacacagctcatattttagctatggcagttcaagaattgtttcctggcacccaagttacaattggacctgtgatagaaaatggattttattacgactttgctagaaaagaaccattcacagaggatgacctagttaaaattgaaaataaaatgaaacagatagttgataggaatgaaataacaaaaagagaagtttggatagaaacaaag

SEQ ID NO: 302954 - DNA, 627 bp, Unknown
  Bacterial polypeptide expressing nucleotide sequence isolated from the Sargasso Sea
aagatgagatctgggataaagctgaaaatgcacttttgaatgcgtctaaagcaacaggcataccctttgatgtaaatagtggtgatggagctttttatggaccgaagttagatttttatcttcatgatgctattggtagaaaatggcaatgcggaacattacaggttgattttaatatgccaggaagattgggtgcaaattatattggagaagataatgaaaaacatacgccagttatgcttcatcgtgctattttaggaagtttagagagatttacaggtattttaattgagcattatgagggaagattccctgtttggttagctccaatccaagtggtggttgctactataacatctaaagcagataaatatgctcataagatagaagaaaaatttatagaaaaaggaataagagttattttagattctcgaaacgaaaaaattaattataaagttcgagaacattcggtaaataaaataccatttatttttgttgttggagttaatgagatgaatgatggaactgttgcaatcagaaaacttggctcagataagcaagaaatacttagcatacaagatagtgtagatttgattcttaaagaaactgctgcaccagacagttgat

SEQ ID NO: 302955 - DNA, 640 bp, Unknown
  Bacterial polypeptide expressing nucleotide sequence isolated from the Sargasso Sea
ggtgaattaaaagatttatattcaacaatagataaggatagttcaattaaaatttttactgcaaaagatcctgagggattagaagttattaggcatgatacagcacatattatggcaatggccgtccaggaattatttccaggaacacaggtaacaattggtccagttatagaaaatggcttttattatgactttgctagaaaggaaccttttactagtgatgaccttaaaaaaattgaaaataaaatgtcagagataattgataaggatgtaaaaactagaagggaaatttgggaaagagataaggcaatatctcattttaaaaaaattggagaaaaatataaagctgaaataattgaaagtattccaaaaaatgagatgcttacggtttatcatcatggtgatacatggcatgatctatgtagaggtccccatttagaatcttctagtaaaattggtaaagcatttaaattaacaaaagtatcaggggcttattggcgaggggattctaataatgaaatgttgcaaagaatttatggaactagctgggccaatcaaaaagacctggatttgtatcttcaaagaatagaagaagcagaaaaaagagatcatagaaaaattggcaaagagatggatttgt

SEQ ID NO: 302956 - DNA, 484 bp, Unknown
  Bacterial polypeptide expressing nucleotide sequence isolated from the Sargasso Sea
ggtaggctttggcaatgttcaaccatacagcttgattttaatctccctgagcgttttgatatgcgatatgttggaagcgacggcaagcaatatcatccaatcatgattcatcgagcattacttggttcagtggaaagattctttggaattttagtggaacattttgcaggtaaattcccattatggcttgctcccgttcaagtttgcgtgattccgattaaccaaaaacaacatgattatgcagaatctgtgtataagattttgaaaaaaaatggcctaagagccgaaattgacttgagaaacgaaaaaataggctctaaaattcgcgatcacaccttaaataaggtaccttacatgattgttttaggtgaccgagaagtttgtgatgaggaaatcactattaggactcaaaagggtgatgacttgggtaatatgaaagtagaaagctttctaaaaaggctttctgaagaaataagtaattaag

SEQ ID NO: 302957 - DNA, 753 bp, Unknown
  Bacterial polypeptide expressing nucleotide sequence isolated from the Sargasso Sea
gaaattttaaaatttcttgaatttttagaagaagtttatgaagattttggcttcaaaaagccaacctactatctctcacttaggccagaaaataggaccggagatgacgagatgtgggattattcagaatctattatgaaaaatatattagaaaattcaaatatggatttttctgtccaagctggagaaggtgctttttatggaccaaagattgacattactgttcctgacgcattaggaagagaatggcaattaggaacagttcaattagatttttttgcgtcaggcaaatttggtttaaattatataaatcaagatggtgaaaaagaagatgttgtattaatacatcgtgcaatttttgggtcccttgaaagattttttggaattttaatagaacattttgggggatcttttcctttatggcttgccccagaacaatatatagtaattccaatatcagaagatcattatgaagactgtaaaactatcgagaaaagtctttctttaatgggcttgagagggaaggttgatctatcaagtgatagatttaacaataaaattagaaaagctcaaaaaatgaaaatacccttaatgataattattggcaacaatgaggttgaaaatagttcgttaaccattagactaagaaatggtgaaaatttaaatgatgttaaaattaaaacattagaaaaaatattaaaaactaatataaaaataaatgatgatgagggaattaaattagctttcattaag

SEQ ID NO: 302958 - DNA, 798 bp, Unknown
  Bacterial polypeptide expressing nucleotide sequence isolated from the Sargasso Sea
tctgtttatcatcatggcgatacttggcatgatttgtgcagaggtccgcatctaacctcttccagtaaaattggtaaagccttcaaattaacaaaagtttcgggagcttactggcgtggtgactctaataatgagatgcttcaaagaatttatggtactagctgggcatctaaaaaagatttagacgaatatttaaaaaggatagaagaagcagaaaaaagagatcatagaaaacttggtaaggaaatggatttatttcattttagagaagaaagccccggctctgtcttttggcatgaaaagggctggtctttatttcagaaattaataaattatatgcgagctagacaggatgctgctggatatagagaagtaaacactcctgaggtattagatagattgttgtgggaaaaatctggtcattgggaaaaatatggagagaacatgtatacttcagaaactccagatgaaaaagtttttgcaattaagccaatgaattgtccaggccatatccaagtttttaatcaaggtttaaaaagctacagagatttacctttacggataacagagtttggaaaagttcatcgatatgagccatcaggagcacttcatgggcttttaagagtaagagcctttactcaagatgatgctcatatcttttgcaccgaggatcaaatcactagtgaatgtttaattgttacaaatttaatcttagatatttataaagatttaggttttgaaaatgtagttcttaaatatgcagatcgaccagaggttagagttggtgatgataaagtt

SEQ ID NO: 302959 - DNA, 686 bp, Unknown
  Bacterial polypeptide expressing nucleotide sequence isolated from the Sargasso Sea
tatgactaacacaattaaaattacgtttcctgatggtaacactaaaaatgtaaataaagcaattagtggtttagaaattgctgaatccatttcaaaatctttagcaaaagaatcaattgctataaaaataaataatgaaattgtagatctttcgagaaaaatagaagaggattcaaaagttgaaattattaaaaaaaatgatgacgaagcactaaatcttatcagacatgattgcgctcatgtaatggcagaagctgtacaaacattatttcctaatacgcaagtaacaataggcccagcaatagaaaatggtttttattatgactttgcaaaagaagcacctttcacaacatctgatttagaaaaaatagaaaaaaaaatgcatgagataatcagtaaaggagaaaactttactcgggaagtttgggagaaaaaagatgctattgatttttttaataataaaggtgaaaaatataaaaccgaattaataaaagaattaccaaatgatgaaactatatcaatttataaacaaggtgattggctagatttatgtaaaggacctcatatgccttctaccaaacatgttggaaaagcttttaaactaatgaaggtagcaggtgcttattggagaggtgattcaagtaatgctatgttaacaagaatctatggaacggcttggagaaatg

SEQ ID NO: 302960 - DNA, 933 bp, Unknown
  Bacterial polypeptide expressing nucleotide sequence isolated from the Sargasso Sea
aagttaatgaaagttgcaggagcttactggcgaggtgactcaaaaaatgcaatgctcacacgtatttatggaaccgcgtggagaaatgaaaaagaattagaaactcatttattacaaattgaagaagctgaaaaaagagatcaccgtaaacttggcaaagaaatggatttgtttcattttcaggaagaggctccaggcgcagttttttggcaccctaaaggatggcgcttatttcaatcattaataaattacatgcgaaaaagacaagataaggctggttatgttgaaacgaacacacctgacatgatggataaatctctttgggaaacatctggccattgggataagtttagtgaaatgatgtttagaaccgaagcaaaagatgaaaagatatatgctatcaaaccaatgaactgtcctggcgcagtagaaatttttaaacaaggcttaaaaagttatcgtgaccttccctttctcttatctgagtttggtaaagtacaccgctatgaaccatcaggtgcgttacacggtctaatgcgagtgagggcatttacacaggatgatgcgcatattttttgtacagaagatcaaataacccaagaaagcaaaactgtatgtgatttaatacttagtatctataaggattttggttttgataatgttagaattaaattttctgatcgacctgaaaaacgggtaggtgatgattcggtgtgggataaggccgaggcagcattaatgcaagctatggaagcaacaggacttgagtatacacttaatcctggtgagggtgcattttatggtccaaaattagaatttgttttacgtgatgctattgggcgcgactggcagtgtggaacgcttcaagttgatttgaatttacccggaagactgggggcatcttatgtagctgaagacggtcaaaaaaaggtg

SEQ ID NO: 302961 - DNA, 893 bp, Unknown
  Bacterial polypeptide expressing nucleotide sequence isolated from the Sargasso Sea
catagaaaaataggaaaagaaatggatttatttcattttagagaagaaagtccaggatcagttttctggcatgaaaaaggctggttgttatttcaaaggttagttgagtatatgagaatgaaacaaaggttggcaggatataaagaaatcaatacacctgaacttcttgacaaatctttatgggaaaaatctggtcattgggaaaaatttggcaatcatatgtttacctcggagacaccggatgaaaagacttttgcggtaaaacccatgaactgtccaggttgtgttcaggtttttaatcaaggtctaaagagctatcgagacttacctttaaaactttccgaatttggaaaagtacacagatatgaaccttcaggagctttacatggattattgagagttagagcttttacccaagatgatgcccatatattttgtactgaagatcaaataacagaagagtctctatcagttacaaatcttattttggaaatatataaagacttaggctttaaagatgtaatattaaaatattcagatcgaccggaacagagagttggagatgatagtatatgggacaaatcggaggctgcactattaactgcaataaaaaaatctaaactcgaatatacaatcaataaaggagaaggagctttttatggacctaaaattgaatttgttttaagagatgcgattggaagagattggcagtgtggtactttacaagtagacttaaacttacctggtagattgggagcatcttacgtagctaaagatggaaataaaaaaattccagtaatgttacatagagctttatttgggtcattagagagatttattggaattcttattgaaaatatgctggtaagttgcctttctggttgtctccggca

SEQ ID NO: 302962 - DNA, 889 bp, Unknown
  Bacterial polypeptide expressing nucleotide sequence isolated from the Sargasso Sea
aattgataatggattttattatgactttttaagaaaagaaccattcactgaagaagatttaagaaaaatagaaaaaaaaatgttagaaattgtagatagagatgagcctacccgtagagaagtatggaaacgtgacaaggccgttgaacactttaaaaaagctggagaaatttataaagctgaaataattaaagatatacctgaagaagaagaggtttcagtttatttccatggaaaatggcacgatttatgtagaggacctcatttgatgtctactggaagaattggaaaatattttaaacttatgaaagtttctggagcatattggagaggagattctaacaatgaaatgcttcaaagaatttatgggacttcatggccatctaaaaaagaattagatgattatttgaatagaatagaagaagcagaaaaaagagatcacagaaaattaggaaaagaaatggatctatttcattttagagaagaaagtccaggctctgttttttggcatgagaaaggttggaatttatttcaaaaactaatttcttatatgagagcaaaacaggacgaagctggatacaaagaaataaatacaccagaaattttagatcgatctttgtgggagaagtcaggtcactgggaaaaatttggagccaatatgtatacatctacaacacctgatgaaaaaatatttgcaatcaaaccaatgaattgcccaggatgtgttcaggttttcaatcaaggactaaaaagttatagagatttgccacttaaaatgtctgaatttggaaaagttcatagatatgaaccatcaggagctttgcacggccttttacgagtaagagcatttacacaagatgatgcacacatattttgttctgaagatcaa

SEQ ID NO: 302963 - DNA, 852 bp, Unknown
  Bacterial polypeptide expressing nucleotide sequence isolated from the Sargasso Sea
agtaattgataatggtttttattatgattttgctagggaggaaccttttactcatgacgatcttcaaaaaatagaaaaaaaaatgaaagaaattattgaaagagatgagccaactcatagagagatatgggaaagagataaagcaatagaacatttcaaaaaagctggtgaaatttataaagctgaaataatcaaaagtattccaaaagaggaagaagtatctatttattttcatggaaaatggcacgatttatgtagaggtccacatttactttcaacaggcagaattggaaaatattttaagttaacaaaagttgctggagcatactggcgtggagattcaaataatgaaatgcttcagagaatttacggaacaagctggtcttctcagaaagatttagatgaatatttaaaaagaatggaagaggctgaaaaaagagaccacagaaaattaggtaaagaaatggatttatttcattttagagaagaaagtccaggttcggttttttggcatgaaaaaggttggaatttatttcaaaaattaatttcatttatgagatccaagcaagatgcagctggatataaagaaataaatacaccagaagttcttgatagaactttatgggaaaaatctggtcattgggaaaaatttggcgaaaatatgtatacatcaacaactccagacgaaaaaatttttgcaattaaaccaatgaattgtcctggttgtgttcaagtgtttaatcaaggattgaaaagttatagagatttacctcttaaaatgtcagaatttggaaaggtgcatagatatgaaccatcaggtgctttacatggtttattaagggtaagagcgtt

SEQ ID NO: 302964 - DNA, 346 bp, Unknown
  Bacterial polypeptide expressing nucleotide sequence isolated from the Sargasso Sea
tttgtgcgcgggccctcacgtggagtcgacgggtaagctcgaccagaaggcgtttgacctcgaaagcgtctccggtgcgtactggcggggcgacgaaacgaagccgatgttgcagcgtatctatggcacggcgtgggaaaacgccgagcaattgcaggcgtacaacgatttcaaggctgaggcgaagcgccgcgaccacagaactatcggacaagatttgagcctcttctcccttcagcaagacaacgcgggcggtggattggtgttctggcatccgaagggggcatacatgcgacacatgattgagacgtactggaaggatctccacctcgcgcgcggctactag

SEQ ID NO: 302965 - DNA, 946 bp, Unknown
  Bacterial polypeptide expressing nucleotide sequence isolated from the Sargasso Sea
aaagaaggacttgaaactataaggcacgacacagcgcatattttgcaaatggctgtacaagaattgtttccaggaactcaagtaaccattggccctgttatagaggatggtttttactatgattttgcaagaaaagagccttttacagatgaagatctgaacaaaattgagaacaaaatgagagaaatagttgaaagagacgaacaaacaaccagagaagtttggcctagaaaaaaagctatcgatcattttaaaaaaattggagaaatttataaagcagaaattattaaaaatattcctgaggaggaagaggtttcgatttattttcatggaaaatggcatgatctatgcagaggtcctcatttaacatctactggaaaaattggaaaatattttaaattaactaaagtatcaggagcatattggagaggagactcgaaaaatgagatgcttcaaagagtatatggaacaagttggtcgacacaaaaagaattagatgattatcttgaaaaaatagaagaagctgagaaacgtgatcatagaaaattaggcaaacttatgaacctttttcattttcgtgaagaaagtccaggagctgttttttggcatgaaaaaggatgggcattattccaaaaacttatatcgtatatgagatataagcaagaagatgcgggttacaaagagattaatactcctgaaattttagatagatctctttgggaaaaatctggacactgggaaaaatttggagccaatatgtatacttcagaaacgcctgacaaaaaaatttttgctattaaaccgatgaattgtccaggatgtgttcaggtttttaatcaaggtttgaaaagttatagagatcttccatttaaaatgtcagaatttggaaaagttcacagatatgaaccatctggtgctttacatggacttttacgagttagggcat

SEQ ID NO: 302966 - DNA, 930 bp, Unknown
  Bacterial polypeptide expressing nucleotide sequence isolated from the Sargasso Sea
cgaacttcctgataactcatcagtctctatcataactatccaatctgacgagggcttagagataatgagacatacattaacagcccaagttcttgcaaaagctataaagaatttatattcagattctaagttagctataggacctacaattgaaaacggcttctactatgatgtttctactgaaacacctatatcggttgaggatcttccaaaaatagaaaatgaaatgaaaaggatactagaaaataagtctaatattattaaatcacttcactcagaaaaagatgcaaaaaaaatgtttaaagagaaaggagagactctcaagatagaaattatagatgatgcagaacaaactgataattttcaaatttatacaaacgctgatgaagattttattgatttatgtagaggacctcatttaccaaatctatcttttattggagcatttaaacttactaaagtctctggagcatactggaagggagattcttcaaatgaaatgcttacaagaatttatggtacagcatggagaaatgaaaaagagcttcaagaacatctaaaatctattgaggaagctgaaaaaagagatcatagaaagattggaaaagatatggatcttttccatttccaagatgaagctccaggtatggttttttggcatccaaagggctggactatttattcaactttaaaatcttatatgtcagatatgcaaaagaaagctgattataaagaaattaatactccatcagtcatagataggaagctttgggaaaaatcaggacattgggataaatatagagaaaatatgtttatcactgagattgatgaagagcatgcaaatgagaaaagagttaatgctttgaagcctatgaactgtcctggacatgttcaggtttataaccatggcataagatcatataaagaact

SEQ ID NO: 302967 - DNA, 910 bp, Unknown
  Bacterial polypeptide expressing nucleotide sequence isolated from the Sargasso Sea
atatatacccgctaaagataaggaaggattagaaacaattagacatgacacagctcatgttttagctatggccgtacaagaaatttttcctaagactcaagtaactattggaccagtaattgataatggattttactatgactttgcaagaaaagatccatttactgaagaagatttacgtaaaatagaaaagaagatgatggaaattgttgagagagacgaacctactcacagagaagtttggaaacgtgataaagcaatcgaacatttcaaaaaagctggagaaatttataaagcagaaataattaaggatattcctaaggaagaagaagtttcagtttattttcatggaaagtggcacgatttatgcagagggccacatttaagttctactggtaaaattggaaagtattttaaacttacaaaggtttcgggtgcatattggagaggtgactcaaaaaatgaaatgttacaaagaatttatggtacatcttggccatctcaaaaagaacttgataactatttaaaaatgattgaagaagctgaaaaaagagatcatagaaagttaggcaaagaaatggatttatttcattttagagaagagagcccgggttcagttttttggcacgagcgaggatggaatctttttcaaaaattaattgattatatgaggttaagacaaaaaaaagcaggttataaagaaattaatacacctgagattttagatagaggtctatgggaaaaatcaggccattgggaaaaatttggcgagcatatgtatacttctactacacctgatgaaaaaatttttgcaattaaacctatgaattgtccaggttgcgtccaagtttttaatcaaggattaaaaagctatagagatttacctcttaaaatgtcagagtttggaaag

SEQ ID NO: 302968 - DNA, 776 bp, Unknown
  Bacterial polypeptide expressing nucleotide sequence isolated from the Sargasso Sea
atatctcgttttcttggaggaagcgaaaaaaagatatcatagaaagattgccaaagaaatggaactctttcatatgcaggaagaagccccaggaatggttttctggcatcctaatggatggagaatataccagattcttcaaaattatatgcagaaagagttagaaagaggtgggtattctgaagttaaaactccgcaggtagttggcagaaaattatgggaagactctggtcattgggataaatttcaggaacatatgtttatagttgaggtagaagaagaaggaattaaagaaaaaaaaattaacgctcttaagccaatgaattgcccttgccatattcagatatataatcaaggtattaaatcatatagagatttaccacttagaatagcagagtttggttcttgtcatagatatgaaccttctggagctatgcatggtataatgagagttagaggatttgtacaagatgacgctcatattttttgtacagaagaacaaatagaagatgaaacaaaaaaattcattgaattattatcaaaagtttatcaagatttgggatttaaagagtacaaaattaaattctcggatagaccagaaaaaagagctggatctgatgaaacttggcttaaagctgaagaagcattaaagaatgctacaaatgctgcaggatattcattcgaattgaatccaggagaaggagctttctatggtccaaaattagagtttgtacttactgacgcaataggtagagattggcagtgtggaaccttgc

SEQ ID NO: 302969 - DNA, 760 bp, Unknown
  Bacterial polypeptide expressing nucleotide sequence isolated from the Sargasso Sea
caggcttacgacaccttcgcagcgcgtggcgaaagctacaaaatggaaattctcgagcagaatgtcgccaaagacgaccagccgggtttgtaccatcacgaagaatacattgatatgtgccgcggccctcatgtgccaaatatgcgtttttgccagcatttcaaaattatgaaagttgccggagcttattggcgtggtgactcgaaaaacaaaatgctgcaacgtatttacggtaccgcatgggccgacaaaaagcagctgggtgcctatttaacccgtttggaagaagctgaaaaacgtgatcaccgcaaaattggtaaagcactggatttattccactggcaggaagaagcgccaggcatggtgttctggcataacgacggctggactatttacactgagcttgaaaaatatatccgtgaaaaactgcgctcatttgattatgacgaagtaaaaggcccattgatgatggaccgttcgttgtgggaaaaatcgggtcactgggacaaatactcaagcgccatgtttaccactgaatcggagaaacgtgaatacgccattaaaccgatgaactgcccgggtcacgtgcagatttttaatcagggtttgaagtcgtaccgtgatttaccgctgcggatggctgagtttggctgttgtcaccgtaacgagccgtctggttctttgcatggtttaatgcgggttcgtggttttactcaggacgatgcccacattttctgtactgaagagcagattgaagcca

SEQ ID NO: 302970 - DNA, 787 bp, Unknown
  Bacterial polypeptide expressing nucleotide sequence isolated from the Sargasso Sea
gaccaaaagcgttccgcttggttctacttctcagcatattgcggaccttatagggcctggtttagctagagcagttgtagttgctaagattgatggtgaattgaaagatctaaattttcctattgaaggagattgtagcatcgaactatttactggggatacacctgaggggcatgatactcttttacattctaccgcacatttaatggcacaggcagtaaaggagttataccccaatgcaaaagttactattggccccaccattgaaaatggattctactatgattttgatgtggatgtctctttctcagatgaggtattagctaaaatagaaagcaagatgcgagaactagcaaaagcaggccaggagatacatagacatgagatctctgcgggagatgcaaaagcactctttaatgatatgggagaggattataaggttgaaattattgagcaaataaatcctgatgatgtgataactgcatataaacaatctgattttacagatctatgtagaggtcctcatgtctctaacacttctaagataaaacactttaagcttttatctacatccggtgcttactggcgaggaaatgaaaataataaaatgctccaacgtatctatggcacagttttttctactaaagatgcattaaagactcatctacataatcttgaagaagccaaaaaaagagaccatagaaaacttggcaaagagttaaagctctttgcatttgatgatgaggtaggacccagtcttcctttgtggtgccaaatggtgctgtga

SEQ ID NO: 302971 - DNA, 838 bp, Unknown
  Bacterial polypeptide expressing nucleotide sequence isolated from the Sargasso Sea
atgctgcaacgaatttatggaactagttggtctactcagaaacagttagatgattatttgaacagaattgaggaagcagaaaaaagagaccatagaaaattaggaagagaaatgaatttatttcattttagagaagaaagtcccggctctgttttttggcatgaaaaaggatggaatttatttcaaaaattaatttcttatatgagaaaaaaacaagatgaatcagggtacaaagaaatcaatactccagaaattttagatagatctttatgggagaagtcaggacattgggaaaaatttggagccaatatgtatacatcaacgactcctgatgaaaaagtatttgcaattaaaccaatgaattgtcctgggtgcgttcaagtttttaaccaagggctaaaaagttatagagatttaccactgaaaatgtcagagtttggaaaagttcatagatatgagccatcaggagctttacatggacttttaagggtaagagcatttacacaagacgatgcacatatattttgctctgaagaacaaattaccgaagaatgtctaaatgttacaaatttaattttagaaatctataaagatttaggttttgaaaatgtaattttaaaatattctgatagacccgatgtccgtgtaggagatgataaagtctgggataaatcagaaaaagcattattagaagcaattaaaacttctaaacttgaatatagtataaataagggtgagggagcattttatggacctaaaatagaatttgtccttagagacgcaattggaagagactggcaatgtggaacacttcaagtagatttaaacttaccaggaa

SEQ ID NO: 302972 - DNA, 926 bp, Unknown
  Bacterial polypeptide expressing nucleotide sequence isolated from the Sargasso Sea
acctgatggagaggtgatagctttatatcatcatgaagaatacatagatatgtgtcgcggacctcacgttactaacatgagacatctaaaagctttcaagctaactaaaacttcgggagcatattggaaaggagattcaaaaaatgaaatgcttcagagggtctacggtaccgcctggccagattcaaaggatctagataattatatattgcagcaagaagaagctgaaaaaagagatcatcgtaaacttggaagacaacttgatttatttcattttcaagaagaagctccaggaatggttttttggcatcctaaagggtggtctatttattctgctcttaaaaactttattaaagaaaaacaagatgaatacaactatcaagaaattaatacaccacaaattgtagatagaaaattgtgggaagcttcaggccattgggataagtatcgagaaaacatgttcattaccgagatagatgaagaacatgccaatgaaaaaagaaccaatgccctcaagcctatgaattgtccttgtcatgttcaggtattcaatcaaggtctcaggtcttacaaagatcttcctataaggttttctgagtttggctcctgtcacagatatgaagcttcaggaactttacatggattgatgagagtaagaggatttacgcaggatgatggtcacatcttttgtacagaggatcaaattcaagacgagactaagaactttatagagcttttatcggatatttattctcaattaggttttgaagcctttgaaatcaagctttctactagaccagaagtcagagcaggcacagatgaaatttgggataaggcagaattagctcttgaaaaagccattaagaatttgaaactaccttatgaattggtggaaggggatggagccttctatgtcctaaattaga

SEQ ID NO: 302973 - DNA, 679 bp, Unknown
  Bacterial polypeptide expressing nucleotide sequence isolated from the Sargasso Sea
aatgccgaatataactttacctgatggaaaaaagttaagttttaaaaataaggtaaccggtttagaagttgctgaaaagataagcaaatcactttcaaaacaagcacttattatgagcgtgaacggtgaattgaaagatctaagtttttctattcaaaaagactcttcagttaaaataattaccaataaagataaagaaggtttagatgtaataagacacgatgctgcccacataatggcaatggcagttcaagaattatttccaggaacccaagtaacaattggccctgtaattgaaaatggcttttattatgattttgttagaaaagaaccatttacaagtgatgatttaaaaaaaattgaaaaaaaaatgtcagaaataattgatagagatgtaaaaacgaaacgagaagtatgggaaagaaacaaagctatcgcgcatttcaaaaagataggagaaaagtacaaagcagaaatcattgagagcatacctgaaaacgaggaactctcagtttatcatcatggagatacttggcatgatttgtgtagagggccccatctagactcatcgaagaaaattgggaaagctttcaaattaacaaaagtctctggtgcatattggagaggtgattccaataatgaaatgttacaaaggatttatggaacatgctggagctct

SEQ ID NO: 302974 - DNA, 937 bp, Unknown
  Bacterial polypeptide expressing nucleotide sequence isolated from the Sargasso Sea
attggctgaaaaaattagtaagtcactttccaagcaagctttgattgtgagtgtggatggacaattaagagatttagattttaaaattaaaaaagattcagcagtaaaaatatttacatcaaaagataaagaaggattggaaacgataagacacgatactgcacatatattggctatggcagttcaagaactatttcctggaacacaagtaactatcggacctgtaattgaagatggtttttattatgattttgctagaaaagaaccattcacaaaagaagatctagaaaagattgaaaataaaatgaaagaaattgttgatagaaatgaaaaaactcatagagaagtttggaagagaaatgatgcaattgaacactttaagaagaatggagaaatttataaagctgaaataattaattcaataccagaagatgaggaagtttctgtctattttcatggcaaatggcatgatctttgcagaggaccacacttaagttctacaggaaaaattggaaaatttttcaaattaacaaaagtatcaggagcttactggagaggagattccaataatgaaatgttacaaagaatttacggaactagttggtcaactcaaaaggagttagatgattatttgtttagaatagaagaagcagaaaaaagagatcatagaaaattaggcaaggagatggatttgtttcatttcagagaagaaagtcctggctcagtgttttggcatgaaaaaggctggaaattatttcaaaaattagtttcttatatgagaatgaaacaggatcaagcaggatatagagaaatcaatacccctgaaattttggatagaactttatggggaaaaatctggtcattggggaaaagtttggagcaaatatgtacacttcaactacacctgacgaaaaggtatttgcaattaagcccatga

SEQ ID NO: 302975 - DNA, 842 bp, Unknown
  Bacterial polypeptide expressing nucleotide sequence isolated from the Sargasso Sea
acctttaaaactttcagaattcggaaaagtacacagatacgaaccgtcaggagctttacacggcttgctaagagttagagcctttactcaagatgatgcacacatattttgtaccgaggatcaaattactgaagagtcattagctgtcacaaatttaattttggaaatttacaaagatttaggattcgaaaatgtaattttaaaatattctgatagaccccaacaaagagtaggtgaagataaaatttgggataaatctgaagccgctctattaactgcaatcaaaaaatctaaattagaatacacagtcaataaaggggagggagctttttatgggccaaaaattgaatttgttctaagagacgctataggaagagattggcaatgtggtacccttcaagttgatttaaacctgcctggaaggctaggcgcaacttatgtagctaaggatggaactaaaaaagtccctgttatgttgcacagagctttgtttggttcgctagagagatttattggaatactaatagaaaattatgcgggcaagttgcccttttggttatctccggcacaagcagtagtatgttcaataacagatgagaacaataagtatgtgaaaaagttatttgaagatttgtttaaagaaggtataaaatgtgaaatggatttaagaaatgagaaaattaattataaaataagagaacattcgttagcaaaaattccatacattatagtttgtggcaaaaaagaagtttcggaaaatactgttacagttagaaaacttggttcagataaacaagaaacaattaaaaaagagaaacttatcaagaatatgctagatttaa

SEQ ID NO: 302976 - DNA, 787 bp, Unknown
  Bacterial polypeptide expressing nucleotide sequence isolated from the Sargasso Sea
catgtatacctctaagacaccagatgaaaaaatttttgcgataaagccgatgaattgtcctggttgcgttcaagtttataatcagggattaaaaagttatagagatttgcctcttaagatgtcagaatttggaaaagttcatagatatgagccttcaggtgctcttcatggattattaagagtaagagcatttacacaggatgatgctcatatattttgcactgaagatcaaattacagatgaatgtttattagtaacaaatttaattttagaaatttataaagatctaggatttgaaaatgtaatattaaaatattctgacaggccagaagtaagagttggaaatgatgatgtgtgggacaaatcagagtcagctttattgaaagcagttaaagcatcaaaactagaatacagcataaacaagggagaaggagcgttttatggtccaaaaattgagtttgtgcttagagatgccataggaagggattggcagtgtggcacattacaggtcgatcttaatttacccgagagattaggagcttcatttgtagataaggacggtacaaaaaaaattcctgttatgctacatagagcattatttggatctttggaaagatttattggtatattaattgaaaattattcaggaaaacttcctttttggattgcacctttacaagcaatggtgatacctgtttcagaagaatttgatagttatgctaaagaggtcaataaaaaaattaataatattggcattaattctgaagtagatttaaaaaatcacaat

SEQ ID NO: 302977 - DNA, 538 bp, Unknown
  Bacterial polypeptide expressing nucleotide sequence isolated from the Sargasso Sea
ctttttttatggccccaaaattgaatttgttttaagagatgcatttggtagagattggcaatgtggaactttgcaggttgatttaaatttaccagaaagactcggagctacatttgtagataaagatggaagtaaaaaggtacctgtgatgcttcatagagcattatttggatctcttgaaagatttattggtatacttatagaacattattctggaaaacttccattttggattgcacccttgcaagcaatggttattcctgtatcagatgattttaatgattatgcaatagaagttacaaaaaaaattaaagatgttggtattaattgtgaggcggacttaaagaaccacaatctaaattataaaattagagaacattcaatgctaaaaacaccacttttgttgatttgtggtaaaaaagaagttgacagtggtaccgtaactattagaagattggattctaataaacaagaaagcatggaattaaatacatttctaaaaaagtttgctactttaaataaagcaccttcaaattaa

SEQ ID NO: 302978 - DNA, 699 bp, Unknown
  Bacterial polypeptide expressing nucleotide sequence isolated from the Sargasso Sea
atatttataaagaccttggatttgaaaatgtaattcttaaatatgcagatagacccgaagtgagagttggtgaagacgaagtttgggacaaagcagaagcatccttacttgaagcggtgaaagcatcaaagttagaatatagtattaacaagggagaaggagcattctacggtcctaaaattgagtttgttctaagggatgcaattggtagagattggcagtgtggaactttgcaagttgatttaaatttacctgaaagattaggggcttcctatatcgataaagatggaactaaaaaaattcctgtaatgttgcacagagcactatttggatctttggaaagatttattggaatcttaattgaaaattattctggtaaatttccattctggatatcacctttacaaacaatggtaattcctatttcagaagaatttaatgactatgctattgagatatctcagaaaattaaaaatgtaggtataagttcttctgttgatttaaaaaatcaaaatttaaattataaaataagagatcattcgttagctaaaatacctcttttgttaatttgtggtaaaaaagaagttgactccaattctgtaacgattagaagattagattctaataaacaagaaaatatggacatagacgcattcttaaaaactttctctgctttaaacaaagcatcctcaaactaag

SEQ ID NO: 302979 - DNA, 570 bp, Unknown
  Bacterial polypeptide expressing nucleotide sequence isolated from the Sargasso Sea
aatgcctaatataactttaccagatggaaaaaaacttgattttgtggaaagtattacaggtctaaaaattgcagaaaagattagtaaatctctgctaaaagaagctcttgtaatgagcgtaaatggtgaattaaaagatttagaacatcaaataacaaaagactcatctgtaaaaattttcacatctaaagataaagaggggcttgaaactataagacatgatactgctcatgttttagcaatggcagtacaagaactttttccaggaacgcaagttacaataggtccagttatacaagatggtttttattatgacttctcaagaaaagaaacttttacaaatcaggatttagaaaaaattgaaaaaaaaatgaaggagatagtcgatagagatgaaaaaacttacagggaagtttggaaaagaagttatgctattgaacattttaaaaaaaaaggcgaaatatataaagctgaaataattaataacattcctgagcaagaagaagtgtcaatttattttcatggcaagtggcatgatctttgcagaggtcctcatctaaacttcactgg

SEQ ID NO: 302980 - DNA, 502 bp, Unknown
  Bacterial polypeptide expressing nucleotide sequence isolated from the Sargasso Sea
atgcctataataacattacccgatggaaataatttaaactttccaaaaaaagtcactggtttagaaattgctgaaaaaattagtaaatcgctagctaaacaagcaatgataataggtgttgatggtgaattaaaagacttagattttataattgacaaggactgttctgtgaaaatttttacttcaaagaatgaagaaggactagaaaccataagacacgatacagctcatattttagctatggctgttcaggaaatatttccaggaacacaagttacaataggtccagtaattgaaaatggtttttattatgactttgctagaaaggaaccatttactgaagatgatttaaaaaaaattgaagttaagatgaaagaaatcattgaccgagatgaaaaaactaaaagagaagtatgggaccgggataaagcagtcagacactttgaaaaaaaaggagagctatataaagctgaattaattaaaagtattccaaaaaatgagg

SEQ ID NO: 302981 - DNA, 856 bp, Unknown
  Bacterial polypeptide expressing nucleotide sequence isolated from the Sargasso Sea
ggtcactgggactactaccgcgagaacatgtacacctccgaagtggaggagcgcgagttcgccatcaagccgatgaactgccccggctgtatgctgtactacagcagcagccagtacagctatcgccagctgccgctgaaagttgccgagatcggccacgtccaccgccacgagatgtccggcgcgctttccggtctctttcgcgtgcgtagcttccaccaggacgacgcgcacatcttcatggaggcggatcagatcaaggaccagatcctgggcgtgctcaagctggcggacactgtctactccacgtttggcctgagctatcacttagaactttcaacgcgcccggacaaggcgattggcaccgacgagatgtgggagctggccacgaacggcctgcgctcggctctggaagcgctcgaagcggatacaggccgcggttataaactgaacgaaggcgacggcgcgttctacggcccgaagatcgactttcatatccgcgacgcgattgggcgcacctggcagtgcggcacgatccagctcgacatgttcttaccggagcgctttgatttactgtatgacggccgcgacggcggcaagcatcgcccgatcatgatccaccgcgccatctacggctcgatcgagcgcttcatgggcatcctgatcgaacactacagcggccgctttccgctgtggatgtcgcctgtgcagattgcgtttttaagcgtggccgatcgtcacgcggacgaagcgcacaagatcgcgaagcgctttgtatcagcgggttttcgcacgcacgtagacgactccagcgaatcgatccccaagaaagtgcgcaacgcgcagtcagccaggc

SEQ ID NO: 302982 - DNA, 816 bp, Unknown
  Bacterial polypeptide expressing nucleotide sequence isolated from the Sargasso Sea
gaattgtccatgccatattcaagtatttaatcaaggtttaaaaagttataaggatttacctattcgtcttgctgaatttggttcgtgtcacagaaatgagccctcaggtgcactacacggcttaatgagagtaagaaactttactcaagatgatgcacacatattctgcacagaagaacaaattcaagaagaggtgtctatttttatcgatcttgttttcgaggtttacaaaacttttggttttaatgaaatcattatcaagctatcaacccgtcctgaaaaaagggtaggtagtgaagagatttgggacaaatcagaagaggctcttaccaaagctctcgataataaaaatctaaaatgggaactacaaccaggggaaggtgctttttatggtccaaaaatagaattctctttaaaagattgtcttaatagagtatggcaatgcggaactattcaggttgatttctcaatgcctattagattagatgcaacttatgtagatattgataatgaaaaaagaaatccagttatgcttcatagagcaattttaggatcttttgaaagatttattggaatcttaattgaacaatatgaggcaaaattcccaatttggcttgcgccttatcaaataattttattgagcattaccgatagaaatattgaaaagtgtttaaagtttaatgaattaataaataataacggttaccgatcaaaagttgatattaggaatgaaaaaataggatataaaataagggaagcaaccctcgggagagttcccttaattgcagttattggagataaagaagaggaaattga

SEQ ID NO: 302983 - DNA, 849 bp, Unknown
  Bacterial polypeptide expressing nucleotide sequence isolated from the Sargasso Sea
ggtgataccagcaatgaacaattgcagcgtatctacggcacggcctggggtaacaagaaagacctgaaaacctatctgcatcgcctggaagaggccgaaaagcgggatcaccgaaagattggcaagaagctgggcctgttccacatgcaggaagaagctcccggcatggtgttctggcatccggatggctggtccttgtaccaggaagttgagcagtacatgcgggccaagcagcaccagcatggctaccaggaaatcaagactccgcaggtggtgtcccgtaccctgtgggagaaatccgggcattgggacaagttcaaggacggcatgtttaccaccgagtccgagaaacacgactatgccatcaagcccatgaactgcccctgccacgtgcaggtgttcaaccagggcctgaagagctacaaggatttaccgctgcgcctggcggagttcggttcctgccaccggaatgaagcttccggcgcactgcacggcctgatgcgggtgcgtggatttacccaggatgatgcgcatatcttctgcgaagaagatgcgatccagcaggaagtatcggcatttatcgaaatgctgcacgaagtctatgcagacttcggctttaacgagattctgtacaaactgtctacccgcccggaaaagcgcgtaggttccgatgaagtctgggacaaggccgaggccgccctggaagaagccctgaatcgcgaaggcgttgactgggaattgttgccgggtgagggtgctttctacgggcccaagatcgagtttctcctgaagattgtctcggtcgggtgtggcagtgtggtaccattcaggtcgatttctcaatgccgg

SEQ ID NO: 302984 - DNA, 811 bp, Unknown
  Bacterial polypeptide expressing nucleotide sequence isolated from the Sargasso Sea
tgctgccttgtgagtaacatatctgtaaatattaaaggtcttggtattcaaaaccttcataaagggattacacctcttcaaattatggttgatataaaagaagtatccaaggattctataatttgcaaagttgatggtgagcttaccgatctttctgcacaactattaaacgactgtgatttacaatttatggatgcaaaaagtaaagacggtcacagtgttctcttgcacagcactgctcatctaatggctcaagcagttaaaagattatttcctgaaactaaagtaacaataggcccttttttagaaaataaattttactatgattttgacgttaaaacgccattttcagaagaagatttaaaaagaattgaagaagagatgtataacatttcaaatgaaaatcttgatataattcatgaagaaaaatcaagagatgaggcattaaagttttttgatcaaattggagaagattataaagttgaaattattaacgatttagataaaaatgagattttaaaagtttattctcagggcgaatttactgatctttgtagagggcctcatattccatcaactggagtgattaagcacttcaagcttttatcttcatctgcagcatattggagaggagatgaaaaaaatcaaactcttcaaagagtgtatggtacatcttttcaaaatagtaaagatttaaaaaaatatcttttaatgttagaggagcaaaaaaaacgcgatcatagaaaaattgggaaagaattagatttatttttctttgatgacgaaattggacctggattgcctttatgga

SEQ ID NO: 302985 - DNA, 926 bp, Unknown
  Bacterial polypeptide expressing nucleotide sequence isolated from the Sargasso Sea
aatgatagttctataaaaatttttacttctaaggatagagagggattagaaacaatcagacacgatactgcgcacgtattggctatggccgtacaagaactttttccaaaaactcaagtaacgattggaccagtaattgaaaatggattttactatgattttgcaagaaaagatccatttactgaagaagatttaattaaaatagaaaataaaatgttggaaattattgaaagagatgaaccaactcatagagaagtttggaaacgtgataaggcaattgaacatttcaaaaaatctggtgaaatttataaggcagaaataattaaagatattcctaaagaagaggaggtttcagtttattttcatgggaagtggcatgatttgtgtagagggccacatttaagctctactggaaaaattggaaaatattttaagttaacaaaagttgctggagcttattggagaggtgactctaataatgaaatgcttcaaaggatttatggaacttcttggccatctcaaaaagaacttgataattatttaaaacaaattgaagaagctgaaaaaagagatcataggaaacttggcaaagaaatggatttatttcattttagagaagaaagcccaggctctgtgttttggcatgaaaaaggatggaagcttttccagaaactagtttcttatatgagagttaaacaagatcgagcaggttataaagagattaatactcctgaggttttagatagagcactttgggaaaaatctggccattgggaaaaatatggagaacatatgtatacttctcaaactcctgatgaaaaagtatttgcaataaaaccaatgaattgtccaggacatgttcaagtttttaatcagggattaaaaagttatagagatcttcctttaagaatttcagagtttggaaa

SEQ ID NO: 302986 - DNA, 640 bp, Unknown
  Bacterial polypeptide expressing nucleotide sequence isolated from the Sargasso Sea
agttagagttggtgatgataaagtttgggataagttcgaggccgctctgcttgaagcagttaaagctacaaaattagagtatagtatcaataaaggtgagggagctttttatggtcccaaaattgaatttgtattaagagatgcaattggaagagattggcaatgtggaacattgcaagttgatcttaatttaccagaaagattaggtgcatcttatgttgataaagatggatcaaaaaaagttccagtaatgcttcacagagcattatttggatcgctagaaagatttattggaattctcattgaaaattacgctggtaagctacctttttggataagtcctttgcaagtcgttgtaataccagtatcagatgattttgatgactatgctaaaaaagtttctaatgagataaatgataagggtataaattgtatagtagatttaaaaaaccataatttaaattacaaaataagggaacattcactttccaagataccagttctactaatttgtggtaaaaaagaagttgacagtaatagtgtaactattagaaagttagataataataaacaagaaaatatgaagctagataaatttttagagcaatatactgctttaagtcaagcaccttcaaactaa

SEQ ID NO: 302987 - DNA, 900 bp, Unknown
  Bacterial polypeptide expressing nucleotide sequence isolated from the Sargasso Sea
gaagctaaagatgataaaatttatgctatcaaaccaatgaattgccctggtgctgtagaaatttttaaacaaggattaaaaagttatagagacttaccatttctattatctgaatttggaaaagtacatcgttatgaaccgtcgggtgctcttcatggattaatgcgagtgagagcatttacacaagatgatgcacatatattttgtacagaagatcagattacacaagagagtaaaacggtatgtgatttaatacttagtatttataaggattttggttttgataatgttagaattaaattttctgaccgtcctgaaaaacgcgtaggcgaggattctatttgggataaagctgaggctgcattaatgcaggctatggaagcgacaggtcttgagtacacactcaacccaggagaaggtgcattttacggtccaaaattagagtttgttttacgtgatgcaattggcagagactggcaatgtggcacactgcaagtagatttaaatttacctggaagattgggggctaattatattggagaagatggtaataaaaaaataccagtcatgttgcatagagctctatttggttccttagagaggtttaccggaattctaattgaacattatgcaggtcatcttcccttttggctttcaccattgcaagcagttgttgctacaattacatctgatactgatgagtatgcatatgaagtacaaaaagcattagtatcagaaggaattaggaccgaaatagatacacgtaatgaaaaaattggttataaaatacgtgaacacagtaatagtaaagttccagcaattatcgctgttggaaaaaaagaagctcaagataaaacagtgtcagttagaagaattggatcttctgaaacaaagaccttt

SEQ ID NO: 302988 - DNA, 874 bp, Unknown
  Bacterial polypeptide expressing nucleotide sequence isolated from the Sargasso Sea
ttggaaaagttcggtgataatatgtttacaactgaatcaagagaagaaagagtctatgctcttaagccaatgaattgccctggatgtgttcaagtttataagcaaggtttgaaaagctatcgagacctacctttacgagttgctgaatttggtaaagttcataggtatgagccatcaggtgctcttcacggattaatgagagttagagcctttactcaagatgatgcgcacatattttgtactgaagaccaaataactgaagaaagcaaaaaagtttgtgatctagtattaagtatttacaaagattttgggtttgaagatgtatccataaaattctctgacagacctgagaaacgcgttggcagtgatgagatatgggataaatctgagaaagcacttaaaactgcaatggaagcaaccggactagagtattcactcaatccaggtgagggagctttttatggaccgaaacttgaatttattttgagagacgcgattggaagagaatggcaatgtggaactttgcaagtagacctgaatcttccggagcgccttggaggaaattacattgcagaagatggtttaaaacacaatcctgttatgcttcatcgagccttgtttggttctttagagagatttacaggaattttattagaacactactcaggaaacctccctttatggttagctcctgttcaagcgatagttgcgccaattacatctgatattgatgattatgctattgaagtaaaaaatgaacttaaaaaatcgaatattagaatagatactgatctaagaaatgagaaaataagttataagattagagagaactctctaaaaaaaataccttatatgttgattttaggtaagaaag

SEQ ID NO: 302989 - DNA, 865 bp, Unknown
  Bacterial polypeptide expressing nucleotide sequence isolated from the Sargasso Sea
tgggaagcatctggtcattgggaaaaatatcaagagaacatgtttatagttgaagtcgatgaagaacatgcgcgagaaaaagcagtcaatgcactcaagccaatgaattgcccatgtcacgtacaagtttataatcaaggtcttaagtcatatcgtgatttgccgcttagaatggctgaatttggcagttgtaatagatatgaaccttcaggtgctctacatggcgtaatgcgtgtccgcggttttactcaagatgatgcccatattttttgccgcgaggatcaaattgaatccgaaacaaaaaaatttataaacttcctatctgacgtctacagagatttaggctttgaaaaattttccatcaaattttccgatagaccagaaaaacgttcaggcagcaataaggtctgggataaggctgaagacgctttgaaatcagcaacaatagctgctggttatgattttgaaataaacccgggcgaaggtgctttttacggtccaaagcttgaatttgtcttaacagacgcaattggtagagactggcaatgtggcactctccaagtagattttgttttacccgatcgattagatgccaattatgtgggagaggatgggaataaacatcgcccagtcatgctccatagagcgtgtttgggctcttttgaacgcttcatcggaatactgatcgaaagttttgcaggtcggttaccattttggctcgcacctagacaagtcgtcgttgcagccattgtctctgacgcaagtgattattgtgaaaatgtagtaaacgctctgagagccaaaggcatacgggcagaggtcgacttacgaaacgagaagattaattacaaagttcgcgagcatt

SEQ ID NO: 302990 - DNA, 869 bp, Unknown
  Bacterial polypeptide expressing nucleotide sequence isolated from the Sargasso Sea
agttgcggctcaggtgttagctcgtgctataaaaaatctttacccaaaagctaaattagccatcggcccaaccattgaaaatggtttttactatgattttttatctgatgagagggtttctatagacgatttaccaaaaattgaaaaagaaatggagaagattgttgctgaaaaatctgacattaccaaaacgattcattcaaagaaagaggcgataaagaattttgctaatattaaagaagattacaaggttaagatcatcgaagactctgagcaagaggataactttcaactctacaatcaaggtgataccggctttatagatttatgtcgcggccctcatttaccaagtttagataaagttggagcttttaaacttacaaagatcgcgggtgcatattggaaaggcgattcacaaaatgaaatgttgtctcgaatttatggaacggcttggaaaaatgaaaaagatcaaaaaaaatatttaactcttttagaagaggctgaaaagcgagaccatcgcaaacttgccaaagaaatggatttgtttcatttgcaagaagaggcacctggaatggttttttggcatgcaaaaggttggtcaatatatgtagctttgcaaaactatatacgtaataagcaaattgctaatggatacgaagaaatcaacactcctttagttgttgatcgtaaactatgggaggcttcaggccactgggacaaatatcgtgaaaatatgttcatcacagaaattgatgaagagcatgctaatgaaaaaagagtaaatgctcttaagcccatgaactgcccctgtcatgtccaggtatataatcagggtcttaaatcctacaaagaccttccagtgagacttg

SEQ ID NO: 302991 - DNA, 688 bp, Unknown
  Bacterial polypeptide expressing nucleotide sequence isolated from the Sargasso Sea
gaaaaacaaccaatgctgcagcgcatatacgggaccgcctgggccagtaaaaaggatttagaagattacctcgagagattagttgaagcggagaagcgggatcatcgtcgattggcagcagaacttgatttagtttcatggcctgaagatttagggccgggattggctgtatggcatccaaagggttcattgattcgcaaagtgattgaagattacagtcgaaatagacatgaaaatggtggttataattttgttttcagtcctcatatagctaaatcagttttatgggaaaccagcggacacttggatttttacgctgacgggatgtatccacccatggaaatggatggagctacttactatccaaaaccaatgaactgtccttttcatgtaatggtttataagagttcacaacgaagctatagggatttacccacacgttattttgagcttggaactgtttatagatatgagctttcaggtgcagttcatgggctccttcgaagtagaggattcactcaagatgattcccatattttttgtacacgtgagcaggttccagcagaactatcttcccttttagctttctgtctttctttgctaagagattttggttttaccgattttcaagcaaaactttcaacaagacctccggataaatctgttggtgatgatgaattgtgggatc

SEQ ID NO: 302992 - DNA, 475 bp, Unknown
  Bacterial polypeptide expressing nucleotide sequence isolated from the Sargasso Sea
atgccaataattaccttgcctgatggttcaaaaaaggttttcgaaaaatctgtaactattctagaaattgcccaaagtataggcgctggattagctaaagcaacaattgctgggaaagtaaatgatgttcttcttgatgcaacaattcctataaataaagattccaaagttgtaatcatcacatcaaaagataaagaaggaattgaaataataagacattcttttgctcaccttattggtcatgcagttaagcaaatttactctgatattaaaatggcaattgggccagtaattgaagatggtttttattacgatattttttctaaatacagatttactcctgaagatttaataaagatcgaaaatagaataaataaattaataaaaacaaattatgaagttgaaattttacaagtttctaaagaggaggcaattaaaacttttaaagaaagaggaatgagacttttaaattacg

SEQ ID NO: 302993 - DNA, 916 bp, Unknown
  Bacterial polypeptide expressing nucleotide sequence isolated from the Sargasso Sea
aattagcaagtctctatcaaagcaagctttattaattagtgttgatggagaattaaaagatttaaatcatagtatttacaaagactcttcaattaagatatttacatcaaaagataaagaagggttagagaccataagacatgatactgctcacatactcgctatggcagttcaagaattatttccagggacacaagttacaatagggccagttattgaagatggcttttattacgattttgcaagaaaggaaccttttacaacagaggatttagaaaaaattgaaaacaaaatgaaagaaatagtagatcgagatgaaaaaacttacagagaggtttggaaaagaaatgatgcaattgaacattttaaaaaaaaaggagaaatatacaaagctgagataatagaaagtattccagaaggtgaagatgtgtccttatattttcatggagattggcatgatttatgcagaggccctcatctaagttcaactggtaaaatcggcaaacattttaaattaacaaaagtctcaggtgcttattggagaggtgattcaaataatgaaatgttgcaaagagtatacggaacaagttggtctacgcaaaaagagttagatgattatttaaatagaatagaagaagctgaaaaaagagatcacagaaaaattggtaaagaaatggatttattccattttagagaagaaagtcctggatctgtattttggcaccaaaaagggtggagtttattccaaaaacttatttcatatatgagaatgaagcaagaaactgcagggtatcaagaaataaatactccagaaatattagatcgctcactctgggaaaagtctggtcattgggaaaaattcggtgcgaatatgtatacttctactacacctgatgaaaaagtatttgcaataaaa

SEQ ID NO: 302994 - DNA, 739 bp, Unknown
  Bacterial polypeptide expressing nucleotide sequence isolated from the Sargasso Sea
atattttgtaccgaagatcagatccagccggaggtctcctcatttatagagttcttgcatttggtttatgccgattttggttttaatgaggtcatttatcgcctatccacaagacctaccaaaagggtaggttcagatcttgactgggataaagctgaaaaagcattagcggaagctctagataatcacaatttaccttggcaggaattacctggagaaggagcattctatggacccaagatcgaattttcgcttaaagattgtataggacgaatctggcaacttggaacaatacaagttgatttttcgatgcctggaaggttagatgctcaatatgtctcggagaatggagttagaaaaactccagttatgttgcatcgagcggtgctcggatctttcgagagatttataggcattttgatcgaaaactatgagggtgctttccccacttggttgagtccagtacaagcagtagtgctaaatattaccgacaaatatgctgaatatgcacaaaaagttgagagagttttaaaaaacaaggattttagagctatttcggacttgagaaacgagaagatcggttttaaaatccgcgagcacacgctccgcaaggttccttaccaacttgtagtaggtgagaaggaaatggaatcgcagaagatctccgttcgaaggcgcaatggagaagatcttggtctaatggatttggagtcttttgtttcacttcttgaaaaagatg

SEQ ID NO: 302995 - DNA, 495 bp, Unknown
  Bacterial polypeptide expressing nucleotide sequence isolated from the Sargasso Sea
caattggcagagattggcagtgtggtacccttcaggtagatttcgtattgcctgagcgcctcgatgctaactatatagcttctgacggggctaaaaagcgaccggtcatgttgcaccgagcaatactaggatctatggagcggtggattggtatacttatcgagcagtatgcaggcagatttccgatatggttagccccagtacaggcggtcataactacgattacaggtgataatgatgtttatgcttacagagtattagaagaatgtaaaaaagttggcttgagagcggctgttgatgtaagaaatgaaaaaataaactacaaaattcgcgagcatagtaacgcaaaaataccggtgatactggttgtgggaacaaaagaacaagaaaacgaaacagtagcggtgaggcgcttaggtgggaaatcgcaggaaatacttgcgcttgacgatgcagttaatacactattgaaagaatcgaccccgccgagttaat

SEQ ID NO: 302996 - DNA, 883 bp, Unknown
  Bacterial polypeptide expressing nucleotide sequence isolated from the Sargasso Sea
atgccaaatataaaattaccagatggaaataccctagcttttgacaagaaagttactggattaaaaattgctgagaaaataagtaaatctttatcaaagcaagcattagtaataagtgttgatggaaatttaagggacttaaattttgaaatagaaaatgattgctctgtaaaaatttatacttctaaagataaagaagggatagaaataataagacatgatacagcacatgttttagcaatggcagtacaagaactttttccaggaactcaagtaactataggaccagtaatagaaaatggtttttattatgattttgcgagaaaagagacttttacagaagaagatcttcaaaaaatagaaaaaaaaatgaaagaaattgttgaaagagatgaacaaacgcatagagaagtgtgggaaagagataaagctatagaacattttaaaaaagctggagaaatttataaagctgaaataatcaaaagtattccaaaaggagaagaagtatctatttattttcatggaaaatggcatgatttatgtagaggcccacatctaacttcaacaggaaaaattggaaagtattttaagctaatgaaagttgctggcgcgtattggagaggcgattcaaaaaatgaaatgttgcaaagaatttatggtacagcatggccatctcaaaaagaacttgatgaatatttaaaaagaattgatgaggcagaaaaaagagatcatagaaaattaggaaaagaaatggatttatttcatttcagagaagaaagcccagggtcagttttttggcatgaaaaaggttggtctttgtttcaaaaattaattgactacatgagaaataaacaaaaacaagctggttataaagaaataaata

SEQ ID NO: 302997 - DNA, 886 bp, Unknown
  Bacterial polypeptide expressing nucleotide sequence isolated from the Sargasso Sea
tgagattactggagactctaaagtaagaattataacgcctaaagatagtgaaggtttagaggtaattagacatgatgctgcccatataatggcaatggcagtccaagagttatttcctggcactcaagtaacaattggacctgttattgaaaatggtttttattatgattttgcaagaaaagaacctttcacaagagatgatcttaaaaaaattgaaaaaaaaatgtcggagataatagacagagatgtaaaaacaaaaagagaggtttgggaaaggggtaaagctatcgctcattttaaaaaaataggagaaaaatataaggctgaaattatagagagcataccaaacgatgaagagctttcaatttaccatcatggggatacttggcatgatctatgtcgaggtcctcatttaacttcttcaggcaaaattggaaaagcttttaaattaacaaaagtatcaggagcttattggcgaggtgactcgaataatgaaatgttacaaagaatatatggaacttgttggagttcaaaaaaagaattagatgagtacttaaatcgattagaggaagctgaaaaaagagaccacaggaaattaggacgagaaatggatcttttccactttagagaagaaagtccaggatcagttttttggcatgaaaaaggatggttgttatttcaaagattagttgaatatatgagaatgaaacaaaggttggcaggttacaaagaaatcaatactcctgagcttttagataaaactttatgggaaaaatctggtcattgggaaaagttcggtgagcacatgtttacctctgatacaccagatgaaaaaacttttgctgtcaaacctatgaattgccccaggatgtgttcaaatttttaa

SEQ ID NO: 302998 - DNA, 514 bp, Unknown
  Bacterial polypeptide expressing nucleotide sequence isolated from the Sargasso Sea
atgccaaacataactttgccagatggaaaaaaattaaaatttcaaactgaaataacaggcttggatattgctaaaaaaataagcaaatctcttttgaaagaggcacttataataagtgtcaatggggaattaaaggatttgagttttgaaataaaaaaagactcatctgtaaaaattataacttcaaaagacaaggaaggattagaagttattagacatgatgctgcacacattatggcaatgtcagttcaagaactttttcctggcactcaagttacaattggaccagtaattgaaaatggtttttattatgattttgctcgagagcaaccatttacaagtgatgatttaaaaaaaattgaaaaaagaatgtctgaaattatagatagaaatgtcaaaacaaaaagagaggtttggcaaagagaggacgctattaaacattttaaaaaaattggcgaaacttacaaagccgaaattataaagagcataccaaaaaatgaggagttatctatct

SEQ ID NO: 302999 - DNA, 463 bp, Unknown
  Bacterial polypeptide expressing nucleotide sequence isolated from the Sargasso Sea
atgcctaatataaaattacctgatggaaagagtttaaactttaaagacaaagttacaggcttccagattgcagaaaaaataagtaaatcactttctaagcaagctttaataattagtgttgatggaaatttaaaagatttaaattatgaaataaataaagattgttcagttaaaattcatacatcaaaagataaagaaggattagaaacaataagacatgacacagcgcatatattagcaatggcagttcaagaactttttcctggcactcaagtaactattgggccagttattgatgatggattttattatgactttgcaagaaaagaaccattcacagaagaagatttaagaaaaatagaaaaaaaaatgttagaaattgtagagagggatgagcctacacatagagaagtatggaagcgtgatgaagccgttgaccactttaaaaaagtaggagaaatta

SEQ ID NO: 303000 - DNA, 601 bp, Unknown
  Bacterial polypeptide expressing nucleotide sequence isolated from the Sargasso Sea
actggatacaaattctgacctctacaaaattaggcattcgcttgcgcatgttcttgcacaggcagttttggaaatacgccctgacgcaaaacttggtttcgggccaccagttgataatgggttttattatgattttgatctgaaagaacccttgacaccggaagacttgcccaaactagaaaaacgtatgcgtcatattataaagttaggacaggtctttgaacgtgaagaattggttcagaaggaaatggtagaacttttgattaagagggatcagcattacaaaattgagcaggttgaggatcttgttgctcaaaacgaaataataagcttgtaccgtaatggtcctttttgggatttgtgtgaaggtcctcatgttaagtcaacaagtgaaattcccaaaaattgtttttcacttgattcattagcaggagcttattggaaggggtctgaaaaaaatagtatgatgcaaagggtttatggattggcttttgagactggtgagaagttaaaggaatataaggataagcgaagtttagccatggaacgtgaccataggaaattgaatagtaaactccattattataccatcagcgaagag

SEQ ID NO: 303001 - DNA, 769 bp, Unknown
  Bacterial polypeptide expressing nucleotide sequence isolated from the Sargasso Sea
agtagaattctgttctttgttgcaatcgatctacgctgattttgggtttgatgatgtgcgggtaaaattttcagaccggccagaagtgcgtgcaggtgacgatgctacatgggaccgggctgaagcagctttgaccgatgccaccaaggcagctaagcttgaaacggttctaaatccgggcgaaggtgcattttatggaccaaaattggagtttgtgctgcgtgatgcgattggccgtgattggcaatgtggaacgttgcaagtggactttgttttgcctgatcgtttagatgccgaatatgttggtgaagacggtaaccggcatcgcccagttatgcttcaccgggctattttgggttcaatggaacgttggattggcattctcattgagcaatatgctgggcgtttccccccatggttggcaccggtccaaattgttgtagcgtcaatcaccgatcaggcaaatgactatgcttgtgagattgcagatgctgctgcagatctgggtcttagggttgaaaaggacctgcggaacgaaaagatcagttataaagtacgtgaacatagcgtgatgaaagtaccttttattctagccgttggtggacgcgaggccgaggcaggtaccgtagcattgcgtcggcttggatcaaaggaacaaagggttatcgatacaaatgaggcattggcaatgcttcgcgcggaaagccttgccccggatatgactgatgagcgtcaggcagagttaaaaaacacgcaatgcgataattga

SEQ ID NO: 303002 - DNA, 914 bp, Unknown
  Bacterial polypeptide expressing nucleotide sequence isolated from the Sargasso Sea
aataactaagaaagagatttggaatagggaaaaagcaattgagcattttaaaaagaagggagaaatttataaagcagaattaattgagagcattcctcaaggtgaagaagtatcaatttattttcatggaaaatggcacgatttgtgcagaggtcctcatttatcatcaacaggtaagataggaaaatattttaaactaatgaaagtttcaggagcttattggagaggagactcaaataatgaaatgcttcagagaatttatggaactagttggtcttcccagaaggaattggatgcgtatttaaaaagaattgaagaggcagaaaaaagagatcacagaaaactaggaaaagaaatggatttatttcatttcagggaagaaagccctggatcagttttttggcatgagaagggatggacactttttcaaaaattaatttcatatatgagaaagaagcaagatcaagcagggtatggagagataaatactcctgaaatgcttgacagatcactgtgggaaaaatctggtcattgggaaaaatttggagaaaatatgtatacctcaacaacaccagatgaaaaagtttttgcaataaaaccaatgaattgtccaggctgcgttcaagtatttaaccaaggtttaaaaagttacagagatttaccacttaaaatgtctgagtttggtaaagtacatcgatatgaaccatcaggcgcacttcatggactattaagagtaagagcatttactcaagatgatgcccacattttttgcacagaacaacaaattacagaagaatgtttatctgtgacaaatttaattttagaaatttacaaagatttgggttttgaaaatgtaattttaaaatattctgaccgaccagatgttagagttggagaagactctgtttgggata

SEQ ID NO: 303003 - DNA, 857 bp, Unknown
  Bacterial polypeptide expressing nucleotide sequence isolated from the Sargasso Sea
aatgccaaatataactttaccagatggaaaaaagctaggttttaaggatagggtaactggtttagaagttgctgcaaaaataagtaaatctttatccaagcaagctttaataatgagtgttgatggtgatcttaaagatttaagttatgtaatatctaaagattcaaaagtaagaataattactccaaaagataaagagggattagatgttataagacacgatgctgcacatataatggctatggcagttcaagagttatttccaggaactcaagtaactataggaccagtaatagagaatggattttattatgactttgcaagaaaagaaccatttacaaaagaagatttgaagaaaattgaaaagaaaatgtccgagataatcgatagagatgttaaaacaaaaagagaagtttgggaaagagatgaagcgatttctcattttaagaaaataggcgaaaagtataaagcagaaattatagagagcattcctaaaaacgaagagctttccgtctatcatcacggagatacttggcatgatctttgtagagggccacatcttgtatcttcaggtaaaattggaaaagctttcaaattaacaaaagtatcaggagcttattggcggggagactctaataatgaaatgttacaaagaatttatggaacatgttggagctcaaaaaaggaattagatgattatttaaatagactagaagaggccgagaagagagatcatagaaaacttggtaaggaaatggacttatttcactttagagaagaaagtccaggagcagttttttggcatgaaaaaggatggaatttatttcaaaggcttattgaatatatgagattaaaac

SEQ ID NO: 303004 - DNA, 533 bp, Unknown
  Bacterial polypeptide expressing nucleotide sequence isolated from the Sargasso Sea
ttatggtcctaaaattgaatttgtattaagagatgccattggaagagattggcaatgcggaactttacaagttgacttaaatttaccaaatagacttggtgcatcttatgttgctaaagatggaaacaaaaaagttcctgttatgttgcacagagcattatttggttctttagagagatttatcggaattttaattgaaaattatgctggcaagttaccattttggctttcaccagcacaagctgttgtgtgtcctatcgctgaagagaacaatgattatgtaaaaaagttatttgaagatttatttaaagaaggtataaaatgtgaaatggatttaagaaatgagaaaataaattataaagtcagagaacactctctagctaaagttccatttataattgtttgtggcaaaaaagaagttgcggaaaatactgtaacagtaaggaaattaggttcagataaacaagaaattatgagaagagaagatttaattaaaaatatgctcacgtcaaataagttgcctttaaattaag

SEQ ID NO: 303005 - DNA, 421 bp, Unknown
  Bacterial polypeptide expressing nucleotide sequence isolated from the Sargasso Sea
ggctgaagacggtcagaaaaaggtgcctgtgatgttacatagagctctttttggctctttagagagatttactggtatattaattgagcactatgctggacatttgcctctttggttatcaccattacaaattgtagttgcaacaataacatctgattctgataactatgcttttgaaattaaagatcaattaattaaaagtggattggtggctgaagcagatatacgaaatgaaaaaataggttataaaattcgtgaacacagcaatgcaaaagttcctgtcattctagcagttggaaaaaaagaagccgatgaacaaactgtttctgttcgaagacttggtagtcaacaaacatcaactattaaactagataaattaataaaggatcttcagaaagaatctctttctccaataaattaa

SEQ ID NO: 303006 - DNA, 499 bp, Unknown
  Bacterial polypeptide expressing nucleotide sequence isolated from the Sargasso Sea
gctataggaagagattggcagtgtggaaccttacagtttgatttaaacttacccggaagactaggagctacatatgtagataaagatggtggaaaaaaagttccagtaatgcttcatcgtgccttatttggatctcttgaaaggtttataggaattttaatagagcattattcaggaaaacttccattctggatctcacctcttcaaacaatgataattcctgtttcagatgaatttaacgattatgctaaatcagtgaacagtaaaattaaaagagctggaatatccagtgatgtggatttaaaaagtcacaatttaaattataaaataagggaacattctttgtcaaaattgccaatattattaatttgtggaaaaaaagaagttgacactaacagtgtaactattagaagattggactcaaataaacaagaaaatatgaaattagaaaaatttattaaaaacttttcaattataaataaagctccttccttataag

SEQ ID NO: 303007 - DNA, 913 bp, Unknown
  Bacterial polypeptide expressing nucleotide sequence isolated from the Sargasso Sea
tatcaaaccaatgaactgcccaggatgtgttcaaatttttaatcaaggtcttaaaagttacagagacttacctttgaaactctcagaatttggaaaagttcatagatatgaaccctcaggagccttacatggcttgttaagagtaagagcttttactcaagacgatgcgcatattttttgtacagaagatcaaattacccaagaatctttagctgtaactaagttaattttagatatttataaagatctaggatttgaaaatgttatcttaaagtactcagacagacctgagaaaagagttggagacgatagtgtttgggataaatctgagaaagcacttttaactgctatcaaacaatcaaaacttcagtatacgattaacaaaggcgagggagctttttacggacctaaaatagaattcgttctaagagacgctataggcagggactggcagtgcggaactttgcaagttgacttgaacttgccaaatagattgggagcaacatttgttgacaaagacggatctaaaaaagttcctgtaatgcttcaccgagctttatttggatctttagaaagatttataggaatacttattgagaattatgcaggaaagttacctttctggttatctccaacacaagctgtagtatgcccaatagctgaagagaacaatgaatatgtaaaaaaattatttgaagatttatttaaagaaggtataaaatgcgaggtggatttaagaaacgaaaaaataaattataaaataagagagcattctctagcaaaaattccagtaattttagtatgtggtaagaaagaagtatcagaaaaaacagtaactattagaagactcggatcagaaaaacaagaaacaatgaaaagagaagaattgatcaaaaacttacttaatgccaac

SEQ ID NO: 303008 - DNA, 721 bp, Unknown
  Bacterial polypeptide expressing nucleotide sequence isolated from the Sargasso Sea
ttaacagttacaaatttgattttagaaatttataaagagcttggatttgaaaaggttttattaaagtactcagatagaccagaggttagagttggggatgatgctgtttgggataaagctgaagatgctctcttaaaagctattaaagagacaaaacttgaatattcgattaataaaggtgaaggtgctttttatggtccaaaaattgaatttgttttaagagatgccattggaagagactggcaatgtggaactttacaagtggacttgaatttgccaaatagacttggtgcttcatttgttgataaagatggaactaaaaaagttcctgtgatgatccatagagctttatttggatcattggaaagatttattggaattttaattgagcattatgcaggtaaattacctttttggatttctccactgcaagcggttattatacctatttcagatgaatttgatgattatgcaaaaaaaatttttaaattggtaagtcagtctggaataaattgtgagattgatttaaaaaatcataatttaaattacaaaataagagaacattcgctgtcaaaagttccattattgttgatatgtggaaaaaaagaagttgacagtgataccataactataagacaattagattctaaaaaacaagaaactatgaaaacagaagattttttaaaaaattattcttatctgaataaagccccattataat

SEQ ID NO: 303009 - DNA, 487 bp, Unknown
  Bacterial polypeptide expressing nucleotide sequence isolated from the Sargasso Sea
aatgcctacaataacattaccagacggaaacaatttagagtttcaaaataaagtgacaggtttagaggttgctgaaaaaataagtaaatcattagccaaacaagcaatggtgataagtgttgatggtgaacttaaagatttagattttttaatagaaaaaaattgttctgtaaaaatatttacttcaaaaaataaggaaggtcttgaaacaattagacatgatactgctcatattttagcgatggctgttcaagagatttttccaggtacacaagttacaatcggccctgtaatagaaaatggattttattatgattttgcgagaaaagaaccgttcacagaagatgatttaaaaaaaattgaatttaagatgaaagaaattattgaccgagatgaaaaaactaaaagagaggtatgggaccgagataaagcgatcaagcattttaaaaaaaagggagaattgtataaagctgaattaattgaaagt

SEQ ID NO: 303010 - DNA, 372 bp, Unknown
  Bacterial polypeptide expressing nucleotide sequence isolated from the Sargasso Sea
tatgccacatatcactctacccgatggtaaaaaaattaaatttaacgaaaagataaacggattagatcttgcaaagcaaataagcagatcgcttagcaaagacgcttccataatgcaagtagatggagaattaaaagatttatctcatgaaatagttaaagattcaaaagttagaattattacagttaaagataaagaaggtttagaagtgcttaggcatgatactgcacatatattagcaatggcagttcaggaactttttccaaaaacacaggtaaccataggtccggttattgaagatggattttattatgatttttcaaggaaggaaccttttacagaaaatgaccttttgaaaatagaaaaaaaaat

SEQ ID NO: 303011 - DNA, 925 bp, Unknown
  Bacterial polypeptide expressing nucleotide sequence isolated from the Sargasso Sea
aaggtagagataatcgaaaattctgaccaagaagagaacttccagatatatcagcaaggagaaacaggctttattgacctgtgcagaggccctcacctaacctcattgaaacaaattggatcttttaaattaacaaaaatctcgggtgcctactggagaggagattcaaaaaaccagatgttgcagaggatatacggtactgcttggctgaataacaaggatctaaaaaaatacctattgcgactagaagaggctgaaaaaagagaccacagaaagcttggcaaacaaatggatttgtttcattttcaagaagaagcaccaggcgcagttttttggcatccgaaaggttggctcctttttcagaaactcatcgattacatgcgagaaaagcaagtgaatgctggatacaaagaggtcaatacacctgaactaatggatcggtcattgtgggaagcatccggacattgggaatcctttggtgaaaacatgttcacctctgagactagagatggaaggaattatgctataaaaccaatgaattgtcctgggcatgttcaagtctttaaacaaggtataaccagttacagagaccttccatatcgactttctgaatttggtaaagtgcatcgatatgaaccctccggatcacttcatggcatgctcagagtccgcgcatttactcaagacgatgctcatatattttgtacgcctgaacaaatcactgatgagacagtagctgtttgtgaccttattcttgatatatataaggattttggctttgaggatgtaatcatcaaatatgccgatagaccggatgttcgagttggcgaagatactgtctgggataatgctgaaaacgcattgatttcagcgctagaaaaaactggattaaaatacgaacataatcctggcgaaggtgccttta

SEQ ID NO: 303012 - DNA, 898 bp, Unknown
  Bacterial polypeptide expressing nucleotide sequence isolated from the Sargasso Sea
tagaggccctcatttaagttcaacaggtaaaattggcaaatattttaaattaacaaaagtctcaggtgcttattggagaggtgactctaataatgaaatgttgcaaagagtatatggaacaagttggtctacgcaaaaagagttagatgattatttaaacagaatagaagaagccgaaaaaagagatcacagaaaaattggaaaagaaatggatttatttcattttagagaagaaagccctggttcagtattttggcatcaaaaaggatggaacttattccaaaaacttatttcttatatgagaatgaaacaagagactgcaggatatcaggaaataaatactccagaaatattggaccgctcactttgggaaaaatctggccattgggaaaaattcggcgccaatatgtatacatctacgacacctgatgaaaaagtatttgctataaaaccaatgaattgtcctggttgcgttcaggtctttaatcaaggcttgaaaagttatagagatttaccacttaaaatgtctgaatttggaaaggttcataggtatgaaccatctggagctcttcatggactgttaagagttagagcttttactcaagatgatgcgcatattttttgtactgaagaacaaattacacaagaatgtttgactgtaactaatttaattttagaaatttataaggatttagggtttgaagacgtgatattaaaatattctgacagaccagaattaagagttggtgatgatcaagtatgggataaatcagaagctgctttactagaagcaattaaagcaacaaaattagaatattctattaacaagggtgaaggtgctttctatggtccaaaaatagagtttgttttaagggatgcgattggaagggattggcaa

SEQ ID NO: 303013 - DNA, 895 bp, Unknown
  Bacterial polypeptide expressing nucleotide sequence isolated from the Sargasso Sea
aggagactctaataatgaaatgttgcaaagaatatatggaacgagctgggcaactcaaaaagatttagatgaatatttaaaaagaatcgaagaagctgaaaaaagagatcatagaaaacttggtaaagaaatggacctatttcattttagagaagaaagtcctggatcagtattttggcacgagaagggatgggctctattccagaaattaattaactatatgagaagtagacaagatgctgctggttataaagaggtaaacacaccagaaatattagatagacaactatgggaaaaatctgggcattgggaaaaatatggagaaaatatgtatacttcagaaactcctgatgaaaaagtatttgcaattaaaccaatgaattgtcctgggcatattcaggtatttaatcaaggtttaaaaagttatagagatcttcctttacgtattgcagaatttggaaaagtacatcggtatgaaccatcaggtgctttacatggattattaagggtaagggcattcactcaagatgatgcccatatattttgtactgaagatcaaattaccagtgaatgtttagaggtaactaatttaattttagatatttataaagatttaggttttgaaaatgtaattcttaaatatgcagatagaccaaaagtaagagttggagatgataaaatttgggataaagcagaggcttctttgcttgaagctgttaaagcttctaaactagaatatactattaacaaaggtgagggagcattttatggtccaaaaattgaatttgtttttagagacgcaataggtagagattgggcatgtggtactttacaagttgatttaaacttacctggaagattagatgcatcatatgttgataaagacggaactaaa

SEQ ID NO: 303014 - DNA, 807 bp, Unknown
  Bacterial polypeptide expressing nucleotide sequence isolated from the Sargasso Sea
atggtcttttggcatcaaaatggatggtctatttatacatcgttgcagaatttcatgagacgaaaattagatttatcaggatatcaagaaataaatactcctgaagttgtagatagaaggctctgggaggcttcaggtcactgggaaaaatatcgagaaaatatgtttattgccgagattgatgaagaacatgcaaatgaaaaaaggacaaatgcactaaaaccaatgagctgccctgttcatacacaagtttttaatcatacgttaagatcctataaagatctgccaatgaggttttcagaatttggcaaatgtcatagatacgaagcttcaggaacaatgcatggtctcatgcgtgtaagagcatttactcaggatgatggacatatattttgtacagatgatcaaattgaaaatgaaacaaaaagctttattgaactattatctgagatttaccatttgttgggttttgaagattttcaaataaagctttcaactcggccaaatgtaagaattggttcagatgaaacttgggataaaacagaacatgctcttgaggaagcaattaagaagttaggtcttccgtatgatattgaagagggtgaaggagctttctatggccctaagctagattttgtcctaaaagatgctattggtaggttatggcaatgtggaacttttcaactcgattttaccttgccttcaagacttgaatcagaatatgttggtgaggatggaagaaaatatccaccagttctaattcacagagcaatactaggatcttttgaaaggtttttgggcatctta

SEQ ID NO: 303015 - DNA, 646 bp, Unknown
  Bacterial polypeptide expressing nucleotide sequence isolated from the Sargasso Sea
gcgacgacgccgtcttgggatctgccacccaaaggcctgatgaaagcgctggaacgcaagggctgggcctacaagatcgatgaaggcggcggtgccttctacggccccaagatcgacctcaagatgaaagacgccatcggccgcatgtggcagtgctccaccatccagctcgatttcaacctgccggagcggttcaagctcgactacatcgcggctgatggcagcaagcagcggccgatcatgatccaccgggccatcttcggctcgctggaacggttcttcgggatcatgaccgagaactacgccggcgattaccccctctggctggcccctgagcaggtgcggctgctgccggtcaccgatgaggtacagccctacgccgaaagcctgctcgaccagctcacccagacgggcgtgcgggccaccatcgatcgcagcggagaccggctcggcaagttgatccgcaccggggagcagatgaagatccccgtgttggcggtgatcggtgccaaggaagccgagcagaacgccgtgagtctgcgcagccgcagggatggcgatctcggtgtggtcgctgtggccgatctgctccgcgccgcccaaaacgccaacagccaacgtgccgcaggactgaagctgaactgat

SEQ ID NO: 303016 - DNA, 773 bp, Unknown
  Bacterial polypeptide expressing nucleotide sequence isolated from the Sargasso Sea
gctgaaaaaagagatcatagaaaactaggtaatgagttaaatttgtttgttaatacagatgaaatagggccaggtcagtttttatggaaacctaaagggtcaatcctaagacaaaatattgaagattattcaaaaaaagctcatgcagataatggttatgaatatgcatacactcctcacattggacgttcagtcctttgggaaacttctggacatcttgattattacagagaaggaatgtacccaccattcaaaaatgaagacaatgaagatgatgaatactacttaaagccaatgaattgcccttttcatattttaatttataaaagtgacatacgatcatacaaagaattaccattacgattttttgaacttggttctgtttatagatatgaaaagactggagtcctgcatggactgttaagagcaagaggatttacacaagatgatgcacatattttttgtactaatgatcaaattgaagatgagatcctaaatctcttaacattttcaataaaactactaaatgcctttggatttgattcaattgaagctgatttatcaactcgaccagaaaaatctattggaaatgatgacgactgggttaaggcaacaaatagtttggcttcagcattagataatcagaatatatcttatgtaactgctcacagagaaggagctttttatggaccaaaaatagatcttcacgtaaaggatgcaataggtagaagatggcaattatcaactatacaagtggatttttcacaaccaga

SEQ ID NO: 303017 - DNA, 597 bp, Unknown
  Bacterial polypeptide expressing nucleotide sequence isolated from the Sargasso Sea
gatgagtgaaaagataataattacatttccagatggaaataaaaaggaagttgataaaggcatcagtggtcttgaattggcaacgcaaatttctaaatctcttgccaaagaatcagtcgctataaaaattaataatgaaataaaagatattagtttgcctattaataatgatgcgtcagtagcaattttaaaaagagatagcgaggaagcacttgaattaatacgacatgattgtgctcatgtaatggcagaagctgtccaagaattattccctggaacacaagttacaattggtccagcaattgaaaatggtttctattatgattttgcaagagatgaaccttttactgtttctgatcttccaaaaattgaaaagaagatgcacgatatcattcaaagaaataaaaattttataagagaagtatggtctaaagaagaaacaataaaacattttaaagataaaggtgaaaactacaaagttgagctaattaatgatctgcctgataatgaggaaatcagtatttacaaacaaggtgattggttagacttgtgcagaggtcttcatatggtttcaacaaaacaaattggtaaagcatt

SEQ ID NO: 303018 - DNA, 765 bp, Unknown
  Bacterial polypeptide expressing nucleotide sequence isolated from the Sargasso Sea
ctcatatattttgcactgaaaaccaaattacaaatgaaagtaaaaaagtttgtgagcttattttaagtatttataaagattttggattcactgatgttcatattaaattctcagatagaccaaaaaaacgtgtgggtgatgatgctatttgggacaaagctgaagcagctttgaaagaagcaatggaagctactggtctagaatatacatttaatccaggagaaggagctttttatggtccaaaacttgaatttgttcttagggatgctatcggacgtgattggcagtgtggtactttgcaagtagatctcaatttacctgaaagactgggcgctacttacgtagctgaagatggccaaaagaagatacctgttatgcttcacagggcattatttggttcgctagaaagattcactggtattttgattgagcattatgcaggccatttacctttatggctatctcctaaacaaattattatagcgaccataacttctgatacaaatgaatacgcaaaatttgttaaaaaaaatttaattgatgttgggctccgtgctgacatagacttacgtaatgaaaaaataggttataaaatacgtgaacacagtagtgcaaaaataccggtcatattagctgtaggaaaaaaagaggaagaaaacaaaaccgtatcacttagaagattaggggatactaagactgaaattatttcactcgaagatataataaaaaatttgcaaaaagaatctttatcacctattcaataga

SEQ ID NO: 303019 - DNA, 774 bp, Unknown
  Bacterial polypeptide expressing nucleotide sequence isolated from the Sargasso Sea
cactggggaaaaatttggtgagcatatgttcacttcagaaacacctgatgaaaaaacttttgcgataaaacctatgaactgccctggatgtgttcaagtttttaaccaaggtttaaaaagctacagagatttgcctttaaaactatcagaatttggaaaagtacataggtatgaaccatcaggagcattacatggattattgagagtaagagcctttactcaagatgacgctcatattttctgtactgaagatcaaataactcaagaaactttatctgttactaatttgattttagaaatttataaagctcttggatttgaaaatgtaatattgaagtactcagacagacctgaaaagagagttggtgaagatagtgtttgggataagtcagaagcagctttattatccgcaataaaaaaatcaaaacttgaatatacagtcaataaaggagaaggggctttctacggacctaaaatagaatttgtactaagagacgcaattggtcgtgattggcaatgtggaacattacaagttgatttaaatttaccaaataggttgggcgcaacttttgttgataaggatggtacgaaaaaggtcccagttatgttacatagagctttatttggttccttagagagattcataggaattctaatagaaaactatgctggaaaattgcctttttggttgtcaccttcacaagctgtagtgtgtactatagcagaagagaacaatgagtatgtaaaaaaattatttgaagatttattcaaaga

SEQ ID NO: 303020 - DNA, 764 bp, Unknown
  Bacterial polypeptide expressing nucleotide sequence isolated from the Sargasso Sea
tgtatacattcggaaactccagatgaaaaggtgtttgctataaaacctatgaattgtcctgggcatgttcaggtatttaatcaaggactaaaaagctatcgagatcttcctttacgatatgcagaatttggaaaagttcatcgatatgaaccttcaggagcattacatggtttacttagagttagagcttttacacaagatgatgcacatattttttgttctgaggatcaaattacaagtgagtgtttaattgtcactaatttaattttagatatttataaagaccttgggtttgaaaatgtaattcttaaatatgcagatagacccgaagtgagagttggtgacgatgaagtttgggacaaagcagaagcatccttacttgaagcagtgaaagcatcaaagttagaatatagtattaacaagggagaaggagcattctatggtcctaaaattgagtttgttctaagggatgcaatttgtagagattggcagtgtggaactttgcaagttgacttaaatttacctgaaagattaggagcctcttatgttgataaagatggaactaagaaaattcctgtaatgttgcacagagcactatttggatctttagaaagatttattggaatcttaatagaaaattatgctggtaaatttccattctggatatcacctttgcaaacaatggtaattcctatttcagaagaatttaatgactatgctattgagatatctaagaaaattaaaaatgtaggtataagttcttc

SEQ ID NO: 303021 - DNA, 846 bp, Unknown
  Bacterial polypeptide expressing nucleotide sequence isolated from the Sargasso Sea
ttcaaattaacaaaagttgcaggcgcttattggcggggagactcaaaaaatgagatgctacagagaatttatggaactggttgggcttcacaaaaagatttagaagattatttaaaaagagtccaggaggctgaaagaagagatcatagaaagctaggcaaagaaatggatttatttcattttagagaagagagtccaggatctgttttttggcatgaaaaaggatgggctttatttcaaaaattaattaattacatgcgagcacgtcaagatgcagcaggttaccgagaggtaaatactccagaagtattagacagattattatgggaaaaatcaggacattgggaaaaatatggagaaaacatgtacacgtcagaaactcctgacgaaaaagtttttgctataaaaccaatgaactgtccaggtcatattcaagttttcaatcaaggtttaaaaagttatagagatttaccattaagaataacagaatttggaaaagttcatcgttatgaaccttcaggagcacttcatggactcttaagagtaagagcatttactcaagatgatgcacatattttttgttcagaggatcaaattactagcgaatgtttaaatgttacaaatttaatcttggatatttataaagatttgggttttaaaaatgtagttctaaaatatgctgatagaccagatattagagtaggcgaagatgatgtctgggataaagctgaagcatcactattagaagcggttaaagcttctaaattagaatatactattaataaaggtgaaggagctttttatggtccaaaaatagaattcgttttaagggatgcaattggtaga

SEQ ID NO: 303022 - DNA, 444 bp, Unknown
  Bacterial polypeptide expressing nucleotide sequence isolated from the Sargasso Sea
aaagattaggtgcatcttacgtgtccaaagatggatctaaaaaagttccagttatgcttcatagagctttatttggatctttagagagatttattggaattttaattgaaaattatgctggtaagttgcctttttggttatctccagcacaagcagtagtgtgtccaatcgctgaagagaacaataattacgttaaaaaattatttgaagatctgtttaaagaaggtataaaatgtgaaatggatttaagaaatgaaaaaataaattataaagtgagagaacattcactttcaaaaattccatatataatagtttgtggaaaaaaagaagttgcagataatacagttactgtaagaaaacttggctcagataaacaagaaattatgaaaagagaagacctaataaaaaatatgttagatttaaataagttgcctttaaattaag

SEQ ID NO: 303023 - DNA, 750 bp, Unknown
  Bacterial polypeptide expressing nucleotide sequence isolated from the Sargasso Sea
attaagatagaaaaaaaaatgaaagaaattgtagaacgagacgaaataacaagaagagaagtttgggaaagaaaaaaagctaaagaccattatcacaaaataggagaaaattataaagttgaacttgttgatagtgttccaaaagatcaagaggtttctgtttactatcatggagaatggtatgatttatgtagaggtccacacttattatcaactggaaaaattggaaaatattttaaattaatgaaagtagcaggagcatattggagaggagattccaataatgaaatgttacaaagaatttatggaacatcatggccatctcaaaaagaacttgatgattatttaaatagaattgaagaggcagaaaaaagagatcatagaaaactgggtaaggaaatggatctttttcactttagagaagaaagtccaggatctgttttttggcatcaaaaaggatggaatctttttcaaaagctaataaattatatgagagctaagcaagaccaagctggttatgatgagataaataccccagaaatattagatagatcattatgggaaaaatctggtcattgggaaaaatttggcgcaaacatgtacacatcaacaaccccagatgaaaagatttttgcaattaaaccgatgaattgccctggttgcgttcaagtttttaatcaaggattaaaaagttatagagatttacctcttaaaatgtcagagttcggaaaagtacatagatatgaacca

SEQ ID NO: 303024 - DNA, 784 bp, Unknown
  Bacterial polypeptide expressing nucleotide sequence isolated from the Sargasso Sea
gtctaatcagaaagaactagacgaatatttaaatatgattgaagaggctgaaaaaagagatcatagaaagttaggtaaagaaatggatttattccattttagagaagaaagtccaggctctgttttttggcatgaaaaaggttggaatttatttcagaaattaattgcttacatgaggtctaaacaagacgatgcaggctataaagaaataaatactccagaaatattggatcgatcattgtgggaaaaatcaggtcattgggaaaaatttggtgcaaacatgtatacttctacaacaccagatgaaaaagtgtttgcaattaaaccaatgaattgtccaggttgtgttcaagtttttaatcaaggtttaaaaagttatagggatttacctcttaaaatgtctgaatttggaaaagttcataggtatgaaccgtcaggtgccttacatggacttttaagagtaagagcttttacacaagatgatgcacatattttttgctctgaagatcaaattactgaagaatgtttaaatgttaccaatttaattttagaaatttataaagatctcggttttgaaaatgtaattttaaaatattctgatagaccagatgtacgtgtaggagaagatagtgtttgggataaatcggagaaagcactattggaagcaattaaagcttctaaacttgaatatagtataaataaaggagaaggtgcattttatggaccaaagatagaatttgtattaagagatgccattggtagagattggcaatgtggaacactt

SEQ ID NO: 303025 - DNA, 736 bp, Unknown
  Bacterial polypeptide expressing nucleotide sequence isolated from the Sargasso Sea
gcaggagaaacttataaagcagagataattaaagatatcccaaaagaagaagaggtatcaatatattttcatggaaagtggcatgatttatgtagaggtccacatttatcatctactggtaaagttggtaaattctttaaactattaaaagtttctggagcttactggagaggtgactctaataatgaaatgttacaaagaatttacggaactagttggtctacaaagagagaattagatgaatatttaaaaagaattgaagaagctgaaaaaagagatcacagaaagcttggaaaggaaatggacttatttcattttagagaagaaagtccaggatcagttttttggcatgaaaaaggctggagtttatttcaaaaattaattgattacatgagatcaaaacaaaaagacgccggatataaagagattaatacacctgaggttttagatagatctttatgggaaaaatctggacattgggaaaaatttggagaacatatgtatactacaactacacctgatgaaaaagtttttgcaataaaaccaatgaattgtcctggctgcgttcaggtatttaatcaaggtttaaaaagttatagagacttaccattaaaaatgtctgagtttggaaaagttcatcgttatgagccatcgggcgccttacatggattattaagagtaagagctttcacacaagatgatgctcatattttttgtacagaagatcaaattacaa

SEQ ID NO: 303026 - DNA, 761 bp, Unknown
  Bacterial polypeptide expressing nucleotide sequence isolated from the Sargasso Sea
taaatctttatcaaaaaatgcacttataatgagtgtagatggcgtattaaaagatctaagttatactattgaaaatgattgttctttaaaaatttttacttcaaaagacaacgaaggattagatgctataagacatgataccactcatattatggcaatggcagttcaggagttatttccaggtacaaaaatagcaataggcccagcgattaaagatggtttttattatgatttttcaagaaaagaatcttttactctggaagatttagaaaaaattgaaaaaaaaatgaaagaaattgttgagaaagatgaacctactcacagagaagtttgggaaagaaaaaaagcaaaagatcattacaaaaaaattggagaaaaatataaggttgaacttgtagatagcataccagagaatgaggaagtctcagtatattaccatggaaagtggtatgatctttgtagagggcctcatctgacatctaccggtaaagttggaaagcattttaagcttacaaaagtttctggtgcatattggaggggtgactcaaacaatgaaatgttgcaaagaatttacggtacatcttggccttctcaaaaagaacttgatgaatatcttaaaagaatagaagaagcagaaaaaagagatcatagaaaattaggaaaagaaatggatttatttcattttagagaggaaagtccaggttcggtattttggcacgaaaaaggttggaatttatttcaaaaacttgtttcatatatga

SEQ ID NO: 303027 - DNA, 893 bp, Unknown
  Bacterial polypeptide expressing nucleotide sequence isolated from the Sargasso Sea
tgacacagctcatattttagctatggctgttcaagagttgtttcccggcacacaagttacaattggaccagtgatagaaaacggattttattacgactttgctagaaaagaaccatttacagaggatgatctagtaaaaattgaaaataaaatgaaagaaatagttgataggaatgaaataacaaaaagagaagtttgggatagaaacaaagcaattagccattttaaaaaaaaaggagaaatttataaagccgagttaattgaagcgatacctgaaaatgaagatgtatcaatttattttcacggagaatggcatgatttatgtaggggcccacatttatcctctacaggtaaaatagggaaatattttaaacttacaaaagtatcaggagcatattggagaggagactctaataatgaaatgttgcaacgaatatatggtacgagttgggcaactcaaaaagatctagatgaatatttgaaaagaatagaagaagccgaaaaaagagatcacagaaaattaggtagagaaatggatttatttcattttagagaagaaagccctggctcagtattttggcatgaaagaggatggggtttgtttcaaaagctcattaactacatgagaagcagacaagatgcagctggttataaagaggtcaatactccagaggtactagacagacaactatgggaaaaatctgggcattgggaaaaatatggagaaaacatgtatacttctgaaacaccagatgagaaagtttttgcaattaaaccaatgaattgccctggtcatatccaagtatttaatcaaggcttaaaaagttacagagatcttccgttacgttttgctgaatttgggaaagttcatcgttatgagccatcaggcgctt

SEQ ID NO: 303028 - DNA, 859 bp, Unknown
  Bacterial polypeptide expressing nucleotide sequence isolated from the Sargasso Sea
agaaaacttgggtaaagctttagatttatttcattttcaggaagaaagccctggagcagttttttggcaccaaaaaggatggagtttatttcaatctctagttaagtttatgagagaaaaacaaaatcaagctgggtatcttgaggttaatacaccagaaatgttagataaggctttgtgggaaaagtctggacattgggaaaaatttcaagagtatatgtataccactgatgctgatgaaaagacctttgctattaagccaatgaattgtccaggccacgtacaagtttttaatcaaggtttaaaaagttataaagatttaccacttaagatttcagaatttggaaaagttcatagatatgaaccttctggtgcacttcatggcttaatgagagtaagggcatttactcaagacgatgctcatattttttgtacccatgaacaaattacagaagagtcgctaaaggtcacaaatttaattttggatatttataaatcttttggttttgaaaatgtaaaactaaaatttgctgaccgcccaaacaaaagagtaggcaacgatgaagtctgggatcaaagtgaaaaagcattactagaagcaatcaaggcaagcggtttaaagtatgaagttaacaaaggtgagggagcgttttatggtccaaaaatcgagtttattctaatagatgcaattggtagagaatggcagtgtggaactttacaagtagactttaatttaccaggaagattagatgcaacttatgtagctagcgatggttcaaaacaggtcccagtgatgttgcatagagcaatgtttggatccttagagaggtttatcggtattttaattgaacatcatgct

SEQ ID NO: 303029 - DNA, 949 bp, Unknown
  Bacterial polypeptide expressing nucleotide sequence isolated from the Sargasso Sea
agtatcccttcaggtgaagaagtttcaaattacccatcatgaaaaatggcatgatctttgtagaggaccgcatctaacatcaacaggaaaaattggtaaagcttttaaattaacaaaagtctcgggtgcttattggagaggagactcaaataatgaaatgctgcagagaatttatggaacttgctggagttctaaaaaagaactagatgattatctaaatcgacttgaagaggctgaaaaaagagatcacagaaaacttggaaaagaaatggatttatttcattttagagaggaaagtccaggatctgtattctggcacgaaaaaggttggttattatttcaaaggttagttgagtatatgagagcaaaacaaaggctggctgggtacaaagaaattaatactcctgaattattagacaagaccctctgggaaaaatctggtcattgggataaattcggagaacatatgtttacatctgatactcctgatgaaaaaacttttgcgataaaacccatgaattgcccaggatgtgtgcaggtttttaatcaagggctaaaaagttatagagacttacccttaaagctttctgagtttggtaaggtacataggtatgagccatcaggagcattacatggattattaagagtaagagcatttactcaagatgatgcccatatattttgcactgaagaccaaatcactcaagagtctttatcagttacaaatttaattttagagatttataaagatttaggttttgaaaacgtaattctcaagtattcagataggcctgagaaacgagtaggagatgataatgtatgggacaaatctgaagcagctcttcttgccgctataaaacaatcaaaacttgaatatacaataaataaaggtgaaggagcgttttatggacctaaaattgaatttgttctaagagatgcaatcggaaga

SEQ ID NO: 303030 - DNA, 808 bp, Unknown
  Bacterial polypeptide expressing nucleotide sequence isolated from the Sargasso Sea
tttcaatctttaataaattatatgcgaaacagacaagataaggcgggttatgtagaaactaatacaccagatatgatggataagtctctatgggaaacctctggtcactgggacaagtttagtgacatgatgtttagaactgaggcaaaggatgacaaaatttatgcaattaaaccaatgaattgccctggtgctgtagaaatttttaagcaaggattaaaaagttaccgagaccttccatttttattatctgaatttgggaaagtgcatcgttacgaaccatcaggttctctccatggattaatgcgagttagggcgttcacacaagatgatgcacatatattttgtacagaagatcaaataactcaagagagtaaaactgtgtgtgatttgatacttagtatttataaagattttggatttgataatgttaaaattaagttttctgatagaccagaaaaacgggtaggagatgatgttgtttgggataaagctgaagctgcattaatgcaggctatgaaagcaactggtctcgagtatacacttaacccaggggaaggagcgttttacggtccaaaattagagtttgttttaagggatgcaattggaagagattggcaatgtggaacattacaagtagatttaaacttaccgggtagactaggcgcaacttatgttggagaggatgggaataaaaaaacacctgttatgcttcatagagcgctctttggttctctagaaagattcacagggatacttattgaacattacgctggtcatctacctctttggctttcacccattacaa

SEQ ID NO: 303031 - DNA, 742 bp, Unknown
  Bacterial polypeptide expressing nucleotide sequence isolated from the Sargasso Sea
gtcgacatgtgccgcggcccgcacgtgccgaacacgcgcttcctcaaggcgttcaagctgactcgcatttccggtgcctactggcgcggtgactcgaagaacgagcagctgcagcgtatatacggcactgcctgggcggacaagaagcagctggctgcttatatccagcgcatcgaagaggctgaaaaacgcgatcaccgtcgcatcggcaagcagctggatctgttccacctgcaggaagaagcgccgggaatggtgttctggcaccccaatggctggactgtctaccaggtgctggagcagtacatgcgccaggtgcagcgtgagaacggctatgttgaggtgcgcacgccacaggtggtcgatcgcattctctgggagcgttccgggcattggtccaactacgccgaaaacatgttcactacggcttcggaaaaccgcgactacgcggtgaaaccgatgaactgcccgtgccacgtgcagatcttcaatcagggcctgaagtcttaccgcgacctgccgctgcgtctggccgagttcggtgcctgtcaccgtaacgagccgtccggtgcgctgcacggcatcatgcgtgtgcgtggcttcgtgcaggacgatgcgcatatcttctgcaccgaggatcaggtcaagaaggaagcagccgatttcatcaagctgaccctgcaggtctatgcggacttcggcttcagcgatatcgccatgaagctttcgacccgtcctgcca

SEQ ID NO: 303032 - DNA, 524 bp, Unknown
  Bacterial polypeptide expressing nucleotide sequence isolated from the Sargasso Sea
aaaattagagtttgttttgagggatgcaattggaagagattggcaatgcggaacattacaagtagatttaaacttaccaggtaggctgggtgctacgtatattggagaggatggtaataaaaaaacaccagttatgcttcacagagcgctcttcggatcacttgaaagattcacaggtatacttattgaacattatgctggtcatcttccactttggctttcaccattacaagtaatggtagcaacaattacatctgatactgatgattatgcgttattggttaaaaataaattgatcaaagagggggttaaagctgatgtagatttaagaaatgaaaaaattggttataaaattcgtgaacatagcaatactaagatcccgttgatcatcgcagttgggaaaaaagagtctcaagaacaaacagtttcagttagaagaattggatctacagaaacaaaaacctttaaattagatgaaatcactagtactttatctagtgaagtaaaatcaccaatagaataaa

SEQ ID NO: 303033 - DNA, 805 bp, Unknown
  Bacterial polypeptide expressing nucleotide sequence isolated from the Sargasso Sea
tctggactgacgagggtccgtcagtttgctcaggatgattgtcacgtatatctgcgtgaggatcagatcgctgaagaggtccagttcctgactgatttcatcttgggccattatgcggcgttcgggcttgagtctcgggttaagtttgcgactcgacctgaacaacgtatcggaagcgacgagcagtgggatcacgctgaggctgagcttaggcaggctttagaagcgacgggttgtgagtatgatgtcgaagagggtgacggggcattctatggtccgaaaattgactttcatgtcactgattcgattggacgtagctggcagctgggaacgattcaactcgactacagtgctccggagcgatttggtctggagtacgtcggtagtgacaataagcctcatcgtccggtcattatccaccgtgcagtctgcggctctttcgagcgattcatcgcaatcctcatagagcactatgcaggagcgttccccacttggttggcacccgagcaagttagagtcatgtccgttgggcaggactgggatgagagtgctcatcagttggtcgatgttctggtgagggctggtattagggccacacttcaatcgcgagagacgctgggttaccgaatcagggaggcagagttgcacaagattccctacatggcggtcgttggagagagggaagcgttagacagcactgtagcagtgcgtgagcgtgggaagggtaagaagcaagaggtgatgtcgcgagatagcttcgtgagccttattaaggaaaagattagcacccgatcgttaacctgat

SEQ ID NO: 303034 - DNA, 511 bp, Unknown
  Bacterial polypeptide expressing nucleotide sequence isolated from the Sargasso Sea
agatgcattaggtcgtgagtggcagttagggaccattcaggttgattacaatcttcctgaccgttttgaattggaatatacaggttcagacaatcagaaacacaggccggttatgattcatcgagcaccttttggttcaatggagcgttttgttgctgtccttcttgagcattgtgctggagatttccccttatggcttacttctaagcaatttattttacttcctatttcagataattacaacggatatgcagaaaaaatttcggaagtgctaaatttttccgatattcgcggccttgttgatactcgaagtgagaaagttggtaaaaaaattcgagatgcagaaatggcaaaaatccccttcatgctcataattggagagaaggaagtaaaggatggtttggtctctgtgagaaaaagaggagagggagatttaggagcaatgtcaatagacaagttccaggctttagttgaggatgctgtaaacaaagagttgtcacaagaaatttaa

SEQ ID NO: 303035 - DNA, 817 bp, Unknown
  Bacterial polypeptide expressing nucleotide sequence isolated from the Sargasso Sea
atgataaatataacatttcctgataaatcagttagaaaatatgaatctagtatcactggtaatgatctagctaaatcaattagcaatagtcttgcgaaaagtgctgtttgtattgaaattaatggtgaattgagagacctttcatatttaattgaaaatgatgcagtctgtaaaatttttaccaaagaagatcaatattcccttgataccttaagacactcaactgcacatgttatggcacaagctgtcttaaatctttatcctggcactgagtttgctgttggaccctccattgatgatggtttttattacgatttcctgtttaaggaaaatattaaagagtctgatttaatcaaaattgaaaatgaaatgagaagaatcagtaaatcccaacaagattttgttagagaagaaatttcgaaggatgaagcatataagatgtttagtaaacaaacatttaagcaagaacttattaattcagcggataaaagtgaaggtgtatccgaagaaaatatatctatttataaaaatgataaatttagtgatttatgtagaggtccacatgttcaaaatactagtttgataaatcatttcaaattaaccaaacttgctggagcttattggagaggtatagaaacaaatctacaattacaaagaatttatggtactgcctggttcaacaaagatgatttagataattatttaaaaagacaagaagaagcagagaaacgtgatcatagaaaattaggaaacgaactagatttatttattagtactgatgaaactggtcctggtcaatttttgtggaaaccaaaag

SEQ ID NO: 303036 - DNA, 805 bp, Unknown
  Bacterial polypeptide expressing nucleotide sequence isolated from the Sargasso Sea
catcggacccgccatcgaggagggattctactacgattgctacctcggagaacgcacgctgagcgccagcgagacggacggcatccagaagcgcatggaggcgatcatcaaggagaagcagcccttccagcgcatcgtggtgagccgagccgaggcgctggagatgttccaggagaataagttcaaggttgagctcatcagcaacctcccggaggacgccaccatctcctgctaccgctgcggccccatggtcgacctctgccgcggcccccaccttcccgacaccgcgtggatcaagacggtgtccgtcaaccagtgctcgcgggcgcactggagagccgacgtcaccaaggaccccctggtccgcgtctacgccgtcaccttccccgacaagaagctcatggccgagtacaagcttcgcatcgaggaggcgaagaagcgcgaccaccgcctgatcggtctcaaccaggagctcttcttcttccacaccctctccccgggctcgtgctttttcctgccgcagggcgccaagatttacaacaagatgatggagttcatccgcgagaagtactgggagtacgagtacgacgaggtcatcaccccgaacgtgtacaacttcgacctgtggaagacctccggtcacgcggcgcattacaaggagaacatgttctcgttcgacgtggagaaggcggagtttggcctgaagccgatgaactgccccgggcactgcgtgatgtttggcaaccgcaagcgatccttccgcgagctgcccatgaggctcgccgactttggcgtgctccaccgc

SEQ ID NO: 303037 - DNA, 865 bp, Unknown
  Bacterial polypeptide expressing nucleotide sequence isolated from the Sargasso Sea
agagatcatagaaaacttggaaaagaaatggatttgttccattttagagaagaaagtccgggatcagtattttggcatgaaaaaggatgggctttatttcaaaaattaataaattatatgagaagcaggcaagatgctgctggttatagagaggtgaatacaccagaaatattagatagacaactatgggaaaaatctgggcattgggaaaaatatggagaaaatatgtacacttcagaaacaccagatgaaaaagtattcgcaattaaaccaatgaattgcccaggtcatattcaagtatttaaccaaggattaaaaagctatagagatttaccaatacgaatagctgaatttggaaaagttcatagatacgaaccatctggtgctttacatggcttattgagagtaagagcatttacgcaagatgacgcgcatattttttgttcagaggatcaaattacaagtgagtgcttagaggtaactaatttgattttagatatttataaagatcttggttttgaaaatgtaatattaaaatatgcagatagacctgaagtaagagtaggtgatgatgagatttgggacaaagctgaagcatcattgcttgaagcagttaaagcttcaaaacttgaatacagtataaataaaggtgaaggcgcattctatggacctaagattgaatttgttttaagagatgcaattggtagagactggcagtgtggaactttacaagttgatttaaatttaccaggacgattagatgcttcttatgttgataaagatggaactaaaaaagttcctgttatgttacacagagcattatttggatctctagaaagatttattggaattttaattgaaaact

SEQ ID NO: 303038 - DNA, 522 bp, Unknown
  Bacterial polypeptide expressing nucleotide sequence isolated from the Sargasso Sea
aatgccaaatataactttaactgatgggaaaaagttaagctttaagaataaggtaactggtttagaggttgccgagaagataagtaaatcactttcaaaacaagcgcttattatgagcgtgaatggtgaattaaaagatttaagcttcttaatacacaaagactcttcggttaaaataattaccaataaggacaaagaaggtttagatgtaataagacacgatgctgctcatataatggcaatggcagttcaagaattatttccaggaacgcaagtaacaattggtcctgtaattgaaaatggtttttattatgattttgcaagaaaagaaccatttacaagtgatgatttaaaaaaaattgaaaaaaaaatgtctgaaataattgatagagatgtaaaaacaaaaagagaagtatgggagagagataaagcaatccaacactttaaaaaaataggagaaaaatataaagcagaaatcatcgagagcatacctgaaaatgaggaactttcagtttatcatca

SEQ ID NO: 303039 - DNA, 933 bp, Unknown
  Bacterial polypeptide expressing nucleotide sequence isolated from the Sargasso Sea
ctgaagaaggtctcatcattttatacaagcacgaagaatacatcgacatgtgtagagggcctcacgttcctaacaccagacatttgagacactttaaattacttaaattatcaggttcatattggagaggcaatagtgagaatgaatcattacaaagaatatatggaactgcatgggcaaaagaaaaagaactcaatgactacttaacaagaattgaagaagcggaaaaaagagatcatagaaaacttggtaaaaagcattcattatttcatatacaagaagaatctccaggaatgattttttggcatccaaatggatggaccatctaccaagtaatggaaaagtacataagagaaatactcaaaaaaaatgattatttagaaattaaaaccccacaagctgttgataaatctctttgggaaaaatcaggtcattgggaaaaatttagagacgatatgttcactactgcatcagaaaatcgaacatatgcaattaaaccaatgaattgtccatgccatatacaagtatttaatcaaggtttaaaaagttataaggatttacctattcgtcttgctgaatttggttcttgtcatagaaacgagccatctggtgcactacacggcttaatgagagtaagaaactttactcaagatgatgcacacatattctgcacagaagagcaaattcaagaagaggtatctacttttatagatcttgttttcgaggtctataaaacttttggttttgatgaaattattatcaaattatcaactcgtcctgaaaaaagagtaggtagtgaagatatttgggataaatcagaagaggctcttaccaaagctctcgataataagaatctaaaatgggaattacaacctggagaaggtgctttttatggtccaaaaaatagaattctcgttaaaagattgtcttaat

SEQ ID NO: 303040 - DNA, 933 bp, Unknown
  Bacterial polypeptide expressing nucleotide sequence isolated from the Sargasso Sea
gtaatggcgaccgtgttgatgcgtgtgagctaattaatgatgatgcacgccttgagatcatcacagcaaaagatgaagacggacttgagattattcgtcactcgtgtgctcacttaataggtcatgcggttaagcaacttttccccgaagcaaaaatggccattggccctactattgataacggcttttactacgatatcgatttagatcattctttgtcacaagatgacttagatgccattgaaaagcgtatgctgcaacttgcaaaaacaaactatgacgtagtgaaaaaaacagtaagctggcaagaagctcgcgatacgtttgaagcgcgtggcgaaacatacaaaattgaaattttggacgagaacattgcaaaagatgatcgcccaggattataccaccacgaagaatacgtagatatgtgtcgtggtcctcatgtacctaacatgaaattctgccaaaacttcaaaataatgaaagtagcaggtgcgtactggcgtggtgattctgaaaataaaatgttacagcgcatttacggcactgcgtggggcgataaaaagcaacttaaagcgtatttaaagcgtttagaagaagctgaaaagcgtgatcaccgtcgtattggtaaggctctagatttatggcactggcaagaagaagcgccaggtatggtattttggcacaacgatggttggagcatttaccgtgagcttgaagagtttgttcgtgaaaaattacgtgaataccaatacgaagaagtaaaaggtccaatgatgatggaccgttctttgtgggaaaaatctggtcactgggaaaaatactcagacgccatgttcaccacagagtctgaaaagcgcgaatacgctattaaaccaatgaactgcccgggtcacgtgcaaatttttaacccaaggtttaaaatcgtaccgtgat

SEQ ID NO: 303041 - DNA, 555 bp, Unknown
  Bacterial polypeptide expressing nucleotide sequence isolated from the Sargasso Sea
aatgcctacaataacattaccagacggaaacaatataaatttttcaaaaaaagttaccggagctgaggtagctgagaaaataagtaagtctttagctaaacaagcaatggttataagcgttgatggtgaacttaaagatttagattatttaatagataaagattgttcagtaaaaatttttacttctaaaaatccagaagggttggaaacaattagacatgacacagctcatattttggcaatggcagttcaggaactgtttccaggtacacaggttacaattggtccagttattgaaaatggattttattatgactttgccagaaaagaaccattcactgaagatgatttattaaaaatcgaaaataaaatgaaagaaattgttgatagagatgaaattaccaaaagagaagtttgggaaagaaataaagctattgatcatttcaaaaaaaaaggtgaaatttataaatctgaattaattaaagctatcccagagaaagaagatgtctcaatttattttcatggagattggcatgatctttgtagaggtcccca

SEQ ID NO: 303042 - DNA, 767 bp, Unknown
  Bacterial polypeptide expressing nucleotide sequence isolated from the Sargasso Sea
gcctgataatgaggaaattagtatttacaaacaaggtgattggttagacttgtgccgaggccctcatatggtttcaacaaaacaaattggaaaagcatttaaattaatgaaagttgctggcgcttactggcgaggtgattcatctaatacaatgctaacaagaatttatggaacggcctgggcaacagaaaagggtcttgaacaacaccttttacaaattgaagaagcagaaaaaagagatcaccgaaaactaggaagagaaatggatttatttcattttcaggaagaggctcctggagcggtattttggcatcctaagggttggacattattccagtcgctaattaattatatgcgaaacagacaagacaaggcaggttacgtagaaactaatacgccagatatgatggataagtctctatgggaaacgtctggtcactgggacaaatttagcgacatgatgtttagaactgaagcaaaagacgataaaatttatgctatcaaaccaatgaattgccctggtgctgtagaaatttttaaacaaggattaaaaagttatagagacttaccatttctattatctgaattcggaaaagtacatcgttatgaaccatcaggtgctcttcatggattaatgagggtgagagcattcacacaagatgatgcacatatattttgcacagaagatcaaattacacaagagagtaaaacggtatgtgatttgatacttagtatctataaggactttggtttcgataatgttagaa

SEQ ID NO: 303043 - DNA, 925 bp, Unknown
  Bacterial polypeptide expressing nucleotide sequence isolated from the Sargasso Sea
actaaaggatcttaattttcctttaattgctgattgtgatttggaattgtttactggtgaaaccccggaaggtcatgatacccttttacattcaacagcacacctcatggctcaagctgtcaaagagttatttccaaaagcaaaagtaactataggacctacaatagttaatggattttattatgactttgatgtggataaaacttttttggatgaagatttagagaaaatcgaaaaaaagatgaaagaattagcaaattcatcacaagaaattttccggagtgaaatttctgcaaaagatgctgtaagtctatttaaaaatataaatgaagattataaggttgaaataattgaacaaattaatccagacgacgtaataagtatctacaaacaatctaattttgttgatctttgccgaggtcctcatgtttcaaacacatctaaaattaaatattttaaacttctctcaactagtggtgcttattggaggggaaatgaaaataataaaatgcttcaacgtatttatgggactgtattttcaacaaaagattcattaagaaaccatctaaacaaccttgaagaagcaaaaaaaagagatcatcgaaagattggtaaagaactgaagttatttacatttgatagtgaaataggaccaggattgcccttatggcttccaaatggtacagtgatgattgaagaactagaaaagctcgctaagtatacagaaaaaaaagctggttacgaccaagtaaggacacctcatttaacaaaggggatagtttatgaaaaatctggacatttagaacattataaagagtctatgtatccaggaatggagattgatggtgttgattactatgtaaaaccaatgaattgccctcatcatcataagatattttgcttcacacctagaaagttatcgtga

SEQ ID NO: 303044 - DNA, 725 bp, Unknown
  Bacterial polypeptide expressing nucleotide sequence isolated from the Sargasso Sea
aatgcccaatataactttaccagatggaaaaaagttaaatttcaaaaataaagtaaccggcctagaggttgctgaaaagataagcaaatcgctttcaaaacaagcactcataatgagtgtagatggagaattaaaagatttaagtttttcaattcaaaaagactcttctgtaaaaataattactcataaagataaagaaggcttagacgtaataagacacgatgctgcccacataatggcaatggcggttcaagaactattcccaggaactcaagtgactattggtcccgtaattgaaaatggtttttattatgattttgctagaaaagaaccatttacaaaagatgatttaaaaaaaattgagaaaaaaatgtcagaaataatcgatagagatgtaaaaacaaaacgagaagtatgggaaagaagtaaagccatagcacatttcaaaaagataggagaaaagtataaagcagaaataattgagagcatacctgaaagcgaggaactttcagtctatcatcatggagatacttggcacgatttgtgtagaggacctcacttagcttcctcaagtaaaattggaaaggcttttaaattaacaaaagtctctggtgcatattggagaggcgattccaataatgaaatgttgcaaagaatttacggaacatgctggagctccaaaaaagaattagatgattatttacttaggttagatgaggctgaaa

SEQ ID NO: 303045 - DNA, 839 bp, Unknown
  Bacterial polypeptide expressing nucleotide sequence isolated from the Sargasso Sea
aaaagttcataggtatgaaccttcgggtgcattacatggtcttttaagagtaagagcatttacacaagatgatgcacatatattttgcaccgaagatcaaattacagaagagtctttatcagtgacaaatttaattttagaaatatacaaagatcttggtttcaaagatgttatcttaaaatattcagacagacctgagcaaagagtaggtgaggatattatttgggataaatcagaggctgctcttttaacagcaattaaaaagtcaaaattaaaatacacaattaacaaaggagaaggagctttttacggtcccaagattgaatttgttttaagagatgcaattgggagagactggcaatgcggtactctgcaagttgaccttaatttacctggaagactaggagcatcttatgtagcaaaagacgggacaaaaaaagttccggtcatgttacacagagctttgtttggctcgttagagagatttataggaattttaattgaaaactatgctggtaagttacctttctggttatctccagcacaagcggtggtatgccctatagcagaggaaaacaatacttatgttaaaaagttatttgaagatttgtttaaagagggtataaaatgtgaaatggatttgagaaacgagaaaataaattataaagttagagagcattctcttgcaaaaattccgtatattattgtttgtggcaagaaagaagttttagaaaacacagttactgtaagaaaattaggctctgaaaaacaagaagtgattaaaagagaagaccttattaaaaatatgttagatttaaataagttgcctttaaattaag

SEQ ID NO: 303046 - DNA, 917 bp, Unknown
  Bacterial polypeptide expressing nucleotide sequence isolated from the Sargasso Sea
ggtagagaaatggacttatttcactttagagaagaaagccctggctcagtattttggcatgaaagaggatggagtttatttcaaaagctcattaactacatgagaagcagacaagatgctgctggttacaaagaagtaaatactccagaagtattagataggcaattatgggaaaaatctgggcattgggaaaaatatggagcaaacatgtacacatctgaaacaccagatgagaaagtttttgcaattaaaccaatgaattgtcctggtcatattcaagtatttaatcaaggtctaaaaagttacagggatcttccattacgttttgctgaatttggaaaagttcatcgttatgagccatcaggcgctttacatggtttattacgagtaagagcctttactcaagatgatgcccatattttttgtactgaagatcaaattactagtgaatgtttaattgttacaaatttaatattagatatttataaggacctcggatttgaaaatgtgattctaaaatatgcagatagaccagaagtaagagttggagatgatttagtatgggataaagcagaagcctctttgcttgaagcagttaaagcttctaatttagaatacaccatcaataaaggtgagggagcattttacggtccaaaaattgaatttgttttaagagatgctattggcagagattggcaatgtggaactttgcaagtagatttaaatttacctggaagattagatgcttcttatgttgataaagatggaactaaaaaagttcctgttatgttgcatagagcattatttggttctctagagagatttattggaattttaattgaaaattatgcaggcaagtttccattttggatatctcctttacagactatggttatacctatttcagaagagtttaa

SEQ ID NO: 303047 - DNA, 871 bp, Unknown
  Bacterial polypeptide expressing nucleotide sequence isolated from the Sargasso Sea
taaaataggaaaagcctttaaactaacaaaggtatccggagcttattggcgaggagactcaaataatgaaatgttacaaagaatttatggaacatgttggggttcaaaaaaagaattagaagattacttacatagattagaagaggctgaaaaaagagatcacagaaaactcggtaaagaaatggatttatttcattttagagaagaaagtcctggttcagtgttttggcatgagaaaggttggttattatttcaaagattagttgaatatatgagaatgaagcagcgcttggcaggttataaagaaataaatacacctgaacttttagacaaaacattatgggaaaaatctggtcactgggaaaaatttggtgagcatatgtttacctcagagacaccagatgaaaaaacttttgcaataaaaccaatgaattgtcctggttgtgttcaagtttttaatcaaggattgaaaagttacagagatttacctttaaaattatcagagtttggaaaagtgcatagatatgaaccctctggtgcattgcatggattattgagagtgagagcttttacacaagatgatgctcatattttttgcacagaggatcagataactcaagaaacgttagcagttactaatttgattttggaaatttataaagctcttggatttgaaaatgtaattttgaagtactctgatagacctgaaaagagggttggtgatgatagtatttgggataagtctgagtctgctttattatctgcaataaaaaaatctaaacttgagtatacaattaataaaggtgaaggagctttctacggacctaaaatagaatttgttttaagagatgcaatcggtcgggactggcaa

SEQ ID NO: 303048 - DNA, 661 bp, Unknown
  Bacterial polypeptide expressing nucleotide sequence isolated from the Sargasso Sea
cttggacaaccccggatccccttcacggaagccgatctcaaggcgatcaagaaggggatgatcaagatcataaaaaaaaaggtcccgctcgagcgtgtcgaagtgacgcgcgctgaggcggaaaccaagatcaaggcccagaacgagccctacaagctggagatcctggaaggcctccaggatccgatcaccctctacaccctcggagaggactggtgggacctctgcgccggcccccacgtggagcacaccggccagctcaacgccaaggcttttgagctggagagcgtggcgggggcctactggcgcggtgatgaaaccaaggcccagttgcagcggatctacggcacggcctgggaaaccgccgagcaactggccgagcacaaacgccgcaaggaagaggccttgcgccgggatcatcgccgcatcggcaaagacctggatctgttctcaatcgaggatgaagctggtgctggattggtgttctggcacccccgtggcgcccgcatgcgtctgctgatcgaggagttctggcgccaggcccacttcgaagggggctacgagctgctctacacgccccacgtggccgatatcagcctctggaagacctccggccacctcgatttctacgccgagagcatgttcggcccgatggaggtgg

SEQ ID NO: 303049 - DNA, 769 bp, Unknown
  Bacterial polypeptide expressing nucleotide sequence isolated from the Sargasso Sea
tgcgcatatatttttttgcactgaagatcaaataacagaagaatgtttaacagttacaaatcttattcttgaaatatatagagatttaggttttgaaaatgtgattttaaaatattctgatagaccagatttaagagttggggatgacagtgtttgggataaagcagaagccgcattattaaaagcagttaaaacaacaaaactagaatacagtataaataagggagaaggagcattttatggacctaaaattgagtttgttttaagagatgctataggaagagactggcaatgtggaactcttcaagttgattttaatttaccaggaagattgggtgcatcatatgtagataaagatggaacaaaaaaagtgcctgtaatgcttcatagagcattattcggttcgcttgaaagatttattggaattttaattgaaaattatgctgggaaatttccattttggatttcaccattgcaaacagttgtaattccaatctcagaagaatttgatgattatgcaattgaagtttgtaaaaaaattaaagaagtaggcataagttcagtaacagatttaaaaaaacacaacttaaattacaaaattagagatcattctctagcaaaaatacctcttttactaatttgtggtaaaaaagaagttgacagtaacacggtaactattagaagattggattctaataaacaagaaaatatggaactaaaattattcttaaaaacattctctgcattaaataaagcaccttcaaattaa

SEQ ID NO: 303050 - DNA, 298 bp, Unknown
  Bacterial polypeptide expressing nucleotide sequence isolated from the Sargasso Sea
cgaaaaagtatttgcaatcaaaccaatgaattgtccaggacacattcaagtttttaaccaaggattaaaaagttatcgagatttacctttgcgtattacagaatttggaaaagtacaccgttatgaaccatctggagctttgcatggattattaagagtgagagcatttactcaagatgatgcgcatattttttgttctgaggatcaaattacaagtgaatgtttagaggtaaccaatttaattttggatatttataaagatttaggttttgaaaatgtaattcttaaatatgcagat

SEQ ID NO: 303051 - DNA, 913 bp, Unknown
  Bacterial polypeptide expressing nucleotide sequence isolated from the Sargasso Sea
tgctgcccatattatggccatgtctgttcaagaactttttcctggtacacaagttacaataggaccagtaattgaaaatggattttattatgattttgctagaaaggaacctttcacttcagaggatttagaaaagattgaaaaaaaaatgtcagaaataattgacagaaatgttaaaactagaagagaagtttgggaaagagaaaaagcaattaaacattttaaaaaaattggcgaaaaatataaagctgaaataattgaaagtattccgaaaggagaggagctttcaatttaccatcatggagaaacttggcacgatttatgtagaggtccacatttaccttcatctggaaaaattggaaaagcttttaaactaactaaagtttctggcgcttattggagaggagactccaataatgaaatgttacaaagaatatatggaacttgttggagcagcaaagagcaattaaaattatatttagataggttagaagaagctgaaaaaagagatcacagaaaacttggaaaagagatggatctatttcattttagggaagaaagtccaggatctgtattttggcatgaaaagggatggattttatttcaaagactcgtcgagtacatgagatttagacaaagactagatggttacaaagagattaatacacccgaattgttagataaaactctgtgggaaaaatctggtcactgggaaaagtttgctgagcatatgtatacatcagaaactccagatgaaaaagtttttgcaataaaaccaatgaattgcccaggttgtgttcagatatttaatcaaggtcttaaaagttatcgagatcttccattaaaactttctgagtttggaaagttcatagatatgagccttcaggagctttacatggactgcttcgagtga

SEQ ID NO: 303052 - DNA, 805 bp, Unknown
  Bacterial polypeptide expressing nucleotide sequence isolated from the Sargasso Sea
catgggtttactaagagttagagcctttactcaagatgatgcacatattttttgtacagaagaacaaattacgagtgagtgcttaatagtcactaatttaattttagatatttataaggacctagggtttaaaaatgtaattcttaaatatgcagatagacctgaggttagagtcggaaacgacagagtttgggacaaagcggaagcatcattacttgaagcggtgaaagcctcaaagttagaatatagtatcaacaagggagaaggagcattttatggtcctaaaattgagtttgttctaagggatgcaattggtagagattggcaatgtggaactttacaagttgatttaaatttacctgaaagattagctgctttttatgttgataaagatggaactaagaaaattccagtaatgcttcacagagcactttttggatctctagagagatttattggaatattaattgaaaattacgcaggcaaattcccattttggatagcacctttacaaacaatggtaatacctatttcagaagaatttaatgattatgctattgagacatctagtaaaattaaaaatgtaggtatcagctcctctgttgatttaaaaaatcaaaatttaaataataaaataagagatcattcgttagctaaaatacctcttttgttgatttgtggtaaaaaagaagttgactccaattctgtaacgattagaagattaaattctaataaacaagaaaatatggatatagataaatttctaaaaactttctctgctttaaacaaagcatcttcaaactaa

SEQ ID NO: 303053 - DNA, 610 bp, Unknown
  Bacterial polypeptide expressing nucleotide sequence isolated from the Sargasso Sea
tcgcgccgaacaagcctgccgtgatgctgccgcatcgctaggtgtgccgtttaccgaagaggaaggtgaagccgccttctatggacctaagattgacttcgttgttagagatgtgcttggaagagagtggcaacttggaactgttcaggtcgattacaacctccccgagcgattcgacctttcctatgtaggtgcagatggtgaaaagcatcgacctgtgatgattcatcgcgcgccctttggaagcatggagcgattctgtggtgttctcatcgaacactttggaggcatgttccccacttggctatctccaacccaagcacatatcctaacaatttctgagaagcatatcgactatgccaatcaggtcagtacggcgctgagagaagccaatgtccgtgtggaaatggataccagcgatgacacgattggtaagaagttgcgaacccatcgcgccatgcgtccggcttaccttctcatcctcggtgatgaggaagcaaacagtgggactgtgtcttacatgggccctgatcgtgagcaagtcaacggcgtagctctcgctgatttcgtcgcgatgattgaggctgaaatatccagtcgctcagcttag

SEQ ID NO: 303054 - DNA, 814 bp, Unknown
  Bacterial polypeptide expressing nucleotide sequence isolated from the Sargasso Sea
agacgaagccccaggaatggttttttggcatccttatggttggactatttatagacagcttcaaaattttatgcgtcagaaacttgaagattctggatacttagaaattaatactccattagttgttgatagaaagctatgggaggcatcaggccattgggacaaatatcgtgaaaatatgtttataaccgaaatagatgaagagcatgctaatgaaaaaagagtaaatgcattaaagcccatgaattgtccttgtcatgttcaggtatacaatcaaggtataaaatcttacaaagatcttccaattaagtttgctgaatttggatcatgtcacagatatgaaccgtctggaacaatgcatggattaatgagggtaaggggctttactcaagatgatggtcatatattttgtaccgaagatcaaatagagtctgaaactggtaaatttatagaattgctttcgggtgtatatgctgatttaggatttaaggattttgatataaaactatcaacaaggcctgaaacaagagttggttccgatgatgtctgggatagggcagaatcttcattggaagctgcaataaaaaatttaggttatccctataaaattgatgaaggagatggagctttttatggcccaaagttagattttgttcttaccgatgcaataggaagagattggcagtgtggtacttttcaattagattttaacttaccagaaaggcttaatgcagaatatgttggtgaggatggaaacaaaaacaatccggtcatgattcatagagctgtgctaggttcctttgagagatttatt

SEQ ID NO: 303055 - DNA, 833 bp, Unknown
  Bacterial polypeptide expressing nucleotide sequence isolated from the Sargasso Sea
gagaggagactccaataatgagatgctgcaaagaatttatggcacttgctggagttcaaaacaagaattagacaattatcttcatcgtctagaagaagcggagaaaagagatcatagaaaattaggaaaagaaatggatctttttcattttagagaggaaagccccgggtcagtgttttggcatgagaaaggatggttattatttcaaagattagttgaatatatgagaatgaaacaaaggttggctggttataaagagataaatacaccagagcttcttgataaaactttatgggaaaaatctggacactgggataaatttggtgagcatatgtttacttctgagacaccagatgaaaaaatttttgctgtgaaacctatgaattgccctggatgtgtacaggtatttaatcaaggcttaaaaagttatagggatttacctttaaaactttcagaatttggaaaagttcaccgttatgaaccttcgggcgctttacacggtttattaagagttagagcattcacacaagatgatgcacatattttttgcactgaagatcaaattactgaagagtcattatcagttacaaacttaattttagaaatttataaagatttaggttttaaaaatgtaattttaaaatattctgatagaccagaacaaagagtaggagaagatagtatttgggataaatcggaagctgctttactaaccgcaattaaaaaatcgaaattagagtacactattaataaaggtgagggagctttttacggaccaaaaattgaatttgttttaagagatgcgattggaagagattggcagtgtggtacgc

SEQ ID NO: 303056 - DNA, 823 bp, Unknown
  Bacterial polypeptide expressing nucleotide sequence isolated from the Sargasso Sea
attgggtcctacaatagagaatggtttttattacgattttgatgtagatacagcattttctgatgaggtaatagctcaaatcgaaaaaaaaatgaaggaactagccaaatcctctcaagaaattttccggagtgaaatttctgcaaaagatgcaattactttgttcaagaatatggatgaggattataaggttgaaataattgaacaaattaatccagacgatgttattagtacctacaagcaatctgattttgttgacttatgtagagggcctcatgtttcaaacacatcgaaaataaaacattttaaactcctatcaacttccggcgcctattggaggggtaatgaaaacaataaaatgcttcaacgtatctatggaactgtattttcaacaaaggaagcattgagagagtacctatttaatctcgaagaggcaaaaaggcgggatcatcggaaaattggtaaagaaatgaatttatttacatttgacagcgatattggtcctggattgccactatggcttcctaatggcacagtaatgcttgaggagctagagaaacttgcaaaatatacagaaaaaaaagctggttacgatcaagtgagaacgcctcatctaaccaaaggaacaatttatgaaaaatctggacatttagatcattacaaggaatctatgtatcccggaatggtaattgacggggtcgactactatgtaaagccaatgaactgcccgcatcatcataagatattttcttcgataccgagaagttatcgcgatatgcctgtgagattatcagaatacggaacatgttaccgttatgaaaaa

SEQ ID NO: 303057 - DNA, 835 bp, Unknown
  Bacterial polypeptide expressing nucleotide sequence isolated from the Sargasso Sea
agcccaagctgtattaaatctttatccaggtacagaatttgccgttggaccttccatcgatgatggtttttactatgatttcttatttaaagaaaatattaaagagtctgacttaatcaaaattgaaaatgaaatgagaaaaatcagtaaatctcaacaagattttgttagggaagaaatttcacaggatgaagcatataaaatatttagcaaacaaacattcaaacaagaacttattaatacagctgacaaaagtgaaggtgtatccgaagaaaatatatctatttataaaaatgataaatttactgatttatgtagaggtccacatgttcaaaatactagtttgataaatcatttcaaattaaccaagcttgccggagcttattggagaggtatagaaacaaatccacaattacaaagaatttatggtacagcctggtttaacaaagatgatttagataattatttaaaaagacaagaagaagcagagaagcgtgatcatagaaaattaggaaatgaattagatttatttattagtactgatgaaactggtcctggtcaatttttgtggaagccaaaaggtgctgtattaagacaaatcatagaagactattcaaaaaaagcacactctgaaaatggttatgactatgcttacactccacatattggaagatcagtcctttgggagacatctggccatttagattactacaaagaaggtatgtttcctccattaaagaacgaagagaacgacgaagaatattatctcaaaccaatgaactgccctttccatatacttatatataagagtgacatccgatcgtataaagagttg

SEQ ID NO: 303058 - DNA, 849 bp, Unknown
  Bacterial polypeptide expressing nucleotide sequence isolated from the Sargasso Sea
tttggctgaaaaaggctggatattatttcaaaaattaattgattatatgagaatgaagcaaaatattgctggttataaagagataaatacaccggaagttttagatagaactttatgggaaaaatcaggacattgggaaaaatttggatcaaatatgtatacttcaactactccagatgaaaaagtttttgcgattaaacctatgaattgtcctgggtgcatagaagtttttaatcaaggccttaagagttataaagatttacctttaaagatgtcagaatttggaaaagtgcatcgttatgagccctcaggagcgctgcatggtttgttgagagtcagggcgtttacacaagatgatgcacatatattttgtacggaagatcaaattactgaagaatgcttagtagtaacaaatcttattctagaaatttataaagatttaggatttgaaaatgtaattttaaaatattctgatagacctgagttaagagtaggtgatgatagcgtatgggataaagcagagactgctttattgaaggctgttaaagcaactaagttagaatatagtattaataaaggtgaaggtgcattttacggaccaaaaattgaatttgttttgagagatgctattggaagagattggcaatgtggaactttacaagttgattttaatttacctggtagactaggcgctacttatgtagataaagatggatctaaaaaagttccagtaatgttacatagagcattgtttggatcgctagaaagatttattggaattttaattgaaaattatgcgggcaaatttcctttctggatctctccattacaaacagttgttatatcaat

SEQ ID NO: 303059 - DNA, 600 bp, Unknown
  Bacterial polypeptide expressing nucleotide sequence isolated from the Sargasso Sea
gatgccaaatataacattaccagacggaaaaaagttaagttttgaaaaacatgtaactggtttggaggttgcagagaagataagcaagtcactttcaaaacaagcacttattataagtgtgaatggcgaattgaaagatttaagttttccaatagaaaaagattcttcagtcaaaataattaccaataaggataaagaaggtttagatgtaataagacatgatgctgctcatataatggcaatggcagttcaagaattgtttccaggaactcaagtaacaattggccccgtaattgaaaatggtttttattatgattttgcaagaaaagagccatttacaagtgatgatttaaaaaaaattgaaaaaaaaatgtcagaaataatcgatagagatgttaaaactaaaagagaggtttgggagagaaacaaagctatagcacatttcaaaaaaataggagaaaagtataaagcagaaataatcgagagcatacctgaaactgaagaactatcagtttatcatcatggtgatacttggcatgatttgtgtagaggaccacatctagcctcatcgagtaaaattggcaaagcttttaaattaac

SEQ ID NO: 303060 - DNA, 849 bp, Unknown
  Bacterial polypeptide expressing nucleotide sequence isolated from the Sargasso Sea
tgatgactatctccaaagaatagaagaagctgaaaaaagagaccatagaaaactaggtaaagaaatgaatttatttcattttagagaagaaagtccaggatctgtattttggcatgataaaggatgggcactttttcaaaaacttgttagctacatgagagcaaagcaagaagatgcgggatataaagaaattaatacacctgaaatattagatagatctttatgggaaaaatcaggacattgggaaaagtttggagagaatatgtacacatctacaactccagatgaaaaagtttttgcaattaagccaatgaattgccctggctgcgttcaagtttataatcaaggtttaaaaagttatagagatttaccattaaaaatgtcagaatttggaaaagtacacaggtacgaaccatctggagcacttcatggactattaagagttagagcatttacgcaagatgatgcacatatattctgtactgaagatcaaataacagaagagtgtctgagtgttacaaacttgatattagaaatttataaagacttaggatttgaaaatgtaattttaaaatattctgatagaccagaagttagagttggagaggacagtgtatgggacaagtcggagacagctttattaaaagccataaaagagtctaaattagaatacagcattaataaaggtgaaggagcattttatggacccaaaatagaatttgtattaacagatgctataggaagagattggcagtgtggaaccttacaagtggatctaaacttgcctggaagactaggagctacatacgtagataaagatggtggaaaaaaagttccagtaatgcttca

SEQ ID NO: 303061 - DNA, 880 bp, Unknown
  Bacterial polypeptide expressing nucleotide sequence isolated from the Sargasso Sea
atgagaagtagacaagatgctgctggttacaaagaggtaaatactccagaggtattagatagacaactatgggaaaagtctgggcattgggagaaatatggagaaaacatgtacacttctgaaacgccagacgagaaagtttttgcaattaaaccgatgaattgccctggtcatatccaggtgttcaatcaaggcttaaaaagttacagagatcttcctttacgttttgctgaatttggaaaagttcatcgttatgagccatcaggcgctttacatgggttattaagagtaagagcctttactcaagatgatgcacatattttttgtactgaagatcaaattactagtgaatgtttaattgttacaaatctaatactagatatttataaagaccttggttttaaaaacgtaattctaaaatatgcagacaggccagaagtaagagtgggtgatgatttagtatgggataaagcagaagcttctttgcttgaagctgttaaagcctctaaattagaatatactattaataaaggcgagggagcattttatggtcctaaaattgaatttgttttaagagatgctattggtagagattggcaatgtggaactttgcaagtagatttaaatttacctggaagattagatgcttcttatgttgacaaagatggaactaaaaaagttcctgttatgttgcatagagcattatttggttctctagagagatttattggaattttaattgaaaactatgaaggcaagtttccattttggatatctcctttacagactatggtaatacctatttcagaggaatttaatgactatgcagtcgaggtatcaaataaaattaaaaattctggtataagttctgcagtagatt

SEQ ID NO: 303062 - DNA, 903 bp, Unknown
  Bacterial polypeptide expressing nucleotide sequence isolated from the Sargasso Sea
attacctctgaagacaaagaaggactagatgttttaaggcatgatgcagcacacattatggctatggctgttcaagatatttttcctggtactcaagttacaattggtccagtaatcgaaaatggattttattatgattttgctagaaaagaaccttttaccagcaatgatttaaaaaacattgaaaaaaaaatgtcagaaattatcgataaagatgtaaagacaaaaagagaggtttgggaaagaaacaaagcaattaagcattttaaaaagattggagaaaagtataaagctgatattatagaaagcataccaaaaacagaagaaattacgatttatcatcatggagatacttggcatgatttatgcagaggaccgcatttagcgtcttctggtaaaataggaaaatcttttaaattaactaaagtatcaggtgcttactggaggggagactctaaaaatgaaatgcttcaaagaatttatggtacatgttggagttcgaaaaaagatttagatgaatatttattaagattagaagaagctgaaaaaagagatcatagaaaattgggtaaagagatggatttatttcatttcagagaagaaagccctggctcagttttttggcatgagaaaggttggtcattgtttcaaagattagttgaatacatgagaatgaaacaacgactggctggatataaagagataaacacgcctgaacttttagataaatcactttgggaaaaatcaggccattgggaaaagtttagcgagcatatgtttacatctgaaactcctgatgaaaaaattttcgcaattaagcctatgaactgtcctggctgtgttcaaatttttaatcaaggccttaaaagttacagagatctacctttaaaattgtcagagttt

SEQ ID NO: 303063 - DNA, 466 bp, Unknown
  Bacterial polypeptide expressing nucleotide sequence isolated from the Sargasso Sea
atgcctaatattaaattaccagatggaaattcaattagttttgaaaaaaatgttactggattacaaatagcagagaaaattagtaaatcgctctcaaaacaagccctagtcattagtgttgatggaaatttaagagatttgaattataaaataaataaagattgtacagttaaaattcatacagcgaaagataaagaaggattagaaacaataaggcatgatactgcacatgttttagcaatggctgtacaggaactttttcctggtacacaagttactattggaccagtaatcgataatggattttattatgacttcgcaagaaaaaaaccattcacagaagaagatttacgaaaaattgaaaaaaaaatgttagaaattgtagagagagatgagcctacccatagagaagtttggaagcgtgataaagcagtggaacactttaagaaagcaggagagctttata

SEQ ID NO: 303064 - DNA, 646 bp, Unknown
  Bacterial polypeptide expressing nucleotide sequence isolated from the Sargasso Sea
atgcctaatatacaacttttagatggaaagaaaatttcatttcaaaaatctataagcgggtttgaactaaccaagaaaataagtaaatcccttgagaagtctgcacttataatggaagtaaatggaaaattgagggatttaagttataatattttagaagactctaaggtaaaaattattacttctaaagatcaagagggcttagatgttctaagacacgacgctgcacatattatggctatggcagttcaagaaatttttcctggaacacaagttacaattggaccagttattgaaaacggtttttactatgattttgctcgaaaagagccatttacgagtgaagatttaaaaaaaattgaaaaaaagatgtcagaaataatagacagggatgtaaaaacccgaagagaagtatgggaaagggaaaaggcaattaatcatttcaatcaaattggtgaaaagtacaaggctgagataatcgagagcataccaaagaatgaggaattgtctgtttaccaccatggtgacacatggcatgacttatgtagagggcctcatctcgcgtcatcaggcaaaataggaaaagcgtttaaactaacaaaagtttcaggtgcttattggagaggcgattcaaataatgaaatgc

SEQ ID NO: 303065 - DNA, 874 bp, Unknown
  Bacterial polypeptide expressing nucleotide sequence isolated from the Sargasso Sea
aaaagtgtttgcaattaaaccaatgaattgtcctggttgtgttcaggtttttaaccaaggattaaaaagttatagggatctcccacttaaaatgtcagagtttggaaaagttcatagatatgaaccatctggtgctttacatggacttttaagagtaagagcatttacccaagacgatgcccatatattttgttctgaagatcaaattacagaagaatgtttaaatgtaacaaatttaattttagaaatttataaggatttaggttttgaaaacataattttaaaatattcggatagaccagatatgcgtgttggtgaagacgatgtttgggataaatctgaaaaagcattacttgaagcaattaaagcttcacagcttcaatatagcattaataaaggggaaggtgctttttatggaccaaaaatagagtttgtattaagagatgcaattggaagagactggcaatgtggaacactgcaagtagacttaaatttgcctggccgtcttggagcttcatttgttgataaagatggttcaaaaaaagtaccagtgatgttgcatagagctttgtttgggtcacttgaaaggtttataggtatattaattgaaaattattctggaaaattacctttttggatatcaccacttcaaacagtggttattccagtttctgcagaatttgatagttatgcaaaagaagtaaataaaaaaataaaaaaagaaggaattacttcagaagttgacttaaaaaatcataacctaaactataaaatacgtgaacattcattatcaaaagtacctatattgttaatatgtggaaaaaaagaagttgacagtaatacagtaactattagaagattggattctaataaa

SEQ ID NO: 303066 - DNA, 656 bp, Unknown
  Bacterial polypeptide expressing nucleotide sequence isolated from the Sargasso Sea
agagcttcttgaacatcttgaatccattgaggaagcggaaaaaagagatcacagaaaaattggaaaagatatggatcttttccattttcaagatgaagctcctggaatggttttttggcatccaaaaggatggaccatatactcaactttgaaatcatatatgtctgatatgcaaagacaatctagctatcaagaaataaatactccctcagtaatagatagaaagctatgggaaaaatctggtcattgggataaatatagagagaatatgttcattactgaaattgatgaggagcatgcgaatgaaaaaagagtaaatgccttaaaaccaatgaactgtcctggacatgttcaggtttataatcaaggtataagatcatataaagaacttccattaagactttgtgagtttggaacatgtcatagatatgaagcatctggaactatgcacggactaatgagagttagggggtttacacaagatgatggacatatttttcttacagaagatcaaattgaatctgaaacggcaatctttatagacttattgtcaaaggtttatgctgatcttggattcaatgaatttgagataaaattatcaacacgtccagaaaaaagggttggatctgatgagatttgggacaaagcagaatctt

SEQ ID NO: 303067 - DNA, 562 bp, Unknown
  Bacterial polypeptide expressing nucleotide sequence isolated from the Sargasso Sea
tacaattaataaaggtgaaggtgcattttatgggccaaaaattgagtttgttttaagggatgcgataggaagagattggcaatgtggaactttacaagttgattttaatttacctgggaggttgggtgcttcgtatgttgataaagatggaacaaaaaaggttccagtaatgttacatagagcactgtttggttctctagaaagattcattgggatattaattgaaaactatgctggtaaatttcctttttggatttctccattacaaacagttgttattccaatatcagaagattttaatgattatgcaatcaaagtatcagatcaaatcaaacaaattggtatcagttcagttgttgatttaaaaaatcagaatttaaattataaaattagagatcattcgttagctaaaatcccccttttattaatttgtggtaaaaaagaagttgactctaactcagtaactattagaagattggattctgataaacaagaaaatatggaattaaacaaattcttaaaaacatactctgctttaaataaagcttcttcaaaaaaataa

SEQ ID NO: 303068 - DNA, 958 bp, Unknown
  Bacterial polypeptide expressing nucleotide sequence isolated from the Sargasso Sea
aatgacgcaattaaattatttgaagagttaaatgagccttacaagataaaaatcatcaatgattcatttcaagaaaatgattttcaaatttaccagcagggtgaaactaatttttttgatctatgtaaagggccacatcttccaagtttaaagtttattggtgagtttaagttaaccaaagtttctggagcgtattggcggggtgattctaaaaatgaaatgcttcaaagaatttatggtacagcatggagaaataaaaaagaattagattcatatttatctatgttggaggaggcagagaaaagagatcatagaaagatagggaaagaaatgggtctttttcattttcaagatgacgctcctggatcagttttttggcattctaagggttgggttatttttaataaactagtcgattatatgagaaataggcaagaaaatgctggttatactgaaattagtacaccaacagttttagataggtctctttgggaaaagtctggccactgggaaaaatttcaagacaatatgtatcttgctaaaactagtgatgaaaaagtttttgcgttgaaaccgatgaactgtcctggaggaatacaaatttacaataattccttaagaagttacagagatcttcctctgagaattgctgaatttggtaaagtttttagatttgaaccttctggtgcacttcatggactaatgagagtaagagaatttacacaagatgatgctcatatttattgtttaaaagaacagatggaagaggagtgtaagaaggttattaatctaaccttagatatatataaagattttggattcgaaaatgtaaagattaaattttctgacagacctgcaaaaaggataggtgatgataatacttgggattttcttgaaaaatcactgcttagctcattaaaaaaactaaatttagaatttgatgttaataaaggagagg

SEQ ID NO: 303069 - DNA, 724 bp, Unknown
  Bacterial polypeptide expressing nucleotide sequence isolated from the Sargasso Sea
tatgcctcttataaaacttcctgataattccataagaaatttcaacaatcccgtaactgtagatgctatagcgaaagatattggcacaggccttgcgaaagcagcagtcgcaggaaaaatcgatggtcaattagttgatgcgtcagaaattatttctgatgattgcagtgtagaaatcataacagtaaaagatgatgaagggcttgaaatagtcagacactcatgtgcccatcttttggctcatgccctgaagcaattatatccagatgctcaaatggcgataggcccagtaattagagacgggttttattacgacatcaaacttgataaaaatctatcagatgaagacctggaagcaatagagaagagaatgaaaaagcttgctaagactaaatatgatgtcagaagagaagtagtatcacaaacaaaggcgatcgagactttcaaagagagaaatgaaccctataaagtaaaactagcagaagaaataccagaagatgaagtaatcgcgttgtatcatcacgaagaatatatagacatgtgtagaggaccacatgttaccaatatgaggcatcttcaggcttttaagcttaccaaggtatcaggcgcttattggaggggagactccaaaaatgaaatgcttcaaagaatatatggaacagcctggcctaattccaaagacctggataattatattctccagcaggaagaagcggaaaagaga

SEQ ID NO: 303070 - DNA, 962 bp, Unknown
  Bacterial polypeptide expressing nucleotide sequence isolated from the Sargasso Sea
gagaggagattctaataatgaaatgttgcaacgaatatatggtacgagttgggcaactcaaaaagatctagatcaatatttgaaaagaatagaagaagccgaaaaaagagatcatagaaaacttggtagacaaatggatttatttcattttagagaagaaagccctggctcagtattttggcatgaaagagggtggggtttatttcaaaagctcattaactacatgaggagcaggcaagatgctgctggttataaagaggtaaatactccagaggtactagatagacaactatgggaaaaatctgggcattgggaaaaatatggagaaaacatgtacacttctgaaacaccagatgagaaagtttttgcaattaaaccaatgaattgccctggtcatatccaggtatttaatcaaggcttaaaaagttacagagatcttccgttacgttttgctgaatttggcaaagttcatcgttatgagccatctggcgctttacatgggttattaagggtaagagcctttactcaagatgatgcccatattttttgcactgaagatcaaattactagcgaatgtttaattgttacaaatctaatactagatatttataaggaccttggttttgaaaatgtgattctaaaatatgcagataggccagaagtaagagttggtgatgattcagtatgggataaagcagaagactctttacttgaagccgtcaaagcttctaaattagaatatactattaataaaggtgagggagcattttatggtcctaaaattgaatttgttttacgagatgctattggcagagattggcaatgtggaactttgcaagtagatttaaatttacctggaagattagatgcttcttatgttgataaagatggtactaaaaaagttcctgttatgttgcaccgagcattatttggttctctagagagatttattggaattttaa

SEQ ID NO: 303071 - DNA, 573 bp, Unknown
  Bacterial polypeptide expressing nucleotide sequence isolated from the Sargasso Sea
catcaactactccagacgaaaaaatatttgctataaagccaatgaactgtccaggctgtattgaggtttttaatcaaggtcttaaaagttataaagatttaccattaaaaatgtctgagtttggaaaagttcatcgttatgagccctctggcgcacttcacggtcttttaagagtaagagcattcacacaagatgatgcccatatattttgtactgaggatcaaattacaaaagaatgtttaactgtaactgatctaatcttggaaatttataaggatttaggttttgaaaatgttattctcaaatactctgatagaccagagacaagagttggagatgatgacgtctgggataaagcagaagcggctttattagaagcagtaaaagctactaaattagaatattctattaataaaggtgaaggtgcattttatggacctaaaattgagtttgttttaagagatgctataggaagagattggcaatgtggaactttgcaggtggattttaatttacccggcagactaggtgctacttatgtagataaagatggaaccaataaaggttcctagt

SEQ ID NO: 303072 - DNA, 876 bp, Unknown
  Bacterial polypeptide expressing nucleotide sequence isolated from the Sargasso Sea
agagaagatagtccaggatctgttttttggcatgaaaaaggttggaatttatttcaaaaacttattgattatatgagagcaaaacaaaaaaaagctggctacaaagaaattaatacacctgaaattttagataaatctttgtgggaaaaatccggtcattgggaaaaatttggtgagcatatgtatacttctacaacacctgacaaaaaagtgtttgcaatcaaaccaatgaattgccctggttgtgttcaggtttttaaccaaggtttaaaaagctatcgtgatttacctttaagaatgtctgaatttggaaaagttcatagatatgaaccttctggcgctttacatggtttactaagagttagagcatttactcaagatgatgcacatattttttgtactgaagatcaaattactaaagaatgtttaagtataacaaatttgatactagaaatttataaagatctaggttttacaaatgttttactacaattttctgacagaccacaaaaaagagtaggagatgataaaatttgggataaagctgaatctgcattactaaaggcaataaaacaatcaaagttaaaatatgaaattaataaaggcgaaggagcattttatggaccaaaaattgattttgtacttagagatagtattgaacgtgattggcaatgtggaactttacaagtagatttaaatttacctggtagattaggagcatcatttgttgataaggatggaagtaaaaaaattcctgtaatgctacatagagcattatttggatcattagaaagatttattggaatattaattgagcattattccggaaaacttccattttggattaatcctttacaagcaatggttattcctgtt

SEQ ID NO: 303073 - DNA, 916 bp, Unknown
  Bacterial polypeptide expressing nucleotide sequence isolated from the Sargasso Sea
gattagcaaatctttaattaagcaagcactcataatgaatgttaacggtgaactgaaagatttaagttactcaattaaaaatgactcttcagtcaaaattattactaacaaagataaagagggtttagatgtaataaggcatgatgctgcacatataatggctatggcagtccaagaattatttccgggaactcaagtgactataggtcccgttattgaaaatggtttttactatgactttgccagaaaagagccgttcacaagtgatgatttagaaaaaattgagaaaaaaatgtctgagataatcgataaagacgtcaaaacaaaacgagaggtatgggaaagggacaaagcaattacacattttaaaaaaataggcgaaaaatataaggcagaaattattgagagcatcccagaaaatgaggagctatcggtttatcatcacggtgatacttggcatgatttatgtagaggacctcatttaacatcttcaaaaaaaattggtaaggcatttaaattaactaaagtctccggtgcatattggagaggagactcaaataatgaaatgttacaaagaatttatggaacctgctggagttcaaaaaaggagttagacgattatttacatagattagaagaagcggaaaaaagagatcatagaaaattaggaaaagaaatgaatctatttcatttcagagaggaaagtcctggcgcagttttttggcatgaaaaaggatggactttatttcaaagacttattgagtatatgagattaaaacaaagatatgctggatacagggaaattaatactccagaattgttggataaaactctttgggaaaaatctggacattgggataaatttggcgatctaatgtttacatctgaaacgccagatgaaaagttttcgctgtaa

SEQ ID NO: 303074 - DNA, 772 bp, Unknown
  Bacterial polypeptide expressing nucleotide sequence isolated from the Sargasso Sea
tcgcattttaaaaaaattggtgaaaaatacaaagcagaaattattgagagtatacctgaaagtgaggaactatcggtttatcaccatggtgatacttggtatgatctttgtaggggaccccatcttgtatcatcaggcaaaattggtaaagcatttaaattgaccaaagtatcaggagcttattggcgtggcgactccaaaaatgaaatgttgcaaagaatttatggaacgtgttggagttcaaaaaaagaattagatgattatcttaacagattagaggaagccgaaaaaagggaccacagaaagcttggtaaggaaatggacttatttcatttcagagaagagagtcccggagcagttttttggcacgaaaaaggctggagtctttttcaaagattaatcgagtatatgagattgaaacagaggaacgcaggttatagagagataaataccccggaacttttggataaaacactttgggaaaaatctggtcattgggataaatttggagatttgatgttcacatcagaaactcctgatgaaaaaatttttgctgtgaagccaatgaactgtcctgggtgtattcaggtatttaaccaaggacttaaaagttatagagatcttccattaaaactgtctgagtttggaaaagtccatagatatgaaccatctggagcattacacggacttttaagagtaagagcttttacccaagacgacgcacatattttttgcacagaggaacaaataacagatgagtgtgtaactgtta

SEQ ID NO: 303075 - DNA, 606 bp, Unknown
  Bacterial polypeptide expressing nucleotide sequence isolated from the Sargasso Sea
aatgccacaaattcaattattagacggaaaaaaaatagactttgaaaaatcaattaatggttttgatttaacgaaaaaaattagtaaatcactcgaaaaggctgctttgataatggaagtagatggtaacttaaaagatttaagccatcaaattagcagagatgctaaggtaagaattattacctctaaagataaagaaggtttagaagtgattagacacgacgcagcacatataatggcaatggctgttcaagagttatatcccggtacacaagtaacaatcgggccagttatagaaaatggattttattacgactttgcaagaaaagaacctttcactagtgaagatttaaataatattgaaaaaaaaatgtccgagataattgatagggatgtgaaaactagaagagaggtttggaaaagggatcaagctatatctcattttaaaaagattggagaaaaatataaggctgaaataatcgagagtatacctaaaaatgaggagctatctgtttaccaccacggagatacttggcacgatttatgtagaggtccccacctggcttcatctggtaaaataggaaaagcttttaaacttacaaaagt

SEQ ID NO: 303076 - DNA, 823 bp, Unknown
  Bacterial polypeptide expressing nucleotide sequence isolated from the Sargasso Sea
atgccccaaattcaactactagatggaaaaaaaatagaatttaaaaattctatttcaggttttgatttaacaaagaaaattagcaagtccttagaaaaagttgctttaataatggaagttgatggtagcttaaaagatttaagtcataatataactaaagatgcaaaggtaagaattataactccaaaagataaagaaggtttagaggtaataaggcatgatgctgcgcatataatggcaatggcagttcaagaattatttccaggcacgcaagtaacaataggccccgttatcgaaaatggtttttattatgacttcgcaagaaaagaacctttcacaagtgatgatttaaagaaaattgaaaaaaaaatgtcagaaattattgatagggatgtaaaaactaaaagagaggtttggaaaagaaacgaggctataaatcattttaaaaaaattggagaaaagtacaaagctgaaattatagaaagcatacctgaaaatgaggaattatccatatatcatcatggagatacttggcatgatttgtgcagagggcctcatttagcttcatctggaaaaataggaaaagcatttaaattaacaaaagtatcaggagcttattggagaggtgactcaaataacgaaatgcttcaaagaatttatggaacttgttgggcctctaaaaaagaacttgatgattatttgcatagattagaagaagctgaaaaaagagatcatagaaaactaggtaaagagatggacctctttcattttagagaggaaagtcctggttcagttttttggcacgaaaaaaggttggttatta

SEQ ID NO: 303077 - DNA, 805 bp, Unknown
  Bacterial polypeptide expressing nucleotide sequence isolated from the Sargasso Sea
aatagattttattacgattttgatatagatggaactttttctgatgaagatttaattaaaattgaaaataaaatgaaggaaatagctagtgaaaatttatcggtttcaagatctgagcttgaccgtgatgaagcaattaagttatttgagaaacgaggtgagaattataaagttgaaataataaatgaaatagaatcttcggatcaaatatcagcatacaaacaaggtgattttattgatttgtgtagaggtccgcatgtgcctttaactggcaaaatcaagcattttaaattgttaaatacatcgggtgcatattggaggggtgacgaaaataataaaatgcttcaaagaatttatggaacagttttttcatcaaaaaaagaattgaatgattatttacattttttagaggaagcaaagaaaagagaccatagaaaattaggtaaagaattagagctttatactttcgatgatgaggttggccctgggcttccattatggctaccaaatggtgctgtaattattgatcaactcgagaaccttgcaaaggaaacagaacgaaaacatggatattatcaagttcgttcaccgcatttgactaaaggtcagctttatgaaaaatccggccatcttgacttgtataaagattctatgttccctgctatggatgttgatgggatggaatattatgtaaaaccaatgaactgtcctcatcatcataaaatttatgatgcttctcctaaaagctatcgtgatttaccttataaaatagctgagtatggtacttgctatcgatatgaaaaat

SEQ ID NO: 303078 - DNA, 773 bp, Unknown
  Bacterial polypeptide expressing nucleotide sequence isolated from the Sargasso Sea
tatggaaattaatttaccggatggatcagcaaaggaacttgaaaagggttcaaatggcctggatcttgctaaatcaataggcgcgggacttgctaaaagtgctgttgcagttgtcgtgaatggtgagcagagagatctcatagacgaacttcctgataactcatcagtttctatcatcactatccaatctgacgagggcttagagataatgagacatacattaacagcccaagttcttgcaaaagctataaagaatttatattcagattctaagttagctataggacctacaattgaaaacggcttctactatgatgtttctactgaaacgcctatatcggttgaggatcttccaaaaatagaaaatgaaatgaaaaggatattagaaaataagtctaatattgttaaatcacttcactcagaaaaagatgcaaaaaaaatgtttaaagagaaaggagagactctcaagatagaaattatagatgatgcagaacaaactgataattttcaaatttatacaaacgctgatgaagattttattgatttatgtagaggacctcatttaccaaatctatcttttattggagcatttaaacttactaaagtctctggagcatactggaagggagattcttcaaatgaaatgcttacaagaatctatggtacagcatggagaaatgaaaaagagcttcaagaacatctaaaatctattgaggaagctgaaaaaagagatcatagaaagattggaaaagatatggatcttttccatttcc

SEQ ID NO: 303079 - DNA, 892 bp, Unknown
  Bacterial polypeptide expressing nucleotide sequence isolated from the Sargasso Sea
cattcctgcgctcatctcattgggcatgcggtaaaacaattatttcctgaagctaatatggtcataggtccagtcattgaaaatggattctattatgacattgctgtggagaaaccgtttacctctgatgatctccaagttatcgaagatcgaatgcgctcgctcataaagcaaaaatatgatgttgttaaaaaaatgacgccgagagacgaagtgatagcggagtttgaaaatagaggcgagcaatacaaactaaaattgatagaagacatgcccgaagaggaagctatgggactgtactatcaccaggaatatttagatatgtgccgagggccgcacgtacctaacactagctttctagaaaattttaaacttacgaaagtatcaggtgcctactggcgcggcgattctaggaacgagatgctccaaagaatctatgggactgcatgggcctcaaaaaaagagctcaatgtttaccttaagcaacttgaggaagcagagaagagggatcatcgcaaattgggtcgagaactagatctctttcacttcagtgaggaggctcccgggtcaattttttggcatcccaagggctggacattatttcgtaagctgcttgattacatgcgtgagcgtcaagataaagcggattatgttgaagtcaatactcctgatgtgatggacagaagtctttgggaaacttctggtcattggtttaactatcgcgagaacatgttttcaacccaaactgaggatgagcgcatatttgcattaaaaccaatgaattgccctggttctgtatctatgtatgcgcaggggcttaaaagttatcgtgatcttcctatccgcatggctgagtttgggaaggttcatcgatacgaaccatctggtgctc

SEQ ID NO: 303080 - DNA, 734 bp, Unknown
  Bacterial polypeptide expressing nucleotide sequence isolated from the Sargasso Sea
agataatgctcaagtatctataattacaattcaatctgaggaggggcttgagattatgaggcatacacttacagctcaagtgcttgcccgcgcaatcaaaaatctatatcccaaatcgaagttagcaattggccccacaattgaggatggtttttactatgacgtcgagtccgaagaagtaatttcttcggatgatctcattaaaattgaggacgagatgaagaatattataaaaactaaatctttactaacaaaaaaattggtctctaaatcagaggctcttaagatatttaaagaaaagaaagaacccttcaaagaaactatcataaatgaatctaatcaaaaaaatgactttcagctttactatcaagataatgaggaatttgttgatctatgtcgaggaccacatttaccaaatttaggatttataggttcttttaaattaacaaaagtttcaggcgcctattggaaaggtgattctaaaaacacaatgttaactagaatttatggcacagcttttaacagtgataaagatctacaaaagcatcttaatgaagttgaggaagcccttaaaagagaccacagaaaattgggaagagagatggatttatttcatttccaagatgaggctcctggtatggtattttggcatcctaaaggttggactatatatagacaattaagaaattttgtcagaaaaaagctccaagataataactatattgaagttaata

SEQ ID NO: 303081 - DNA, 931 bp, Unknown
  Bacterial polypeptide expressing nucleotide sequence isolated from the Sargasso Sea
tagcccgataccaggtaatgaatttgcaaaaagtataagtccaagtttattaaaatctgcaatagcgatatctattaatggtcaattaaaagatctaaactttaaaataaacaaagattgtgaagcacaaattataactaaagaaagcgatttaggaattgaaatattaagacatgatacagctcatgttatggctgaagctgtaaaaatactttatcctgatgttcaaattacaattggaccaccaatagaaaatggattttattatgatttttcaaaaaaaaaaccatttactcctgaagatttaataaaaatagaaaaaaaaatgttagaaataattaataagaatgagccatttgaaaaagaagtttggagtagaaaaaaagcaattgattattttaaagaccaaggcgaaatatataaaactgaaattataaaagatattccaaataaagatgaaatctcaatttataaacaagggaagttccttgatctttgcaagggaccacattctccttcaaccggaaaaataggaaaattttttaaactcattaaattagcaggggcttactggagaggtgattctaataatgaaatgttgcaaaggatttatggtaccgcttggacaacaaaaaaagatttagacaattatttaaaaattttagaagaggcagataaaagagatcatagaaaactaggacgagatatgaatttatttcatttccaagaagaaagccccggttctatattttggcataataaaggttgggatgtttttatgagattaaaaaattatttaagaaaaaaacaattagaagctggatatgaagaaattaatactcctgatatgttggatagaactatgtgggaaaagtcaggacattgggaaaaatttaaagaaaacatgtttacgattaatacagaagataaa

SEQ ID NO: 303082 - DNA, 933 bp, Unknown
  Bacterial polypeptide expressing nucleotide sequence isolated from the Sargasso Sea
agcaaaagcagcactagcgggaagagtcaacggtaatcttttggatacatgtattccaattacaaatgatgccgaaatacaaataatcacatcaaaggataatgaaggtttagaaattattagacattcattcgctcaccttctcggtcacgcagtaaagcagctatatcctgaggccaaaatggcaattggccctgtcattgaggatggtttttattatgatatttcatacaaagatacatttactccagtagatttggagaagattgaaaaaaggataaaagaacttataaataaagattatgatgtagatgtagaagtcgtttctcctgcaaaagcaaccaaagttttctcagaaagaggtgaagtattcaagctagatataattaaaaatataccgaaagatgaaattataaaactatataaacatgaagaatatattgatatgtgcagaggacctcacgtcccaaacacaaggcatctaagagcttttaaattaatgaaagtttctggtgcatattggcgaggagattctaacaatgaaatgcttcaaagaatatatggaacagcttggaagaattctaaagaattaaaagaatacattaatagaattgaagaagcagaaaaaagagatcatagaaagttgggtaaaaaactatcacttttccactttcaagaagaagcaccaggaatgattttctggcatccaaatggttggactatttatagagttttacaagattttattcgggaaacgatttcaaaatatgattatcaagaattaaaatcacctcagatagtttgtagaagtttatgggagaaatctggacattgggataaatttaaggaggacatgtttactactacatctgagaataaagaatatgctataaaaccaatgaattgtccatgtcatgtacaagtatttaaatc

SEQ ID NO: 303083 - DNA, 439 bp, Unknown
  Bacterial polypeptide expressing nucleotide sequence isolated from the Sargasso Sea
gcagacttggagcacatatgttgccgaagatggtcaaaagaaagttcctgtaatgttacacagagccctgtttggttctttagagagatttacaggaatattaattgagcactacgcagggcacttaccattatggttatctccttctcaaattatagttgcaacaataacgtctgagtcagataattatgcttatgatgttaaagagcaattaattaaaaatggactacgtgcagaagtagatattagaaatgaaaaaattggttataaaattcgcgaacatagtaatgctaaaatacccatcattcttgctgttggaaaaaaagaagctgaagataaaactgtatctgttaggcgtctaggaagtcaaaatacaatagtcgttaaacttgatgaattaattaacgatctaaaaaaagaatcactttcaccaaattaa

SEQ ID NO: 303084 - DNA, 467 bp, Unknown
  Bacterial polypeptide expressing nucleotide sequence isolated from the Sargasso Sea
atgcggaactctacaagtagacttgaatcttcctgaacttttaacagcaaattatattggtgtagacgggaagaaacatagaccagttatgattcatagagctctttttggttcaattgaaagatttattggaatattaattgagcattactcaggtaatttacctttgtggttagctcctacacaaatagttatagccacaattacttctgattctgataattacgcattggaaattgagaaattacttaagtcaaaaaatttaaaagttgaagtcgatctaagaaatgaaaaaattggttataagattcgcgaacatagcttagctaaaattccacttatatattctgttggtgaaagagaaaaaaacaatagaactgtgtcagtaagaagattaggaagtaaaaaaactgaatctatatcaatcgacgaggcaatcaattcagttttaaatcaaataggataat

SEQ ID NO: 303085 - DNA, 807 bp, Unknown
  Bacterial polypeptide expressing nucleotide sequence isolated from the Sargasso Sea
tttgtttgttaatactgaagaaatagggccaggtcagtttttatggaaacccaaagggtcaatcctaagacaaaatattgaaaattattcaaaaaaagctcatgcagataatggttatgagtattcatacactccacacattggacgttcagttctttgggaaacttctggtcatcttgattattacaaagaaggaatgtacccaccattaaaaagtgaggataataaagatgatgaatactatttaaagccaatgaattgtccttttcatattttaatttataaaagtgacataaggtcatacaaagaattaccattacgattttttgaactgggatctgtttatagatatgaaaagactggagtcctgcacggactgttaagagcaagaggatttactcaagatgatgcacatattttttgcactaatgatcaaattgaagaagagatcctaaatctcttaacattttcaataaaactactaaatgcgtttggatttgattcaattgaagctgatttatcaactcgaccggaaaaatctattggaaatgatgacgactgggttaaggcaacaaatagtttggcttcagcattagataatcagaagatatcttatgtaactgctcatggagaaggagctttttatggaccaaaaatagatcttcacgtaaaggatgcaataggtagaagatggcaattatcaactatacaagttgatttttcacaacctgacaactttgatttgcaatatgtagattcaaataacaaacgaattagaccagtcatgattcatagagcattgttggg

SEQ ID NO: 303086 - DNA, 577 bp, Unknown
  Bacterial polypeptide expressing nucleotide sequence isolated from the Sargasso Sea
agcaacaggtcttgagtacacattcaatccaggagagggtgcgttttatggcccaaaactagagtttgttttgcgcgatgcaattggacgtgattggcagtgtggaacacttcaggttgatttaaatttgccaggtagacttggcgcaacatatgttgctgaggatggtcaaaagaaagttcccgttatgttgcaccgagctctgtttggctctttagagagatttgcaggaatattaatagagcattatgctggccatttaccattatggttatctccatcacaggtagtagttgctacaataacttctgaatcagataattatgcttttgatgtaaaagatcaattaagtaaaaatggattgcgcactgagacggacattagaaacgaaaaaataggttataaaatacgtgaacatagtaatgctaaaatacctataattcttgctgttggaaaaaaagaagcagaagaaaaaactgtttctgttagacgcttaggcagtcaagaaacattagttgtaaagcttgataaattaattagtgatttaaaaaaagaatctctttctcctattaattaa

SEQ ID NO: 303087 - DNA, 739 bp, Unknown
  Bacterial polypeptide expressing nucleotide sequence isolated from the Sargasso Sea
actgagtcacaacttcatgatgaaattacaaaattaataaaattaacttttaaagtttacaataatcttggatttgaaaatataaaagtagcactatcaactagacctgataaaaaagttggaactgatgatatatggaataaatctgaaaaaattttagaaaattcattaaaagaaaatgtgcctaattacattactttgcctggtgagggagctttttatgggccaaaaattgaattcacgttaacagactccttgggaagagaatggcaatgtggaactgtgcagctagatttttcaatgccctctgcattatcggcttcatatgttgatgaaaaaggtgttaaaactaccccagttatggttcatagagcgatattaggatcaatggagcgctttattggtattttaattgaacattatgcaggaaaattaccattttggctttgcccagaacaaataataattgtcaatataactaataaacatgtagaattcgctgagaaaatcgaaaaaatattaaaagatagtggttttcgatgttcttcagacttgagaaacgaaaagattggatataagattcgtgaacatattattgcaaagattccatatgttgtaataattggcgatgaagaggtatcatctaataaaatttcagttaggcagtatgatggcactgagaataaattgatcagtgttgatgattttatagttgaattgagtagtaaaaaaacataat

SEQ ID NO: 303088 - DNA, 838 bp, Unknown
  Bacterial polypeptide expressing nucleotide sequence isolated from the Sargasso Sea
ggaaaaattggtaaagcttttaagctaacaaaagtttccggtgcctattggagaggagactctaataatgaaatgctgcaaagaatttatggaacatgttggagtaataaagaacaattaaatttatatttagaaagattggaagaggctgaaaaaagagatcacagaaagttaggcaaggagatggatttgtttcattttagagaagaaagcccaggatctgtattctggcatgaaaaagggtggattttatttcaacgacttgttgaatatatgagatttagacaaaggcttgatgggtataaagaaataaatacacccgaattattagataaaactttatgggaaaaatctggtcactgggagaaatttgctgaacatatgtacacttcagaaactccagatgaaaaaatttttgcaattaaaccaatgaattgtccaggttgtgttcagatttttaatcaaggtttaaagagttatcgcgatcttcctttaaaactttctgagtttggaaaagtacatagatacgaaccttctggagctttgcacggactacttcgagttagagctttcacccaagatgatgctcacatattttgtactgaggatcaaataactgaagaatgtttaagtgttaccaacctaattatagatatctacaaaaatcttggatttgaaaaagtaatattaaagtattctgacagacctgaaaaaagagttggggatgataaaatctgggacaaatcagaagcagcattattgactgcaataaaaaaatcaaaacttgaatattcaataaataaaggtgagggagcattttacggacctaagattgagt

SEQ ID NO: 303089 - DNA, 610 bp, Unknown
  Bacterial polypeptide expressing nucleotide sequence isolated from the Sargasso Sea
atgactccgttggaagaaattcgccactcggcctcccatgtcttggccactgcggtccttcgcctgtaccccgatgccaagctcgacatcgggccgccgactgagtccggtttctattacgacttcgactcggaaactcccttcacgcccgaggtcctcgagaccgtcgaggcggagatgaagaaagtgataaaggaaaaccagaggtttgagcggatagaagtttcccgtgaggaggcaatcaatctcatccaggaaatgggccaggaaaagtacaaactgggcaggctggaggatatcccggagggggaaaccatctccttctatcgcaatggggaattctccgacttgtgcggtggaacccacgtttcctataccaagaagatcaaggctttcaagcttctgcaggtagcgggctcctaccaccgaggagatgcatccaacaaacaactgcagcggatttatggtactgcctttgccaccaaggatgagctcgctgaacaccttgagcgacttgaggaagctaagaagagggaccaccgcaaggtcggtcgcgaactaggactttttcatatcgacgacatggtcgggcaaggtcttgttctttgga

SEQ ID NO: 303090 - DNA, 775 bp, Unknown
  Bacterial polypeptide expressing nucleotide sequence isolated from the Sargasso Sea
atgcttcagaggatatatggaactagctgggctagtcagaaagatttagacaattatttaaaaagacttgaagaggcagaaaaaagagatcatagaaaattgggaaaagaaatggatttattccattttagagaagaaagtcctggatcagtattttggcatgaaaaaggttgggcgctattccaaaaattaataaattatatgaaaatgaaacaagatattgcaggttataaggaaataaatactcctgaggttttagatagaggtttatgggaaaaatctggtcattgggaaaaatttggagcaaatatgtacacatctactactccagatgaaaagatatttgctattaaacccatgaattgcccagggtgtgtggaggtttttaatcaaggccttaaaagctataaagatttacccttaaggatgtctgagtttggaaaagtacatcgctacgaaccttcaggtgcacttcatggtttgttaagagtaagagcgtttactcaagatgatgcacatatattttgtactgaagaccagataacagaagaatgtctaactgtaactaatcttatcttagaaatttataaagatcttggtttcgaaaatgttattctaaaatattctgatagaccagaattaagagttggtgatgattatgtgtgggataaagctgaggctgcactgcttgaagcagtaaaagcaactaaactagaatatacgattaataaaggagagggtgcattttatggacctaaaattgagtttgtttaag

SEQ ID NO: 303091 - DNA, 811 bp, Unknown
  Bacterial polypeptide expressing nucleotide sequence isolated from the Sargasso Sea
tttaaaagcaaaggtgaagaatataaggttgagctaattgaagacttaaacgaagacgaagaaataacagtatataaacaaggagaatggttagatctttgtcgtggtccacatatgatgagcactaaacaaattggtaaaggatttaaattaatgaaagtagcaggtgcatattggagaggagactccaataatgaaatgcttacacgtatttatggaacagcgtggagaaatgaaaaagaattagaaagtcatttgctacaaattgaagaggcagaaaaaagagatcatcgaaaacttggaaaagaaatgaatttgtttcattttcaagaagaggctcctggagcagttttttggcatcccaaagggtggaaattatttcaatctttaataaattacatgcgaaaaagacaagatgatgcaggttatgtagaaacaaacacaccagacatgatggataaatctttgtgggaaacttctggtcactgggataaatttagtgaaatgatgttcaggactgaagcaaaagatgaaaaaatatatgcaattaaaccaatgaattgtcctggcgctgttgaagttttcaaacaaggtttaaagagttaccgagatcttccatttctattatctgaatttgggaaggtccatcgttatgaaccttcaggagcattacatggtttattgcgagtaagagcatttacgcaagatgatgcacatatattttgtacagaagatcaaataactcaagaaagcaaaactgtgtgcgacctaatacttagtatctataaagattttggctttgataatgtaa

SEQ ID NO: 303092 - DNA, 601 bp, Unknown
  Bacterial polypeptide expressing nucleotide sequence isolated from the Sargasso Sea
atgccaaatataaaactaccagatgggaattcattaagatttgatacaaaagttactggatttcaaatagctgaaaaaattagcaaatctctttctaaacaggctttaataattagcgttgatggaaatttaaaagatttaaattatgaaatagataatgactgttctgtcaagatttataccgccaaggataaagaaggattagaaacaataagacatgatacagctcacgtattagctatggctgtacaagaactttttactaaaactcaagtaacaattggaccagtaattgacaatggattttattatgactttgcaagaaaagatccatttactgaagaagatttacgtaaaatagaaaaaaaaatgttggaaattgttgaaagagacgaaccaactcatagagaagtttggaagcgtgataaagcaattgaacatttcaagaaagcaggagaaatctataaggcagaaataattaaagatattccaaaggaagaagaagtatcagtttattttcatggaaagtggcatgacttgtgtaaaggaccacatctgagttctactgggaaaattggaaaattttttaaattaactaaaa

SEQ ID NO: 303093 - DNA, 544 bp, Unknown
  Bacterial polypeptide expressing nucleotide sequence isolated from the Sargasso Sea
atgcctaatattaaattaccagatggaaattcaattagttttgaaaaaaaagttactggattaaaaatagcagagaaaattagtaaatcactatcaaaacaagccttggtcattagtgttgatggaaatttaagagatttgaattatgaaatagataaagattgtactgttaaaattcatacagcaaaagataaagaaggactagaaacaataagacatgatacagcacatgttttagcaatggctgtacaggaactttttcctggtacacaagttactattggaccagtaatcgataatggattttattatgacttcgcaagaaaaaaaccatttacagaggaagatttacgaaaaattgaaaaaaagatgttagaaattgtagaaagagatgagcctactcatagagaagtttggaagcgagataaagcagtcgaacactttaagaaagcaggagaactttataaggctgaaataattaaagatataccaaaagaagaagaagtttcagtttactttcatggaaaatggcatgatttatgta

SEQ ID NO: 303094 - DNA, 505 bp, Unknown
  Bacterial polypeptide expressing nucleotide sequence isolated from the Sargasso Sea
aatgcctaatataattcttgctgatggaaaaaaacttgattttactgaaagtattacaggtttaaagattgcagaaaaaatcagtaaatcgttaatgaagcaggctcttgttatgagtgtagatggtgaattaaaagatctggagcatgaaattaaaaaagattctgtagtaaaaatttttacgtcaaaagataaagaaggccttgaaacaataagacatgatactgctcatattttagctatggcagttcaagaactatttccagaaacacaagtaacaattggcccaattatagaggatggtttttattatgattttgcaaggaaagaacctttcacaaatgaagacttagaaaaaattgaaaaaaaaatgaaagaaatagttgatagagatgaaaaaacttatagagaagtatggaaaagaaatgatgctgtagaacactttaaaaaaaaaggtgaaatatataaagcggaaataataaatagcattccagagaatgaagaa

SEQ ID NO: 303095 - DNA, 769 bp, Unknown
  Bacterial polypeptide expressing nucleotide sequence isolated from the Sargasso Sea
ttggatcttattaggcattctacagctcatattttggctgaagctgttcagagtgtttaccccgatacaaaagttactatcggccccgttatagatgatggcttttattacgatttttatactgaaaaaacatttacagaagctgatttaactttatttgaggaaaaaatgaatgaaattatcaacaaaaaggtttcatttgttccggaaagattaactagaagtgatgcccttaaaactttttcagaaattaatgaaaaatttaaaatagaaataataaatgatttaccggaagaagaagatattacaatttataaacaaggtgactggtttgacctttgtagaggtccacatgctccaaattcatcttttattaaatcttttaagcttttaagtgtggcaggttcttattggaggggtgatgagaacagggagtcgcttcagaggatctatggtactgcattttttaacaaaaaagatttaaaaaaacatttagaaatgattgaagaagctaaaaaaagagatcacaggaagctaggaaaagaactcaatttattctcaattactgatgagattggaccaggactagttttgtggcatccaaaaggctctacaattcgtaatgttattgaaaattactggcgagaaaaacatattgattcaaactatgaacttatttataccccacacatagcaaaggcaaacttatgggaaacaagcggacatacagagttttatagcgaaaacatgttttcccctaggaaataga

SEQ ID NO: 303096 - DNA, 770 bp, Unknown
  Bacterial polypeptide expressing nucleotide sequence isolated from the Sargasso Sea
tattactgctaaaggtgaaagtcttagcttctatcaacacggggagtttattgatctatgccgcggaccccatgtacctcatacaggatggttgaaaagcgtcaagcttacaaaggtatctggtgcctattggcgtgcagatgcaagtcgagaaaatttaacaagagtttacggtacagctttttttgactccaaagatctaaaagaatatcttcattttctcgaagaagccaaaaaacgtgatcatcgtgtactcggggaaaaactgcacctatttagtttcttcgacgaaactcccggaatgcccttttttcacgcaagaggcaccactcttttcaatctacttgctgattacatgcgaaagcttctcaaaacacgtaagtatattgaagtcaaaactcctttgattctttccgaagagctttggcatcgctccggtcattacgacaactacatggaaaacatgttctttaccaagcttaaacttgaagatcccaaaaacaagggtgcagtgaaagacaatgttgtggaagaacgaccaatggctgttaagccgatgaattgtccaggccatctcatgatttacggcacacgcttacactcacacaaagaattccctttgcgaattgctgaaatggggctcgtgcatcgacgcgaactatcaggcgtacgacatggtttgttccgagttcaggccttcacccaagacgatgcacaccacttctgtactgcagagcaaatcgtagatgagattggaatgctgatcaatt

SEQ ID NO: 303097 - DNA, 460 bp, Unknown
  Bacterial polypeptide expressing nucleotide sequence isolated from the Sargasso Sea
aatagatcttaatttacctgaaagattagattgtagctttattaatagtaatggaataaaagaaagacctgttatgatacatagagctctttttggctcattagagagatttataggcatactcatagagcattatgccggtaatttacctgtttggttaagcccaacaaaagttgttgttacaaccgttacagagaaatgtagtgactatgctaatgaggttttcaaatttcttagtagtagtaatattaaaacagagattgatttaagaaatgaaaaaataggttataaaattagggaacatagcaatagcaagataccaatcatcatcataattggagaaaaagaaaaagagaataatacagtttcagttagaaggttaggaagcaatgatattgagactttatcacttgaagaatttgttatagtaactaaaaggcaattaagagaactatgttaa

SEQ ID NO: 303098 - DNA, 964 bp, Unknown
  Bacterial polypeptide expressing nucleotide sequence isolated from the Sargasso Sea
tcatcagtaaaaattattacatccaaggataaagaaggtttagatgccattagacatgatacaacccatattatggcaatggctgttcaagaattatttccaggaacaaaaattgcaattggtccaacgatcaaagatggtttttattatgatttttcaagaaaagatcctttcactccagaggatcttgaaaaaattgaaaaaaaaatgaaagaaatagttgtaaaaaacgaaccaactaaaagagaagtgtgggaaagaaaaaaggcaaaggaccattataaaaaaattggagaaagctataaagctcagttagtcgatagtattccagatgatcaagaagtttcaatatactaccatggaaaatggtatgatctgtgtagaggacctcatctaacatcaactggtaaagttggtaaatattttaagcttacaaaagtatcaggagcatattggagaggtgactcaaataatgaaatgctccaaagaatttatggaacttcttggccatctcaaaaagaacttgatgagtatttaaaaagaatagaagaagctgagaaaagagatcatagaaaattaggtaaagaaatggacttatttcattttagagaagaaagcccaggagcagtattttggcatgataaaggatgggcactgtttcaaaaacttgttagctacatgagagtaaagcaagaagatgctggatataaagaaattaatacacccgaaatattagatagatccttatgggagaaatcaggacattgggaaaaatttggggagaatatgtatacatctacaactccagatgaaaaagtttttgcaattaagccaatgaattgccctggttgtgttcaggtttataaccaagggttaaaaagttatagagacctcccattaaaaatgtcagaatttggtaaagtgcatagatatgaaccatctggagcacttccggactattaag

SEQ ID NO: 303099 - DNA, 676 bp, Unknown
  Bacterial polypeptide expressing nucleotide sequence isolated from the Sargasso Sea
atgaagctgtcgactcgtccggccaagcgcgtggtttccgaagaattgtgggatcgcgccgagggtgcgctggccgatgcgctcaacgaatccggtctggagtgggaataccagccgggcgagggcgctttctacggtccgaagatcgagttcacgctgcgtgactgcctgggtcgtaactggcagtgcggcacgctgcagtacgatccgaacctgcccgagcgtctggacgccagctatatcgccgaagacaacaaccgcaagcgcccggtcatgctgcaccgtgcgatcctcggttccttcgagcgtttcatcggcatgctgatcgaacattacgccggttccttcccggcctggttggcgccgacccaggcggtgatcatgaatatcaccgacaagcaggccgattttgcccgtgaagcggagaaaactctcaatcaaagcggttttcgtgccaaggttgacttgagaaacgaaaagatcggctttaaaatccgcgagcataccttgctcaaggttccctatctcctggtcatcggagatcgggaggtcgagacacgatccgttgctgtgcgcacccgcgaaggcgtcgacctggggtcaatgcctctcgagcagttcgccgcgcagttgcagcaagcggtttcccggcgtggtcgccaagatttggagtaag

SEQ ID NO: 303100 - DNA, 829 bp, Unknown
  Bacterial polypeptide expressing nucleotide sequence isolated from the Sargasso Sea
gatggttttttggcatcctaatggctggactgtttatagaaagctacgaaattttgttagagatagactaaaagaaaataattatattgaagtcaatacccctcaagtgatagatagaaaattatgggaagcttctggtcattgggacaaatatagagaaaatatgtttattacagagatcgatgaagagcatgctaacgaaaaaagaattaatgctctaaagccaatgaactgtccaggtcatgttcaaatatacaatcaaggcataaaatcctataaagacttgccattaaagtatgcagaatttggtttatgtcatagatatgagccttctggaactatgcatggtttgatgagggttagggcctttactcaagatgatggacatattttttgcacagaagatcaaatagagtcagaaacaggcttatttataaattttttatcagatatctatgctgatttaggatttaaaaattttgatatcaagttatctactaggcctgagatgcgagttgggtctgatgaaacttgggataaagcagagcattcgttggaaacagctattgagaatttaggacatccttataggatagatgagggtgatggcgcattttatggacctaagcttgattttgttctaacagatgctattggaagagaatggcaatgtggcactttccaattggattttaatttagctgataggctcgaagctaaatatattggtgaagatggaaaaaaatatactcctgttatgattcacagggctgtcttgggatcttttgaaagatttattggtattctcattgagaattatgctggaaaa

SEQ ID NO: 303101 - DNA, 893 bp, Unknown
  Bacterial polypeptide expressing nucleotide sequence isolated from the Sargasso Sea
tgttgcaaagaatataccggtacgtggctggcgtaataaaaaagaattagacgaatatcttttaagactagaagaggctgaaaagcgagaccatagaaaactgggcaaagaaatggatttatttcatttcagagaagaaagtccaggagcagttttttggcatcataaaggctggactttatttcaaactttagttggttatatgaggcaaaaacaaaaacaagctggttatagagagattaatactccagaaatattagacaaaactttatgggaacaatcaggccactgggaaaaatttggagaaaatatgtatacatcagaaacaccagatgaaaaaacttttgcaattaaaccaatgaattgtcctgggggtatacaggtttttaaccagggtttaaaaagttatagagacttacctctcaaactatctgaatttggtaaagtgcatagatatgaaccttcaggcgctttacatggtttgttgagagtcagagcatttactcaggatgatgcccatattttttgcaccgaagatcaaattactgaagagtgtttaactgtaacaaatttaatattagaaatttatagagatcttggattcaaaaatgttctacttcaattttctgatagacctcaaaaaagagtgggcgatgataagatttgggataaagctgaaagtgcattactaaaagctataaaacaatcaaatttaaaatatgaaattaataaaggggaaggagcattttacggacctaaaatagattttgtacttaaggatagtattggaagagattggcagtgcggaactttgcaggttgatttaaatcttccttctagattaggatcttcttatgttgcgagcgatgggatcaaaaaagttcctgtcatgt

SEQ ID NO: 303102 - DNA, 812 bp, Unknown
  Bacterial polypeptide expressing nucleotide sequence isolated from the Sargasso Sea
ttataaacaaggcttaaaaagttatcgtgatctccctcttcgtatgtctgagtttggaaaagtacatcgatatgaaccttcgggagcccttcatggattgatgagagttagagcatttactcaggatgacgctcatattttttgcactgaagatcaaattactagcgaaagcaaaaaagtgtgtgacttaattttaagtatatataaagattttggtttcaatgatgtgcgaataaaatattctgatagaccagaaaaaagagttggagatgacgctgtctgggacaaatctgagaaagcattaaaagatgccatggaagcaactggtttagaatattctttgaatcctggtgagggagcattttacggaccaaaattagaatttgttcttcgagatgcaattggtagagattggcaatgtggtactttgcaagtagacttaaatttaccaggacgtctaggggctactttcgttgacgaagatggtcagaaaaaaattcctgtgatgttacatcgagctctttttggttcattagagagatttacaggtattttgatagaacactatgctggacatttaccaatatggttatcaccagttcaagttgttgtagcaactattacatcagatactaatgattatggtcatgaggtattaaataaaataaaattagaaaaaatacgtgctgaaatagatactcgtaatgaaaagattggatataaaattagagaacatagcaatttaaaagttccagcaattttagccattgagaaaaaagaagctgaagaagcaactgtttctgttcgacgta

SEQ ID NO: 303103 - DNA, 838 bp, Unknown
  Bacterial polypeptide expressing nucleotide sequence isolated from the Sargasso Sea
ggatttgtttcatttcagagaggaaagtcctggatcagtattttggcatgaaaagggatggagtctatttcaaaaattagtttcttatatgaggatgaaacaggatcaggcaggatacaaagaaataaatactccagaaattttagatagaactttgtgggaaaaatctggtcattgggaaaagtttggcgctaatatgtatacttcaactacacctgatgacaaagtattcgcaattaaacctatgaattgtcctggctgtgttcaagtttttaatcaaggtttaaaaagttatagagacctgcccttgaaaatgtcagagtttggaaaagtccatcgttacgaaccttcaggagctcttcatggcttactgagagtaagggcttttacgcaagacgatgcacatattttttgtacagaagatcaaataacagaagaatgtttgttagtcactaatttaatactagagatctataaagatcttggtttcgaaaatgttctgttaaaatattctgatagaccagatttacgagttggagacgatagtgtgtgggataaagcagaagctgcactactaaaagctataaaggagtctaaactagaatattcaatcaataaaggagaaggtgcattttatggacctaagattgagtttgtcttgagagatgcaattggaagagattggcaatgtggaactttacaagttgatttaaatttacctggaagacttggcgcatcttatgttgataaaggtggaaataaaaaaattccagttatgcttcatagagctttatttggttcattggaaagatttataggaataataattgaacattat

SEQ ID NO: 303104 - DNA, 841 bp, Unknown
  Bacterial polypeptide expressing nucleotide sequence isolated from the Sargasso Sea
ttataaggctgagttgattgaagcaatacctgaaaacgaagatgtatcaatttattttcatggagaatggcatgatttatgtaggggtccacacctttcctctactggtaaaatagggaaatattttaaacttacaaaagtatctggagcatattggagaggagactctaataatgaaatgttgcaacgaatatatggtacgagttgggcaactcaaaaagatctagatgaatatttgaaaagaatagaagaagcagaaaaaagagatcacagaaaattaggtagagaaatggatttatttcattttagagaagaaagccctggctcagtattttggcatgaaagaggatggggtttatttcaaaagctcattaactacatgagaagcagacaagatgcagctggttataaagaggtcaatactccagaggtactagatagacaactatgggaaaaatctgggcattgggaaaaatatggagaaaacatgtatacttctgaaacaccagatgagaaagtttttgcaattaaaccaatgaattgccctggtcatatccaggtatttaatcaaggcttaaaaagttacagagatcttccgttacgttttgctgaatttgggaaagttcatcgttatgagccttcaggcgctttacatggtttattaagagtaagagcctttactcaagatgatgcccatattttttgtactgaagatcaaattactagcgaatgtttaattgttacaaatctaatactagatatttataaggaccttggttttgaaaatgtaattctaaaatatgcagataggccagaagtaagagttggtgatgattcagtt

SEQ ID NO: 303105 - DNA, 823 bp, Unknown
  Bacterial polypeptide expressing nucleotide sequence isolated from the Sargasso Sea
tattggtcatgcagttaaacaaatttactctgatattaaaatggcgattggacctgtaattgaagatggtttttattacgatattttctctgaatacagatttactcctgaagatttaataaaaatcgaaaatagaattaataaattaataaaaacaaactatgacgttgagattttacaagtttctaaagaagaagcaattaaaacttttcaagaaagagatgagacttttaaattaagaataattgaagaaattcctgaagaaggtctcatcaatttatacaagcacgaagaatacattgacatgtgtagagggccccacgtgcctaacactagacatttgagacactttaaattacttaaattatcaggttcatattggagaggtaatagtgagaatgaatcattacagagaatttatggaactgcatgggcaaaagaaaaagaactcaaagattatttaacaagaattgaagaggcggaaaaaagagatcatagaaaacttggaaaaaaacattcactttttcatatacaagaagaatctccaggaatgattttttggcatccaaatggatggacaatctaccaagtactggaaaagtacataagagaaatactcaaaaaaaatgattatttagaaattaaaaccccacaagctgttgataaatctctttgggagaaatccggtcattgggaaaaatttagagacgatatgttcactactgcatcagaaaatagaacttatgcaattaaaccaatgaattgtccatgccatattcaagtatttaatcaaggtttaaaaagttataaggatttacctatt

SEQ ID NO: 303106 - DNA, 811 bp, Unknown
  Bacterial polypeptide expressing nucleotide sequence isolated from the Sargasso Sea
attggaactattaaacgaacttgaagatggcactataactttctataaccaagggaattttactgatttatgcagaggacctcacatcccaaatactggatatataaaagctgttaaattattaagcattgctggggcttactggagagggaacgaaaacaataagcaacttacaaggatatatggcatcacttttgaaaaacagaaagatttaaatatctacttagaaaagcttgaagaagcaaagaaaagagatcatagaaaattgggaaaagagttggaattatttaccttttctgaaaaagttggacaaggtttaccactttggcttccaaaaggaactgaactaaaagaaagattaatatcatttctaaaaaaagcccaaacatcttccggctatcttccagtttcaaccccacatattggacataaagacttatatgtttgttcaggtcattatgaaaaatatggtgaagattcttttcaatcaattaaaacaccacatgatggagaagaatttcttttaaaacctatgaattgtcctcatcattgtgaaatatttaattcgtctccaaaatcttataaagatcttcctcttcgtttagcagaatttggtacagtatatagatatgagcaaagcggtgaattacatggtctaacaagagtaagaggctttactcaagatgatgcacatatattttgtagaccggatcaactagaagacgaattcaaaaaagtaattgacttagtactgtatgtttttggtgctttgaaatttgaagaatttgtagctcaaatctccttaagagat

SEQ ID NO: 303107 - DNA, 673 bp, Unknown
  Bacterial polypeptide expressing nucleotide sequence isolated from the Sargasso Sea
aatgtaattttaaaatattctgatagaccagacttgagagtgggagatgatagcgtttgggataaatcagaaaaagcgttgttaaaagctattcaagcatctaaattagaatattcagtgaataaaggagaaggtgctttttatggtcccaaaattgagtttgtacttcgtgatgccattggaagagattggcaatgtggaactcttcaagtagacttaaatttaccaggaagattaggtgcttcatttgttgataaagatggatcaaaaaaagttcctgttatgcttcatagggctttatttggatctttagaaagatttattggaatattaatagaaaattattcaggcaaacttcctttttggatttctcctctacaaattgttgttataccggtttcaaatgaatttgacgcttacgctatcaaagtaaacaatgaaattaaaaaggctggattaacttcagaagtagatcttaaaaatcataatttaaactataaaatacgtgaacattctttaacaaaagtcccaattttactaatttgtggaaaaaaagaagttgacagcaatactgtaactattagaagattagattctgaaaaacaagaaagtatggacataaaaaaatttttaaaaacttatactgccttaaataaagtttccccaaattaag

SEQ ID NO: 303108 - DNA, 481 bp, Unknown
  Bacterial polypeptide expressing nucleotide sequence isolated from the Sargasso Sea
tcaagtagatttctcaatgcctgaaagactaaattcaagctatatagatgttgatggtaagaaacaaccccctgtcatgttgcatagagcaattctaggttcatttgagaggtttattggtattttaattgagaactattctgggaacttgccaatatggttatgcccacttcaaatcgtagttatggggataactgacagaaataatgatgcatgcatctatactaaatctaaattaataaattttggttttagagcttctgttgatacaaggaacgaaaaagtgggctttaagataagagagcacacaatgcaaagaatacctttcttgataattattggagataaagaagaaaagaataatgaaatctcaataagaacacgtgagggaaaagatcttggtaaaatgactttggataagttcaaacttataatggatgaatcaatcagaaaaaagagtttagtggagagtaaatcataa

SEQ ID NO: 303109 - DNA, 819 bp, Unknown
  Bacterial polypeptide expressing nucleotide sequence isolated from the Sargasso Sea
gaggtagctgagaaaataagtaagtctttagctaaacaagcaatggttatgagcgttgatggtgaacttaaagatttagattatttaatagataaagattgttcagtaaaaatttttacttctaaaaatccagaagggttggaaacaattagacatgacacagctcatattttggcaatggcagttcaggaactgtttccaggtacacaggttacaattggtccagttattgaaaatggattttattatgactttgccagaaaagaaccattcactgaagatgatttattaaaaattgaaaataaaatgaaagaaattgttgatagagatgaaattaccaaaagagaagtttgggagagaaataaagctattgatcatttcaaaaaaaaaggtgaaatttataaatctgaattaattaaagctatcccagagaaagaagatgtctcaatttattttcatggagattggcatgatctttgtagaggtccccacctatcctcaacaggtaaaataggaaaatattttaaactaacaaaagtttcgggtgcttattggaggggtgactcaaaaaatgaaatgcttcaaagaatatatggtactagttgggctactcaaaaagatttagatgaacatcttaaaagaatagaagaagcagaaaaaagagatcatagaaaattaggaagagaaatggatttatttcattttagagaagaaagtccgggatctgttttctggcacgaaagaggctgggcgttatttcaaaatttaattaactatatgagacataggcaggatacagctggttataaagaaattaat

SEQ ID NO: 303110 - DNA, 700 bp, Unknown
  Bacterial polypeptide expressing nucleotide sequence isolated from the Sargasso Sea
tatgaactgtccgcatcattgtgagatatataactttaaaccacactcttataaagatttaccttatagaatagctgaatttggaaccgtttacagatacgagcaaagtggtgaacttcatggaatgactcgagttagaggatttacacaagatgatgcacatatattttgtacgatagatcaggttaaagatgaggttataggcgttatggatttaattcttaaagtttttaagtcattatcttttgaaaattttaaagtacagatatcattaagagataaagatgataattctaaatatatgggagatgagaaactatgggataaagcagaaaatgatttgatagaatctgttaaggtgaaaggcatcgatgctgtagttgagtacggtgaggctgccttttatggtcctaaaatagactttatggtaagagattctcttgaaagagaatggcaattaggcacaatacaagtagattatcagctaccacaaagatttaatttgacttatgtggataaaaacaatgagaaaaaaactcctgttttaatacatcgtgctccttttggttcattagagagatttattgctatcttaattgaacattgtgaaggtaattttccattatggctggcaccggaacagactataatcttaccaataaacgagaacgtaatacaatacgctgaaaagataaatgcg

SEQ ID NO: 303111 - DNA, 602 bp, Unknown
  Bacterial polypeptide expressing nucleotide sequence isolated from the Sargasso Sea
gagagctctagaagatgcaatagataaatggagtttagattatgaaatttcggtgggagatggagcattttatggtcctaaattagattttgttttaaccgatgcaatcgatagggaatggcaatgcggaacattacaattggattttaatttacctgaaagacttgatgcaaaatatgtaggggaagatggtgaaaaacaccaaccagtgatgatgcatagagcaatactaggctcagttgagagattcattggaattttaattgaagaatacgatggaaattttccaatttggttggctcctattcaggcagtgataatgaacatttctcaaaaacatgaagaaaaggctactgaatacgctgattttctcaaatctaagggttttagagtgaaattagacttgaggaatgagaaaatcacttataaaatccgcgatcactctatacaaagagtgccttttcaacttgttgttggagataaagaacaaaattcaaattctttgtctgttagagctaggaaaggagaggatttaggaagtatgaagttggatgaattttctaactttctttctaaaaaaataaaatcaaaggaggtttgat

SEQ ID NO: 303112 - DNA, 700 bp, Unknown
  Bacterial polypeptide expressing nucleotide sequence isolated from the Sargasso Sea
atgcgccgcaaacaggaactagatggttatgttgaggtaaacactccacagctagttgatcgaaaattatgggaagcatccggtcattgggaaaaatatcaagaaaacatgtttgtagttgaagtcgatgaagaacatgcgcgagaaaaagctgtcaatgcactcaagccaatgaattgcccatgtcacgtgcaagtttataatcaaggtctcaagtcatatcgtgatttaccgcttagaatggctgaatttggcagttgtaatcgatatgaaccttcaggtgcgctacatggcgtaatgcgtgtgcggggatttactcaagatgatgctcatattttctgccgcgaggatcaaattgaatccgaaacaaaaaaatttataaacttcctgtctaacgtttacagagatttaggatttgaaaaattctctataaaattttctgatagaccagaaaaacgttcgggtagcaacgaggtttgggataaggcagaagacgctttgaaatcagcaacaatagccgctggttatgattttgaaataaacccgggcgaaggtgctttttatggcccaaaacttgaatttgttttaacggacgcaattggtagagattggcaatgtggcactctccaagtagattttgttttaccagatcgattagatgcgaattatattggggaagatgggaataaacatcgccccg

SEQ ID NO: 303113 - DNA, 864 bp, Unknown
  Bacterial polypeptide expressing nucleotide sequence isolated from the Sargasso Sea
aaagtatctggcgcatattggaagggtgattcaaagaactcaatgctaacaagaatttatgggacagcatttagtaatgacaaagatttacaaaatcatttagataacatagaggaggcgttaaaaagagatcatagaaaacttgggaaagagatggatttgtttcactttcaagatgaagctccagggatggttttttggcatcctaatggctggactgtttatagaaagctacgaaattttgttagagatagactaaaagaaaataattatattgaagtcaatacccctcaagtgatagatagaaaattatgggaagcttctggtcattgggacaaatatagagaaaatatgtttattacagagatcgatgaagagcatgctaacgaaaaaagaattaatgctctaaagccaatgaactgtccaggtcatgttcaaatatacaatcaaggcataaaatcctataaagacttgccattaaagtatgcagaatttggtttatgtcatagatatgagccttctggaactatgcatggtttgatgagggttagggcctttactcaagatgatgggcatattttttgtactgagaaccaaatagaatcagaaacaggcttgttcattgaatttctttcaagcatatatgctgatttaggatttaaaaatttcgatattaaattatctaccagaccagagatgagagttggctcagatgagacatgggataaagctgaacaggcgcttgaagcagcaattaaaaatttaggatattcatacagaattgatgaaggtgatggcgcattttatggaccaaaactagattttgttctcaccgatgcaataggaagagaatggcaatgtggt

SEQ ID NO: 303114 - DNA, 830 bp, Unknown
  Bacterial polypeptide expressing nucleotide sequence isolated from the Sargasso Sea
aatgtatggcgttggcccttctatcgaggatggtttttattattattttttatttgaaaataatattaaagaagaagatttattaaaaatagaaaaagaaatgcataaaattgtacaacaaaagcaaattttctctaaagaatttgtaaatgataaagaagctttaaagttattttctaatcagcaatttaagcaagaattaatcaatactgctgataaagatgagggagttaatggtgaaaaagtatcaatttataaaaatggagattttatagatctttgtagaggacctcacattccaaatacaggttatcttaaacattttaaattaactaaattagcaggagcttattggagaggtattgaaacaaaccctcaactacaaagaatatatggaacatcatggttttctaaagatgatttaaataaatatttaacacgccaaaaagaagcagagaaaagagatcatagaaagttaggtaaagagttaaaattatttactactgctgatgaattaggtcctggacaatatttatggcaacctaatggttctatacttagaaaccaaattgaagaatttagtaagtctgcacatataagtaacggttatgaatttgtaaatactccacacattgggagatcaatactttgggaaacatcaggacatttagatcactataaagaaggaatgtacccagctttatcaactgaggatactaatgaagattattatttaaaaccaatgaactgtccttttcacattcttgtatataagaatgatataaggtcctatagagatcttccaataaggtattttgaattaggatcag

SEQ ID NO: 303115 - DNA, 808 bp, Unknown
  Bacterial polypeptide expressing nucleotide sequence isolated from the Sargasso Sea
caagtgctagctttagctgtaaaaaacctatatccagatgcaaaattggcgattgggccaactattgatgatggtttttactatgatttttttatggataagcctatctcatctgatgatttacctaaaatcgaggatgagatgaacaagataattaaatcaaaatctaagattactaaaacctatcattcaaaaaaagaagctctagaagtttttgatggtctcgatgaaggcttcaaagctgaaataataactgactcagggcaaaaaaatgattttcaactatatacacaagatgaaacaggatttatagatctatgtagagggcctcatcttcctaatctagatatgtgtggagagttcaagcttacaaaagttgctggagcatattggagaggtgattctactaaaccgatgcttacaagaatctatggcacagcatggaataccagaaaagaactagaagcatatctcaatcaattggcagaagctgaaaaaagagatcatagaaaattaggtaaagaaatgcgtctatttcattttcaagatgaagctcctggtatggttttttggcatccatcaggatggactatttattctgaacttcagaattatgtaagaaaaatgcaaagaaatgctgagtatcaagaaatcaatactcctcaagttgtagatagaaaattatgggaaaaatcagggcattgggataaatatagagaaaacatgtttattactgaaattgatgaagaacatgcaaatgaaaaaagagttaatgctttaaagccaatagaattgtccatgtcatgtt

SEQ ID NO: 303116 - DNA, 388 bp, Unknown
  Bacterial polypeptide expressing nucleotide sequence isolated from the Sargasso Sea
tttatgggttgagtcaggtcattgggataaatacaaagataatatgtataaaaccattattgatgatagagaattgatgattaaacctatgaactgtccggggcatgttcaaatatataatcaaggtataaaaagctataaagttcttccactgagaatggcagaatttggttcatgtcttcgtaatgaaccttctggtgcgttgcatggtttaatgagagttaggaattttgttcaagatgatgcgcatattttctgtactgaagatcaaatagagagtgaaactataagtttttgtaaattgcttcaggatgtataccgtgaattgggttttgaagaggtttcaataatgtacgctgataggccagaccaaagggtaggtgaagat

SEQ ID NO: 303117 - DNA, 603 bp, Unknown
  Bacterial polypeptide expressing nucleotide sequence isolated from the Sargasso Sea
tatgagttctggtgtaacgatcattctccccgatggcagcgagcgggttctcggcggcgacgctaccggcgctgatttagctgcggatttgggtgggcgcgccgcaaaagaggctctgatcgctgttgcagatggcgttgagttggatctcaaccgtcccctgcccgatggcgcgaatgtttcacttgtcttcccggcttccgaggaaggtctcgaagttttgcgccattcgacggcccacgtgttggctcaggcagttttaacgctttaccctggggctacgttcagcatcggtcctccaatcgaggatggtttttactacgattttgatttgcctgatggtcaaacgtttagcgatgaagatctcgaaaagatcgcgtcaaaaatgaaggaaatcgtcggtcgcaaacagccttttattaggagcgaagttgaacgccgagaagcagagcggcttttcgccaatcatccttacaaactcgaaattctcgatggagaagctgacgaccccagttctggacccgagggcgacgtcataacgacgtaccgcaacacagatgaattcgttgatctgtgcagaggtccccacgtacccaacacagg

SEQ ID NO: 303118 - DNA, 932 bp, Unknown
  Bacterial polypeptide expressing nucleotide sequence isolated from the Sargasso Sea
gatggaggaggcacggaagcgagatcatcgagtactcgggaaacagcttgatctgtttacaaccagcccacttgttggatctgggttggtactgtggatgccaaaaggtgccacactgcgagctacgcttgagtcgtttgttcgtgatgaactggctgcacgtggatacgagcctgtgtacacaccgcacatcggtaaagttgatctgtacaagatatcgggccactatccgtactactcagatagccaattcaagccgatcgtcatgcatgaggatgaacagtatctcctgaagccaatgaattgcccgcatcacacaatgatctataagtcccgcccacatagctataaagatcttcctctccgtctggcagagtttggaaccgtctatcgctacgagcaatctggtgaattggggggcatgactcgtgttcgtggctttactcaggatgatgcccatattttttgtcgccccgagcaggttgaggaagaggtggaagggtgtattgagttcacgctgaaggtcctcgaaagtcttgcatttgataattttcgagtgcggctgggatttcgtgatcaggccagcgacaaatacgttggcccacctgagaggtgggatgaggcagaggcagcaatcgaacgtgtggcccgccgcatgaatctgccggggtgtgagccagagccgggagaggctgctttttatgggccaaagattgattttgtggtgaacgattcactgggtcgggagtggcagcttgggaccgtccagctcgattacaacctcccgagtaaagaacgatttgatcttgagtacattggagcagacaatgcgaaacatcagccggtgatgattcaccgtgcaccgctggggagtctggagagatttgtgggtgttctcatagaacattttgcgggagcattttcgttgtggc

SEQ ID NO: 303119 - DNA, 730 bp, Unknown
  Bacterial polypeptide expressing nucleotide sequence isolated from the Sargasso Sea
aatgcctacaataacattaccagacggaaacaatataaattttccaaaaaaagttaccggagctgaggtagctgagaaaataagtaagtctttagctaaacaagcaatggttataagcgttgatggtgaacttaaagatttagattatttaatagataaagattgttcagtaaaaatttttacttctaaaaatccagaagggttggaaacaattagacatgacacagctcatattttggcaatggcagttcaggaactgtttccaggtacacaggttacaattggtccagttattgaaaatggattttattatgactttgccagaaaagaaccattcactgaagatgatttattaaaaattgaaaataaaatgaaagaaattgttgatagagatgaaattaccaaaagagaagtttgggagagaaataaagctattgatcatttcaaaaaaaaaggtgaaatttataaatctgaattaattaaagctatcccagagaaagaagatgtctcaatttattttcatggagattggcatgatctttgtagaggtccccacctatcctcaacaggtaaaataggaaaatattttaaactaacaaaagtttcgggtgcttattggaggggtgactcaaaaaatgaaatgcttcaaagaatatatggtactagttgggctactcaaaaagatttagatgaacatcttaaaagaatagaagaagcagaaaaaagagat

SEQ ID NO: 303120 - DNA, 680 bp, Unknown
  Bacterial polypeptide expressing nucleotide sequence isolated from the Sargasso Sea
attcaaagattttgatataaaactttctaccagacctgaaatgagggttggatctgataaaacttgggataaatctgaaaaagctttagaggatgcgataaaaaatttaggctatccttatagaattgatgaaggagatggagctttctatgggcctaagctagattttgttttaactgatgcaattggaagagaatggcaatgcggaacttttcaattagattttaacttagcagaaaggcttgacgctcaatatgttggtgaggatggaaaaaaacattatcctgtaatgattcatagagctgtgcttggatcatttgaaagatttatagggattttgattgaaaattattcaggtaagcttcctttttggttggccccacaacaagttgttatcgcctcaattatttctgacgttaacgattattcaattgaaataatggaacagctcaaaaaagaaggtattcgagctgaagttgacctaagaaatgaaaaaataagctataaaataagagaacatagttcaaagaaagttccaattattatagcaataggtaaaagtgaaaaaagcgaaaaaacagtctcaataagaagaattggaagctctgagacagagattttagaattaaatgaagctttaaaacaaattaaaaaggaaaatattttagttagtacatgat

SEQ ID NO: 303121 - DNA, 526 bp, Unknown
  Bacterial polypeptide expressing nucleotide sequence isolated from the Sargasso Sea
atggatataaagattaaagatgcaattgaaaggcaatggcaatgttcaactatacaattggattttaatctccccactcgctttaatatgtcttttataaatacaaaaggcatcaaagaagagccatacatgattcatcgagcattacttggatctatagaacggttttttggtattcttatagagcattatgcaggatggtttccagcttggctagcgcctgttcaatgtactattcttacgattaattctgaatctcatgattatgcaaaaaatgttctgtcagaattacaaaaaagtaatatacgtgtagattatgatgactcttcagaaaagataggatataaaattaaacaagcaatttcacaaaaaattccatatttacttattattggggatcaggaggtatctgataataaaattacaattcggcataaaaaggagaatatgggctcattatctgttgctgattttattgagaagtttggacctgaatttacaagtccaattgacaatgttatttaaa

SEQ ID NO: 303122 - DNA, 686 bp, Unknown
  Bacterial polypeptide expressing nucleotide sequence isolated from the Sargasso Sea
tttaggttttgaaaatgtaattttaaaatattcagatagaccagatcaacgtgtaggcgaagatgatgtttgggacaaatctgaaaaagctttgttagaagcgattaaagcctccaatcttgaatacactgtaaacaagggggaaggtgcattttatggaccaaagattgaattcgtattaagagatgcaattggaagagattggcaatgtggaacacttcaagtagatttaaatttacctggaaggcttggcgcatcatttgttgataaagacggatctaaaaaagtacctgttatgttgcatagagctttatttggatcattagaaagatttataggaatattaatagaaaattattcaggaaaattacctttttggatatcaccacttcaaactatggtaataccagtatctgaagattttgataattatgcaaaagaagttaataaaaaaataaaaaaagcaggaatcacttctgaagttgatctaaaaaatcataatttaaactataaaataagagaacattcattgtctaaagtacctattttgttaatttgtggaaaaaaagaagttgacagcaatagtgtaactattagaagattggattctaataaacaagaaaatatggatttagagttatttataaaaaaatattctgcattaaataaagtattatcaaattaag

SEQ ID NO: 303123 - DNA, 549 bp, Unknown
  Bacterial polypeptide expressing nucleotide sequence isolated from the Sargasso Sea
tatggaaaatgaagaaaaatttatagacacgttgcgtcatgatacagctcatgtaatggccatggctgttcaggaactttaccctgagactaaagtaactattggtccagtgattgaaaatggatttttttatgatttctccagagagactccattcacagaaaaagatttaattgtaattgaaaaaaaaatgaaagagattgttaatcgagatattccagttacatttaaaattgtttcaagaaaagaagcaatagaaatatttagtaaaattggtgaaaattataaggtagagataatcaattcaattccagaaaatgaggaaataaaaatttattatcatggtgattggtttgatttatgtcgtggacctcatttgaactcatctggagaaattggcaaagcatttaagttgactaaagtagctggcgcatattggagaggagattctaaaaatgaaatgcttcaaaggatatatggaactgcatgggaaacacaagaggagttagacaattatttaaatcttatcaaagaagctgaaaaaagaga

SEQ ID NO: 303124 - DNA, 325 bp, Unknown
  Bacterial polypeptide expressing nucleotide sequence isolated from the Sargasso Sea
gctggtttattcccaacgtggctttctccaaagcaagtggtaattatgaatattaccgataaactagcagattacgtgcacgaaattgtacaaaaattaaataaacttggaattagagccgctgctgacttgagaaatgagaagattggctttaaaatccgtgagcatacattaaagcgtataccttacttactggttgttggcgacaaagaagttgaacaacaagaagtagcggttcgtacgcgaacaggtgaagacctgggtaaatttaatgtcgatgactttgtagctaaaataagcgaagagattaaaaatcgacagtaaa

SEQ ID NO: 303125 - DNA, 967 bp, Unknown
  Bacterial polypeptide expressing nucleotide sequence isolated from the Sargasso Sea
agatttagaatgtaaaataacaaaggattcctctataaaaatttttacatctaaagataaagaaggtcttgatactataagacatgatacagcacatattttagcaatggcggttcaagaactttttcctgaaactcaagttacaattggcccagttatagaagatggtttttattatgactttgcaagaaaagaatcttttacaagtgaagatttagaaaaaattgaaaaaaaaatgaaagagatagttgatagagatgaaaaaacttatagagaagtttggaaaagaaatgatgctgtagaacattttaaaaagagaggtgaaacatataaagctgaaataattaatagcattcctgaaaaagaagaagtttcaatttattttcatggaaagtggcacgatctttgtagaggtcctcatttagtttcaactggaaaaataggaaaatatttcaaattaacaaaagtttcaggtgcatattggaggggagattctaataatgaaatgcttcaaagaatttatggaactagttggccatctcaaaaggaattagacgattatttaaaaagaatagaagaggccgaaaaaagagatcatagaaaattaggcaaagagatggatttatttcattttagagaagagagtccaggttcagttttttggcatcaaaaaggatggagtttatttttaaaattagtttcttatatgagaatgaagcaagaccaggcaggatatgaagaaattaatactccagaaattttagatagatctttatgggaaaaatctggtcattgggagaagtttggagaaaatatgtatacatctactacaccagatgaaaaagtttttgcaatcaaaccaatgaattgcccaggatgtgttcaagtttttaatcaaggtttaaaaagtaatagagatttacctttaaaaatgtcagaattggaaaagtacatagatatgaaccat

SEQ ID NO: 303126 - DNA, 769 bp, Unknown
  Bacterial polypeptide expressing nucleotide sequence isolated from the Sargasso Sea
atgccgacaattacactaccagacggaaaaaatcttgaattctctaaagaagtaacaggattagagattgcggaaaaaataagtaaatcgttgttaaaacaagcattaataatgagtgtcaatggtgaattaaaggatttatatttttcagttaaaaaagattgttcaataaaaatttttaccgctaaagacccagagggccttgaggttattaggcatgacaccgctcacattatggcgatggcagtgcaagagttgtaccctggcacacaagtaactattggaccagtaattgaaaatggtttttattatgattttgctcgaaaagaaccgtttactgaggacgatttagaaaaaattgaaaaaaaaatgtcagaaataatcgataaggatgttaaaacgagaagagaagtttggaaaagagataaagcaataagtcattttaaaaaaataggtgaaaaatataaagcagagataatagagagtataccagaaaaagaagaactaactgtttatcatcatggtgatacctggcatgatttgtgtagaggcccacacttagtttcttctggaaaaattggtaaagcatttaagcttacaaaagttgctggagcgtattggcgtggagactcaaaaaatgaaatgttacaaagaatttatggaactagttgggcatctcaaaaagatttagatgattatttaaaaagaaaaaagaagccgagaaaagggatcacagaaaacttgaaaagagatggacttatttcattta

SEQ ID NO: 303127 - DNA, 701 bp, Unknown
  Bacterial polypeptide expressing nucleotide sequence isolated from the Sargasso Sea
aatgccaaatataactttaccagacggaaaaaaaattagttttgaaaaaagtatttcaggttttgaggttgctgaaaaaattagcaaatctctctcaaaacaggctttattaataagtgttgatggagaattaaaggatttaaaccacaatatttcaaaagactcttcaataaagatatttacatcaaaagataaagaagggctggaaactataagacatgatactgcccatatattagctatggcagttcaagaattatttccaggtacacaagtcacaataggtcccgttattgaagatggtttttattatgattttgcaagaaaggaatcttttacctctgaagatttagaaaaaatagaaagtaaaatgaaagaaattgtggatcgagatgaaaaaacttatagagaagtttggaaaagaaatgatgcaattgagcattttaaaaaaaagggagaaatatataaagctgaaataatagaaagcattccagaaggtgaagaagtttctctatatttccatggtgattggcatgatttatgtagaggtcctcatttatcttcgactggcaaaattggaaaattttttaaattaacaaaagtttctggagcttactggagaggtgattcaaataatgaaatgttacaaagagtttatggtactagttggtcaacccaaaaagagttagacgattatttga

SEQ ID NO: 303128 - DNA, 835 bp, Unknown
  Bacterial polypeptide expressing nucleotide sequence isolated from the Sargasso Sea
atgcttcagaggatatacggtactgcctggccagattcaaaggatttagataattatatattgcagcaagaagaggctgaaaaaagagatcatcgcaaacttggtagacaacttgatctatttcacttccaagaagaagctcctggaatggttttctggcatcctaaagggtggtctatttactcagttcttaaaaactttattaaagaaaaacaagatgaattcgactatcaagaaattaatacaccacaaatcgtagatagaaaattgtgggaagcttccggccattgggataagtatcgagaaaacatgttcattaccgagatagatgaagaacatgccaacgaaaaaagaacaaatgccctcaagcctatgaattgtccatgtcatgtccaggtatttaatcaaggtctgaggtcttacaaagatcttcccgtccggttttctgagtttggctcttgtcatagatatgaagcttcgggaactttgcatggattgatgagagtaagaggatttacgcaggatgatggacacatcttctgtaccgaagatcaaattcaagatgagactaagaactttatagagcttttatcagatatttacgctcaattgggttttgaggcttttgaaatcaagctttctactagaccagaagtgagagcaggcacagatgaaatttgggataaggcagaattagctcttgaaaatgccattaagaatttaaaacttccttatgaagtggtggaaggggatggagccttctatggtcctaaattagactttgttcttatagatgccctaggaagggaatggcaatgtggtacttttcaagcaa

SEQ ID NO: 303129 - DNA, 802 bp, Unknown
  Bacterial polypeptide expressing nucleotide sequence isolated from the Sargasso Sea
atttagagaaaatatgtttattactcaaggtgaggatgaaaaacccatggctttaaagccaatgaattgtcctgcccatgtacaaatttttaaacaaggaataaaaagctaccgagatcttccttatagaatgtcagaatttggaagctgtcatagaaatgaaccttcaggatcattgcacgggttaatgagggttagaggatttacgcaggatgacgcacatattttttgtactaaagatcaaattaattcagaaacagaaagtttttgtaaacttcttacagaaatttatcatgattttggatttacaaaaataaatattagatttgctgataggccagaaaaacgagcaggggatgacagtacttgggaccaagcagaaaattcgcttgaaaatgctataaaagcaataaaccttccttatcagaaagatcccggtggcggggctttttatggtcctaaacttgattttgtattaactgatactttaggtcgagaatggcaatgtgggacattgcaagttgattttgttttaccagaacgtttagatgccttttatattgatgaaagaggttcaaaagtaagaccagtaatgcttcatagagctattttgggttctatggaaagatttattggagttttaatggaaagcacaggtggaaagtttcctttgtggctggcacctatacagataatgataacaaatatttctgaagaatctatagaatatgccaaaaaaatatatgaaatctgtattaatagaaatttaagagctgaaatagatatacgaaatgaacaacta

SEQ ID NO: 303130 - DNA, 883 bp, Unknown
  Bacterial polypeptide expressing nucleotide sequence isolated from the Sargasso Sea
ggaatggttttttggcacagcaaaggatggactatatataatattataaaagattatatacggaatattactcttaaaaatggttatcaagaagtcaacactccccaagtgcttgatagaaagctttgggaaaaatctgggcattgggataagtttggtgaaatgatttttaccacaagttctgaaaaaaaagattatgcaataaaaccaatgaattgccctgctcatgttcagatttttaatcagggattaaaaagttacaaggatttaccaataaaaatatcagagttcgggctggtgcacagaaatgaaccctctggaactcttcatggcttaatgagggctagacaatttgtccaagatgatgctcatattttttgtaccgaggaacaactaagtaaagaaattcataatttaattaaaatgacatttatggtgtataaatattttggctttcaaaatatcagtattgctttgtcaacaaggccagaaaaaagagtaggtaatgaagaattatgggataaatcagaggatattttaaaaaaggttttgtctgaaagtgttgagtcattttctatacaagagggcgagggagcattttatggccccaaaatagaattttctctaacggattcattagatcgtgtgtggcaatgcggcacaattcaacttgacttttcaatgccgtcggcgttatctgcttcatttattgatgaaaaaggggaaaaatcaactccggtaatgattcatcgagcaatacttggatcaattgagcgatttataggaattttgatagaacattatggtggaaatttacctttttggctgagtcctgagcaaataataattgctaatattactgataagcatatagaatgcgcaa

SEQ ID NO: 303131 - DNA, 461 bp, Unknown
  Bacterial polypeptide expressing nucleotide sequence isolated from the Sargasso Sea
aaaaaagctggagaaatttataaagcggaaataattaaggatattccaaaggaagaagaagtttcagtttattttcatggaaagtggcatgatttatgcagagggccacatttaagttctactggaaaaattggaaagtattttaaacttacaaaggtttcgggggcatattggagaggtgactcaaaaaatgaaatgttacaaagaatttatggaacatcttggccatctcaaaaagaacttgataattatttaaaaatgattgaagaagctgaaaaaagagatcatagaaagctaggcaaagaaatggatttatttcattttagagaagagagcccgggttcagttttttggcatgagcgaggatggaatctttttcaaaaattaattgattatatgaggttaagacaaaaaaaagcaggttataaagaaattaatacacctgagattttagatagagg

SEQ ID NO: 303132 - DNA, 496 bp, Unknown
  Bacterial polypeptide expressing nucleotide sequence isolated from the Sargasso Sea
atgccgataataacactacctgacggaaacaatattgattttcctaataaagttactggactggaagtagctgagaaaattagtaaatcattagctaaacaagccatggttataagtgttgatggtgagcttaaagatcttgattttctaattgaaaatgactgttctgtaaaaatttttacttcaaaaaatcctgagggtttggaaactataaggcatgatacagctcatattttagctatggctgttcaagaattatttcctggcacacaagttacgattggacccgtgattgaaaatggattttattacgactttgctagaaaagaaccattcacagaagatgatttaattaaaattgaaaataaaatgaaagagattgttgataggaatgaaataacaaaaagagaagtttgggatagaaacaaggcaattagccattttaaaaaaaaaggagaattttataaagccgagctgatgaagcgaaccgaaaacg

SEQ ID NO: 303133 - DNA, 475 bp, Unknown
  Bacterial polypeptide expressing nucleotide sequence isolated from the Sargasso Sea
tggcacccttcaagttgacttcgttttaccagatagattagacgcatcatatgtgggtaaggatggtgcaaagcatcgtccagtaatgctacaccgagcaattcttggatcttttgagcgtttcataggaatcctcattgaacattatgcaggccgctttccattttggttagcaccattgcaagttgtggttgcgtctattactgatgaggcaaatttatatgctgaaaaagtcaaaaaccaacttatcgaggccggattgacagtcgaaacagatttgcgtaatgaaaagataaactttaagattcgcgagcattcggtcgcaaaagttccaataattttagttgttgggacgaaggaaatagagaaaaacactgttgctatgcgcaggctcggtggtgacaatcaagaaattcttgcgcttgaggcagcagttgctaaactacaaacagaagctattattccctgtaattaa

SEQ ID NO: 303134 - DNA, 932 bp, Unknown
  Bacterial polypeptide expressing nucleotide sequence isolated from the Sargasso Sea
cattttaaaaaaaaaggagaaatttataaagctgagctgatcgaagcgatacctgaaaacgaagatgtgtcaatttactttcatggtgaatggcatgatttatgtagaggtccgcatctctcctctacaggtaaaatcggaaaatattttaaacttacaaaagtatcaggagcatactggagaggagattcaaataatgaaatgcttcaaagaatttatggaaccagttgggcaaaccaaaaacaattggacgattatttgaaaagaattgaagaagctgaaaaaagagatcatagaaaacttggaaaagaaatgaacctatttcattttagagaagaaagtcctggatcagtattttggcatgaaaaaggatgggccttatttcagaaattaatcaactatatgagaagtcgacaagacgctgctggttataaagaagtaaacacaccagaaatattagatagacaactatgggaaaaatctgggcattgggaaaaatatggagaaaatatgtatacttcagaaactcctgatgaaaaagtatttgcaattaaaccaatgaattgtcctgggcatattcaggtatttaatcaaggtttaaaaagttatagagaccttcctttacgtattgcagaatttggaaaagtacatcggtatgaaccatctggagccttacatggattattaagagtaagagcttttactcaagatgatgctcatatattttgttctgaagatcaaattactagtgaatgtttagaggtaactaatttaattctagatatttataaagacttaggcttcgaaaatgtaattcttaaatatgcagatagacctgaagtaagagttggggatgataaaatttgggataaagcagaggcttctttgcttgaagcagttaaagcttccaagttagaatatagtattaataa

SEQ ID NO: 303135 - DNA, 778 bp, Unknown
  Bacterial polypeptide expressing nucleotide sequence isolated from the Sargasso Sea
atgccaaatataaaattgtcagatggaaatacactagcttttgataagaaagttaccggatttaaaattgctgagaaaataagtaaatctttatcaaagcaagcattagtaatcagtgttgatggaaatttaagagacttaaactttgaaatagaacatgattgctcagtaaaaatttatacttctaaagataaagaaggtatagaaacaatacgacatgatacagcacatgttttagcaatggcagtacaagaactttttccaggaactcaagtaactataggaccagtaattgataatggtttttattatgattttgcgagaaaagaaacttttactgaagaagatcttcaaaaaatagaaaaaaaaatgaaagaaattgttgaaagagacgaacaaacacgcagagaagtatgggaaagagataaagctatagaacattttaaaaaagctggagaaatttacaaagctgaaataattaaaagtattccaaagggagaggaagtatctatatattttcatggaaaatggcacgatttatgtagaggtccacacctaacttcgacaggaaaaattggaaagtattttaagcttactaaagttgcaggcgcatactggagaggcgactcgaataatgagatgctacaaagaatttatggaacagcgtggccttctcaaaaagaacttgatgaatatttgaagagaattgaagaagcagaaaaaagagatcatagaaaattgggaaaagaaatgaatttatttcattttagagaagaaa

SEQ ID NO: 303136 - DNA, 698 bp, Unknown
  Bacterial polypeptide expressing nucleotide sequence isolated from the Sargasso Sea
aatttataaagatcttggttttgaagatgttattctgaaatattctgatagaccagagttgagagtaggagatgatagtgtatgggataaagcagaggcagctttactagaggcagttaaagctactaaactagaatatactattaataagggtgagggtgcgttttatggacctaaaattgagtttgttttgagagatgctattggaagagattggcaatgtggaactttacaggttgattttaatttaccaggaaggttaggtgcttcatatgttgataaagatggaacaaaaaaagttccggtgatgttacatagagcattgtttggatcacttgaaagatttattggaattttaattgagaattatgctggaaagtttccattttggatatctccattacaaacagtagtaattccaatctcagaagattttgaggaatatggaagtaaagtttcacaaaaaataaaagaagctgggattacctcaatagttgatttaaaaaatcataatttgaactataaaataagagaacattctcttgcaaaagtccctattttattaatttgtggtaaaaaagaagttgacagcaactccgtaactattagaagattggattctaataaacaagaaaatatggaactaaacaaatttttaaaaacattttctgctttaaataaagcgtcttcaatttaag

SEQ ID NO: 303137 - DNA, 937 bp, Unknown
  Bacterial polypeptide expressing nucleotide sequence isolated from the Sargasso Sea
gtgtctattgatggcgttcaaaaaagatttgcatgatgtcatagaagctgatgcgtcagtttcaataattacaattgatagcgatgaaggtgttgaaatcatgcgtcatactcttactgctcaggttttagcaagagccattaaaaacctttatccaaaatcaaaattagctattggtcctacagttcaagatggtttttattatgatgttgaatccgatgagtctatatcttctgacgatctaagtaagatcgaagaggaaatgaaaaaaatcattaaaactaaatcagcaattactaaaaaactagtttcaaaaaaagaagctttaaagatatttaaatcaaacaaagaatcatataaagaaattatcattaatgagtctgatcaagacgataattttcaactttattaccaggatgacgaagagtttgttgatctatgtagaggtccgcatctaccaaatttaggatttattggttcattcaaattaacaaaagtatcaggtgcatattggaagggcgattcaaaaaactcaatgctaacaagaatttatggaactgcatttggtaatgataaagatttacaaaatcatttagataacatagaggaggcattaaaaagagatcatagaaagcttggaaaagagatggatttgtttcactttcaagatgaagctccagggatggttttttggcaccctaatggctggactgtttatagaaaattacgaaattttgttagagatagacttaaagaaaataattatattgaagtcaatactcctcaagtgatagatagaaaattatgggaagcttcaggccattgggacaaatacagagaaaatatgtttattacagagatcgacgaagaacatgctaacgaaaaaagagtaaatgctcttaagccaatgaattgtcctgggccatgttcaaatata

SEQ ID NO: 303138 - DNA, 853 bp, Unknown
  Bacterial polypeptide expressing nucleotide sequence isolated from the Sargasso Sea
cgacttgaagaagctgaaaaaagagatcatagaaagctaggaaaggaaatggatcttttccattttagagaggaaagcccaggatctgttttttggcatgaaaaaggttggctgctttttcaaagattgattgagtatatgagaatgaaacagaggctagctggttataaagaaattaatacacctgagcttttagataaatctttatgggaaaaatcaggtcattgggaaaaatttggtgagcacatgttcacctccgaaactccagatgaaaaaacttttgctgttaaaccaatgaactgtcctggctgtgtacagatttttaatcaaggattaaaaagttatagagacttacctttaaaactttcagaattcggtaaggttcatagatatgaaccatctggagcattacatggattattgagagtaagagcatttactcaggatgatgcacatatattttgtactgaagatcaaattacagaagagtcattatctgtcacaaacctcattttagaaatatataaagatttaggttttaaaaatgtaatattaaaatactcagatagaccaaaagaaagagtcggagaggatagtgtttgggataaatcagagtctgctcttttaactgcaattaaaaaatccaaattggaatacacaattaataaaggggagggagcgttttatggtcccaaaattgaatttgttttgagagatgctatcggaagagattggcaatgcggaactttacaagttgacctaaacttacctggcaggcttggagcttcatacgttgcaaaagatggaacaaaaaaaattcctgttatgctgcatagagctttatttggctctc

SEQ ID NO: 303139 - DNA, 679 bp, Unknown
  Bacterial polypeptide expressing nucleotide sequence isolated from the Sargasso Sea
tatcatcatggagatacctggcacgatttatgtagaggacctcatttagcctcatcaagcaaaattggaaaggcttttaaactcacaaaagtttcaggtgcctattggcgtggagactccaataatgaaatgctgcaaagaatttacggtacttgttggagtactaagaaagaattagatgattatttacaccgactcgaagaggcagaaaaaagggatcacaggaaattaggcaaagaaatggatttatttcattttagagaggaaagtccaggatcagttttctggcacgagaaaggctggttgctgtttcaaagattagttgagtatatgagaatgaagcaaagactagctggttacaaggaaatcaatacacctgagttattagacaaaacattatgggaaaaatcaggccactgggaaaaatttggtgagcacatgtttacctctgagacacctgatgaaaaaacttttgcagtaaaaccaatgaactgcccaggatgtgtacaagttttcaatcaaggcttaaagagttatagagatttaccactaaaactttcagagtttggaaaagttcatagatatgagccatctggagcattacacggtctattgagggtaagagcgttcacaaaagatgatgcccatattttttgtactgaggatcaaattacagaag

SEQ ID NO: 303140 - DNA, 709 bp, Unknown
  Bacterial polypeptide expressing nucleotide sequence isolated from the Sargasso Sea
attgagaagttatagagaccttccattaaggattgcagaatttggaaaagtttttaggtttgaaccttctggagcacttcatggactaatgagagtgagagaatttactcaagatgatgctcatatttattgtttaaaagaacagatggaagaagaatgtgaaaaggttattaatttaactttggatatatataaagattttggatttgagaatgttaagattaaattctctgatagaccaaaaaaaaggatcggcgatgatgatacatgggattttctcgaaaaatcattactcgggtctcttaaaaaattaaatttagaatttaatgttaataaaggggagggagctttttacggaccaaaaattgaatttgtattagttgatgctattggaagagaatggcaatgtggaacactgcaagttgatttaaatttacctccgaggctgggtgcaaatttcatagataaagacggttctaaaaagcatccagtaatgttacatagagccttttttggatccatagagagattcattggaattttaatagaaaattacgctggaagactgccccactggcttgcgccagtacaggttgcaatagctacaattaatgataactgtatagaatattcaaaaactataggtaatcatctcagtaaagatggtataaaatttaaatttgattttagaaatgaaaagttaaattat

SEQ ID NO: 303141 - DNA, 937 bp, Unknown
  Bacterial polypeptide expressing nucleotide sequence isolated from the Sargasso Sea
gattgaaaaaaaaatgtcagaaataattgatagagatgtaaaaactaaaagagaagtttggaaaagaaaagaggctataaaacattttaaaaaaattggagaaaagtacaaagcagaaattatagagagtatacctgaaaatgaggaattatctgtttatcatcatggtgatacctggcacgatttatgtaggggaccacatttagcttcatctggaaaaattggtaaagcattcaaattaacaaaggtatcaggagcatattggagaggtgactccaataatgaaatgcttcaaagaatttatggaacatgttggagcactaaaaaagagcttgatgattatttacaccgtctagaggaagctgaaaaaagggaccatagaaaacttggaaaagaaatggatctttttcattttagagaggaaagtccgggagcagtattctggcatgaaaaaggctggttattatttcagagacttgtagaatatatgcgagtgaaacaaagacttgctggatataaggaaattaatactcctgaacttttagataaatctctttgggaaaaatctggtcattgggacaaatttggagaacacatgtttacatctgaaactccagacgaaaaaacttttgcagttaaaccaatgaactgtcctggttgtgttcaagtgtttaatcaaggtttaaaaagttatagagatttaccacttaaattatctgaatttggaaaggtgcatagatatgagccttcaggagctctacatggactattaagagtaagagcatttacgcaagatgatgcacatatattttgtacagaagatcaaataactgaggagtcattgtcagttacaaatttaattttagaaatttataaagatttaggttttgaaaatgtaattttgaagtactcagacaggcctgaaaaacgtgtagga

SEQ ID NO: 303142 - DNA, 909 bp, Unknown
  Bacterial polypeptide expressing nucleotide sequence isolated from the Sargasso Sea
tttccattttcaagaagaggcgcctggtatggtattttggcatgcaaatggttttcatatttttaatcaagtaaaaaattacattactacatatttgatagagaataattataaaataatagatacgccacaaattcttgataagtctttatggaaaaaatccggtcatcttgataaattttctgatttgatatttgatgcaggatcagaaaataaagagttcgcaattaagccaatgagctgtcctggacatatacaagtatacaatcatggattaaaaagctatagagatttgccaataaaatatgcagagtttggtaaagttcatcgtaatgaaccatcaggaacgttacatggtcttttaagattgagagcattcactcaggatgatgctcatatcttttgcactattcatcaagtagaggatgagattggaaaattgatagataacatatatgatatttataatatatttggttttaaagatatctttgtagaattatcaactagacctgaaaaaagagtgggtgatgatcgtatctgggatatatctgagagtgcattgaaaaaaactttagagtcaaagaatgtcaaatggaagattaatgaaggagacggtgccttttatggacctaaaatagatttttctttaaaagattctattggaagagtttggcaacttggaactatacagcttgatttttcaatgcctgagagattgagcgccacttacgtcaatgaagaaggtaacagagtcgcaccagtaatgattcatagagctatcctaggatcgctggagagattcgtaggaattttaattgaagaatattcagggaacttccccttgtggctctctcctcaacagattcaaataataaatattacctctgctcaagatgattattgtat

SEQ ID NO: 303143 - DNA, 687 bp, Unknown
  Bacterial polypeptide expressing nucleotide sequence isolated from the Sargasso Sea
gtatttatgcgcatggatggtggacaataaatggagaaaaaatgtcaaaatcattgggaaatgtaatagaccccaattaccttgtagacacatatggtatagaccaagttagatactttttactaaaagaaattccttttgggcaggatgggaacttttctgaagaattattagtcaatagaataaatagtgacttagcaaatgattttggtaaccttgttcaaagagtgctcgcaatgattcaaaagtatagtagtggtaatattcctaaagctgataatttaaatgaaactgatttatctctaatagaactgcctgaaaatatttataacattaataatgctgaaatgaataactatcagtttaatataatattagaaaacatttggaaaattataagatcagcaaacagctatgtagataacaatgaaccttggaacctacataaaaataataatttcaaaagattgaataatgtattatatacattattaaatactatctataaagtaactatacttctgcagccatttttacctgagtcttcaaaaaaaatatttcatttgctaaagcaaaaagaggaaatatccttctctgaaattaaaaataatattcaagaaggtgtaaaacttgaaaaatctcagcctatttttccaaggtttgataaaaaggatttaaaaatatgat

SEQ ID NO: 303144 - DNA, 778 bp, Unknown
  Bacterial polypeptide expressing nucleotide sequence isolated from the Sargasso Sea
aatgccaaatattactttaccagatgggaaacaaataaaatttgacaagccagttaatggtttagatatatgtaataaaataagcaaatcactttctaagaatgcacttataatgagtgttgatggagagcaaaaagatctctcttttaatattgaaaaagattctacagtaaaaatattcacttctaaagaccgtgagggagttgatactattagacatgatacggctcacatacttgcgatggcagtccaagagatattccccggaactcaagtaactataggaccagttattgataacggtttttattatgattttgcacgaaaagagccctttactcaggatgatttagataaaattgaaaaaagaatgaaagaaattgtagatagagatgaggaaacaaggagagaagtttgggaaagaaacaaagctgcagatcattttaaaaaaaaaggtgagatttataaatctgaaattatagagagtattcccgagggagaagaaatctctttatattttcatggtaaatggcatgatttatgtagaggtcctcatttatcctcaactggaaaaattggaaagcactttaaattaatgaaagtatcaggagcatattggagaggtgactcaaacaatgaaatgttacaaagaatttatggaacagcatggccatcgcaaaaggaattagatgattatcttaaaagaattgaggaggcagaaaaaagagatcacagaaaacttggaaaagaaatggacctttttcactttagagaggaa

SEQ ID NO: 303145 - DNA, 826 bp, Unknown
  Bacterial polypeptide expressing nucleotide sequence isolated from the Sargasso Sea
atttggaaaagttcatagatatgaaccgtcaggtgctcttcatggattgatgagagttagagcatttacccaagatgatgcacatattttttgtacagaagatcaaattactgaggaatctttatcagtaacaaatttaattttagatatttataaagatttaggtttttcaaatgtaatattaaaatattcagatagaccagaaactagagttggaaatgataaagtttgggataaagccgaagctgcattgcttgaagcagttaaagcatcaaaattagaatacagcataaataaaggagaaggagcattttatggaccaaagattgaatttgttctaagagatgcaataggaagagattggcaatgtggaaccttacaagtagatttgaatttacccgaaagattaggtgctacatttgtagataaagatggatcaaaaaaaatcccagttatgttacatagagcattatttgggtcacttgagagatttattggcatattaatagagaactatgccggaaaacttcccttctggataaacccactccaggtagtagtaattccagtatcagcagaatttgatgattatgcgaaaaaaatatataacaaaatcaacagcataggtttaaattgtgaagttgatttaaaaaatcataatttaaattataagataagagaacattctcttagtaaagtaccaatattattaatttgtggtaaaaaagaagttgacagtaacacagtaactattagacaattggattctacaaaacaagaaaacatggaagtaaaaaaatttctagaaacttattcctcattaaat

SEQ ID NO: 303146 - DNA, 466 bp, Unknown
  Bacterial polypeptide expressing nucleotide sequence isolated from the Sargasso Sea
tgatttctcaatgcctattagattggatgcaacttatgtagatattgataatgagaaaagaaatccagttatgcttcatagagcaattttaggatcctttgagagatttattggaattttaattgaagaatatgaggcaaaattcccaatttggattgcgccttatcaaataattttattgagcattactgatagaaatattgaaaagtgtttaaagtttaatgaattaataaataataatggttaccgatcaaaagttgatgttaggaatgaaaaaataggatataaaataagagaggcaactctcgggagagttcctttaattgcagttattggagataaagaagaggaaattgattcagtcgctttaagagctttggatggaacaaatttggggatcttcgacctacctaatctatacaaattaatggatgaattaatagaaaaaaaagggagaacagtataa

SEQ ID NO: 303147 - DNA, 861 bp, Unknown
  Bacterial polypeptide expressing nucleotide sequence isolated from the Sargasso Sea
ttggcattataaaggttggactttgtttcagaccctagtcaattacatgagacaaaagcaaaaaaatgcaggttataaagaaattaatacaccagaaatattagataaaactttatgggagcagtcaggtcattgggaaaagtttggagaaaatatgtatacctcagaaactcctgatgaaaaaatatttgcaattaaacctatgaactgccctggcggtatacaagtatttaatcaaggactgaaaagttatagagatttacctcttaaattatcagaatttggtaaagttcacagatatgaaccttctggtgctttgcatgggctactaagggtcagagcttttacacaggatgatgcacatatattttgtacagaagatcaaattacagaagaatgtttaagtgtaactaatttaatattagaaatttataaggatttaggttttgaaaaagtcttactacaattttcagacaggccaaaaaaacgagttggagatgataatatttgggataaggctgaaactgctttgttaaatgcaattaaacaaacaaaattaaaatatgaaataaataaaggcgaaggtgcattttatggtcctaaaatagatttcgttctccgcgatacaataggaagagattggcaatgtggaactttgcaagttgatttaaatttacccggcagactaggttctacttatatagctagcgatggatcaaagaaagttcccgtaatgcttcaccgtgctttatttggttctttggaaaggtttattggaattttaattgaacattacgcaggaaaattaccattgtggctagcccctttacaagttgttattttaccaatagcatcagaatt

SEQ ID NO: 303148 - DNA, 439 bp, Unknown
  Bacterial polypeptide expressing nucleotide sequence isolated from the Sargasso Sea
aatgccacaaattcaattactagacggaaaaaaaataaagtttgataaatcaattaatggttttgatttaataaaaaaaatcagtaagtctctagaaaaaatggcattaattatggaagttgacggagatctaaaagatctaagtcatttgattacaaaagatgcaaaagtcaggattattacctcaaaagataaagagggtttagaagtaatcagacatgatgctgctcatattatggcaatggctgttcaagaattatttcccagcacacaagtcacaataggaccagttatagaaaatggtttctattacgattttgcgagacaagaaccttttacgagtgatgatttaaataagattgagaaaaaaatgtcagaaataattgatagagatgtaaaaactaaaagagaagtttggaaaagaaaagaggctataaaa

SEQ ID NO: 303149 - DNA, 724 bp, Unknown
  Bacterial polypeptide expressing nucleotide sequence isolated from the Sargasso Sea
ttgatagttacaaatcttattttagaaatatataaggacttaggttttgaaaatgtaattcttaagtattctgacagaccaaatgtaagagtaggtgacgataatgtatgggataaagctgaaactgctttactagaggcagttaaagcgagtaaattagaatatagtataaacaaaggtgaaggtgctttctatggacccaaaattgaatttgttttaagagatgcaatcggaagagactggcaatgtggtactttacaggttgattttaatttacctggaagactaggtgcctcatatgttgacaaagatggaacaaaaaaagtaccagtaatgttgcatagagcgttatttggatcacttgaaagatttattggcattctaattgaacactatgctggtaagtttcctttttggatttcacctcttcaaactgtggtaatccctatatctgaagagtttgataactatgcaattcaagtttcaaaaaagattaaaaaagcaggaatcagttcttttgttgatttaaagaaacataatttaaactacaaaataagagatcattcccatgcaaaaataccactgttgctaatttgtggtaaaaaagaagttgacagcaactcagtaacgattagaagaatggattctaataaacaagaaaatatggatttaaatttattcttaaaaaaattctctgcttttaataaagcatcctcaaactaag

SEQ ID NO: 303150 - DNA, 858 bp, Unknown
  Bacterial polypeptide expressing nucleotide sequence isolated from the Sargasso Sea
gctaggcaaagaaatggatttatttcattttagagaagagagtccaggttcagttttttggcatgagcgaggatggactctttttcaaaaattaattgactatatgaggttaaggcaaaaaaaagcaggatataaagaaattaatacacctgagattttagatagaggtttatgggaaaaatcaggccattgggaaaagtttggtgagcacatgtatacctcaactacaccagatgaaaaaatttttgcaattaaacctatgaattgtccaggttgtgtccaagtttttaatcaaggattgaaaagttatagagatttaccccttaaaatgtcagaatttggaaaagtacatagatatgagccttcaggcgctttacatggtttaatgagagtaagggcttttactcaagatgatgcacatattttttgtacagaggatcaaattacccaggagtctttgacagtaacaaatttaattttagatatttataaagatttaggttttaaaaatgtgattttgaaatattcagatagaccagaggttagagtcggtgatgataaagtttgggacaaatcagaagctgctttgctagaagcggtcaaagaaacaaaattagaatatagtattaataaaggcgaaggtgctttttatggtcctaaaattgaatttgttttaagagatgcaataggtagagattggcaatgtggaactctacaagtagatttgaacctaccagaaagacttggtgcatcatatgttgataaagatggatcaaaaaaaattccagtaatgctgcatagagcattatttggatcacttgaaagatttataggaattctcatagaaaactattctgg

SEQ ID NO: 303151 - DNA, 682 bp, Unknown
  Bacterial polypeptide expressing nucleotide sequence isolated from the Sargasso Sea
aatgttgaatataactttacaagacggaaacaaacttaaatttgataaaaaaactactggattggagattgctgaaaagataagtaaatctctgtcaaaaaatgctcttttaattagcattgatggaaaattgaaagaccttaatacagtaattgaaaaagattgttcggtaaaaatatttacatcaaaagataaggagggtcttgaaacaataagacatgatactgcacatattttagcaatggcggttcaagaattattcccaggaacacaagttacaattggtcctgtaattgaagatgggttttattacgattttgcaagaaaaaaacctttcacagaagatgatttaaataaaattgaaaataaaatgaaagaaatagttgggagagatgaaaaaacaatcagagagatttggccaagagataaagctatcgaacattttaaaaaaattggtgaaatttataaagctgaaattattaaaagtattccagagggagaagaggtttcaatttattttcatgggaaatggcatgatctttgtagaggtcctcacctaacatctactggaaaaattggaaaattttttaaactaacaaaagttgcaggtgcgtattggaggggagactcaaataatgaaatgcttcagagagtatacggaacaagttggtcgactcaaaaa

SEQ ID NO: 303152 - DNA, 488 bp, Unknown
  Bacterial polypeptide expressing nucleotide sequence isolated from the Sargasso Sea
aatgcctataattacattaccagatggtaaaaatattgaatttccaaaagaggttacaggtttagacattgcagaaaaaataagtaagtcattattaaaacaagcattaattatgagcgttgatgatgagctaaaagatttatatttttcaattaaaaaagattgctccgtaaaaatttttactgcaaaagaccctgaaggacttgaggttattagacatgataccgctcacatcatggcgatggctgttcaagaattataccctggtacacaagtaactattggacctgtaattgaaaacggtttttactatgattttgttcgtaaagaaccctttacagaggatgatctagaaaaaatagaaaaaaaaatgtccgaaataattgacaaagacgtaaaaacaagaagagaggtttggaaaagagataaagcaattagccatttcaaaaagattggtgaaaactataaagcagaaataatagagagta

SEQ ID NO: 303153 - DNA, 601 bp, Unknown
  Bacterial polypeptide expressing nucleotide sequence isolated from the Sargasso Sea
aatgcctacaataacattaccagacggaaataatctaaatttttcaaaaaaagttactggagttgaagtagctgagaaaataagtaagtcattagcaaaaaaggcaatggttataagcgttgatggtgaacttaaagatttagattatttaatagaaaaagattgttcagtaaaaatttttacttcaaaaaatccagaagggctggaaacaattagacatgacacagctcacatattggcaatggctgttcaagaattatttcctggaacccaggttacaattggtccagttattgaaaatggattttattatgactttgctagaaaagaaccttttactgaagatgatttagtcaaaattgaaaataagatgaaagaaattgtagacagagatgaaattactaagagagaagtttgggacagaaataaagctattgatcattttaaaaaaaaaggtgaaatttataaatctgagttaattaaagctataccagaaaaagaagatgtctcaatttattttcatggtgattggcatgatctttgtagaggtcctcatttatcttcaacaggtaaaattggaaagtattttaaactaaccaaa

SEQ ID NO: 303154 - DNA, 388 bp, Unknown
  Bacterial polypeptide expressing nucleotide sequence isolated from the Sargasso Sea
aatgcctataattacactaccagacgggaaaaatattgattttccaaataaagttacgggattagaagtagctgaaaaaattagcaaatcattagctaaacaagcaatggtaataagcgtagatggtgagttaaaagacttagaacatttaattgagaaagattgttcagtaaaaatttttacatctaaaaatcccgaaggtttggaaactattagacatgatactgctcatatattggcaatggcagtacaagaattgtttccaggaacacaagttacgattggtcctgtaattgaaaacgggttttattatgattttgccagaaaagatccgtttacagaagatgatttaacaatgattgaaaataaaatgaaagaaattgttgat

SEQ ID NO: 303155 - DNA, 958 bp, Unknown
  Bacterial polypeptide expressing nucleotide sequence isolated from the Sargasso Sea
atccgcatcaacggagaacttgatgatttatccacggtcatggacgccgatgccgaggttgccatcatcaccgacaagaacgaggaagaggccctggacctgatccgccatgatacggcgcatgtgctggcggaagccgtacaggagctgttccccggtacccaggtgaccatcggcccaaacatcgaaaacggtttttactacgatttcgcccgcgaagagtccttctctacggaagatctggaagccatcgaagccaagatgcgggagatcatcgaccgcgatgacgtctttacaaaggaagtttgggatcgggatgaggccgtgaagaccttcagcgacatgggtgaaaagtacaaggcggagctgatcgagggcctacccgaggacgaagaagtcaagatttaccgccagggtaaatggtttgacctgtgtcgtggcccgcacctgccgtccacgggccgcatcggcaaggcgttcaagctcatgaaggtggccggggcctattggcgcggcgattcaaacaaagatatgctgcaacgtatatacggcactgcttggcgcactgagaaagagctgaagaagcacctgctcatgctggaagaggcggaaaagcgtgaccaccggcgtttgggccgtgaaatgggcttgtttcatcaacaagaacaagccacgggctcggtcttctggcatccaaagggctggaccttctaccgcaccatccagaaatatatgcgcaagcgcctggaggccggcggctacgttgaagtgaacacaccgcaaatggtcgaccggacactgtgggaagattctggccattgggacaagttccgcgagaacatgttcatcgctgagagcgaagaccgtatgctggctatcaagcccatgaactgtccctgccacgtgcagatcttcaaacagggccaaacgtcctaccgagattaccctatcgcatggc

SEQ ID NO: 303156 - DNA, 733 bp, Unknown
  Bacterial polypeptide expressing nucleotide sequence isolated from the Sargasso Sea
attttcagctgaagaccttcctaaaatcgaaaagaaaatgcgtcagatcattgaacaaaaccaacctttcacccgtgaaatctggagccgcgcggaagctattgagtttttcaaaaataagggcgaacacttcaaggtcgaactcattcaagatcttccaaaagacgaaacgatcacaatttataagcaaggcaaatggcttgatttatgtcgtggaccacatatgcccagcactaaccatattggcacggccttcaagctgatgaaggttgctggcgcttactggcgcggcgattccagcaagcctatgcttagccgcatttatggaacggcttggcgtactcaggaagagcttgatacgcatttacaccaactagaggaagcagaaaagcgtgaccaccgtaaattgggcaaagagatggaactatttcattttcaagatgaagcgccgggccaagtgttctggcaccacaaaggctggacgatctatacagagcttctagcctatatgcgtcgcaaggttcacaaccataactacatcgaagtaaatactcctcaaatgctggattcccgtttctggcaagcttccggtcactgggacaaataccgtgaaaatatgttcattatcgatgacgacagccaagttcaaaaagacaaaaacccttatgctttgaaaccgatgagttgccccggtaatgcacagctttataattacggtgttaaatcctaccgc

SEQ ID NO: 303157 - DNA, 834 bp, Unknown
  Bacterial polypeptide expressing nucleotide sequence isolated from the Sargasso Sea
attgttgatagagatgaaaaaacaagaagagaagtttgggaaagaaaaaaagctatagatcatttcaaaaaaaatggtgaaatttataaatctgaaataataaaaagtatccctgaaaatgaagaagtttcactttatttccatggagaatggcatgatttatgcagaggtccacatcttccatcgactggaaaaattggaaaatattttaaacttatgaaagtttcaggtgcttactggagaggagattctaaaaatgaaatgcttcaaagaatttatggtacatcttgggcatcacaaaaggaacttgatgattatcttaaaagaattgaggaagctgaaaaaagagaccacagaaagttaggaaaagaaatggatttatttcattttagagaagaaagtcctggttcagtattttggcatgaaaaaggttggactctttttcagaaattaattgattatatgagattaagacaaaaaagagcaggatataaagaaataaatacaccagagatcttagatagaagcttgtgggaaaagtctggacattgggaaaagtttggcgaacatatgtatacctcaactaccccagatgaaaaaatttttgctgtaaaaccaatgaattgtccagggtgtgttcaggtttttaatcaaggtttgaaaagttatagagatcttccattaaaaatgtctgagtttggaaaagtacacagatatgaaccatcaggtgctcttcatggtttaatgagagtaagagctttcactcaagacgatgctcatattttttgtactgaggatcaaattacaagtgagtcattaagtgtaacaaattta

SEQ ID NO: 303158 - DNA, 730 bp, Unknown
  Bacterial polypeptide expressing nucleotide sequence isolated from the Sargasso Sea
aatgccgataataacattacctgatggaaacaacattgatttccctaacaaagttactggaacggaagtcgctgaaaaaattagtaagtcattagccaaacaagccgtggttatgagtgttaatggtgaacttaaagaccttaatcatttaattgataacgattgttctgtaaaaatttttacttcaaaaaatccagaaggcttggaaacaataagacacgatacagctcatattttagctatggctgttcaagaattatttcctggcacacaagttacaatcggaccagtgattgaaaatggattttattacgactttgccagaaaagaaccatttacagaggatgatctggttaaaattgaaaataaaatgaaagagattgttgatagggatgaaataacaaaaagagaagtttgggaaagaaataaagcaattagccattttaaaaaaaaaggagaaatttataaagctgagctgatcgaagcgatacctgaaaacgaagatgtatcaatttactttcatggtgaatggcatgatttatgtagaggtccgcatctctcctctacaggaaaaatcggaaaatattttaaacttacaaaagtatcaggagcatactggagaggagattctaataatgaaatgttgcaacgaatatatggaacgagctgggcaactcaaaaagatttagacgaatatttaaaaagaatcgaagaagctaaaaaagagatc

SEQ ID NO: 303159 - DNA, 814 bp, Unknown
  Bacterial polypeptide expressing nucleotide sequence isolated from the Sargasso Sea
catttgggaaaaatttggcgaacacatgtatacctctactacacctgatgaaaaaatttttgcaattaaacccatgaattgtccaggttgtgtacaagtttttaatcaaggattaaaaagctatagagatttacctcttaaaatgtcagaatttggaaaggtgcataggtatgagccctcaggtgctttacatggattaatgagagtaagagcttttactcaagacgatgcacatattttttgcactgaagatcaaattacacaggagtctttgtcagtaacaaatttaattttagatatttataaagatttaggttttaaaaatgtgattttaaaatattcagatagaccagaagtaagagttggtgacgataaagtttgggacaaatcagaagcagctttgctagaagcagttaaagaatcgaaattagaatatagtattaataaaggtgaaggtgctttttatggtcctaaaattgaatttgttttaagagacgcaataggcagagattggcaatgtggaactttacaggtggatttaaatttaccagaaagacttggtgcatcatatgtagataaggatggatcaaaaaaaattccagtaatgctacatagagcattatttggatcacttgaaagatttataggaattctcatagaaaactatgctggaaaatttcctttttggataagtcctcttcaagtagttgttatacctgtatcagatgattttgataaatactctagagaagtagcaaataaggttaataatagtgggataaattgccaagttgatttaaaaatcacaacttaa

SEQ ID NO: 303160 - DNA, 943 bp, Unknown
  Bacterial polypeptide expressing nucleotide sequence isolated from the Sargasso Sea
tttaccacagaggatttagccgcgatagaatcaaaaatgcatgaattggccgataggtctatccctctcgagcgtataacttattcaagggatgaagcggtgaagttctttactgacatcggagagaaatataaagcggagattattgcatcaatccccgaagaagaagatatcagtttgtataggcagggagagtttgttgatctttgccgtggtccacatgtgtcgaacacgggtatcttaaaagattttaagttaacaaaagtagcaggcgcttattggagaggcgattcgcggaatgagatgctgcaaagaatttacggaaccgcctggaattcaaggaaagaattggacaactatttacggagagtagaggaagctgaaaaaagagaccaccgcaaaataggtaagcaattagactattttcactttcaggaagaagcgccgggcatggttttttggcatgaaaaaggctggtcactttttaagtctgtagaaaaacacattagggatgtctgttacgcggattatcaagaagtccatactccacaagttattgatagaagtctttgggaaaaatccggtcattgggataagtttcatgacatgattttccaaaccaactctgataatcgcgaatatgcgataaagccaatgaattgtcctggccacatacaaatatttaacgaagggctcagaagctatcgagatctcccttttcgtatagccgaatttggcgttgtgcatagaaatgagccatctggaactctgcacggcctattaagagcgagaagatttactcaggacgatgctcacatattctgccaagaggatgatctccaagaggaagtaggtcgcctgatcgacaagacttttgaggtttatcgagacttcggttttaacgaagtcgagatggcactttctcttagacctgagcagagag

SEQ ID NO: 303161 - DNA, 439 bp, Unknown
  Bacterial polypeptide expressing nucleotide sequence isolated from the Sargasso Sea
ttaggcgcatcttacgttgctaaagatggtaataaaaaagttcccgttatgttgcatagagcattatttggttctttagaaaggtttattggaattttaattgaaaattatgctggcaaattacctttttggctttcgccggcacaagctgttgtgtgtcctatagctgaagaaaacaatgattatgtaaaaaagttatttgaagatttatttaaagaaggtataaaatgtgaaatggatttaagaaacgaaaaaataaattataaggttagagaacattctctcgcaaaggttccgtttatcatcgtttgtggaaaaaaagaagttgcagataatactgtgacagttagaaaactaggatcagataaacaagagattatgaaaagagaagatttaataaaaaatatgcttgcctcaaataagttacctttaaattaag

SEQ ID NO: 303162 - DNA, 937 bp, Unknown
  Bacterial polypeptide expressing nucleotide sequence isolated from the Sargasso Sea
acatcaaaagataaagaaggtttagaagttattagacatgatgctgcgcatataatggcgatggctgttcaagaattattcccaggtacacaagtaacaattggtccggttattgaaaatggtttctattatgactttgctagaaaagagtccttttcaagcgaagatttaaaaaagatagaaaaaaaaatgtcagaaattattgatagagatgttaagacaaggcgagaagtttgggaaagggacaaagctattactcactttaaaaaaattggtgaaaaatataaagcagaaattattgagagcattcctaaaaatgaagaactttcagtttatcatcatggagatacctggcatgatttgtgtagaggtccccatttaacatcttctagcaaaataggaaaagcttttaaattaactaaagtatccggggcttattggcgaggagactcaaataatgaaatgttgcagagaatttatggaacatgctggagttcaaaaaaagaattagatgactatttacataggctagaagaggcagaaaaaagagatcatagaaaactcggcaaagaaatggacttatttcattttagggaagaaagtccgggatcagtattttggcatgagaagggttggttgttatttcaaagattagttgagtatatgagaatgaagcaacgtttagcaggctataaagagataaatacgccagaacttttagataagactttatgggaaaaatctggtcactgggaaaaatttggtgagcatatgtttacctctgaaacacctgatgaaaaaacttttgcaattaaacccatgaactgtccaggatgtgttcaagtttttaaccaaggtctcaaaagttatagagatttaccattaaaattatcagagttggaaaagttcatagatatgaaccttcgggagcgttgca

SEQ ID NO: 303163 - DNA, 414 bp, Unknown
  Bacterial polypeptide expressing nucleotide sequence isolated from the Sargasso Sea
aatgcctacaattacattaccagacggaaataacttagattttccaaaaaaagttacaggtttagaagtagctgaaaaaattagtaaatcattagcaaaagaagcaatgattatgagtattgatggtgaattaaaagatttgagttatttaattgaaaaagattgttcagttaaaatatttaccaaaaaaaatgaagaaggtcttgaaactattagacacgacacagctcatattttggcaatggcagttcaagaattatttcctggaacacaggtcacaatcggaccagttatagaaaatggtttttattatgattttgctagaaaagagccttttactgaagacgatttgaaaaagattgaacagaaaatgagagaaattgttgaccgtgatgaaaaaactaaaagagaagt

SEQ ID NO: 303164 - DNA, 916 bp, Unknown
  Bacterial polypeptide expressing nucleotide sequence isolated from the Sargasso Sea
cgatgaaaataataaaatgcttcaacgtatttatggaactgttttttcaacaaaagaagcgttgaaagagcacctacataatcttgaggaggcaaaaaggagagatcatcggaaaattggtaaagaaatgaaattatttacatttgatagtgatattgggccaggattgcctttgtggcttcctaatggcacagtaatgattgaagagttagaaaaactcgctaaattcactgagaaaaaagctggctttagtcaggtaagaacacctcacttaaccaaaggtacaatttatgaaaaatctgggcacttagatcattacaaggaatctatgtatccaggcatggaaattgatggtgttgattattatgtaaagccgatgaactgcccgcatcatcataagattttttcttcattacctagaagttatcgcgacatgcctatcagattatcagaatatggaacatgctatcgctatgaaaaatccggtcaattgtttggtctgatgagagtgcgaagcttacaaatgaatgatgcacatatctattgcactccaaatcagtttaaaaaagagtttatggatgtttgcagaatgtatttagagtattttgaattatttaatattgagaaatattccatgaggcttagtcttcatgacaaagaaggattgggtgagaaatatgtcaatgagcctgagctatggttagagacagaacaatgggttagagaagctttagatgaaggcggttttaattatagtgaggtgtcgggcgaggccgccttttatggacctaagattgatgtgcaggtctggagtgcgataggtaaagagtttacattagctaccaatcaggttgattttgtggtcccaaagagatttggtcttacctataaggatgagaatggagagcgacagact

SEQ ID NO: 303165 - DNA, 706 bp, Unknown
  Bacterial polypeptide expressing nucleotide sequence isolated from the Sargasso Sea
ttgattttagaaatttataaagagcttggatttgaaaaagttttattaaagtattcagatagaccagaggtaagagttggagatgatgctgtttgggataaagctgaagacgcgcttttaaaagctattaaagaaacaaaacttgagtattcaattaataaaggcgaaggtgctttttatggtccaaaaattgaatttgttttaagagatgccattggaagagactggcaatgtggaactttacaagtggatttgaatttgccagatagacttggcgctacatttgttgataaagatggaactaaaaaagttcctgtaatgattcatagagctttatttgggtcattggaaagatttattggaattttaattgagcattatgaaggtaaattacctttttggatttctccactgcaagcggttattatacctatttcagatgaatttgatgattatgcaaaaaaaatttttaaattggcaagtcagtctggaataaattgtgagattgatttaaaaaatcataacttaaattataaaataagagaacattcactgtcaaaagttccattattgttgatatgtggaaaaaaagaagttgacagtgataccataactataagacaattagattctaaaaaacaagaaactatgaaaactaaagattttttaaaaaattattcgtctctgaataaagccccattataat

SEQ ID NO: 303166 - DNA, 703 bp, Unknown
  Bacterial polypeptide expressing nucleotide sequence isolated from the Sargasso Sea
ttggaaatctataaaaatttaggttttgaaaatgttattttaaaatactcagatcgtcctgataaaagagttggggatgataaagtttgggataaatcagaagctgctcttttagctgctgtaaaaaaatctaatcttgaatacagtgtaaataaaggtgaaggcgctttttatggtccaaaaatagaatttgttctaagagatgcaatcggaagagattggcaatgtgggactttgcaggttgatttaaatttaccaggaagactgggagcatcctttgttgacaaagatggaacaaaaaaagttcccgttatgttgcacagagcactatttggatcattagaaagatttataggaattttaatagagaattacgaaggtaaattgcctttttggttgtcaccggcacaagttgtagtatgtcccatatcagaggaaaataatgaatacgtaaaaaaattatttgaagatctatttaaagaaggtataaaatgtgaagtggatttaagaaatcagaaaataaattataaaataagagaacactcccttgcaaaagtaccctacatattagtatgtggaaagaaagaggaggacaacaaaacggttacaataagaaaacttggatcagataaacaagagactattaaaagagaagtacttataaaaaatatgttacacgcaaataagatgcctttaaactaag

SEQ ID NO: 303167 - DNA, 113 bp, Unknown
  Bacterial polypeptide expressing nucleotide sequence isolated from the Sargasso Sea
tagagtaagagcttttacccaagatgatgcacatattttttgtactgaagatcaaattacgcaagagtctctaacagttactaagttaatttggaaatctataaaaatttagg

SEQ ID NO: 303168 - DNA, 409 bp, Unknown
  Bacterial polypeptide expressing nucleotide sequence isolated from the Sargasso Sea
atgccacaaatacaactactagatggaaaaaaaatttcttttacaaaatctattaatggtttcgatataacaaaaaaaattagtaaatctcttgaaaaatccgctttgataatggaagtaaatggtcaactaaaagatttaagttttgagatcaaaagcgactctgaagtaaaaattattactaataaagacaaagaaggcttagaggttataagacatgatgctgcacatataatggcgatgtctgttcaagagttatttccaggcacacaggttaccattggtccagtaattgaaaatggtttttattatgattttgcaagaaaagaaccattcacaaatgatgatttaaaaaaaattgaaaaaaaaatggaagaaataatagatagagacgtaaaaacgagaagag

SEQ ID NO: 303169 - DNA, 979 bp, Unknown
  Bacterial polypeptide expressing nucleotide sequence isolated from the Sargasso Sea
cttgactgacctttcaacaaaacttatgaatgattgctcaataacaatacatactattaacgatacagaagtagcactcgaattaattagacatgattgtgcccatatcttagctagggctgttcaagagatatggccaaatgtaaaagtaactataggtccagttatccaagatggtttctattatgactttgataaagatgaacctttttctgagaatgatatagaaaaaattgaattgttgatgaagtcaataattgaaaaaaaagaccctgtgaaaaaagaaacatgggatcgtgctagagccctagagttttacaaagagagaaacgagccttacaaagtcgagctagttcaagatattccaacgggtgaagatataaaaatgtactggcatggagattggcaagatctctgcagagggccgcatttagcacatacaggacaggtgcctgctgacgctttcaaacttacaagagttgccggtgcttattggaagggtgatagcaagaataaaatgcttcagcgaatatatggagtagcctttagaagtaaagaagaactgaagcagtattttttcagacaagaagaagccgaaaggcgagatcatagaaaacttggaagagaaatggagctgtttcatcttcaagaggaggctactggaagtattttttggcatccaaaagggtggaagttatactctacattacaagaatatatgactagaaaacttgaacataatggttatttagaggtaaaaacaccacaaatcgtagatagaagactttgggaaaaatcagggcactgggataaatttagggaaaatatgttcatagttgaagtagatgaacaagaaaaaacaccaagaataaatgctttaaaaccaatgaattgcccatgtcatgttcaaatttataatcagggtttaaaatcttatagagaccttcctttacgaatggctgagtttggagcttgccat

SEQ ID NO: 303170 - DNA, 742 bp, Unknown
  Bacterial polypeptide expressing nucleotide sequence isolated from the Sargasso Sea
gcaaaaactgtattcaaagatagagatgaaaattataaattaaaattaattgatgatataccggaggatgaagttattgccttatatcatcataatgaatacatagatatgtgcagagggcctcatctaataaacactaagtttcttaaatattttaagctgatgaagatttctggatcctactggagaggtaactctaataatcagacacttcagagaatatacgggactgcatgggaaaaaaagtcctcgttagacaactaccttttaaagttagaggaagcagaaaagcgagatcatagaaaattagggcaaaaattagactttttccattttcaagaagaggcacctggtatggtattttggcatgcaaatggttttcatatttttaatcaagtaaaaaactacattactgcatatttgatagataatgattataaaataatagatacgccacaaattcttgataagtctctgtggaaaaagtctggtcatcttgataaattttctgatttgatatttgatgcaggatcagaaaataaagagtttgcaattaagccaatgagctgtcctggacatatacaagtatacaatcatggattaaaaagctatagagatttgccgttaaaatatgcagagtttggtaaagttcatcgtaatgaaccatcaggaacgttacatggtcttttaagattgagagcattcactcaagacgatgctcatatcttttgcactattcatc

SEQ ID NO: 303171 - DNA, 880 bp, Unknown
  Bacterial polypeptide expressing nucleotide sequence isolated from the Sargasso Sea
gatgttcacatccgaaacccccgacgaaaaaatatttgctgttaaaccgatgaattgcccaggatgtgtccaggtatttaatcaaggtctcaaaagttatagagatttacccttaaaactctctgaatttggaaaagtacatcgttatgaaccctcgggcgctttacatggtcttttaagagttagagcttttacacaagatgatgcacatattttttgtaccgaagaccagattacagaagaatgtattgaagttacaaaattaattttagaaatttataaagatttaggtttcaaaaaagtatttttaaaatattcagatagacccaagaaaagagttggagatgactctgtttgggataaatcagaaaaagcattactagcaacaattaaaaaaacaaaattagaatttgaaataaataagggagaaggtgctttttatggaccaaaaattgagtttgtcctccgagatgctattggtagagactggcagtgtgggacacttcaagtagatttaaatttgcctggtaggttaggcgcaacctatattgacaaagatggacaaaaaaaaactcctgtcatgcttcatagagctttatttggatcattagagagatttatcggaataattatagaaaactatgcaggtaagttgccattttggctaagtccaacacaactagttgtgttacctatatcagaagaacacaataaatatgcaaaaaaaatatttgaagaggcatttaaagagggtataaattgtgaagtggatttaagaaatcaaaaaataaattacaaaataagagaacattctcttgcaaaagtacccatgctctttatctgtggcgacaaagagataaaagagaaaaaagtacaataa

SEQ ID NO: 303172 - DNA, 867 bp, Unknown
  Bacterial polypeptide expressing nucleotide sequence isolated from the Sargasso Sea
tgatgttgcggcggatattggccctggccttgccaaggcagccttgcttggcatcgttgatggcggtgaatgggatctgtcacgcccaatcgaggccgacgtatcgctggcattgttaacagccaaggatgacagtgcgctagcgctgctgcgtcatgattgtgcgcatgtgatggcggaggctgtccttgaaatctttccggaaacccaagtgacgattggtccgtccattgaaaacggattctattatgatttccatcgcgaaacaccattcacggatgcggacctcgaagccgttgaggcccggatgcacgaaatcgttgatcgtgacgagccgattatccgcgaggtttggacccgtgatcaggcggtgactttctaccgggaaaatgctgagccgttcaaagttgagcttgttgaggcaattccggctgacgagaccgtgacattctatcgccagggcgattttattgatctctgcaggggaccgcatctaccctcgacggggcggctgggccatgcctttaaactgatgagtgttgccggcgcctattggcgcggtgactccgaccgaccaatgctgcaacgcatttatggcactgcctggcgcacggaaaaggaacttggtgcctatcttcacatgcttgaggaggctgaaaaacgtgatcatcgcaagcttggaaagcagcttggctttttccatatgcaggaggaggcaacgggatcggttttctggcatcccaaaggctgggcaatttatcgtgagatcgaggcctatgttcggcgtcggctcgacgagggtggctatagcgaggtgaagaccccgcagcttgttgatcgcaccttgtgggaggcgtccggtcactg

SEQ ID NO: 303173 - DNA, 604 bp, Unknown
  Bacterial polypeptide expressing nucleotide sequence isolated from the Sargasso Sea
gaggcagctctattgacggcaataaaaaaatctaaacttgattatactgttaataaaggagagggagccttttatggtccaaaaattgagtttgtattaagagatgcaattggaagggattggcagtgcggaactcttcaagttgatttaaatttacctaatagattaggcgccacatacgtttctaaagatggaagtaaaaaggttccggttatgttacatagagctttattcggttctttagagagattcattggaattttaatagaaaattacgctggtaaattacctttttggttgtctcctgcacaagcagtggtgtgccccattgcggaggagaacaataattatgtgaaaaagttatttgaagatctatttaaagaaggtataaaatgtgaaatggatttaagaaatgaaaaaattaattataaaatcagagaacactctcttgctaaaattccttttataattgtttgtggcaaaaaagaagttgcagataatacagttaccatcagaaaattgggttctgaaaaacaagagaccatcaaaagagaagaattgatcaaaaatatgctagatttaaataagttgcctttaaactaag

SEQ ID NO: 303174 - DNA, 672 bp, Unknown
  Bacterial polypeptide expressing nucleotide sequence isolated from the Sargasso Sea
aaataaagttatcaacaagacctgaaaaaagaattggatctgatgcaagttgggataaagcagaaaaagctctacaagatgcaatagagaaacttaaacttgaatatttcatagatgaaggagatggagccttttatggtcctaagctagactttgtgttaaccgatgctataggtagaaaatggcaatgcggcacacttcaagttgattttaatttaccaggtaggtttgactcaacttacataggtgaagatggtgctaaacatacgccggttttactacatagagcagctcttggatctttcgaaagatttataggtattttgttggagaattatgagggtaaattgccactttggttagcacccacccaaactgtgattgctgcaataacagacgatgcaaatgaatatgccaccaaattacatgaaaatcttattggtaagggaattagatctgaagtagatgttagaaatgaacaaataagctataaagtgcgagaacatagcttacaaaaagtgccttatattcttgccgtaggaaaaaaagagatagccgatgaatcagtttcagttagaaaactcggaagcgataaaaatgaagtaatatctgttgataaattcatagaaaccatcgtattagaatcgaaaaacccgcttcaaattaaatgaa

SEQ ID NO: 303175 - DNA, 805 bp, Unknown
  Bacterial polypeptide expressing nucleotide sequence isolated from the Sargasso Sea
aatgcacaatataactcttccagatggaaaaaaactaaattttactgagagtatttccggtttaaagattgcggaaaaaattagcaagtcattaatgaaacaagcacttattatgagtgtaaatggcgaacttaaagatttagaatatgaaatcacaacagattctgaagtaaaaatttttacttcaaaggataaagagggacttgaaacgataagacatgatacagctcacattttggcaatggcagttcaagagctttttccaggaacccaggtaacaattggtccagtgatagaggatggtttttattatgactttgcaaggaaagaaccttttacaaatgatgatttagaaaaaattgaaaaaaaaatgaaagagatagttgatagagatgaaaaaacttacagggaagtatggaaaaggaatgatgctattgaacattttaaagaaaaaggagaaatatataaggcggaaataataaatagtattcctgaaaatgaagaagtttcaatttatttccatggaaagtggcatgatctttgtcgaggaccacatttagtttcaactggaaaaataggaaaatactttaaattgacaaaagtttcaggtgcatattggaaaggagattcaaataatgaaatgttacaaagagtttatggtactagctggtcgtctcaaaatgaattagatgaatatttaaagagaattgaagaagcagagaaaagggaccatagaaaattaggtaaggaaatggatttatttcatttcagagaagaaagtccaggctcagtattttggcatcaa

SEQ ID NO: 303176 - DNA, 783 bp, Unknown
  Bacterial polypeptide expressing nucleotide sequence isolated from the Sargasso Sea
tttgaaaagtataccggtcgatgaagaattgtcattttacaaacaaggagattttattgacctatgtcgcggtcctcatatcccgagtaccggtagatgtggggtttttaagctcaccaaagtagcgggggcatattggcgcggggattcagataacgaaatgcttcaacgcatctacggcacggcttgggcagacaaaaaatccctcaaaacttatctatcaagaatggaagaagctgagaagcgtgatcatagaaaactaggcaaacgccttgacctatttcatgttcaagaagaagccccaggcatggtcttttggcatcctaaaggttggcagatctggcagattgtggagcaatatatccgcgacgtgcagaatgccaatggctatcaagaaattaagacacctcagctcgtcgatatggctctctgggaagcttcaggccatgcggataaatttagtgaggatatgttcgcggtaaacactgagaaccgtcagtatgctattaagccaatgaactgcccatgccatgttcaggtctataatcagggcttgaagagctaccgcgaactgcctattcgattggctgaatttggctcttgccaccgaaacgagccctctggtactttgcagggcattatgcgtgtaagaggctttgttcaggatgatgctcacattttctgtgcagaggagcaggttcaggatgaagtcactaaatttatagatctcttgactgaggtatatcgagatttcggttttaacgaaattatcgttaagctttc

SEQ ID NO: 303177 - DNA, 806 bp, Unknown
  Bacterial polypeptide expressing nucleotide sequence isolated from the Sargasso Sea
ggagcttattggagaggtgatcataaaaacccaatgctccaaagaatatatggcactgcatggagaaataaaaaagaattaagagcctaccttaatcaattagaagaagctgagaagagagatcatcgtatattaggaaaaaatatgaacttatttcactttcaagaagaagctcccggagcagttttttggcatagtaaggggtgggttcttttccaaagtttaattgaatttatgagaaaaaaacaaaatgatgcagggtatatagaaattaatactccagatattatggataaatccttatgggaaaaatcaggccattgggaaaaatttggagaaaacatgtttacaactgaatctaaggaagaaagaatctatgctctaaaacccatgaattgtcctggacatgttcaagtttttaaacaaggcataaaaagttatagagatctccctcttaaattttccgaatttggaaaagtacacagatatgaaccttccggtgcactacatggtttaatgagggtgagagctttcacacaagatgatgcacatattttttgtactgatgcccaaataacagatgaatgcgttgaggtctgcaagttaattctagatatttataaagattttggttttaaagatgtttttattaagttttctgacagaccaaataaaagagttgggaatgatgaaatttgggataaatctgaaaaggctcttatgacagcaatagactcaaccggccttccatatagcttaaactctggagaaggtgcattttatgggccaaaactagaatttgtttt

SEQ ID NO: 303178 - DNA, 868 bp, Unknown
  Bacterial polypeptide expressing nucleotide sequence isolated from the Sargasso Sea
tgaaaaagattgttcggtaaaaataataacttctaaagacaaagaaggtctagatgcgataagacatgatactactcatatcatggcaatggcagttcaggaattatttccaggaactaaaattgcaattggtcctgcaattaaagatggtttctattatgatttttcaagaaaagaaccttttacactggaagatttagaaaatattgaaaaaaaaatgaaagaaattgtagaaaagaatgaacctactcgtagagaagtatgggaaagaaaacaaactagagatcattataaaaaaattggagaagattataaagttcaactagttgatagtatcccagatgaagaagaagtttcagtatattatcatggaaaatggtatgatttgtgtcgaggtcctcatttaacatctacaggtaaaattggaaagttttttaaacttacaaaagtatcaggtgcatattggaggggtgattctaataatgaaatgttgcaaagaatttatggaacatcttggccatcacaaaaagaattagatgaatacctaagtagaattgttgaagctgaaaaaagagatcatagaaaattaggtaaagaaatggatttatttcattttagggaagaaagtcctggatcggttttctggcacgaaaaaggatggaatctttttcaaaaattagtcacatatatgaggatgaaacaacttcaagctggttataaagaaataaatactccagaaatattggatagatctttgtgggaaaagtctggacactgggaaaaatttggtgccaatatgtatacttcaactacgcctgatgaaaaagtttttgcaattaaaccatatgaactgtcctggctgtgtaca

SEQ ID NO: 303179 - DNA, 745 bp, Unknown
  Bacterial polypeptide expressing nucleotide sequence isolated from the Sargasso Sea
atgttaaatattactttaccagatggaaaaaagcttaactttgaaaaaaaagttacaggtttagaagttgctgaaaaaatcagcaaatctctttcaaaaaatgctttactgatcagtgttgatggtaagttaaaagatctcaatacaataatagataaagactgctcaataaaaatatttacttcaaaagataaagaaggtcttgaaacgataaggcatgatacagcacatattttagctatggctgttcaagaattatttcctggaactcaagttacaattggtccagttatagaagatggtttctattatgattttgctagaaaagaacctttctcagaagacgatttaaataaaattgaaaataaaatgagagaaatagttgaaagagatgaaaagacaactagagaggtttggcctagagaaaaagcaattgatcattttaaaaaaattggtgaaatttataaagcagaaattattaaaagtattccagagggagaagaagtatctgtttattttcatggaaaatggcacgatctttgtagaggtccccacttaacatcaacaggaaaaataggaaaattttttaaactaacaaaggtatcaggagcatactggagaggagactcaaataatgagatgctccagagagtatatggaacaagttggtctacacaaaaggatttagatgaacatcttaaaagaatagaggaagcagaaaagcgcgatcacagaaaattaggaa

SEQ ID NO: 303180 - DNA, 830 bp, Unknown
  Bacterial polypeptide expressing nucleotide sequence isolated from the Sargasso Sea
agtaacaattgggccagtaattgaaaatggtttctattatgattttgctaggaaggaaccattcacaagtgaagatctaaaaaaaattgaaaaaaaaatgacagagataattgataaggatgtaaaaactagaagagaaatttgggaaagaaaaaaagcaattagtcatttcaagaaaattggtgaaaaatataaagctgaaataattgagagtattccagaaaatgaggagctttctatttatcatcacggcgaaacatggcatgatttatgcagaggtcctcatttagtatcatctggtaaaatcggcaaagcttttaaactaacaaaagtttcaggtgcatactggcgtggagactccaaaaatgaaatgcttcaaagaatttatggcacaggctgggcaaatcaaaaagaccttgagaattatttaactagaattgaagaggctgaaaaaagagaccatagaaaaattggaagacaaatggatttatttcattttagagaggaaagtccagggtcagtattttggcatgaaaaaggatgggcgctgtttcaaaaattgataaactatatgagaatgaaacaagacattgctggttataaagaaataaatactcctgaagttttggatagaagtttatgggaaaaatctggacattgggaaaaatttggagaaaatatgtatacatctatcactccagatgaaaaaatatttgctataaagcccatgaattgcccaggttgtgtagaactttataatcaggggcttaaaagttataaagacttacctttaaagatgtctgaatttggaaaagttcacaggtatgaac

SEQ ID NO: 303181 - DNA, 763 bp, Unknown
  Bacterial polypeptide expressing nucleotide sequence isolated from the Sargasso Sea
ccaggtagaagaagaaactaaaaaattcattgacctcttatcagaagtttatagagacttcggctttaatgagtttaaaattaaattttctgatagacccaaaatacgtgctggaacagataagatctgggataaagcagaggaatctttacaaaaagcaacagtggctgctggttgtaacttttcgataaataaaggagaaggagcattttatggccccaaacttgaatttgtcttaactgatgccttaggcagagagtggcaatgcggtacgctgcaagtagacttcgttttaccagaacgactaaacgctaattatatcaatgagtttggtgaaaaaaaaatacccgttatgctccatagagctatacttggctcatttgaacgctttataggtattatccttgaagactcaggtgggagactaccactttggcttgcccctatacagttggtgatagcgaccataaccacaaaagtagagagctatttaaatatcgtgactaatacgtttaagcaaagtggcttaaggataaaaatcgataatagaaatgagaaaattaattacaaaataagagaacattctctggctaaaatacctataattctggtaatcggcgaaaaagaggcggcctccaatacggttaatattagaagatttgggactaaacagtctgaaacattagatctagacaaagcttgtgaggaaataatcattgaagcataccctcctgaccaaaatttaaataaaaagtcatcttaa

SEQ ID NO: 303182 - DNA, 910 bp, Unknown
  Bacterial polypeptide expressing nucleotide sequence isolated from the Sargasso Sea
cgattttgatttggatacgactttttcacctgaagatttgaaaaagttggaaagacaaatgaaaaaatcaataaaaagaaatacaaagtttgaaagtaaagaaatttccaaaaaacaagcattggaaatttataaaaataatccttataaacttgaaattattgattctatgccaactgatgaaattattaccgaatacagtcattcaaacggaaactttgttgacttgtgtgagggtgggcatgttgacaaaacaggcgaagtaaaagcagtcaagttgctatctattgctggtgcttattggagaggagatgaaaataacaaaatgctacagcgtatatacggaacggcatttgaaaatcaggaagaattagacaatcacatatctttattggaagaagcagcaaaaagagatcacagaaaattaggaactgaattagatcttttttctatatcatctgatgttggatcaggattaataatttggcatccaaaaggtgcttttgttagaaataaaattgaagagtattggaaagaagaacatataaaagataattatgatctaatttacaccccgcatattggtaaatctgatctttggaaaaaaagtggccatttagataattttagcgaaaatatgttttcaagtatcgagatggaaaataatgattattatttaaagccaatgaactgtccttttcatattgcttattataaaaatagcctgagaagttatagagatttgccaatgcgaataggcgagttaggtactgtttacagatatgaaaaacaaggagttttacacggattacttagagtgagaggatttactcaggatgatgctcatattttttctactcccgaacaggtagttgttgaatttaataaagttttagatttaactttttaa

SEQ ID NO: 303183 - DNA, 811 bp, Unknown
  Bacterial polypeptide expressing nucleotide sequence isolated from the Sargasso Sea
agaaagtttgtatcaaaaaacaggtcacttgccttactatgctgaatcaatgtaccctgcaatggatattgatggtacaaagtactacatcaaacctatgaattgtccccatcatcataaattattcaaagctttaccgaggagttatagagatctaccaattaaattttctgaatatggaacgtgttatagatatgaaaagtcagggcaactttttgggttaatgcgggttagaagtttacagatgaatgatgctcatatatactgcacaaaagaacagtttaagtttgagtttttgcaagtttgtaaattgtatttagagtattttcgtatttttggcatagagaaatacaaaatgaggttgagtttgcatgataaaagtggcctaggtgaaaaatatgtaaatgagccagaattatggataagtacagagaatctggtcagagaagctatgattgatgggaacatagaatttgacgaggtagagggtgaagctgcattttatggtcctaaaattgatgttcaaatatggagtgcaattggaaaagaatttaccttagcaacaaatcaagtagattttgctattcctaaacgtctgaaaatgaattatgtaaataaggttggaaattatgaaacaccactatgtattcatagagctcctcttggtactcatgagagatttataggttttcttattgaacattttggaggtaacttccccctctggttggctccaatccaagtaatagttataccaatatctgagaataatttaaattatgcgatggaaataaaacaaaaatctatttaa

SEQ ID NO: 303184 - DNA, 664 bp, Unknown
  Bacterial polypeptide expressing nucleotide sequence isolated from the Sargasso Sea
agtggaaaaatcggaaaatattttaaacttactaaagtctctggagcttattggagaggtgactcaaataacgaaatgttacaaagaatttatggaacagcttggccatcccaaaaagatcttgatcagtatttaaaacgtatagaagaagcagaaaaaagagatcatagaaaattaggcaaggaaatggatttatttcactttagagaagagagtcccggatctgttttttggcacgacaaaggttggagtctttttcaaaaacttgtttcttatatgagagtaaaacaggatcacgctggatacaaagaaataaacacaccagaaatattggatagaactttatgggaaaaatcaggtcattgggataaatttggagacaacatgtatacatcaattactcccgacgaaaaagtttttgcaataaaaccaatgaactgcccaggatgtattcaagtttataatcaagggataaagagttatagagatttacccttaaaaatgtcagaatttggaaaagttcatagatatgaaccatcaggagcgcttcatggtttattgagagttagagcatttactcaagatgatgcgcatatattttgcactgaagatcaaataaccgaagagtgtttatcggttacaaatttgattttagaaatatata

SEQ ID NO: 303185 - DNA, 697 bp, Unknown
  Bacterial polypeptide expressing nucleotide sequence isolated from the Sargasso Sea
tattttaaattagcgaagagggttgggaaaggattaccgttatggctcccaaacggaacagttattcgagatgagatggaaaaattagcaaaggaaaaagaatttattgctggttataaaagagttgttacaccccatataactagagagaaaatttttcaaatatcaggacatcttccatattataaagatagtatgtttccaccaatcgagattgatggagaacgtatttttttaaaacctatgaattgtccgcatcaccatatgatatataaatctgaacaaagaagttatcgagatttacctttacgattcgcagaatatgggacctgttatcgttatgaacagtctggtgagttagcaggacttttaagggtaagatgtatgagtatgaatgatgctcacatatattgcagtccggaacaagcaaaaaatgagtttgtaagtgtaatgagaatgcatgcagactactataaactttttgggttgaaagatttctggatgcgactttcactatctgaaaaaaatgcagacaagtatgttgatgagccaaaactttggcaaaaatctgaagagatcgttatagaagcaatgaatgaagtagaaataccttatgagtctgtcagaggtgaggcagcattttatggaccaaaaattgattttcaagttacaaatgtagtagggcgtgaagaaactg

SEQ ID NO: 303186 - DNA, 601 bp, Unknown
  Bacterial polypeptide expressing nucleotide sequence isolated from the Sargasso Sea
tctgaaaagcattattatcaactatttgaaaaactagaaattccatacaaagtgaatccgggtgagggagcattttatggtccaaaattagagtttgttctaagagatgctattggaagggattggcagtgtgggacagtacaaattgatttgaatttaccagagagattgtcttgtacctatgtaaatcgtgaaggagaaaaaaaaaacccagtgcttattcatagggcactattcggttctctagagaggtttataggtattttaatagaacattacgcaggaaagttacctctatggttaagtcctgtaaatgttgcaattgtaacaataaacaataaatttgatgaatatgcaaaaaagctttataaaaaattattaaaagaggaaataacttgtaaattagatttacgaaatgaaaaaatatcatataaaatcagggagcatagcagtacaaaagtgcctttgatttttgttattggagaaaaagaggtagagagtgatacagtcgcactaagaactcttggcagtaaagatatagaaagtatttcaatagaaaaagttattagattaattaaaaatgaaaaaaataaattttaaa

SEQ ID NO: 303187 - DNA, 778 bp, Unknown
  Bacterial polypeptide expressing nucleotide sequence isolated from the Sargasso Sea
caagaaaaagctggatataaagaaataaacactccagaaattttagatagatctttatgggaaaagtcaggacactgggaaaaatttggggcgaatatgtatacctcaacaactccagatgataaaatttttgcaataaaacctatgaattgtccaggctgtgttcaagtttttaatcaaggtttaaaaagttacagagatcttccattaaaaatgtcagaatttggaaaagttcatagatatgagccatcaggtgctctacacggtttgcttagggtaagagcatttacacaggacgatgctcatatattttgtactgaagatcaaataacagaggaatgtttatcagtaacaaatttgattttagatatttataaagacttaggatttgagaatgtaattttaaaatattctgatagacctgatttgagagttggagaagaccacatttgggataaagcagaatcagctttactcaaagcaattaaagcatcaaaattagagtataccgtaaacaagggtgagggagcattttatggtccaaaaatagaatatgttttaagagatgcaatagggagagattggcagtgtggtactttacaagttgatttaaatttaccagaaagactggaggctacttatgttgataaagatggaacaaaaaaaattccagtaatgctccatagagctttatttggttctttagaaagatttataggtatattaatagaacattattcaggaaaacttccattttggatttcaccattacagacaa

SEQ ID NO: 303188 - DNA, 846 bp, Unknown
  Bacterial polypeptide expressing nucleotide sequence isolated from the Sargasso Sea
aaatgtcagaaataattgatagggatgtaaaaactaaaagagaggtatggaaaagagaagaggcgataaaacattttaaaaaaattggagaaaaatataaagcagaaattattgagggaatacctaagggtgaagaattatctatatatcaccatggtgaaacatggcatgatttatgtagggggccgcatttggcttcatcaggcaaaataggtaaagcttttaaattaacaaaagtatctggtgcatactggagaggagattctaagaatgaaatgcttcaaagaatttatggaacttgttggagttcaaaaaaagaacttgaggattatcttcatagacttgaagaggctgaaaaaagagaccatcgaaaattgggtaaagaaatgaatttattccattttcgagaggaaagtccaggatcggttttttggcatgaaaaaggttggttattatttcaaagattaattgagtatatgagattgaaacaaaggttagcaggttataaagaaattaatacacctgaactattagacaaatcattatgggaaaaatctggacattgggaaaaatttggagagcatatgtttacttctgaaactccagatgaaaaaatttttgcggtaaagcccatgaactgtccaggatgtgtgcaaatttttaatcaaggtcttaagagttatagagatctcccgcttaaactatctgaatttggaaaagttcacagatatgaaccatcaggcgcacttcacggattgttaagagtaagagcttttactcaagatgatgcacatattttctgcactgaagatcaaattacagatgagtctctcaccagttactaaa

SEQ ID NO: 303189 - DNA, 709 bp, Unknown
  Bacterial polypeptide expressing nucleotide sequence isolated from the Sargasso Sea
caaattacagatgagtgcttatcagttacaaatttaatattagaaatttataaagatttaggttttgaaaatgtaattttgaaatattctgaccgtccagatactagagttggtgaagatgctgtttgggataaatcagaagctgctttgcttaaagctatcaaagcatcaaaattagaatatactataaataaaggtgaaggagcattttacggtccaaaaatagaatttgttttaagggatgcgataggaagagactggcaatgtggaactttgcaagttgatttgaatcttccagaaagattaggggccacatatgttgctaaagatggtagcaaaaaagttccagtaatgcttcatagagcattatttggatctttagaaagatttataggaattttaatagagaactatgctggcaagctacctttttggataacacctcttcaaacagttgtaataccaatttctaatgattttgatgattatgcaaaaaatgttcatcaacaattaaaaaaagcaggtatttcatctgaagtagatcttaaaaatcataatttaaattataaaattagagatcattcattaacaaaggttcctttgcttttaatttgtggaaaaaaagaagttgacactaacacagtaactattagaagattggattctaataaacaagaaaatatggaattaaaagaatttctaaaaaaat

SEQ ID NO: 303190 - DNA, 757 bp, Unknown
  Bacterial polypeptide expressing nucleotide sequence isolated from the Sargasso Sea
catattgaagtttttaatcaaggtttaaaaagttatagagatcttcctttaagaataagtgaatttggaaaagtacatagatatgagccttcaggcgcattacatggtctattgagagtaagagcatttacacaagatgatgctcatattttttgttcagacgatcaaattacaagtgaatgtttaaatgtaactaatttaattttagatatatataaagatcttggttttgaaaatgtaatattaaaatatgcagacagacctgaagtaagagttggtgaagacaaagtttgggacaaggccgaagcttcattgcttgaggcagtaaaggcatctaaacttgaatatacaattaataaaggtgaaggagcattttatggccctaaaattgaatttgttttaagggatgcaattggaagggattggcagtgtggaactttacaggttgatttaaatttaccagggagattagatgcttcttacatagataaagatggaacaaaaaaaattcctgttatgcttcatagagcattatttggttctttagagagatttattggcatactgattgagcactatgctggcaaatttccattttggatttcacctttacaaactgtcgttatacctatttcagaggagtttgatgattatgcaattaaggtatcaaataaaattaaacaagttggcataagttctaccgtggatttaaaaaaacataatttaaattataaaataagagatcattcgttggcaa

SEQ ID NO: 303191 - DNA, 854 bp, Unknown
  Bacterial polypeptide expressing nucleotide sequence isolated from the Sargasso Sea
cattagacatgatactgcacacatattagcaatggctgttcaagaactgtttcctaagacacaagtaacgattggtccagtaattgaaaatggtttttattatgattttgcaagaaaagaaccttttacagaggatgatttaagaaaaattgaggaaaaaatgagagaaattgtggatagagatgaaattactaaaagagagatttgggatagagataaagctattaaacattttaaaaagaaaggtgaattttataaagctgaacttatagaaagtattcctaaaaatgaagaagtttcaatttattttcacggaaaatggcatgatttatgtaaaggtccacatttaccatcaacaggaaaaataggtaaattttttaaattaacaaaagtttcaggagcttattggagaggtgactctaaaaatgaaatgcttcaaagaatatatggcacaagctgggcttcacaaaaagatttagatgaacatttaaaaagaattgaggaggcagaaaaaagagatcatagaaaattaggtaaagaaatgaatttgttccattttagagaagagagcccagggtcagttttttggcatgaaaaaggctgggcattatttcaaaagttaataaactatatgcgaatgaaacaggatattgctggttataaggaaataaatactccagaagttttagatagaagtttatgggaaaaatctggtcattgggaaaaatttggagcaaatatgtatacatcaaccactccagatgaaaaaatatttgcaattaaacccatgaattgccctggatgtgtagaagtttttaaacaaggtcttaaaagctataaagatttacctttaa

SEQ ID NO: 303192 - DNA, 803 bp, Unknown
  Bacterial polypeptide expressing nucleotide sequence isolated from the Sargasso Sea
catgtatacttcaacaactccagatgaaaaaatttttgctattaaaccaatgaactgtcctggatgtgtacaggttttcaatcaaggattaaaaagttatagagatttaccattaaaaatgtcggagtttggaaaagttcataggtacgaaccttcaggagcgctccatggacttatgagggttagagcatttacacaggatgatgctcatatattttgtacagaagatcagattacggaagagtctttgagtgtgaccaatttaattttagacatctataaagagttaggtttcacaaatgttattttaaaatattcagatagacccgatgtaagggtcggaagtgatgaagtatgggataaatctgaagcagcattattagaagctgtaaaagcgaccaagctcaaatatactattaataagggcgaaggtgctttttatggacctaaaattgagtttgttttaagagatgcaataggaagagattggcaatgtggaacattacaagtagatttaaatttaccagagagattaggtgcttcttttattgataaagatggatcaaaaaaagttccagtaatgcttcatagagcgcttttcggatcattagagagatttattggaattcttatcgagaactatgctggaaaactcccattttggatcagtccacttcaagttattgcaatacctgtatcagacgaatttgataaatatgcatcacatgtagctgataaaattagaaatgctggaatgaattgtgaggtagatttaaaaaatcataatttaaattacaaaatta

SEQ ID NO: 303193 - DNA, 720 bp, Unknown
  Bacterial polypeptide expressing nucleotide sequence isolated from the Sargasso Sea
taggaccagacatgagcatggtggttacaattttgtattcagtccccacattgccaagtcggttctttgggaaactagcggccatttggatttttacgcggagggtatgtacccgcctatggagatggatggagccacttattatccgaaaccaatgaactgtccatttcatgtaatggtttacagaagttcacaacgtagttatagggatttaccaacacgatattttgagttaggaactgtgtacaggtatgaactgtcgggcgcagtgcatggtctccttagaagtcgagggttcacccaggatgattcacacattttctgcacacgagagcaagttccagaagaattgtcatctctcttagctttctgcctttcagtattaagggattttggattcaccgattttcaagcaaaactgtccacaagacctcaggaaaaatctgttggcgatgatgatttgtgggatattgcaactgagggtcttagggaagctctcgaaaaagaaggacttccctacatagtcgatgaaggaggaggagctttctacggtccgaaaattgacatggatgtgaatgacgccattggcagaccatggcaattgaccactatccagttggacttcaaccttccagagcgctttggtcttgagtacataggaaccgacggggcaagacatcagccggtaatgatacatcgagctttattgggttctgtcga

SEQ ID NO: 303194 - DNA, 925 bp, Unknown
  Bacterial polypeptide expressing nucleotide sequence isolated from the Sargasso Sea
gaaattattgagagcataccaaaaaatgaggagctatctgtttatcatcatggcgatacttggcacgatttgtgtagaggaccacatctagcttcatctggtaaaatagggaaggcatttaagttgactaaagtatcgggtgcttattggcgaggcgactccaataatgagatgcttcaaaggatttacggaacttgttggagttcaaaaaaagagcttgatgactatttacatcgtttaaaggaagcagaaaaaagagatcatagaaaacttggaaaagaaatggatttatttcattttagagaagagagccctggggcagtattctggcacgaaaaaggctggttattatttcaaagattagttgaatacatgcgagcgaaacaaagactagccggctataaagaaattaatacgcctgagttattggacaaaactttatgggaaaaatctggacactgggataaatttggagaacacatgtttacaaccgaaacgccagatgaaaaaacgttcgcagtaaaaccaatgaattgcccaggatgtgttcaggtatttaatcaaggtttaaaaagttatagagacttaccacttaaattgtcagagtttggtaaagtccacagatatgaaccctctggagctttgcatggtttattaagagtacgagcattcacacaggatgatgcacatatattttgcaccgaagatcaaataaccgaggagtcattgtcagttacaaatttgattttagaaatttataaagatttaggttttgaaaatgtaatactaaaatattctgatagacctgagaaaagagtaggtgacgataatgtttgggataaatctgaagcggcacttctttcagcaatcaaaaaatcaaaattagagtatacaattaataagggagagggagcttttacggacc

SEQ ID NO: 303195 - DNA, 589 bp, Unknown
  Bacterial polypeptide expressing nucleotide sequence isolated from the Sargasso Sea
gatgagtaaagaattgctaattaatcgtaaaagtgaagaagagcttgacactattcgccatgattgtgcgcacatactcgcagaagctgttcaaagtttattcccggaaacccaagtaaccattggtcctacaattgaaaatggtttttattatgatttcgctagagaaaaaccttttacctcagatgatttaattgtcatcgaaaaaaaaatgcatgaaatagttgataagggtgaaaattttaaacgagaagtatggacacaaaagaaagcaattgactatttcacaaaaaaaggagaattatacaaggttgaattaattaaagatattcccaaaacagaagagattacaatatacagacagggtgactggcttgatttgtgcagaggccctcatggcatatccacaaaagatataggacaaggttttaaattaactaaagttgcaggtgcatattggaggggggattcaagcaaaacaatgcttacgcgtatctatgggaccgcatggcgaaacaaaaaagaactcaaagaatatttaatacaattagaagaatctgaaaaacgtgatcataggaaactggaaaag

SEQ ID NO: 303196 - DNA, 382 bp, Unknown
  Bacterial polypeptide expressing nucleotide sequence isolated from the Sargasso Sea
atgcctaatataacacttccagatggaaaaaaattaaactttgaaaaaagtgtaacaggttcagaagttgcagaaaaaattagtaaatctctagcaaaacaagctttaataatgagtgtaaacggtgagttaaaagacttagattcaataatagataaagatagttctgttaaaatttttacttcaaaagatcctgagggattggaagttattaggcatgacgctgcacacataatggctatggctgttcaagaattatatccaggtacacaagtaactattgggccagttatagaaaatggattttattacgacttcgcaagaaaagatccttttactagcgatgatcttaaaaatatgaaaaaagaatgtccgagataat

SEQ ID NO: 303197 - DNA, 652 bp, Unknown
  Bacterial polypeptide expressing nucleotide sequence isolated from the Sargasso Sea
atgccagatattacattacctgacggaaaaaaaattaattttgaaaaaagtatttcaggatttgaagttgcagaaaaaattagcaaatctctttcaaagcaagctttgctaataagtgttgatggagaattaaaagatttaaatcatagtatttctaaagattcttcaattaagatatttacgtcaaaagataaagaaggtttagagactataagacatgatactgctcatatacttgctatggcagttcaagaattatttccagggacacaagttacaatagggccagttatcgaagatggcttttattacgattttgcaagaaaagaaccttttacaacagaagatttagaaaaaattgagaacaaaatgaaagaaattgtcgatagagatgaaaaaacttacagagaggtttggaaaagaaatgatgcaattgaacattttaagaaaaagggagaaatatataaagctgagataatagaaagtattccagagggagaagatgtgtctttatattttcatggagattggcatgatttatgcagaggccctcatttaacttcaactggtaaaattggaaaatattttaaattaacaaaagtctccggtgcttactggagaggcgactctaataatgaaatgttacaaagag

SEQ ID NO: 303198 - DNA, 873 bp, Unknown
  Bacterial polypeptide expressing nucleotide sequence isolated from the Sargasso Sea
accagttatagaaaacggattttattatgactttgcaagaaaagagccttttacaagtgatgatctgagcaaaatagaaaaaaaaatgatagagataatcgataaaaacttaaaaacaagaaaagaggtttggggaagagaaaaagcaattaatcattttaaaaaaattggagaaaaatataaagctgaaattatagaaagtattccaaaaaacgaggaacttaccatttattaccacggagactcatggcatgatttatgtagggggccacatttagtatcatctggcaaaattggtaaagcatttaaattaatgaaagtagcaggcgcatactggcgtggagactctaacaatgagatgcttcaaagaatttacggaacaggttgggcaactcaaaaagaacttgatttataccttcaaagaattgaggaagctgaaaaaagagaccatagaaaaattggaaaagaaatggatttatttcattttagagaagaaagtcctggatcagtattttggcatcaaaaagggtggaacttatttcaaaaacttgtttcttatatgagagcaaaacaagatcatgatggatatcaagaaatcaatacccccgagatcctcgatagatcattatgggagaaatcaggtcattgggaaaagttcggggccaatatgtatacttcaactacacccgacgaaaaaatctttgcaatcaaacctatgaattgtccaggatgtgttcaagtatttaatcaaggccttaaaagttacagagacttaccattaaaaatgtctgaatttggaaaggttcatagatatgaaccatctggttctttacatggtttattacgtgtaagagcattcacacaagatgatgc

SEQ ID NO: 303199 - DNA, 750 bp, Unknown
  Bacterial polypeptide expressing nucleotide sequence isolated from the Sargasso Sea
ctgaagatcaaattaccaaggagtgtctatcagtcacaaatttaattttagaaatttataaagacttaggatttgaaaatgtaattctaaaatactcagacagaccggatttaagagttggagatgatgcagtatgggataaatctgaagcagcattaattaaagcagtagaggcctcaaaattagaatatagcattaataaaggtgaaggcgctttttatggtccaaagatagaatttgttttgagagatgcaattggaagggactggcagtgtggaactttacaagttgatttaaatttaccagcaagattgggagcaagttatgtagataaagatggatcaaaaaaaatacctgttatgttacatagagctttatttggttctcttgaaagatttattggaatattaattgaaaattactcaggtaaattacctttttggatttcaccactacaaactgtagtaattcctatatcagatgattttaatgattatgctttaactgtttataaaaaaattaaaaaagctggtatttcttgtgaagtagatttaaaaaatcacaatttaaattacaaaattcgtgaacactctaattcaaaagcaccaatgttattaatttgtggaaaaaaagaagttgactccaacgcagtaactattagaagattggattctgataaacaagaaaatatgttagtagacgaatttattaaaaaatacaccgccttaaacaaggctccatcaatttagt

SEQ ID NO: 303200 - DNA, 738 bp, Unknown
  Bacterial polypeptide expressing nucleotide sequence isolated from the Sargasso Sea
aaaatttttcaaattaacaaaagtttctggggcttactggaggggcgactcaaataatgagatgcttcaaagaatatatggaacaagttgggcaagtcaaaaagatttagatatttatttaaaaagaattgaggaagccgaaaagagagatcatagaaaattaggtaaagaaatggacttatttcattttagagaagaaagtccaggatcggtcttttggcatgagaaaggttgggcattgtttcaaaaattaatcaattatatgagaatgaaacaagatattgctggctataaagaaataaatactccagaagttttagacagaagtttatgggaaaaatctggtcactgggaaaagtttggagcaaatatgtatacatcaactactccagatgaaaaaatatttgcaattaaaccaatgaattgtccaggttgtgtagaagtttttaatcaaggtttaaaaagttataaagatttaccattaaaaatgtctgagtttgggaaagtccatcgatatgaaccttcgggtgctcttcatggccttttaagagtaagagcttttactcaagatgatgctcatatattttgtactgaagaccagataactgaagaatgtttgactataaccaatcttattttagaaatttacaaagatcttggttttgaaaatgttattcttaagtattctgatagaccagatttaagagttggtgatgatagtgtatgggataaagctga

SEQ ID NO: 303201 - DNA, 523 bp, Unknown
  Bacterial polypeptide expressing nucleotide sequence isolated from the Sargasso Sea
gaggactgggatcgtgccgaacgagcgcttatcgatgccttagatagccatggccttccttggaaggagctacctggtgaaggggctttctatggaccaaagatagagttttccttaaaagactgtatagggagagtctggcagttgggtacaatacaagtggatttttcaatgcctagtaggcttgatgcgcaatttgttgccgaggatggattgagaaaaactcctgttatgctacatcgagctattcttggatccttcgaaagattcatagggatattggttgaaaattatgaaggtgtttttccgacttggttaagtccagttcaggctattgtgctaaatattaccgacaaacatgccgaatatgcacaaaaagttgaagaagccataaaaaacaaaggctttcgtgcaatttcagacttgagaaacgagaagatcggatttaaaattcgcgagcacacacttcgaaagattccatatcagctcgtggtgggtggtaaagagctggagtcgcggcaag

SEQ ID NO: 303202 - DNA, 739 bp, Unknown
  Bacterial polypeptide expressing nucleotide sequence isolated from the Sargasso Sea
atgcctataattacattaccagatggaaaaaatattgaatttcccaaagaagttacaggtttagatgttgcagaaaaaataagcaaatcattatcaaaacaagcattgataatgagcgtcgatggtgagttaaaagatttgtatttttcaattaaaaaagattgttcagtaaaaatctttactgcaaaagatccagagggccttgaagttataagacacgatacggctcacattatggcaatggctgttcaagaactataccctggtacacaagtaactataggaccagtaattgaaaatggtttttactatgattttgctcgaaaagagccttttacagaggaagatctagaaaaaatagaaaaaaaaatgtcagaaataattgacaaagatgtaaaaacaaaaagagaggtttggaaaagagataaagcaataagccatttcaaaaaaattggtgaaaaatataaagctgaaatcatagagagtattccagagagtgaggagctaacagtctaccatcatggtgatacttggcatgacttgtgtagaggtccacacttagtttcttctggaaaaattggcaaagcgtttaagcttacaaaagttgctggagcatattggcgtggagactcaaaaaatgagatgttacaaagaatttatggaactggttgggcgtctcaaaaagacttggacgattatttaaaaagaattgaggaagcggaaaaaagagatcatagga

SEQ ID NO: 303203 - DNA, 808 bp, Unknown
  Bacterial polypeptide expressing nucleotide sequence isolated from the Sargasso Sea
taaaaaaaagggagaaatatacaaagctgagataatagaaagtattccagaaggtgaagatgtgtccttatattttcatggagattggcatgatttatgcagaggccctcatttaagttcaactggtaaaattggaaaatattttaaattaacaaaagtctcaggcgcttattggagaggtgactctaataatgaaatgttgcaaagagtatacggaacaagctggtctacgcaaaaagacttagatgattatttaaatagaatagaagaagcagaaaaaagagatcatagaaaaattggaaaagaaatggacttatttcatttcagagaagaaagtcctggatctgtattttggcatcaaaaaggatggagcttattccaaaaacttatttcgtatatgagaatgaagcaagaaactgcaggatatcaggaaataaatactccagaaatattagatcgctcactctgggagaaatctggccactgggaaaaatttggtgcaaatatgtatacttccactacacctgatgaaaaagtttttgcaataaaaccaatgaattgtccaggttgtgttcaggttttcaatcaaggtttaaaaagctatcgagatttaccacttaaaatgtcagaatttggaaaggttcataggtatgagccctcaggagcacttcatggattattacgtgttagagcttttactcaagatgatgctcatattttttgtacagaggaacaaattacggaagaatgtttaactgtaactaatttaattttggaaatttataaagatttaggatttgaagaagta

SEQ ID NO: 303204 - DNA, 344 bp, Unknown
  Bacterial polypeptide expressing nucleotide sequence isolated from the Sargasso Sea
aaaagcttctaaacttgaatatactattaataagggcgaaggagctttttatggtccaaaaatacagtttgttttgcgcgatgctattggtagagactggcagtgcagaacactacaagttgattttaatcttccacgtagacttggtgcaagttacatgtctaaagatggaactaaaaaagttcctgtcatgctccacacggctttgtttggttcattggagagatttattggaattttaattgaacactatgctggcaaacttcccttttggttatctcctttgcaaacaataattatccctgtctcaaatgagttcgatgaatatgcaaaagatataaatc

SEQ ID NO: 303205 - DNA, 605 bp, Unknown
  Bacterial polypeptide expressing nucleotide sequence isolated from the Sargasso Sea
aatgcctataattacattacctgacggaaataatattgattttccaaataaagttactggattagaagtagcagaaaaaattagtaaatcattagctaaacaagcaatggtaataagtgtagatggcgagttaaaagacttagaacatttaattgagaaagactgttcggtaaaaatttttacatctaaaaatcctgagggtctagaaaccattagacatgatactgctcacatattagcaatggcagtacaagaattgtttccaggaacacaagttacgattggccctgtaattgataatggattttattatgattttgctagaaaagaaccgtttacagaagatgatttaacaatgattgaaaataaaatgaaagaaattgttgatcgagatgagattaccaaaagggaagtttgggacagaaataaagccatagatcattttaaaaaaaaaggtgaaatctataaagctgagttaattgaagcaataccggagaatgaagatgtttcaatttattttcatggagattggcatgatctttgtagaggaccccatctttcttcaacaggtaaaattggaaaatactttaaattaatgaaagttt

SEQ ID NO: 303206 - DNA, 571 bp, Unknown
  Bacterial polypeptide expressing nucleotide sequence isolated from the Sargasso Sea
gatggcggctgacatgcaagtaccggtgagcagcacagcagtaaccgcccttcccccgaacgaaacggtggtgctgcctaaaaccagcgaaagcgaaacgctgctgcgcatccgccactccatgagccacgtgatggccatggcggtacagaagcttttccccaaggcgcaggtcacgatcggcccctggaccgagagcggcttttactacgacttcgacaatccggatccattcacggaggccgatctgaaggcgatccgcaaggagatgatcaagatcatcaaccgcaagctgccccttcagcggctggaggtggatcgagccgaagcagaggccaagatcacggctcagaacgagccttacaagctggagatcctggcagggattcaagaaccgatctccttgtacaccctgggcgacgactggtgggacctctgcgccggaccccatgtcgccaataccagtgaactcaaccccaaggcattcgagctcgaaagtgtggccggcgcctactggcgtggtgatgagacgaaggcgcagcttcaacgcattacggcaccgcatggaaac

SEQ ID NO: 303207 - DNA, 733 bp, Unknown
  Bacterial polypeptide expressing nucleotide sequence isolated from the Sargasso Sea
atgagtgaaaagataataattacatttccagatggaaataaaaaggaagttgataagggcatcaatggtcttgaattggcatcgcaaatttctaaatctcttgccaaagaatcagtcgctataaaaattaataatgagataaaagatattagtttacctattaatggtgattcatctgtagcgattttaaaaagagatagcgaggaagcacttgaattaatacgacatgattgtgctcatgtaatggcagaagctgttcaagaattattccctggaacacaagttacaattggtccagcaattgaaaatggtttctattatgattttgcaagagatgaaccttttactgtttctgatcttccaaaaattgaaaagaagatgcacgatatcattcaaagaaataaaaattttataagagaagtatggtctaaagaagaatcaataaaacattttaaagataaaggtgaaaactacaaagttgaattaattaatgatctgcctgataatgaggaaatcagtatttacaaacaaggtgattggttagacttgtgcagaggccctcatatggtttcaacaaaacaaattggtaaagcatttaaattaatgaaagttgctggcgcttactggcgaggtgattcatctaatacaatgctaacaagaatttatggaacggcctgggcaacagaaaaagatcttgaacaacaccttttacaaattgaagaagcagaaaaaa

SEQ ID NO: 303208 - DNA, 668 bp, Unknown
  Bacterial polypeptide expressing nucleotide sequence isolated from the Sargasso Sea
aatgcctaatataactttaccagatggaaaacagttatcttttagcgaaaaggtaaatgggaacaagattgtagaaaaaattagcaagtctttggccaaagaagcactcataatgagtgttaatggtcatttaaaagatttgagttttgaaatagaaaaagacgctaaggttaaaattttaacatcaaaagatgaagatggtttagatactattaggcatgatactgcacatattttagcaatggctgtgcaagaactattcccaggaacccaagtaacaattggtccaacaatagagaatggattttattatgattttgcaagaaaggaacctttcacagaaacagatttaaaaaaaatagagactaaaatgtcagaaatagttgatagaaatgaaactacctacagagaagtttgggaaagagataaagctatttctcattttgaaaagatgggagaaaagtataaagctgaaattattcaagatattcctaaaagtgaggagatatcaatctatttccacgggaaatggcatgatctttgtagaggtcctcatttaccgtcgactggcagaattggtaaacattttaaattaacaaaagttgctggtgcttattggagaggtgactcaaaaaatgaaatgttgcaaagaatctatggaacatctt

SEQ ID NO: 303209 - DNA, 789 bp, Unknown
  Bacterial polypeptide expressing nucleotide sequence isolated from the Sargasso Sea
ttagctaaagaagctatggtaataagtgtagatggtgagttaaaagatttagatttccaaattgaaaaaaattgttccattaaaatattaacttcaaaaaatgaggaaggtcttgaaacaataagacacgatactgcccatattttggctatggctgttcaagaactgtttcctggaactcaagttactattggacctgttatagaaaatggtttttattatgattttgccagaaaggaaccttttactgaggatgatctaaccaagattgaagaaaagatgaaagagatagttgatcgagatgaaaagacaaaaagagaagtttgggatagagataaagcaataaagcattttaaaaataaaggagaattatataaagctgaacttatcgagagtattcctcaaaacgaggaggtatcaatttactttcacggtgcgtggcatgatttatgtaggggtccacatctatcttctacaggaaaaataggtaaattttttaagcttacaaaagttgcaggagcttattggagaggggactcaaataatgaaatgcttcaaagaatatatggaacaagctgggcttctcaaaaagatttagacaattatttaaaaagaattgaagaagcagaaaaaagagatcatagaaaattaggtaaagaaatggatttgttccattttagagaagaaagcccaggatctgttttttggcatgaaaaaggttgggcattgtttcaaaaattaatcaattatatgaggatgaaacaagagattgcaggatataaggaaata

SEQ ID NO: 303210 - DNA, 663 bp, Unknown
  Bacterial polypeptide expressing nucleotide sequence isolated from the Sargasso Sea
aatagaaacagaatgtaaaattttatgtgatttaattacagacatttataaagattttggtttcgaaaaaattatgattaaatattcagatagaccaaaaaaaagagtaggcactgatcagatatgggataaagcagaaaaagctcttttaactacaatagataaaataggattaccatattctataaattcaggagaaggagctttctatgggcctaaattagagtttgttcttagagatgcaataggtagagattggcagtgtggtactgtacaaatcgatttaaaccttcctgaaagattggcatgctcttttgttaataaaagaggagaaaaacaaaggccggtcttaatccacagagccttattcggttctttagaaagatttattggtattttattagaacattattctggaaaccttccattatggatttcaccattagaagtcatcatagcaactattagtgaaaaatttaataaatatgcattggaaatcaaaaagcaattaaaaataaataatatttcggttgaaattgatgataggaacgaaaaaatcggatataaaataagagaacatagttttagtaaagtgccatttataatagtaataggagaaaaagaagttacaaataaaaatataacaataagaaggctaggaag

SEQ ID NO: 303211 - DNA, 769 bp, Unknown
  Bacterial polypeptide expressing nucleotide sequence isolated from the Sargasso Sea
ttcaaaagacgatttggcggtaataagacatagtgcatcccatgtacttgcacaggcagtccagcagctttttcctgatgcaaaattagggataggccctgcaattgatgatggattttattatgattttgagctttcaagacctttaaatgatgatgatttattagttcttcaaaaaagagtaaataaaatattagcggaaaaacaagtgtttaagcaatttgatttatcaaaaacagaggctgttagactcttgaaagagaaaggccaagattttaaattagaacttatcaaagatttagatttagaagaatattcattttatgaaaatgggccttttgtagatctatgtcgtggtccacatatagaaaatacttcggaaatccctgttattaagcttttaaaagtttcaggtgcttattggaaaggtagtgaatccaatccaatgttgcagcggatttatggaactgctttttttagtcaagaggagttggatgattatttgacacgattagaggaagctaaaactagggatcatagaactataggtaaatctatggatttgtatagtattcaagatgagattgggagtggtttagttgtttggacgccacaaggtgcttttatgcggcatgttattgagaatttatggaaagaaattcattttcaaactggctatcaattattatattcacctcatataggaaaatctaatttatggaaaaccagtgggcagttagatttttatgaagaaaatatgtatagtcct

SEQ ID NO: 303212 - DNA, 878 bp, Unknown
  Bacterial polypeptide expressing nucleotide sequence isolated from the Sargasso Sea
cgggtcatttgggaaaaaatttggtgcaaacatgtatacatcaactacacctgatgaaaaagtttttgctataaaaccgatgaattgtcctggctgtgtgcaggtttttaatcaaggtttaaaaagttatagggatttaccacttaaaatgtctgaatttggaaaggttcataggtacgagccctctggagcacttcacggattattacgtgtaagagcatttacccaagatgatgcacatattttttgtaccgaagaacaaatcacgcaggaatgtttaagtgtaacaaacctaattttagaaatttataaagatttgggatttgaagatgtaattttgaaatattctgatcgacctgacttaagagttggggatgataaagtatgggataaatctgaagcagctctattggaagctataaaagcaacaaaattagagtactctattaataaaggtgaaggagcattttatggtcctaaaatcgaatttgttttaagagatgcaataggaagagattggcaatgcggaacattacaagtagatttaaatttgccaggtagactaggtgcttcatttgtagatagcgatggaaacaaaaaagttcctgtaatgcttcaccgagccttatttggatcattagagcggtttattggaattttaattgaaaattattcagggaaattacctttttggctttgtccagttcaaacaatagttatccctatctcgagtgactttgatgattacgcaaaagaagtaaatagtcagttaaaaaaagtagggatttcttctgaagtagatttaaaaaatcataatttaaattataaaataagggaacattcattaactaaagtaccaatgttactaatatgtggaa

SEQ ID NO: 303213 - DNA, 904 bp, Unknown
  Bacterial polypeptide expressing nucleotide sequence isolated from the Sargasso Sea
tggtttctattatgattttgctaggaaagaaccattcacagaggatgatctgaaaaaaattgaagaaaagatgaaagaaattgtcgatcgaaatgaaatcacaaaaagagaagtttgggatcgtgataaagccataaaacattttaaaaacaaaggtgaaatctataaagcagagttaattgagaaaattccatcaggtgaagaagtttcaatttactttcacggggattggcatgatctatgtagaggtccacatttatcttcaacaggtaaaattggtaaatttttcaaattaacaaaagtttctggtgcatattggcggggggactccaacaacgaaatgcttcaaagaatatatggaacaagttgggcaagtcagaaagacctagataattatctaaaaagacttgaagaagctgaaaaaagagatcatagaaaattaggtaaagaaatggatttgtttcattttagagaagaaagtcctggatcagttttttggcacgagaaaggatgggctttatttcaaaagttaattaattacatgagaatgaaacaagaaattgcaggctatcaagaaataaatactccagaagttttagatagaagtttgtgggaaaaatctggtcattgggaaaaatttggggctaatatgtacacatcaactacgccagatgaaaaaatatttgccattaaacctatgaattgtccaggttgtgtagaagtttttaatcaaggcctcaaaagctataaagacttaccattaaaaatgtcagagtttggaaaagtacatcgatatgaaccttcaggagcgcttcatggcttgttaagggtaagagcatttacacaagatgatgcacatatattttgtactgaagaccaaataacaaaagaatgcttaatcgta

SEQ ID NO: 303214 - DNA, 844 bp, Unknown
  Bacterial polypeptide expressing nucleotide sequence isolated from the Sargasso Sea
ttcttgtcacagaaacgagccctcaggcgcacttcatggcttaatgagagtaagaatttttactcaagatgatgcacacatattttgcacagaagagcaaattcaagaagaggtatctacttttatagatcttgttttcgcagtttataaaacttttggttttgatgaaatcattatcaaattatcaactcgtcctgaaaaaagggtaggtagtgaagagatttgggataaatcagaagaggctcttacgaaagctctagataataaagatctaaaatgggagctccaaccaggagagggggctttttatggtccaaaaattgaattctcgttaaaagattgtcttaatagagtctggcaatgcggaactattcaggttgatttctcaatgcctattagattaaatgcaacttttgttgatattaataatgaaaaaagaaatccagttatgctgcatagagcaattttaggatcctttgaaagatttataggaatattaattgaacaatatgaggcaaaatttccaatttggcttgcgccttatcaaataattttattgagcattactgatagaaatattgaaaagtgtttagagtttaatgaattaataaataataggggttatcgatcaaaagttgatattagaaatgaaaaaataggatataaaatacgagaggcaacactcgacagagttcccttaattgcagttattggagataaagaagaggaaattgattcagtcgccttaagatctttgaatggaaaaaatttaggaattttcaacttacctaatcttttcaaattaatggatgaacaaattgaaaaaaaagggagactagaataa

SEQ ID NO: 303215 - DNA, 716 bp, Unknown
  Bacterial polypeptide expressing nucleotide sequence isolated from the Sargasso Sea
gataggtgattcatcaaatcaagctttgacaagagtttatggtactgcatgggaaactcatgaatctctagatagctacttaaaatcacttgaggaggcagagaaaagcgaccacaggattttaggtaaaaagcttgatttatttcattttcaagaagaatcacccggtatggtgttctggcatgacaagggctggactatttttaatcttatcaaagattatataacaagctatttaaagaaaaactcatacaagatcatcaatactccacaaatgctagataaaagcttatggaagaaatctggtcacttggataaatttggagatttgatttttgatgttggttctgaaaaaaaggaatatgcaataaaacccatgagttgtccaggtcatgttcaggtattcaaccaagggttaaaaagttataaagaactgcctgttaagtatgcagaatttggttttgtacatcgaaatgaaccatcaggaactttgcatggtttactgagaataagagcatttacccaagatgatgcacacatattttgtacgccagatcaaataaagcaagaaatatctatattaatcaatactataaaagatatttataataagtttggctttgatgatttaaagattgagttatctacacgacctgaaaaaagagttgggagtgacgaaatatgggataaggctgaaaacagcctaatcgaagcat

SEQ ID NO: 303216 - DNA, 967 bp, Unknown
  Bacterial polypeptide expressing nucleotide sequence isolated from the Sargasso Sea
ttattcattttagagaagaaagtctgggctctgttttttggcatgagaaaggatggacgctttttcaaaaaattaattgattatatgagaatgaaacaaaacatagccggttataaagaaattaataccccagaggtattagatcgaactttatgggaaaaatccggacattgggaaaaatttggagaaaatatgtatacatctacaactcctgatgaaaaagtctttgccattaaacctatgaactgccctgggtgtgttgaagtttttaatcaaggtttaaaaagttataaagatttaccattgaaaatgtcggaatttggaaaagtacatcgttatgaaccatctggagcacttcatggtttgcttagagtcagagcctttacacaagatgatgctcacatattttgcactgaagatcaaattatagatgaatgtttaatagttacaaatttaatattagaaatttataaagatcttggatttgaaaatgtaattttaaaatattctgatagacctgaagtaagagttggagatgataaagcttgggataaagcagaaaccgctttgttaaaggcagttaaagcaactaaattagaatatagtattaataaaggtgaaggtgcattttatgggccaaaaattgaatttgttttaagagatgctattggaagagattggcaatgtggaactttacaagttgattttaacttaccaggtagactgggcgcttcatatgtagacaaagatggttcgaaaaaagttcctgtgatgttacatagagctttgtttggatcactagagagatttataggaattttaattgaaaattatgcaggaaaatttccattttggatatcgcccttgcaatcagttgtaattccaatatcagaagaatttaatgattatgcgattacagtttctgaaaaaattaaaaaatcaggcattagttcaatagttgatctta

SEQ ID NO: 303217 - DNA, 946 bp, Unknown
  Bacterial polypeptide expressing nucleotide sequence isolated from the Sargasso Sea
tatgataaaaataactctcccaagtggtgaattaaaaaaatataataatccggtgtcaccactagatgttgttaaagaaatttcaaccaccctttttaaagatgccttaatagcaagtgtggatggcattttatgggatcttaaaagattaattgaaaaagattgctcattaaaaatattaaccaaaaaagacccagaaaccctttcagtgttaagacatgatgccgctcatgtgatggctgaagcagtattagagctatttccagaaacagaaataactataggtccagctatagaggatggtttttattatgatttttttagagatgaaagctttaatattgaagatcttaaaaaaatagaaaaaagaatgcacaaaatagtggaccgaaatgagaaaattgagagagaggtttggagtagaaaagacgcattaaaattttttaaagaaaataaacagaaatttaaaatagagttactgagcgatatttctgaaaatgaagaagttactttttataaacaaggagattttattgatttatgcagagggcctcatttcagaacaactaaatttatgggtcactcttttaagttaatgaaattagctggatcatattggagaggtgatagtaaaagagaaactctacaaagaatatatggcacagcttttttttcagatgatgacttaaacagacatttaaatatgattgaggaagctgaaaaaagagatcatagaaagattggaaaacaacttaatctttttcatttgcaggaagaagctgccggttctgttttttggcatccaaaaggttggtctatttatttggaaatagaattttatatcagaagaaagttattttcaaataattatcaagaggtcaaaacccctcaaattattgataggtctttgtgggaaaagtctgggcattgggacaagttaaagaaa

SEQ ID NO: 303218 - DNA, 682 bp, Unknown
  Bacterial polypeptide expressing nucleotide sequence isolated from the Sargasso Sea
tgtccgcatcaccataaaatttatgattctcagcccaaaagctatcgagatttaccggtgagattttctgagtatggaacttgttatcggtatgaaaagtctggccagttgtttggcttaatgcgtgtaagaagtatgcagatgaatgatgctcatatttattgcacgccggaacagttcaaggaagaatttcttgctgtttgcaatatgtatcttcattattttgaaatttttggaattgataaatatcaaatgcggttaagcttgcatgatccagctggattaggcaaaaaatatattaacgaaccaactttatggaagaagacagaggaagaagttcgagaagctctaattgaagggaatatagatcatgtggaaatttctggtgaagctgctttttatggaccgaaaattgatgttcaggtgtggagtgcgattggaaaagaatttactcttgcgaccaatcaagtagattttgcaatacctaaacggtttggtttgacatataccgatgaacaaggaaaggatcaaactccattatgcattcatcgcgccccattaagtacacatgaacgttttattggatttttgatagagcactatggtggagattttcctttatggcttgctccagtgcaagtagctgtattaccaatatctgataaagtaattgattatgcaa

SEQ ID NO: 303219 - DNA, 925 bp, Unknown
  Bacterial polypeptide expressing nucleotide sequence isolated from the Sargasso Sea
gatgcagcaagatttggagtttgcagaggttaacaccccaattcttgtagattacaagctttgggaagagtctgggcacgctgagaaattttcggatgatatgttcaccttggaggctgaccatagacgatttgccattaagccaatgaattgtccttgccatgtccagatattcaagcagggacttaagagctatcgcgatttacccgtaagatattcagaatttgggtcgtgtcaccgcaatgagccctctggcagtttgcatggtttgatgcgtgtgcgcggatttgtgcaagatgatgggcatattttttgtacggagcagcaaattgctagtgaagcggctgattttataaaatcgttgtacgaattgtataaagatttgggcttcgaccagattgaagttaagctgtcgacacggccggagaagcgggttggtagtgattcagcctgggatgaggcggagactataatggaaaatgtgcttaaggagcagggccttgcatatgagatctcagaaggtgaaggagctttttatggccccaaatatgagtttgcacttaaagattgcctgggccgggtttggcagtgtggcacctttcagttggacttcttcttgcctcaacgccttaatgcgacctatatcgctgaagatggcagcaaacagcatcctgttatgctgcatcgagcagcactaggtagcatcgagcgctttattggcatcttactggagcattatgctggtgatttgccattatggttggcgccagttcaggtggttatcgccactattacagagaaacactcagcttatgctgagaatttagcaaaaaaattgaaaaatcttggcattagaggcgaaattgacttgcgtaatgagaaaatcagctttaaaattcgccagcatagtattgcaagagtgcca

SEQ ID NO: 303220 - DNA, 640 bp, Unknown
  Bacterial polypeptide expressing nucleotide sequence isolated from the Sargasso Sea
atgcataatattatagtaactttgccagataattcagttaaagaggtaccaaaaggtactaattcacaagagattgcgtccatgattggggagcggctttcaaattctgttgtcgtatccaaaataaatggtgtcctatctgatcttaataaaccgataaatgaagattgcactttagagcttttaacaggacaaagtccagagggccatgagacccttttacactcaactgctcatctaatggcacaagctgttaaggaattatttccagacgctaagatatcaatcggtccaactattgaaaagggtttttattacgattttgaacttgaggattttatctctgagaatgatttaagagttattgaaaaaaaaatgatggaattagctcggtctaatcaagaaattatcaggaaagaggtctctgcgaagcaagcattaaaaatttttaaagacaaaaaagaaaattataaattagaaataattaatcagataaatccagaggatataatttctctatatacacaaacaaattttactgatctgtgcagagggccacacgtttcaaacacttctaaaattaaatactttaaattattatcaacatcaggtgcttattggcgtggtgatgaaaaaaatc

SEQ ID NO: 303221 - DNA, 870 bp, Unknown
  Bacterial polypeptide expressing nucleotide sequence isolated from the Sargasso Sea
ccccggacatgttcaagtttataaccaaggcataagatcatataaagaactaccatttaggttatgtgaatttggttcatgtcatcgatatgaagcatcggggactatgcatggactaatgagagttaggggattcacacaagatgatgggcatatttttcttacagaggatcaaatcgagtcggaaacagctatctttatagatttattatcaaaggtctatgctgaccttggatttaaccaatttgaaattaagttatcaacacgcccagaacaaagagtcggatctgatgagatttgggacaaggctgaattatctttaaaaaatgcaatcgaaaaacttggattggaatacaggatagacgaaggagatggagcattttatggtccaaaattagattttgtattaacagatgctattggaagaaagtggcaatgtggaactcttcagctggatttcaatcttgctgaccgtctagatgctcagtatgttgcagaggatggaaataaatataatccagttatgtttcatagagcaattctggggtcttttgaaagattcattggtattttaattgagaactacagtggaaatcttcccttatggcttgctcccacccaagtgacagtttgttcaattacagatgaagctgatgattatgtaaaagagatatcagaaacactcagaagtaataatattcgatgtaattcagatttaagaaatgaaaaaattagctataaagtcagagaacatagcgtctcaaaagtaccaataattctcgctgtcggaaaaaaagaggtttcagagagaactgtttcaataagaaggcttggcagtgatgatacatctatattaccccttgatgattt

SEQ ID NO: 303222 - DNA, 886 bp, Unknown
  Bacterial polypeptide expressing nucleotide sequence isolated from the Sargasso Sea
aaaagtttttgcaattaaacctatgaattgtccaggatgtgttcaaatttttaatcaaggtttaaaaagttatcgagatttaccattaaaaatgtctgagtttggaaaagtgcataggtatgaaccctcaggttctcttcatggacttttaagggtaagagcatttacacaagatgatgcacatatattttgtacagaagatcagatcacagaagaatgtttgagtgtcacaaatttaattttagaaatttataaagatttaggttttgaaaatgtaattttaaaatattctgatagacctgaaattcgcgttggtgaagataaagtttgggataaatctgaaaaagctctccttcaagccattaaagcttctaaacttgaatacagtattaatcagggagagggagctttttatggacccaagatagaatttgttttaagagatgcaataggaagagactggcaatgcggaacattgcaagtagatttaaatctaccagaacgtttaggagcttcatttgtagacaaagatggtacaaaaaaagtaccagttatgttgcatagggctttatttggatctctcgaaaggtttattggaatattaattgaaaattatgccggaaaacttccattttggttagctccattgcaaataatagttatcccagtatcaagtgaatttgatgaatacgcaaaagaaattaaccgaaaaataaaaagcaatggaataatttctgaggtagatctaaaaaatcataatttaaactacaaaataagagatcactccttatcaaagataccaattctgctaatttgtggaaaaaaagaagttgacagcaatacagtaactattagaagattggattctaaaaaacaagaaaatatg

SEQ ID NO: 303223 - DNA, 544 bp, Unknown
  Bacterial polypeptide expressing nucleotide sequence isolated from the Sargasso Sea
tgaaggtgctttttatggaccaaaaattgaatttgttttgagagatgctattggtagagactggcaatgtgggactcttcaggtagatctaaatttacctaatagattaggagcgtcatacgtagctaaagacgggacaaaaaaagtacctgtaatgttacatagagctttattcggttctttagaaagatttattggaatattaattgaaaactatgctggtaagttacctttttggttatctccagcacaagcagtagtatgtccaatagcagaagagagcaataattatgttaaaaagttatttgaagatttgtttaaagaaggtataaaatgtgaaatggatttaagaaatgagaaaattaattacaaagtgagagaacattctcttgcaaaaattccatatattgtagtctgcggaaaaaaagaagtttctgaaaatactgtaactgttcgacaactaggttcagaaaaacagcaagtaatgaagagagaagaatttattaaaaatatgctagatttaaataagctgcctttaaactaa

SEQ ID NO: 303224 - DNA, 607 bp, Unknown
  Bacterial polypeptide expressing nucleotide sequence isolated from the Sargasso Sea
aaagcagaaaaagctcttcaagatgcaatagaaaagcttaatatcgattatgaaattgatgaaggtgatggagctttctatggtccaaaacttgattttgtgttaacagatgcaattggcagaaaatggcaatgtggaacttggcaagctgattttaatcttcctggtagatttgactcaacatatgttggcgaggatggtgcaaaacatacgcctgtcttattacatagagccgctttagggtcttttgaacgttttattggcatattgcttgaaaactatggtggtaatcttcctttatggctctcacctactcaagttgttctagcaacaataacagatgaagctaaagcatatgcagatgatatagaaaaacaattattagatcttggtgtcagagtaatatctgataaaagaaatgaacaaattagttataaagttcgtgaacacagcaaatctaaatcttcaacaattctcgctctaggcaaaaaagaggtagatgataaaacagtttctatacgaagattaggtagtgaaaaaaccgaagttaaaaaattagaaaaatttttaaaagagattgaaaatgaaattgtaataccgggctaga

SEQ ID NO: 303225 - DNA, 947 bp, Unknown
  Bacterial polypeptide expressing nucleotide sequence isolated from the Sargasso Sea
tagtcaattgagaacagaaaagagagatcaccgtaagctcgcaaaagaaatgaatttatttcatttccaagacgaggctccgggaatggtgttctggcaccaaaatggctggtcaatatatacctctttattaaactttatgcgagaaaaacttaacctttctggatatcaggagattaatactcctcaagtggttgatagaaaattatgggaagcttcagggcattgggaaaaatatcgagagaacatgtttattgctgaaattgatgaagagtatgcaaatgaaaaaagaacaaatgctcttaaacctatgaattgtccttgtcacgttcaggtttataatcagggccttacatcttataaagatctacccattaggttttcagaatttgggtcatgccatagatatgaggcttcaggaacgatgcatggattaatgagggttagaggatttactcaagacgatggccatattttttgtactgaagatcaaatcgaagatgaaacaaaatcatttattatgcttttatctgatatctataaaacgcttggtttcaatgaatttaatatcaaactctcaactcgtcctgaagttagaataggtaatgatgagacttgggataaggctgagaatgctttgcagaaagcaattgagaggttagatctaccatatgttattgaagagggagagggagctttttatggtccaaaattagattttgttcttacggatgcaataggtcgacaatggcaatgcggtacttttcaagctgattttattctcccgtctagattggatgctgtttatgtaggtgaggatggaaaaaaacataatcctgtaatgattcacagagccatattgggttcttttgagaggtttttaggcatcttgatagaaaactattcaggaaagctgccattatggttagcgccaaagcagatagctg

SEQ ID NO: 303226 - DNA, 796 bp, Unknown
  Bacterial polypeptide expressing nucleotide sequence isolated from the Sargasso Sea
aacaaatccacaactacaaagaatttatggcactgcttggttttctaaagaagatttagataattatctagctcgtcagaaagaagccgaaaaaagagatcatagaaaattaggtaacgaattaaatttgtttgttaatacagatgaaattggtccaggtcaatttttgtggaaacctaaaggatcaattttaaggcaaataattgaggattattcaaaaaaagcacatgccgataatggttatgagtatgcttatacacctcatattggtcgctcaatactttgggaaacttcgggacatcttgattattacaaggaaggaatgtacccaccattaaaaaatgaaaacaatgatgatgatgagtattatttaaaacctatgaattgtccttttcacattttaatttataaaagtgatatcagatcttataaagagctgcccttacgtttttttgaactaggttctgtttacagatttgaaaaaacgggcgttctacatggtttgttaagagcaaggggttttactcaagacgatgcacacattttttgtacaaatgatcaaatcgaagaggagattttaaatctcttaacattttcaataaaacttcttaatgcgtttggttttgattcaattgaagctgatttatcaacaagaccggaaaaatctattggaaatgatgacgactgggttaaggcaacaaatagtttggcttcagcattagacaatcagagtatatcttttgtaactgctcatggagagggagctttctatggaccaaaaatagatcttcatgta

SEQ ID NO: 303227 - DNA, 837 bp, Unknown
  Bacterial polypeptide expressing nucleotide sequence isolated from the Sargasso Sea
ggctataaggaaataaataccccagaagttttagacagatctttatgggaaaaatctggacattgggaaaaattcggtgcgaacatgtatacttcaacaactccagatgaaaaagtatttgcaattaaacctatgaactgtccaggttgtatagaagtttttaatcaaggtcttaaaagctataaagatttgccattaaaaatgtctgagtttggaaaagtacatcgttatgaaccgtcaggcgcattacatggcttattgagagtgagagcattcacacaagatgatgcacatatattttgtactgaagatcaaattacaaaagagtgtctaatcgttacagatcttattttggaaatttataaagatttaggttttgaaaatgtaattttaaaatactccgatagaccagaaaagagagttggggatgatagtgtttgggataaagcagaaagtgctctgttagaagctgtaaaagctacaaaattagaatatagcataaataaaggtgaaggtgcattttatggtccaaaaatagagtttgttttaagagatgcaattggtagagattggcaatgtgggactttacaagttgattttaatttacctggaagattgggtgcatcatatgtagataaagatggttcaaaaaaaatcccagtaatgcttcatagagcactgtttggttcactagaaagatttattggaattttaattgaaaactatgctggtaaatttccattttggatttcaccattacaaacagttgtaataccaatctcagaagactttgaagactatgcagttaaggtatctgaaaaaattaaattggctggt

SEQ ID NO: 303228 - DNA, 904 bp, Unknown
  Bacterial polypeptide expressing nucleotide sequence isolated from the Sargasso Sea
ggaagcacttgaattaattcgacatgattgtgctcatgtgatggctgaagctgtccaagaattattccctggaacacaagttacaattggcccagcaattgaaaatggtttctattatgattttgcaagagatgaaccctttactgttgctgatcttccaaaaattgaaaagaaaatgcacgatatcattcaaagaaataaaaattttataagagaagtatggtctaaagaagaatcaataaaattttttaaagaaaaaggtgaagactacaaagttgaattaattaatgatctgcctgataacgaggaaattagtatttacaaacaaggtaattggttagacttgtgcagaggtcctcatatggtttcaacaaaacaaattggtaaagcatttaaattaatgaaagttgctggtgcttactggcggggtgattcatctaatacaatgctaacaagaatctatggtactgcctgggcaacagaaaaagaacttgaacaacaccttttacaaattgatgaagcagaaaaaagagatcaccgaaaactaggaagagaaatggatttatttcattttcaagaagaggctcctggagcggttttttggcatcctaagggttggaaattattccaatcgttaataaattatatgcgaaacagacaagacaaggcaggttatgtagaaactaatacaccagacatgatggataaatctctatgggaaacgtctggtcactgggataaatttagcgacatgatgtttaggactgaggctaaagacgataaaatttatgctatcaaaccaatgaattgcccaggtgctgtagaaatttttaaacaaggattaaaaagttatagagacttaccgtttctattatctgaattggaaaagtgcatcgttagaacc

SEQ ID NO: 303229 - DNA, 768 bp, Unknown
  Bacterial polypeptide expressing nucleotide sequence isolated from the Sargasso Sea
caacgacttgaagaggcagagaaaagagatcatcgaaaacttggaagaaaattagatctttttcacttcagcgacgaagctccgggctcagtcttctggcacccgaaaggttggactttgttcctacagcttcttgactatatgcgtcaaagacaagagaaggctggctacgtcgaggtcaataccccagatgtcatggaccgaagtttatgggagacctcgggtcactggtttaattatcgagagaacatgttctcgactcaaaccgaggatgatcgaatttttgctctaaaaccaatgaactgtcctggttctgtatccatgttcgcacaagggcttaagagctacagggatctgccattgcgtatggctgaatttggcaaagtacatagatatgagccgtcgggggcgctgcatggactaatgcgtgttcggcactttactcaagacgacgctcatatctattgtacagaggaccaaatggagggtgagtgtatagatgtggtttctctagttctggatatctacagggattttggcttcactgatgtcgttataaagctctcgacgagaccggaaaaaaggattgggtcagacgaagtttgggacaagctcgagggagctctgattaacgcgttaaaagttatgggccttgattatgtgctttatcctggtgaaggcgctttttatgggccgaaattagaatttgttctaagggatgctatcggtcgagactggcaatgcggaaccttgcaagttgatatgaat

SEQ ID NO: 303230 - DNA, 781 bp, Unknown
  Bacterial polypeptide expressing nucleotide sequence isolated from the Sargasso Sea
gcttttactcaagatgatggacatattttttgtactgaagatcaaatcgaatctgaaactggattatttatagagtttttatcaagcatatatgcagatttaggctttaaagaatttgatatcaaattatctaccagacccgaaatgagagttggatctgatgaaatatgggataaagcagaagaggctcttgaagctgcaattaagaacttaggctatccatatagaattgatgagggagatggagcattttatggacccaagttagactttgtgcttactgatgcaatcggaagggaatggcaatgtggaacatttcaactagattttaacttagctgaaagacttgatgctcactatatcggggaagatggtaagaaacacaatcccgttatgatacatagggctgttttaggttcttttgaaagatttataggaatacttattgaaaactatgctggaaagcttcctttatggcttgcgcctcaacaggttgtcatagcttcaattatttctgatgtaaatgattattccctcgaaattatgaatcttcttaaaaaagagggtattagggctgaggcagacttaaggaatgagaaaatcagctataaagtaagagaacatagctcgaaaaaagttcctataatcctagcaattggtaataatgaaaaaaatgataggactgtttccattaggcgaataggaagtaaagacactgaagtgcttagccttgatgatgctattaatcaaattaacaatgagagcaagaccttaaattaat

SEQ ID NO: 303231 - DNA, 958 bp, Unknown
  Bacterial polypeptide expressing nucleotide sequence isolated from the Sargasso Sea
ttcatggtaaaatggcatgatttgtgcagaggaccgcatttagtatctactggaaaaattgaaaagaatttcaaattgacaaaagttgcaggagcatattggagaggtgactcaaaaaatgaaatgcttcaaagaatatacggaacagcttggagtacaaaaaaagagcttgatgaatatttgaaaagaattgaagaagcagaaaaaagagatcatagaaaattaggtaaagaaatggatttatttcattttagagaagaaagtccaggatcagtgttttggcatgaaaaaggatggtctttttttcaaaaactcatttcttatatgcgagccaaacaagatgaagctggatataaagaaattaatacacctgaaattttagatagaactttgtgggaaaaatctggacactgggaaaaatttggtgaaaatatgtatactactacaactccagatgaaaaaatttttgcaataaagccaatgaactgtcctggctgtgttcaagtttataatcaaggattaaaaagttatagagatttaccacttaaaatgtcagagtttggaaaagttcacagatatgaaccttcaggtgctttacatggcttattacgagtaagagcatttactcaagacgatgctcatatattctgtacggaagaccaaataacagaagaatgcttgtcagttactaacttaattttggaaatatataaagatcttggatttaaaaatgttatactaaaatattccgatagacctgaagtaagagttggcgaagatcacatatgggataaatcagaagctgctttattaaaggcagtccaagcatcaaaattagaatatagtattaataaaggagaaggtgctttctatggaccaaaaattgagtttgtattaagagatgcgattggcagagattggcagtgtggaacattacaggttgaccttaattgccaga

SEQ ID NO: 303232 - DNA, 612 bp, Unknown
  Bacterial polypeptide expressing nucleotide sequence isolated from the Sargasso Sea
ctggggaaaagaaatggatttgtttcactttagagaagaaagtccaggtgcagttttttggcatccaaaaggatgggctttatttcaaaagcttgttggatacatgagacaaaaacaaaaaaacgcaggatataaagaaattaatacaccggaaatactagataaatctttatgggaacaatcaggacactgggaaaaatttggtgaaaatatgtttacttcagacacacccgatgaaaaaacttttgctataaaacctatgaattgccctggatgtattcaggtatttaatcaaggacttaaaagctatagagaccttcctcttaaattatcagaatttggtaaggttcacagatatgaaccctctggtgctttacatggtttattaagagtaagagcttttacccaagatgatgcacatattttttgtacagaagatcaaattaccgaagaatgtttaagtgtaactaatttaatattagaaatttataaagaccttggttttgaaaatgtcctattacaattttctgataggcctaaaaaaagagttggggatgataaaatttgggataaagcagaatctgctttattgaaagcaattaaacaatcaaa

SEQ ID NO: 303233 - DNA, 724 bp, Unknown
  Bacterial polypeptide expressing nucleotide sequence isolated from the Sargasso Sea
ggtccacacttagtttcttctggtaaaatttgcaaggcttttaagcttacaaaagttgctggagcatattggcgtggagactcaaaaaatgagatgttacaaagaatttatggaactggctgggcgtctcaaaaagatttagatgattatttaaaaagaattgaggaagcggaaaaaagagatcacaggaaacttggtaaagaaatggatctatttcattttagagaagagagcccgggatctgttttttggcacgaaaagggttgggcattatttcaaaaattaattaattatatgcgagcacgccaagatgcagcaggatataaagaagtgaatactccagaggtattagatagattattatgggaaaaatcggggcattgggaaaaatatggtgaaaacatgtatacttccgagactcctgacgaaaaagtttttgcaataaaacccatgaattgcccaggtcatatacaagtttttaatcaaggtttaaaaagttatagagatttaccattaagaataacagaatttggtaaagtacatagatatgaaccatcgggagctttacatggtcttctaagggtaagagcttttacacaagatgatgcacatattttttgttcagaagatcaaattacaagtgagtgtttaaatgtaacaaatttaattttagatatttataaagatttaggttttgaaaacagtggtgttaaaatatgctgac

SEQ ID NO: 303234 - DNA, 370 bp, Unknown
  Bacterial polypeptide expressing nucleotide sequence isolated from the Sargasso Sea
aatgccaaatattaaattaccagatgggaattcattaaactttgataaaaaagttactggatttcaaatagctgaaaaaattagcaaatctctttcaaagcaggccttgataattagcgttgatggaaatttaaaagatttaaattatgaaataaatcatgattgttcagtcaaaatatatactgctaaagataaggaaggattagaaacaattagacacgatacagctcatattttagctatggccgtgcaagaaatatttcctaagactcaagtaactattggaccagtgattgataatggattttactatgattttgcaagaaaagacccttttactgaagaagatttacgaaaaatagaaaaaaag

SEQ ID NO: 303235 - DNA, 505 bp, Unknown
  Bacterial polypeptide expressing nucleotide sequence isolated from the Sargasso Sea
gatgagcggaaaaattacaattacatttcctgatggaaacaaaaaagaagtagataagggaattagtggattagacctagcttcacagatttctaaatcacttgctaaagaatcagttgctataaaaataaacgatgaaataaaggatattagcttacctattaatagtgaagcatccgttgcaattttaaaaaaagatagtgaagaagctcttgaactaattcgacatgattgtgcacatgtgatggcggaagcagttcaagaattgtttcctggtacacaagttactattggtccggctattgaaaatggtttctattatgattttgcgagaaacgaaccatttactttatctgatcttccaaagattgaaaaaaaaatgcatgaaattattcagcgtaatgaaagttttgtcagggaagtatggtctaaggatgaggcgataaaatattttaaagataagggtgagaactacaaggttgaattaataaatgatttatctgat

SEQ ID NO: 303236 - DNA, 931 bp, Unknown
  Bacterial polypeptide expressing nucleotide sequence isolated from the Sargasso Sea
caaagaaataaatacaccagaaattttagacagatctctttgggaaaagtctggtcactgggataaatttggagaacatatgtacacttcaacgactccagatgaaaaagtatttgcaattaaaccaatgaattgtccaggatgtgtacaggtttttaatcaaggattaaagagttatagagacttacctttaaaaatgtctgagtttggaaaagtgcacaggtatgaaccttcaggagctttacatggacttatgagggttagagcatttactcaagacgatgctcatattttttgtactaatgaacaaattacagaagagtctttaagtgtaacaaacttgatattggatatttataaagatttaggttttaaaaatgtaatattaaaatattcggataggcccgaggtaagagttggagatgacaacgtatgggataaatctgaagcagctttattagacgcagtgaaggcaactaagttagaatatactattaacaaaggtgaaggcgcattttatggtccaaaaattgaatttgtattaagagacgcgataggaagggattggcaatgtggaaccttacaagtagatttaaacttacctgaaagattgggggcttcatttgttgataaagatggaacaaaaaaagttccagtaatgcttcatagggcgcttttcggatcattagaaagatttattggaattctgattgaaaactatgcaggtaaacttcctttttggattagtccacttcaaatagttgtaataccagtttctgatgaatttgataaatattctatagatgtagcaaataaactaagaaatgaaggattaaattgtgaagtagatttaaaaaatcataatcttaattataaaattagagaacattctctgactaaagtgccagttttactaatttgtgaaaaaaga

SEQ ID NO: 303237 - DNA, 791 bp, Unknown
  Bacterial polypeptide expressing nucleotide sequence isolated from the Sargasso Sea
aattaaatttgataaacctgtaactggttcagaagttgcagaaaaaataagtaaatctttagcaaaacaagctttaataatgagtgtaaatggagagctaaaagatttgtatcatataattaaagaagacagtgatgtaaaaatttttaccgcaaaagatcctgaaggattagaagttattagacatgatactgcacatattatggccatggctgttcaagaattatacccaggtacacaggtgactattggaccagtaatcgaaaatggcttttattatgacttcgctagaaaagaaccatttacaagtgatgatcttaaaaagattgaaaaaaggatgtcagagataattgataaagatgtaaaaacaagaagagaagtttgggaaagagataaagcaataagtcactttaaaaaaattggtgaaaattataaagccgaaataattgatagtattccagaaaaagaagaacttactatttatcatcatggagatacttggcacgatttatgtagaggcccacatttagagtcctcaggtaaaattggtaaagcttttaaattgacaaaagtttcaggtgcatactggcgtggagattctaaaaatgaaatgcttcaaagaatctatggtacaggatggtccagtcaaaaagatctagatatttatcttaatagaatagaagaggctgaaagaagagatcatagaaaacttggaaaagaaatggatctttttcattttagagaagaaagtccaggttcagtgttttggcatgagaaaggttggagcttat

SEQ ID NO: 303238 - DNA, 703 bp, Unknown
  Bacterial polypeptide expressing nucleotide sequence isolated from the Sargasso Sea
aattatatgcgaaagagacaagacaaggcaggttacgtagaaactaatacaccagacatgatggataagtctctatgggaaacgtctggtcactgggacaaatttagtgacatgatgtttagaactgaagcaaaagacgataaaatttatgctatcaaaccaatgaattgccctggcgctgtagaaattttcaaacaaggattaaaaagttatagagacttaccatttctattatctgaattcggaaaagtacatcgttatgaaccatcgggtgctcttcatggattaatgagggtgagagcattcacacaagatgatgcacatatattttgtacagaagatcaaattacacaagagagtaaaacggtatgtgatttgatacttagtatctataaggactttggtttcgataatgttagaattaaattttctgaccgtcctgaaaaacgcgtaggggatgatactatttgggataaagctgaggctgcattaatgcaagccatggaggcaacaggtcttgagtatacacttaatccaggagaaggtgcattttacggtccaaaattagagtttgttttacgagatgcaattggcagagactggcaatgcggaacactacaagtagatttaaatttacctggaagattaggagctacttatattggagaagatggtaataaaaaaataccagtcatgttgcata

SEQ ID NO: 303239 - DNA, 823 bp, Unknown
  Bacterial polypeptide expressing nucleotide sequence isolated from the Sargasso Sea
gaaccttcaggagcaatacatggtttattaagagttagagcatttacccaagatgatgcacatattttttgttctgaagatcaaattactagtgaatgtttaaatgttacaaatttaattttagatatttatagagatttaggttttgaaaatgtaatactaaaatatgctgatcgaccaaaaattagagttggtaatgatgaagtatgggataaggctgaagcatctttattagaagctgttaaagcatcaaaattagaatacagtattaataagggagagggcgctttttatggtccaaaaattgaatttgttttaagagatgcaattggaagagattggcaatgtggaacccttcaagttgattttaatttacctggaagattaaatgcctcttatgtggataaagatggtacaaaaaaagttcctgtaatgctacatagagcattatttggttcattagagagatttattggaattcttatagaacattatgctggcaaatttcctttttggatttcacctcttcaaactgttgtaattccaatttcagaagattttaataattatgcaattgaagtttcaaaaaagataaaacaatcaggaataagttctgttgttgacttaaaaaaacataacttaaactataaaattagagatcattcacttgcaaagatacctcttttattaatttgtggtaaaaaagaagttgactccaactcagtaacgattagaaagttggactctaataaacaagaaaatatggatttaaatttatttctaaaaactttctccgctttaaataaagcatcttcaaattaag

SEQ ID NO: 303240 - DNA, 892 bp, Unknown
  Bacterial polypeptide expressing nucleotide sequence isolated from the Sargasso Sea
aatcgaacatatgcaattaaaccaatgaattgtccatgccatattcaagtatttaatcaaggtttaaaaagttataaggatttacctattcgtcttgctgaatttggttcttgtcacagaaacgagccctctggtgcactacatggcttaatgagagtaagaaactttactcaagatgatgcacacatattctgcacagaagagcaaattcaagaagaggtatctacttttatagatcttgttttcgaggtttataaaacttttggtttcgatcaaatcattatcaaactatcaactcgtcctgaaaaaagggtaggtagtgaagatatttgggataaatcagaagaggctcttaccaaagctctcgataataagaatctaaaatgggaactacaacctggagaaggtgctttttatggtccaaaaatagaattctcattaaaggattgtcttaatagagtttggcaatgcggaactatccaggttgatttctcaatgcctattagattggatgcaacttatgtagatattgataatgaaaaaagaaatccagttatgctgcatagagcaattttaggatcctttgaaagatttataggaatcttaattgaacaatatgaggcaaaattcccaatttggcttgcgccttatcaaataattttattaagcattactgatagaaatattgaaaaatgtttaaagtttaatgaattaataaataataatggttaccgatcaaaagttgatattaggaatgaaaaaataggatataaaatacgagaggcaactctcgggagagttcccttaattgcagttattggtgataaagaagaggaaattgattcagtcgccttaagagccttgaatggaacaaatttaggaattttttaat

SEQ ID NO: 303241 - DNA, 849 bp, Unknown
  Bacterial polypeptide expressing nucleotide sequence isolated from the Sargasso Sea
tcttcagtatatagacaagggaaatttgtagatttatgtagaggaccgcatgttgaaagtactgcaaaattaaagtggtttaaactaactaatactagtcaagcattctggagagctgattcttctagagaaacccttgtacgaatttatggaatgtgttactcatcaaaagaagacctgcaggctcgtgaaactatgctacgagaagctgcaaaacgcgaccatcgaaaactgggtaaagatctacaattgtttcatgtcgatgaaatggtgggacaaggactaatcctttggacaccacggggaactatagtaagaaacgagctacaacaattcatttctgaacatttaaatcgccaaggataccaacagatacacactcctcatattggaaagcttgatctctatcgaacatctggtcattttccatactatcaagatagtcaatatccacctattgtaaagcgagatacattacgccgattatctgacgaaggatgttcatgtggtgatttatcgaacctaatttcagatggtgagatagaaggatacatgctgaagcctatgaattgtccacatcacatacaaatctatgctagtcaaccaagatcatatcgtgatcttccattaagattagctgaatttggaactgtatatcgctgggagcaatctggtgaaatttcaggaatgacaagggtaagaggttttactcaagatgatgcacatttattcataacagaagatcagattgagcaagaattacttggttgtattgaattagtcaaagttatttttggaactttgggaatgaaagattatcgtgttagaattggacttcgtgattcaaat

SEQ ID NO: 303242 - DNA, 535 bp, Unknown
  Bacterial polypeptide expressing nucleotide sequence isolated from the Sargasso Sea
taaaatagatttttctttaaaagattctattggaagagtttggcaacttggaactatacagcttgatttttcaatgcctgagagattgagcgcaacttacgtcaatgaagaaggtaataaagtcgcaccagtaatgattcatagagctatcctaggatcgctggagcgattcgtaggaattttaattgaagaatattcaggaaacttccccttgtggctctctcctcaacaaattcaaataataaatattacctctgctcaagatgattattgtataaagttaagagataaattacgtagtttaaattttagagttgatactgatttaagaaatgaaaaaattaatttaaagatacgtgaaaatgcaatgcttagaatcccatatttgttagtagttggtgataatgaactaaaaaacaatactgtctccattcgtacccgtgatggtgacaacctcggagaaatgggagttgaaaaattgatcaaaatgttggaaactcttgtagatactaagagtagaaaattaactacgtag

SEQ ID NO: 303243 - DNA, 874 bp, Unknown
  Bacterial polypeptide expressing nucleotide sequence isolated from the Sargasso Sea
tatgtttactactaatgttgacgaatctaatgttttatctcttaaaccaatgaattgtccgggtcatgtgcaaatatttaaacaaggtttgaaatcttttagagatcttccattaagactatcagaatttggttcttgccatagaaatgaaccaagtggagcactccatggaattatgcgtgttagagcatttactcaagatgatgcacatattttttgtactgaagatcaaattaatgatgaatcgattaacttttgtgatcttcttaaatctatctataaagattttgggtttgaaagtattaaaataaaattttctgatcgaccagagattcgtgctggtgatgatgaaacttgggatcaggcagaaacagcactagtaaatgccactaaggctgctggaataaaaactgttctaaatcctggtgagggtgctttttatggccctaaattagaatttgtattacgtgatgcaattggtcgagattggcaatgtggaacacttcaagttgattttgttttacctcagaggttagatgctgaatatgttacatctgatggttcaaagaaaagacctgtcatgcttcatcgagccatacttggctctatggaaagatggattggtatacttatagaacagtatgcaggtaaatggccaatatggttatctccagttcagattgttgtggcaacgataactcaagatgcagatcaatattgtgaaaaagtttttatcaaagctgaggaattaggtttgagaatttcgcatgataaaaggaatgaaaagattggctataaaattcgagagcatttggaaaagaaaataccaataattttgatagttggtaaaaaagaagctgaaatgggaacagtt

SEQ ID NO: 303244 - DNA, 863 bp, Unknown
  Bacterial polypeptide expressing nucleotide sequence isolated from the Sargasso Sea
agatgacttaattctcatcgaaaagaaaatgaaagaaataataaacgctcgagacatggttaaaactgaagtatggagccgtcagaaagcgatcgattattataaaaaaaataatgaaccatttaaagttgagctgattgaatcaattccaggcgacgaacctataagaatgtattggcatggacattggcaagatctttgccgtggccctcacttgcaacatacaggtcaagttcccgcagatggttttaaattaatgcatgttgccggtgcatattggaggggtgatagcaatagagagcagcttcaacggatttatggctgtgcttttttaaataaagaacaactaaaagttcatctaaatatgcttgaggaagctgcaaaaagagaccaccgaaaacttggtcgagaaatgaaattattccatatgcaggaggaagcgccgggacaaatattttggcatcctaatgggtggaaaatttacacaacattacaagattatatgcgccgtaaacaggaacaagatggttatgttgaggtaaatactccacagctagttgatcgaaaattatgggaagcatctggccattgggaaaaatatcaagagaacatgtttatagttgaagttgatgaagaacatgcccgcgaaaaagcagttaatgctctcaagccaatgaattgtccatgtcacgtgcaagtttataatcaaggtcttaagtcatatcgtgatttaccccttagaatggctgaatttggcagttgtaatcgatatgaaccctcaggtgcactgcatggcgtgatgcgtgtgcgcggttttactcaagatgatgcccatattttttgccgccgaggatcaaattgag

SEQ ID NO: 303245 - DNA, 853 bp, Unknown
  Bacterial polypeptide expressing nucleotide sequence isolated from the Sargasso Sea
aatgtcggagtttggaaaagtgcaccgctatgaaccttcaggtgctcttcatggtttgttaagagttagagcttttacacaagatgatgcacacattttttgcacagaagaacaaattacagaagaatgtttgtctgttacaaatttaatattagaaatttacaaagatttaggttttgaaaatgtaattttaaaatattcggatcgaccagatataagagttggcgatgatagcgtttgggataaatcggaaactgcattgcttaaagctataaaagcatcaaaattagagtacacaataaataaagcagaaggagcattttatgggccaaaaatagaatttgttctaagagacgcgattggaagagattggcaatgtggaacattgcaagttgacttaaatttacctggaagattaggagcaacttatgttgcaaaagatgggactaagaaagttcccgttatgcttcatagagcactctttggttcgttggaaagatttataggaatattaatagaaaattatgcaggaaagcttcctttttggattgctcctcttcaaacagttgttataccaatttccaatgattttgatgattatgcaaaaaatgtttataaaaaaataaaaagagctggaatatcctcagaagtagatcttaaaaaccataatttaaattataaaatcagagatcattcattaaccaaggttcctttgcttttaatttgtggaaaaaaagaagttgacactaactcagtaactattagaagattggattcaaataaacaagaaaatatggaattaaaagaatttctaaacaaatattctgcttttaataaagcaccttcaatttaa

SEQ ID NO: 303246 - DNA, 703 bp, Unknown
  Bacterial polypeptide expressing nucleotide sequence isolated from the Sargasso Sea
agtatgtataaagaatcttggctttactgattttaaaatcaagttatctacaagacctgaaaaaagaataggtacagatgcaagttgggataaagcagaaaaagctcttcaggatgctattgaaaaattaaaacttgaatattcaattgatgaaggtgatggagcattttatggtccaaaactagactttgtgcttactgatgctattggtagaaaatggcaatgtggaacattgcaggttgattttaatttacccggcagatttgactctacatttattggtgaagatggagccaaacatacacctgtattgttgcatcgtgcagctcttggttcatttgaacgatttataggaattttattagaaaactatggtggaaaattaccagtatggttagcgcccacacaaacagtaatagctgcaataaccgatgaagcaaatgaatatgctgtatctataaatgagaaactattagaaaatgggattagatcagaacttgacattagaaatgaacaaattagctataaagtaagagaacatagccttcagaaaataccattcatcattgcagttggaaaaaaagaagttgaatctaaatcagtttcagtaagaagaattggtagtgataaaactgaatctatattaatggacgattttattaaatttgttgtgcaagaagctaaaacgccactagacaaataa

SEQ ID NO: 303247 - DNA, 845 bp, Unknown
  Bacterial polypeptide expressing nucleotide sequence isolated from the Sargasso Sea
aaaagttatagagatcttcctcttaaactttcagaatttggcaaggtgcatagatacgaaccttctggtgcgttacacggtttattgcgggttagagccttcacacaagatgatgctcatatattttgtacagaagatcaaattacagacgaatgtttaaatgttactaatttgatattagaaatttatagagacttgggttttaaaaatgttttgctgcaattttctgatagaccgcaaaaaagagttggagatgataatatttgggataaagcagaaacagctctactaaaagcaataaaacaaacgaaattaaaatatgaaatcaataaaggagaaggtgctttttatggaccaaaaatagattttatattgcgagatactataggtcgtgactggcaatgtggaactttacaggtagatttaaatcttccttcaagacttggggcgtcatatgtttcgagcgatggaacaaaaaaagttcctgttatgttgcatcgtgcattatttggttctttagagagatttattggaattttgattgaacattatgccggtagattgccattatggttgtccccattacaagctgttattcttcctatttctttagagtttaacaattatgcaaaaaagatatttgaacaatttgtgaaagcaggtataaacaccgagatggatttaaaaaatcaaaaaataagttataaaattagagaacactctttatcaaaagtccctcttctgctaatatgtggtgaaaaagaacttaaaaagaaatctgttacgattagaaaattaggatctgaaaaacaagaaacattaacacttgataaagctattaaaaa

SEQ ID NO: 303248 - DNA, 796 bp, Unknown
  Bacterial polypeptide expressing nucleotide sequence isolated from the Sargasso Sea
tatgtatacttcaactacaccagatgaaaaattttttgcaattaaacccatgaattgtcctgggtgtgttcaagtatttaatcaaggacttaaaagttatagagacttacctttaaagatgtcagaatttggaaaagttcatagatatgaaccttcaggtgcattgcatggattattacgtgtaagagcctttactcaagatgatgcacatattttttgtacagaagaacaaattactgaagaatgtttgagtgttacaaatttaattttagaaatttataaagatcttggttttgaagatgttattttaaaatattcagatagaccagatttaagagttggtgacgataaagtttgggataaatcagaggctgcgttgttagaggcaattaaagcgacaaagctagagtactcaattaataaaggtgagggcgcattttatggaccaaaaattgaatttgttttaagagatgcaatcggtagagattggcagtgtggaaccttgcaagtagatttaaatttaccaggtagattaggagcttcttttgttgataaagatggaactaaaaaagtacctgtaatgttacacagagcattatttggatctttagaaaggttcataggtatccttatagagaattatgcaggcaagctaccattttggatatcacctttacaggcagtagttattccaatctctagtgattttgatgaatatgctaaaagtgtagctaaggaattaaaacgggttggtttgattgtcgaggtggatcttaaaaatcacaatttaaattat

SEQ ID NO: 303249 - DNA, 904 bp, Unknown
  Bacterial polypeptide expressing nucleotide sequence isolated from the Sargasso Sea
tttcctggcacacaagtaactattggaccggtaattgatgatggattttattatgactttgcaagaaaggaaccatttaccgaagaagatttaagaaaaatagaaaaaaaaatgttagaaattgtagagagagatgagcctactcacaaagaaatatggaaacgagagaaggcaattgaacactttaaaaaagcaggagaagtttataaggctgaaataattaaagatatacctaaagaagaagaggtttctgtttactttcatggaaaatggcatgatttatgtagagggcctcatttgatgtctactggaaaaatcggaaaatattttaaacttatgaaagtctctggcgcatattggagaggtgactcaaataatgagatgcttcaacgaatttatggaactagctggtctacacagaaacagttagatgattatttggttagaattgaggaagcagaaaaaagagatcatagaaaaataggaaaagaaatggatttatttcattttagggaagaaagtccaggagcagttttttggcacgaaaaaggttggatattatttcttaaacttattgattacatgagatctaaacaaaaattagctggttaccaagaaataaatacacctgaaattttagatagatctttgtgggaaaaatcaggtcactgggaaaaatttggagaacatatgtacacttcgacaactcctgatgaaaaaatatttgcaataaaacctatgaattgccctggatgtgtagaagtatttaagcaaggtttaaaaagttatagagacttacctttaaaaatgtctgagtttggaaaagtacatagatacgagccatctggagcattacatggattgttaagagttagagcttttacacaagatgatgcacatattt

SEQ ID NO: 303250 - DNA, 883 bp, Unknown
  Bacterial polypeptide expressing nucleotide sequence isolated from the Sargasso Sea
gggccctatttcaaaactaattaattatatgagagacagacaaaacgctgcaggttataaagaggtaaatacccccgaagttcttgatcgacagttgtgggaaaaatctggtcattgggaaaagtatggagaaaatatgtatacctccgaaacaccagatgaaaaagtttttgctattaaacctatgaactgtcctgggcatatacaggtttttaatcaaggtttaaaaagttacagagatcttccattaagaattactgagtttggaaaagttcatagatatgaaccctcaggtgcacttcatggtttattaagagttagagcatttacacaagatgacgctcatattttttgttccgaagatcaaattacaaacgaatgtttaaaagtaacaaatttaattttagatatttataaagacttaggttttaataatataatacttaaatatgcagatcgaccagaagttagagtcggtgaagataaagtgtgggataaagccgaagcctctttgttagaggcagttaaagcctcaaaattagactatagtatcaataaaggagagggagcattttacgggccaaaaatagaatttgttttaagagatgctataggtagagattggcaatgtggaacacttcaagttgacttaaatttacctggaagattagatgcatcttatattgataaagatggaacaaaaaaagtacctgtaatgttacatagagctttatttggttctttggaaagatttattggaattttaatcgaacattatgctggtaaatttcctttttggatttcgcctttacaaactgttgtaataccgatatctgaagatttcgaagattatgcaaataaagtttctaaaaaaattaagcaa

SEQ ID NO: 303251 - DNA, 742 bp, Unknown
  Bacterial polypeptide expressing nucleotide sequence isolated from the Sargasso Sea
caaattacaggagagtctctttcagttacaaatcttattttaaatatttataaagaccttggatttgaaaatgtaattttaaaatattctgatagaccagaccttagagttggagaagatgaggtttgggataaagcagaaaaagctctcttggaagcagttaaagctacaaaactagaatacagtatcaataaaggggaaggtgcattttatggtccaaaaattgaatttgttttaagagatgcaataggaagagattggcaatgtggaactcttcaggttgatttaaatttaccaggaagacttggtgcatcttttgtagataaagatggatcaaaaaaagtaccagtgatgttacatagagctttattcggttctcttgaaagattcatcgggatattaattgaaaattattctggaaaacttcctttctggataagcccatcacaaatcatggtaataccagtttctgaagactttaacgattactctgttgaagttaacaaaaagcttatagcatctggtttaaattcagaagttgatttaaagaatcacaatttaaattataaaataagggaacattcgttatcaaaggttccaatattattaatttgcggaaaaaaagaagttgacagcaacagtgtaactattagacaattggattctacaaaacaagaaaatatggaactaaaaaaatttattaatcactatcaggctttaaataaagctccatcattataag

SEQ ID NO: 303252 - DNA, 760 bp, Unknown
  Bacterial polypeptide expressing nucleotide sequence isolated from the Sargasso Sea
attttttgtactgaggaacaaataacagaggaaagtataagtgttactaaactaatactagatatttataaaaatttaggatttaaaaaagtattcttgaaatattccgatagaccggaaaaaagagtcggtgatgacacgatttgggataaatcagaaaaagctttacttgcagcaattaaaaaaacaaaacttgaatatagtgtgaataaaggagagggagcattttatggaccaaaaattgagtttgttcttagagatgctattggaagagattggcaatgtgggaccttacaagttgatttaaatttaccggaaagattaggtgcaacatttgttgataaagatggaacaaaaaaaccaccggtcatgcttcacagagcgctatttggatctctagaaaggttcattggaattttaattgaaaattatgctgggaaacttccattctggctatcaccatcacaagttgttgtgttacctattgctgaggaacacaatgagtacgcaaaaaaaatatttgaagagctcttcaaagaaggtataaaatgcgaagtggatttgagaaaccaaaaaataaattataagattagagaacattctttagccaaagttccattacttttaatatgtggaaaaaaagaaatatctagcaagagtattacaataagaaaattgggatcagaaaaacaagaaactttaaaatttatcaaagctctacaaaacattaagttattaaataaactacctataaaataag

SEQ ID NO: 303253 - DNA, 1026 bp, Unknown
  Bacterial polypeptide expressing nucleotide sequence isolated from the Sargasso Sea
tcttcttgatgcaacaattcctataaataaagattccaaagttgtaatcatcacatcaaaagataaagaaggaattgaaataataagacattctttcgctcaccttattggtcatgcggttaaacaaatttactctgatattaaaatggctattgggcctgtaattgaagatggtttttattacgatattttctctgaatacagatttactcctgaagatttaataaaaatagaaaatagaattaataaattaataaaaacaaactatgacgttgaaattttacaagtttctaaagaagaggcaattaaaacttttaaagaaagagatgagacttttaaattaagaataattgaagaaattcctgaagaaggtctcatcaatttatacaagcacgaagaatacatcgacatgtgtagagggcctcacgtccctaacactagacatttgagacattttaaattacttaaattatcaggttcatattggagaggtaatagtgagaatgaatcattacagagaatatatggaactgcatgggcaaaagaaaaagaactcaatgactaccttacaagaattgaagaagcggaaaaaagagatcatagaaaacttggtaaaaaacattcactatttcatatacaagaagaatctccaggaatgattttttggcatccaaatggatggacaatctaccaagtactggaaaagtatataagagaaatactcaaaaaaaatgattatttagaaattaaaaccccacaagctgttgataaatctctctgggaaaaatccggtcattgggaaaaatttagagacgatatgttcactactgcatcagaaaatcgaacatatgcaattaaaccaatgaattgtccatgccatattcaagtatttaatcaaggtttaaaaagttataaggatttacctattcgacttgctgaatttggtttctgtcacagaaatgagccctcaggtgcactacacggatttatgagagtaagaaactttactcaagatgatgcgcatat

SEQ ID NO: 303254 - DNA, 967 bp, Unknown
  Bacterial polypeptide expressing nucleotide sequence isolated from the Sargasso Sea
aatgtctgagatcatcgacagagatgtcaaaacaaaacgtgaagtatgggacagagctaaagcaatagcacattttaaaaaaattggtgaaaagtataaagctgagattatagagagcattcctaaaaatgaagaattatcaatttaccaccatggagatacctggcacgatctatgtcgaggcccacatttagtttcatcaggaaaaataggtaaagcttttaaattaacaaaagtttctggtgcttattggagaggggactcaaataatgaaatgctacaaagaatttatggaacctgttggagttctaaaaaagaattagatgaatatttacacagattagaggaagcagaaaaaagagatcacagaaagctgggtaaagagatggatcttttccatttcagggaggaaagccccggatctgttttttggcatgaaaagggttggaatttatttcaacgacttgtagagtacatgagattaaagcaaagaaacgcaggatataaagagataagcacaccagaacttttagataaaagtctttgggaaaaatcaggacactgggagaaatttggtcatcacatgtttacatctgagaccccagatgaaaaagtttttgccgtgaaaccaatgaactgtcctggttgtgtccaagtgtttaatcaaggtcttaaaagttatagagatttaccattaaagctatctgaatttggaaaagttcatagatatgaaccatctggtgcactacatggacttttaagagtaagagcttttactcaggacgatgcacacatattttgtactgaagagcaaataacagatgaatgcattagtgttaccaaattaatattagatatttataaagatctgggatttgaaaaggtgttccttaaatattctgatagaccagaaaagagagttggtgatgataaggtctgggataaatcagaaaaagccctgctgaag

SEQ ID NO: 303255 - DNA, 859 bp, Unknown
  Bacterial polypeptide expressing nucleotide sequence isolated from the Sargasso Sea
agacatgatactgcccatattttagctatggcagttcaagaactattccctggaacacaagttacgattggtccagttatagaaaatggtttttattatgatttttcaagaaaagaaccttttactgaagatgatttaaaaaaaattgaagaaaaaatgaaacaaatagttgatcgtgatgaaaaaacaaaaagagaagtatgggataggaataaggctattaaacatttccaaaaaaaaggagaaacttataaagcagaattaattgctaacatccctaaagatgaggaagtatcaatttattttcatggtaaatggcatgatttatgtagaggacctcatttaagctctacaggaaaaattggaaaattttttaaattaacaaaagtttctggtgcctattggcgaggagactcaaaaaatgaaatgcttcagagaatatatggaactagttgggcgagtcagaaggatttagatagttatttaaaaaagattgaggaagctgaaaagagagatcatagaaagctaggaaaagaaatggacttatttcattttagagaagaaagtcctggatcagttttctggcatgtgaaaggttgggcattatttcaaaaattaataaactatataagggttaaacaagacaatgctggttacaaagaagtaaatacccctgaagttttagatagattattatgggaaaaatcaggtcattgggaaaaatatgcggagaatatgtatacatcgcaaacaccagatgaaaaaatatttgcaattaagccaatgaactgtcctggtcatattcaagtattcaatcaaggtttaaaaagttatagagatttacctttaagaataacag

SEQ ID NO: 303256 - DNA, 387 bp, Unknown
  Bacterial polypeptide expressing nucleotide sequence isolated from the Sargasso Sea
tgaaaatggtggttacaactttgttttcagtcctcatatagctaaatcagttttatgggaaaccagcggacacttagatttttacgctgacggcatgtatccacccatggaaatggatggagttacttactatccaaaaccaatgaattgtccttttcatgtaatggtttataagagttcacaacgaagctacagggatttacccacacgttattttgagcttggaactgtttatagatatgagctttcaggtgcagttcatgggcttctccgaagtagaggatttactcaagatgattcccatattttttgtacacgtgagcaggttcctgcagaactatcttctctcttagctttctgtctttctttgttaagagattttggttt

SEQ ID NO: 303257 - DNA, 954 bp, Unknown
  Bacterial polypeptide expressing nucleotide sequence isolated from the Sargasso Sea
tgcagctatctgtaggctatatgataatattaaattagatataggaccaccaactgaagatggattttactatgactttgatatgaatgagcgtctatcaactgatgactttgaaaaaattgaaaaaataatggaacaaattattcaagaagatcatccgtttacttgtgaagaagtttccagagataaagcgatagagatgttaaaaggacaaaaatacaagcttgaaagactgaacgacattccagatggagaacctattacattttatacatgtggtgaatttaccgatctttgcagaggacctcacatagcaagtactggtgaagttaaagcatttcaattagttaatgttgctggatcatattatcgtggaaaagaaactaatccaatgcttcaaagattatatggaacttcatttaaaactccaaaagatcttcgattgcatttaaagcaacttgatgaagcaaaaaaaagagaccatagaaagttagcaaaagaattagacttattttccatttcagaaaatgttggaccaggtcttgtcaattggcatcctaaaggctcaagaatacgctcactaatcgaatcattttggcaaaatgaacattatcgcaacggatatgaaatgctttacacaccacatgttggaaaatcatcattatgggaaacgtctgggcatctagacttttatcgtgaaggtatgtatgcctcgatggatgttgatggtcaggaatattatgcaaaaccaatgaactgtccttttcatattgaaatatataaatctaatctacgttcatatagagaactacctttaagatgggctgaacttggaacagtatatagatatgaaaaagcaggaacacttcacggactatttcgagttcgcggatttacaccagatgacgctcatatcttttgtacagcagaacaaattgaggatgaaatcaaaga

SEQ ID NO: 303258 - DNA, 856 bp, Unknown
  Bacterial polypeptide expressing nucleotide sequence isolated from the Sargasso Sea
agtttatcatcatggtgatacttggcatgatttgtgtcgaggtccacaccttttatcatctggtaaaattggaaaagcttttaagcttacaaaagttgcgggagcttattggcgtggggactctaaaaatgaaatgttgcagcggatctatggaaccggttgggcatcacaaaaagatttggatgattatttaaaaagaattcaagaagctgaaaaaagggatcataggaaacttggtagagaaatggacctatttcattttagagaagagagtcctggatccgttttctggcatgaaaagggatgggcattatttcaaaaattaattaattatatgaaaatgaaacaagatgcagcaggatataaggagataaatactccggaggtattagatagaagtttatgggaaaaatcaggtcattgggaaaaatttggcgcaaatatgtacacatcgaccactcctgatgaaaaagtatttgctattaaaccaatgaactgtccagggtgtgtagaagtttttaatcaaggtcttaaaagttataaagatctgccattaaaaatgtctgagtttggaaaggttcatcgttatgaaccttcaggtgcgcttcatggtttattaagagtaagagcatttacacaagatgatgcacatatattttgtactgaggatcaaataacaaaagaatgtttaacagtaacaaatcttatattagaaatttacaaagatcttgggtttgaaaatgttattctgaaatattctgatagaccagaattaagagttggagatgacagtgtgtgggacaaagcagaggcagcgttattagatgcagttaaagctacaaaactcgaatatgaa

SEQ ID NO: 303259 - DNA, 825 bp, Unknown
  Bacterial polypeptide expressing nucleotide sequence isolated from the Sargasso Sea
agataaaaaagtttttgctataaaacccatgaactgcccaggatgtgtgcaagtatttaatcaaggactaaaaagttatagagatttaccaattaaatattcagaatttggaaaggttcacagatatgaaccatcaggcgccttacatggtttattaagagtaagagcttttacgcaggacgatgctcatattttttgtacagaagaacagattactcaagaatgtttatcggtaactaatttaatattagaaatttataaagatcttgggtttgaaaatgttttactaaaatattcggatagacctgaaacaagagttggagatgataagatctgggataaatctgagtctgctttgttagaagcaataaaaaaatcaaaattaaaatatgaaattaataaaggagaaggtgccttttatggtccaaaaatagaatttgttttaagagatgctataggaagagattggcaatgtggaacattgcaagtagatttaaatcttccagcaagacttggtgcatcctatgtctcatctgatggatcaaaaaaaattcctgttatgttacatcgcgcactgtttggttctttagagagatttattggtattttaatagaacattatgcaggtaaattgcctttctggttatctccgataaaagcagttgtgctacctattgcttcagaatatgatagttatgcaaaaaaaatatttgaacaatgtattaaagcaggtataaacaccgaagtggatttaaaaaatcaaaaaataaactataaaattagagaacattctctttctaaaattccattattattaatttgcgg

SEQ ID NO: 303260 - DNA, 532 bp, Unknown
  Bacterial polypeptide expressing nucleotide sequence isolated from the Sargasso Sea
atgcctacaataacattaccagacggaaacaatataaatttttcaaaaaaagttactggagtagaggtagctgagaaaataagtaagtctttagctaaacaagcaatggttataagcgttgatggtgaacttaaagatttagattatttaatagataaagattgttcagtaaaaatttttacttctaaaaatccagaagggttggaaacaattagacatgacacagctcatattttggcaatggctgttcaggaattgtttccaggtacacaggttacaattggtccagttattgaaaatggattttattatgactttgctagaaaagaatcattcactgaagatgatttagtaaaaattgaaaataaaatgaaagaaattgttgatagagatgaaattaccaagagagaagtttgggagagaaataaagctattgatcatttcaaaaaaaaaggtgaaatttataaatctgaattaattaaagctatcccagagaaagaagatgtatcaatttattttcatggtgatggca

SEQ ID NO: 303261 - DNA, 652 bp, Unknown
  Bacterial polypeptide expressing nucleotide sequence isolated from the Sargasso Sea
aatgccccaaattcaattattagacggaaaaaaaatagatttcgaaaaatttattactggttttgaattaaccaaaaaaattagcaagtcactagaaaaaattgccttaataatggaagttgacggtgacttgaaagacctaagtcataaaattacaaaggatgctaaagttagaattatcactcccaaagataaagaaggtttagaagttataaggcatgatgcagctcatataatggcaatggctgttcaagaattatttccaggcactcaagtcactataggaccagttatagaaaatggtttctactacgattttgccagaaaagaacctttcactagtgatgacttaaacaagattgaaaaaaaaatgtcagaaataattgatagagatgtaaaaactaaaagagaagtttggaaaagaaaagaggctataaaacattttaaaaaaattggagaaaagtacaaagcagaaattatagagagtatacctgaaaatgaggaattatctgtttatcatcatggtgatacctggcacgatttatgtaggggaccacatttagcttcatctggaaaaattggtaaagcattcaaattaacaaaggtatcaggagcatattggagaggtgactccaataatgaaatgcttcaa

SEQ ID NO: 303262 - DNA, 895 bp, Unknown
  Bacterial polypeptide expressing nucleotide sequence isolated from the Sargasso Sea
acccaagtgactatagttccggttatagaaaatggtttttattatgacttcgcaagaaaagaaccttttactagcgatgacttaaaaaaaattgaaaaaaaaatgtctgagataattgatagagacgttaaaacaaaaagagaggtatgggaaagaaaaaaggctattgagcattttgaaaagattggtgaaaagtataaagcagaaatcatcgaaagcattccaaaaaatgaagagctttctatataccatcacggtgatacttggcacgatttgtgcagaggtcctcatttgtcatcatcagggaaaattgggaaagcttttaaattaacaaaggtatctggtgcctattggagaggggactcaaataatgaaatgcttcaaagaatttacggaacatgctggagtaataaaaaagatctagatgattatttacatagacttgaggaggctgaaaaaagagatcatagaaaattaggaaaagaaatggatttattccattttagggaagagagcccaggatctgttttctggcatgaaagaggttggaatttatttcaaagattaattgattatatgagagcaaagcaaagaattgcaggttataaggaaattaatactccagagttactcgataagtccctatgggaaaagtcaggtcactgggaaaaatttggtgaacatatgtatacatcagaaacaccagacaaaaaagtttttgcagtaaaaccgatgaattgtccaggctgcgtccaaatatttaatcaaggtttaaaaagttatagagatttacctttaaagttatctgaatttggaaaagttcacagatacgaaccttcaggagctttacatggattgctcagagtaagagcattcacacaagatgatgcacata

SEQ ID NO: 303263 - DNA, 858 bp, Unknown
  Bacterial polypeptide expressing nucleotide sequence isolated from the Sargasso Sea
aaacttataaagcagaaatcatcgaaagcattcctgaaagcgaggaactttcagtatatcatcatggtgatacatggtatgatctttgtaggggcccacatttatcttcatcaagtaaaattggaaaagcttttaaattaacaaaagtttcaggagcatattggcgtggagactcaaaaaatgaaatgcttcaaagaatatatggcacttgctggagttcaaaaaaagatttagatgaatatttaaatagattagaagaggcagaaaaaagagatcatagaaaattagggaaggaaatggatcttttccactttagagaggaaagtccaggatccgtattttggcatcaaaaaggttggaatttatttcaaaaattaatctcgtacatgagagcaaaacaagataaggcaggttataacgaaataaatacacctgaaattttagataggtctctttgggaaaagtctggacactgggataaatttggagacaacatgtatacatctacaactccagatgaaaaggtatttgcaataaaaccaatgaactgccccggatgtgttcaagtctttaatcaaggtttaaaaagctacagagatttgcctttaaagatgtctgagtttggaaaagttcatagatatgagccctcaggatctttacatggtttattaagagtaagagcttttacgcaagatgatgcacatatattttgtactgacaatcaaattacccaagagtgtctttctgtcactaatttaattttagaaatttataaagacttaggatttgagaacataatactgaaatattctgatagaccagatgtaagagtgggtgaagacccatgtttgggataaa

SEQ ID NO: 303264 - DNA, 801 bp, Unknown
  Bacterial polypeptide expressing nucleotide sequence isolated from the Sargasso Sea
tggaaaacattttaaattaactaaagttgcgggagcatactggtgtggagattctaacaatgtaatgcttcaaagaatttatgggacttcatggagctctaaaaaagaattagataattatttaaaaatgattgaagaggctgaaaaaagagatcatagaaaaattggtaaagagatggatttatttcattttagagaagagagtccaggaagtgttttttggcatgatagaggttggagattatttcaaaagctaatagactatatgagagagaaacaaaatactgctggttataaggagattaatactccagagattttagatagatcgctatgggagaagtctgggcattgggataagtttggagagcacatgtatactacgcagactcctgatgaaaaagtttttgctataaagccaatgaattgtcctggatgtgttcaaatttttaatcaaggactaaagagttatagagatttacctcttaaactttcagaatttggaaaagttcataggtacgagccatccggcgcattacatggattaatgagagtaagggccttcacccaagatgatgcccatattttttgcacagaagatcaaattacacaagaaactttatctgttactaatttaatactaaacatttataaggatcttggattcgaaaaagttatattgaaatattctgatagaccagaggcaagagtaggtgatgataaaatttgggataaggcagaagctgccttgttgcaagcaattaaatcatcaaaattagaatattcagtcaacaagggtga

SEQ ID NO: 303265 - DNA, 813 bp, Unknown
  Bacterial polypeptide expressing nucleotide sequence isolated from the Sargasso Sea
cgaaggttttaaacttatcaagctagctggagcatattggagaggcgattcacggaacgatatgctgcaaagggtttatgggacagcttggcgagataaaaaagagttagaagcatacctgctccaattagacgaagcagagaagcgtgatcaccgtcggcttggaagagaattagatttattccattttcaggaagaggcgcccggggctgtcttttggcaccacaaggggtggaccctttttagattattgatcgattacatgcgcaaacggcaggaggatgctggttattctgaaattagcacccctggtgttatggatcgcagcttgtgggaaacttctgggcattgggagacattccgtgagcatatgtacactacccaaaccgaggataatcgggtgtttgcgctaaaaccgatgaactgtccggggggaatacaggtatttcgtcaaggtattacaagttacaaagatctcccaaaaaggatagcggaatttggaaaggtaaatagatacgaaccatcaggcgcgctgcacggtcttatgagggttagagaatttacacaagatgacgcacatatcttttgtactgaggaacaaatcgatgaagagtgtagaattgttgttgaactgattttggatatatatcgcgattttggattcgaagatgtagcgataaaattttctgatcggcctgaaaaccggattggtagtgacgcgatttgggacaggctggaagcagctttgaaaggtgcccttgatgatatggatcgcccatataccttgaatccgggagagggtgctttttacgg

SEQ ID NO: 303266 - DNA, 889 bp, Unknown
  Bacterial polypeptide expressing nucleotide sequence isolated from the Sargasso Sea
attttattatgacttcgcaagaaaagaatcatttactagcgatgatttaaaaaaaattgaaaaaaagatgtctgaaataattgatcgcgatgtaaaaactaagagagaagtttggaaaagagataaagcaatagaacactttaaaaaaattggagaaaaatataaagctgagattattgagagcattcctcaaaatgaagaattatcagtatatcatcatggtgacacgtggcacgatttatgtagaggtccgcatttagcttcctcgggtaaaattggcaaagcttttaaactgacaaaagtatcgggagcatactggcgaggagactctaataatgaaatgcttcaaagaatttacggaacatgttggagttccaaaaaagaattagatgattacttgcaccgtttagaggaggctgaaaaaagagatcatagaaagcttggaaaagaaatggatttatttcattttagagaggaaagtcctggctcagtcttctggcatgaaaaaggttggctgctatttcaaagattagttgaatatatgagaatgaaacagagattagccgggtataaagaaattaatactcctgagcttttagataaaactttatgggaaaagtcgggtcattgggaaaaatttggtgaacatatgtttacctctgagacgccagatgaaaaaacttttgcggttaaacctatgaattgtcccggatgtgttcaggtattcaatcaaggtttaaaaagttatagagatttaccattaaagctctcagaatttggaaaagttcataggtacgaaccatctggagcattgcacggccttctaagagttagagcttttacccaagacgacgctcatattttttgtactgaagatcaaattacagaa

SEQ ID NO: 303267 - DNA, 907 bp, Unknown
  Bacterial polypeptide expressing nucleotide sequence isolated from the Sargasso Sea
aaatggtttttattatgattttgctagaaaggaaccatttacagaagatgatttaaaaaaaattgagaaaaaaatgtcagaaatcattgatagagatgtaaaaaccagaagagaagtatgggaaagaagtaaagctatagcacatttcaagaaaattggagaaaagtacaaggctgaaataattgaaagcatacctgaaaacgaggaactttcagtataccatcacggtgatacttggcgtgatttgtgtagaggcccccatttatcctcatctagcaaaattggaaaagcttttaagttgacgaaagtttctggtgcttattggagaggcgattcaaaaaatgaaatgttacaaagaatctatggaacatgttggagttcgaaaaaggaattagatgattacctaaacaagttagaagaagcagagaaaagagatcatagaaagctaggtaaagagatggacttgtttcattttagagaggaaagtcctggctctgttttttggcatgaaaaagggtggaacctattccaaaggcttgttgagtatatgagatttaaacaaagaaatgcaggatatcgtgaaattaatacccctgaattattagataaaagtctttgggaaaaatctggtcattgggataaatttggtgatctgatgtttacatcagaaacacctgacgaaaaaacttttgcaattaaacctatgaattgcccaggatgtattcaagtatttaatcagggccttaaaagttatagagatttaccattaaaactttctgaatttggaaaggttcatagatatgaaccctctggtgcactacatggtcttttaagggttagagctttcacgcaggatgatgctcatattttttgtacagaggagcaaataacagaagaatgtataatt

SEQ ID NO: 303268 - DNA, 703 bp, Unknown
  Bacterial polypeptide expressing nucleotide sequence isolated from the Sargasso Sea
catcgccatcgatcgtcccttcacgccggaagacatggcggccatcgagaagcgcatggccgagctgatcgacaaggactatgacgtcatcaagaagatgacgccgcgcgccgacgtcatcgagctgttcaagtcccgtggcgaggagtacaagctgcgcctgatcgacgacatgcccgatgaaacggccatgggtctgtacttccacgaagaatacgtcgacatgtgccgtggcccgcacgtgccgaacacgcgcttcctcaaggcgttcaagctgacccggatttccggtgcctactggcgcggtgactcgaagaacgagcagctgcagcgcgtctacggcaccgcctgggcggacaagaagcagctggctgcctatatccagcgcatcgaagaagccgagaagcgcgatcaccgtcgtatcggcaagcagctggacctgttccacctgcaggaagaagcgccgggcatggtgttctggcacgccaatggctggactgtctatcaggtgctggagcagtacatgcgccaggtgcagcgcgagaacggctaccaggagatcaagacgccgcaggtggtcgatcgcattctctgggagcgttccggtcactggtccaactacgccgagaacatgttcaccacggcctcgggaaatcgcgactacgcggtcaagccgatgaactgcccgtgccacgtgcaggtg

SEQ ID NO: 303269 - DNA, 688 bp, Unknown
  Bacterial polypeptide expressing nucleotide sequence isolated from the Sargasso Sea
gaaatacagctattagatggtaaaaaaatttcttttgtaaaacctattagcggttttgaacttgtaaaaaaaattagtaagtctttagaaaaagatgctcttataatggaagtcgacggcattttaaaagaccttagtcatgagatcaaaaaagactcaaaggttagaataattactcaaaaagacaaagaaggtcttgaagttataagacatgatgcagctcatataatggcaatggcagttcaagaattgtatcctggtacgcaagtaactataggtccggtaatagaaaatggtttttactatgactttgcaagaaaagaaccttttacgaatgaggatctatctaaaattgaggcaaaaatgtcagaaataattgatagagatgtaaaaactaaaagagaagtttggaaaagagataaagctatttcacattttaaaaagataggagaaaaatataaagcagagataatagaaagcatccctgaaaatgaagatctttctgtataccatcatggagacacttggtatgatttgtgtagaggaccacaccttgcatcatctagtaaaataggcaaagcttttaaattaactaaagtttcaggcgcttactggagaggcgactccaataacgaaatgttgcagaggatttacggaacttgctggagttcaaaaaaagaattagacg

SEQ ID NO: 303270 - DNA, 703 bp, Unknown
  Bacterial polypeptide expressing nucleotide sequence isolated from the Sargasso Sea
ttggatatttacaaagacttgggatttgaaaaagtattccttaagtattctgacagaccagaaaaaagagttggcgatgataaaatctgggataagtcagaaacagctttgcttgcagcaattaaaaaaacaaaattagaatatactataaacaaaggagagggagctttttacggtcctaaaatagaatttgttttgagggatgctataggaagggactggcagtgtggaactttgcaagtggatttgaatttaccaggaagacttggtgcaacttttgtagataaagatggaaccaaaaaagtacctgtaatgttacatagagctcttttcggatctttagagagatttataggtataattattgaaaactatgcgggcaaacttccattttggctatcaccttcacaagttgttgtattgcccatagctgaagaacacaatgactatgcaaaaaaaatatttaaagaactctttaaagagggtataaaatgtgaagtggatttaagaaatcaaaaaattaattacaaaataagagaacattctttatcaaaagttcctatactattaatttgtggaggaaaagaaataaaaaataaaagtgttagtatacgtaagcttggatctgaaaaacaagaagttaaaaaatttgatatagctctcaaagaatttaaatcatcaaacaacttaccgattaaataag

SEQ ID NO: 303271 - DNA, 697 bp, Unknown
  Bacterial polypeptide expressing nucleotide sequence isolated from the Sargasso Sea
aatgcctcaaattcaacttttagacggtaaaaaaatttcttttgcaaaatcaattagtggttttgaactttcaaaaaaaatcagtaagtcacttgagaagtctgctttgataatggaagtagacggcaagcttaaagatctaagtcatgaaattactaaagactctaacgtaagaattattacatcaaaagataaagagggtcttgaggttatcaggcacgatgcggcacatataatggctatggcagttcaggagttatttcctggtacgcaggtaacgattggaccagttatagaaaatggtttttactacgactttgcaaggaaagaacctttcacgagtgatgatttaacaaatattgaaaaaaaaatgtctgaaatcattgacagggatgtaaaaacaagaagagaggtctggaatagggataaagctattaaccatttcaaaaaaattggtgaaaagtataaggccgaaattatagaaagcattccaaaaaatgaggaattatctgtttatcaccacggcgatacttggtatgatttatgtcgaggacctcatctaagttcatcaagcaaaattggaaaagcatttaagttaactaaggtttcaggagcatattggaggggagactcaaacaatgagatgttacaaagaatttatggaacttgttggagttccaagaaagaattagatgat

SEQ ID NO: 303272 - DNA, 592 bp, Unknown
  Bacterial polypeptide expressing nucleotide sequence isolated from the Sargasso Sea
atgccaaatattactctaccagacggaaaacaattaagttttagtgaaagtgtaactggttttcagcttgctgaaaaaataagtaaatcattatcaaagcaagcattaattattagtgtagatggtcagcttaaagacttagattttaaaattgaaaaagattctaaagtaaagatatttacatcaaaagataaagaagggcttgaaacaattaggcatgataccgcccatattttagcaatggcagtccaagaactttttcctggaacgcaagtaacaataggtccagtgattgaagatggtttttattatgactttgcaaggaaagagccattcacgcaagaagatttagaaaagatagagaacaaaatgaaagatattgttgataggaatgaaaaaacttatagagaagtttggaagagaaatgatgctataaaacatttcaaaaataatggagaacattacaaagccgaaataattaattctattcctgaaggtgaagaggtatctatatattttcatggaaaatggcatgatttgtgtagaggtccgcacttaagttctacaggcaaaattggaaagtattttaaat

SEQ ID NO: 303273 - DNA, 939 bp, Unknown
  Bacterial polypeptide expressing nucleotide sequence isolated from the Sargasso Sea
ttatgattttgcaatggacccaattactgaatctgaccttaaaccgattcaaaagaagatgcaggaactagcaagaaagaattttacagtcgaaagaatagaattaagcgatgaagaattgcaacaacattttgctgataatccttacaaattagaaataattaatgataaaatcgaagatggaggaggatcaaccatttacaaacaaggtgaatggtatgacctgtgccttggacctcacgtaccaaatacttctaggttgatgttttgtaaactaaccagtgtttcttctgcttattggagaggagaccaggacagagaacaattggttagaatttatgggattgtcgaaccgacaaaagatgcgttaaaatcaacactacatcgaatggaagaagcaaaaaagagagatcatcgtaagttgggtaaggatttacaattattccatatcgatgaagaggttgggcaaggactcattctctggactccgagaggttctatcattcgtcaagaattacaagatttcatcagtagccatcttagaaggcaggggtattctcaggtctttaccccacatataggcaagttagacctataccgaacttctggtcatttcccatattatcaagattcacagtatcctccattggttgaaaaagaccttatgaagaagttgtcagatgatggatgttcttgttcagaattatctaacatgatgaaaagcggagatattgacggatatatgctcaaaccgatgaactgtccacatcacgtcaaaatttatgcttcacaagcacgttcatatcgagacctccctctaagacttgcagaatttggaaccgtataccgatgggaacaatctggagaaatatctggaatgacaagagttagaggttttactcaagatgatgcacacctgtttgttactgaagaccaaat

SEQ ID NO: 303274 - DNA, 841 bp, Unknown
  Bacterial polypeptide expressing nucleotide sequence isolated from the Sargasso Sea
ggaaccgtctataggtacgagagggcgggaacgctgcacggccttatgaggattcggggtttcacccaagacgacgcccatattttcaccactgaagagggccttgcagatgagatagcacagctgttggaatttgttatatctgttctagaagcgttcgggttcgaggacttttcctttaatctatctactcgagattatgagaaatctgttggtgacgatcagatatgggaccttgctactgcggccctagaaaaagcgctcgatacgcacggactaccttttgagaccaaagagggagacgcagcattctatgggcccaaaatagatatcgacgtatcggatgcaatcggccgttcatggcagttatcaactattcagcttgactttaatctccctgagcgatttaacctaaggtacataaactcctctggagagcggaagaggccggttatgattcacagggctttaatgggatccatcgaaagattcttcggtgtcctccttgaacattatgctggagctttccctgcttggttggcaccaattcaaatagcggtccttcctgtcgcaaatgaacatggagactacgcctcgagtatccttactcaattggaagaggttggctttcgatgtgagtttcaccgtgccgacaatccacttgggaagcggattagagatgtgaagactcaaaagattccatatgtgcttgtggcgggtagtgatgatgtggccaacgggacagttggcgttaatccgagggggagcgaagtggaacgagacgtgccgatatctgaatttatagaacgcctgcaaggtgaggttgaaaaccgtttatgaa

SEQ ID NO: 303275 - DNA, 937 bp, Unknown
  Bacterial polypeptide expressing nucleotide sequence isolated from the Sargasso Sea
tactgctgatccttctgagggtgtcgaaggggataatatatcaatttacaagaatgataactttgaagatctctgtagaggacctcatgttccaagtacaagccaaataatccattttaagttaactaaattagctggggcttattggcgtgggatagaaacaaatcctcaacttcaaagaatttatggaactgcatggttctctaaagaagatttagataattatttagcacgtcaaaaagaagctgaaaaaagagatcatagaaaactaggtaatgaattagatttatttgttaatactgacgaaatagggccaggtcagtttctatggaaacctaaagggtcaatccttagacaaaatattgaagattattcaaaaaaagctcatgcagataatggttatgagtatgcatatactccacacattggacgttcagtcctttgggaaacttcgggtcatcttgattattacaaagaaggaatgtacccaccattgaaaaatgaaggtaatgaagatgatgaatactacttaaagccaatgaattgcccttttcatattttaatttataaaagtgatatacgatcatataaagaattaccattacgtttttttgaactcggttctgtttatagatatgaaaagactggagtacttcatggactgttgagagccagaggatttactcaagatgatgcacatattttttgtactagtgaccaaattgaagaagagatcctaaatctcttaacattttcaataaaactactaaatgcctttggatttgattcaattgaagctgacttatcaactagacccgaaaaatcaattggaaatgaagacgactgggttaaggcaacaaatagtttagcttcagcattagacaatcagaatatatcttatgtaaatgctcatggagagggagctttttatggacca

SEQ ID NO: 303276 - DNA, 433 bp, Unknown
  Bacterial polypeptide expressing nucleotide sequence isolated from the Sargasso Sea
atgagtgaaaagataacaattgcatttccagatggaaataaaaaggaagttgaaaaaggcatcagtggtcttgaattggcaacgcaaatttctctatctcttgccaaagaatcagtcgctataaaaattaataatgagataaaagatattagtttacctatcaatgctgatgcatctgtatcaattttaaaaagagatagcgaggaagcacttgaattaattcgacatgattgtgctcatgtaatggcagaagctgtccaagaattattccctggaacacaagttacaattggtccagcaattgaaaatggtttctattatgattttgcaagagatgaaccttttactgttgctgatcttccaaaaattgaaaagaagatgcatgatatcattcaaagaaataaaaattttataagagaaagtatggtctaaa

SEQ ID NO: 303277 - DNA, 967 bp, Unknown
  Bacterial polypeptide expressing nucleotide sequence isolated from the Sargasso Sea
cattcctttgctcaccctattggtcatgcagttaaacaaatttactctgatataaaaatggcgattgggcctgtaattgaagatggtttttattacgatattttttctgaatacagatttactcctgaagatttaacaaaaatcgaaaatagaattaataaattaataaaaacaaactatgacgttgaaattctacaagtttctaaagaagaagcaattaaaacttttaaagaaagagatgagacttttaaattacgaataattgaagaaattcgtgaagaaggtcttatcaatttatacaaacacgaagaatatatcgatatgtgtcgagggcctcacgtacccaatactagacatttgagacactttaaattactaaaattatcaggttcatactggagagggaatagtgagaatgaatcattacagagaatatatggaactgcatgggcaaaagaaaaagaactaaatgactacttaataagaattgaagaggctgaaaaaagggatcatagaaaacttggtaaaaaacattcactatttcatatacaagaagaatctccaggaatgattttttggcatccaaatggatggacaatctaccaggtactggaaaagtatataagagaaatactcaaaaaaaatgattatttagaaattaaaaccccacaagctgttgataaatccctttgggaaaaatctggtcattgggaaaaatttagagatgatatgttcactactgcatcagaaaatcgaacttatgcaattaaaccaatgaattgtccatgccatattcaagtatttaatcaaggtttaaaaagttataaggatttacctattcgtcttgctgaatttggttcttgtcacagaaatgagccctccggtgcactacacggtttaatgagagtaagaaactttacgcaagatgatgcccacatattctggcacagaagagcaaatcaagaag

SEQ ID NO: 303278 - DNA, 643 bp, Unknown
  Bacterial polypeptide expressing nucleotide sequence isolated from the Sargasso Sea
tgaattaagagttggagataatagtgtatgggataaagcggaggcggcattattagaagcagttaaagctactaaattagaatatactattaataaaggtgagggtgcgttttatggacctaaaatcgagtttgttttaagagatgctattggaagagattggcaatgtggaactttacaggttgattttaatttacctggaagattaggtgcctcatatgtagataaagatggaactaaaaaagttccagtgatgttacatagggcattatttggttcacttgagaggtttattggaattttaatcgagaattatgcaggaaaatttcctttttggatctcacctttacaaacagttataatcccaatttcagaagattttgaagattatgcaaaaaaagtttcaaacaaaataaaagaagttggtataagctgcatagttgatttaaaaaatcacaatttgaattataaaatcagagaacattctcttgcaaaagtacctattttattaatttgtggtaaaaaagaagttgacagtaactcagtaaccattagaagattggattctgataaacaagaaaatatgcaacttaataaatttttaaaaacattttctgctttaaacaaagtatcttcaaattaa

SEQ ID NO: 303279 - DNA, 945 bp, Unknown
  Bacterial polypeptide expressing nucleotide sequence isolated from the Sargasso Sea
aagagatcatagaaagttaggaaaagaaatggacttatttcattttagggaagaaagccctggatctgtattttggcatgaaaaaggatggaacctttttcagaaattaatctcttatatgcgaactaaacaagatcacgctggatataaagaaataaatacaccggaaattcttgatcgttcattatgggaaaaatctggtcattgggaaaaatttggtgcaaacatgtatacctctacaactcctgatgaaaaagtttttgcaataaaaccaatgaactgtccaggatgtgttcaagtgtttaatcaaggactaaaaagttacagagacttaccattaaaaatgtcggaatttggaaaagttcatagatatgaaccttctggtgcattacatggattgttaagggtaagagcatttacccaagatgatgcacatatattttgcaccgaagagcaaattactcaagaatgtctatcagttacaaatttaattttggaaatttataaagaccttggatttgaaaatgtaatattaaaatattcagaccgaccagatctgagagtcggagatgacgctgtatgggacaaatcagaagctgctctcttagaggcaattaaagaaacaaaactagaatacactataaacaaaggtgagggtgctttttatggtccaaaaattgagtttgttttaagggatgcaattggaagagattggcagtgtggaaccttacaagtagatttaaatttacctggtagattaggagccagttatgttgaaaaagatggatcaaagaaaatacctgttatgttgcatagagcattgttcggttccttggagagatttatcggtatcttaattgaaaattattcaggtaaattacctttttggctcacaccattacaagtagttgtaataccaatttcaagtgactttgatgattattc

SEQ ID NO: 303280 - DNA, 625 bp, Unknown
  Bacterial polypeptide expressing nucleotide sequence isolated from the Sargasso Sea
aatgcctataataaccttaccagatggaaaaaacctaaactttcctaaaaaagttacaggattggagattgcagagaaaattagtaaatcactagctaagcaggcactaatattaagtgttgatggtgaattaaaagatttatatttttcaattgaaaaggatagctcggtaaagatttttacatcaaaggatccagagggactggaagttattagacatgataccgcacatattatggcgatggctgttcaggaattatatcctggtacacaagtaactatcggaccagttattgaaaatggtttttattatgactttgctcgaaaagaaccttttactgaagatgatcttataaaaattgagaaacgaatgtcgcaaataattgacaaagatgtcaaaacaagaagagaagtttgggaaagggaaaaagcaataaatcattttaaaaaaattggtgaaaaatataaagctgaaataatcgagagtattcctgaaaatgaggaactatctgtctatcaccacggtgatacttggtatgatttatgtagaggtccacatttattatcatctggtaaaattggtaaagctttcaaattacaaaaagtgcaggcgcttattggcggg

SEQ ID NO: 303281 - DNA, 681 bp, Unknown
  Bacterial polypeptide expressing nucleotide sequence isolated from the Sargasso Sea
aatgattgaaatcactcttccggataattcaaaaaaacaatttaataattcagtctcagccattgaagtggctaaatctataggatctggcttagccaaagctacagttgcggcaaaagttaatggaaaactaatcgatgcaaccgacttaatagaaaatgattgttctcttgaaataataagagctcaggatcaagaaggtttagaaattattagacatagctgtgctcatttatttggccatgctttgaaacaattgtttcccaaagcaaaaatggccatcggtccagtcattaaaaatggattttattatgatgtggatttagaaaattcgcttacacaagaggatttagaaaagattgaagctcgaatgagaaaattggctttaaccagttatagtgtaagaaaagaagttgtaccaaaaaaagttgcagaggaagtttttaaaaaaagaaaagaaagctataagttagaaatcttaaaagatattgatgataaagaaacagttggactttatcatcatgaagaatatatagacatgtgtaggggacctcacgtcgattccatgagacatattaaagcttttaagctttctcatgttgctggagcttattggcgtggcgactcaaaaaataaaatgctgcaaagagtttatggaacactgtggaattcagataaaga

SEQ ID NO: 303282 - DNA, 922 bp, Unknown
  Bacterial polypeptide expressing nucleotide sequence isolated from the Sargasso Sea
atgaaagttgctggtgtttactggcggggtgattcatctaatacaatgctaacaagaatttatggaacggcctgggcaacagaaaaagaacttgagcaacaccttttacaaattgaagaagcagaaaaaagagatcaccgaaaactaggtagagaaatggatttatttcattttcaggaagaggctcctggagcggttttttggcatccaaagggttggacattattccaatcgttaataaattatatgcgaaacagacaagaaaaggcaggttacgtagaaactaatacaccagacatgatggataagtctctatgggaaacttctggtcactgggacaaatttagtgacatgatgtttaggaccgaggctaaagacgataaaatttacgcaatcaaaccaatgaattgcccaggtgctgtagaaatttttaaacaaggattaaaaagttatagagacttaccatttctattgtctgaatttggaaaagtacatcgttatgaaccatcgggtgctcttcatggattaatgagggtaagagcattcacacaagatgatgcacatatattttgtacagaagatcaaattacacaagaaagtaaaacggtatgtgatttgatacttagtatctataaggattttggttttgataatgttagaattaaattttctgaccgtcctgaaaaacgcgtaggagatgatgttatttgggataaagctgaggctgcattaatgcaagccatggaagcgacaggtcttgagtacacactcaatcctggagaaggcgcattttatggcccaaaattagagtttgttttacgtgatgcaataggcagagactggcaatgcggaactctgcaagtagatttaaatttacctgggagattgggagctacttatatggagaagatggtaataaaag

SEQ ID NO: 303283 - DNA, 865 bp, Unknown
  Bacterial polypeptide expressing nucleotide sequence isolated from the Sargasso Sea
aatgcctattattacactaccagatggaaataatattgaattcccaaatgaggttactggcttagatattgctgaaaaaataagtaagtcattaatgaaacaagcattgataatgagtgtcgatggtgagcttaaagatttatattttccgattaaaaaagattgttcggtaaaaatttttacatcgaaagaccctgagggacttgaggttattagacatgataccgctcacatcatggccatggctgtccaagaattatatcctggcacacaagtaactattggaccagtaattgaaaatggtttttactatgattttgctcgtaaagaaccctttacagaggatgatctagaaaaaatagaaaaaaaaatgtcagaaataattgacaaggatgtaaaaacaaaaagagaggtttggaaaagagataaggcaataaatcatttcaaaaaaattggtgaaaaatataaagcagaaataatagagagtatcccagaaaatgaggaactgactatttaccatcatggtgatacttggcatgacttgtgtagaggtccacatttagtttcttcaggaaaaattggcaaggctttcaagcttacaaaagttgctggagcatattggcgaggagactcaaaaaatgaaatgttgcaaagaatttatggaactggttgggcatctcaaaaagatttggatgattatttaaaaagaattgatgaagctgagaaaagggatcataggaaacttggtaaagaaatggatttgtttcattttagagaagagagcccaggatctgttttttggcatgaaaagggttgggcattatttcaaaaattaattaattacatgccgggctcgccaagatga

SEQ ID NO: 303284 - DNA, 721 bp, Unknown
  Bacterial polypeptide expressing nucleotide sequence isolated from the Sargasso Sea
atgataaaaataactcttccagataagtcaattaaagaatttgaatccaatattgatggaaaacaaatagctgaatctataagtaatagcttggcaaaaagtgctgtgtgtatggatgttaatggagaattaaaagatttatcttatgtcattaaagaagactccaaatgtaaaatttatacaaaacaagaccaatatgcattagatacattaagacattccacagcccatgttcttgctcaagcggtactaaatctttttcctggaactgaattcgcagtaggaccgcctatagaagatggcttttattatgattttttgtttaaagaaaatattaaagaaagtgacctttcatcaattgaaaatgaaatgagaagaattaataaagcaaatcaactttttattcgtgaagaaatatcgattaatgatgcaaaaaataagttcttaaaacagcaatttaagcaggaattaatttcttctgctgatccttctgagggtgtcgagggggataatatatcaatttacaagaatgataacttcgtagatctttgtagaggacctcatgtttcaagtacaagccaaataaaccattttaagttaactaaattagctggggcttattggcgtgggatagaaacaaatcctcaacttcaaagaatttatggtactgcatggttctctaaagaagatttagataattatttagcacgtcaaaaagaag

SEQ ID NO: 303285 - DNA, 730 bp, Unknown
  Bacterial polypeptide expressing nucleotide sequence isolated from the Sargasso Sea
gaatgcttatcagtaacaaatttaattttagaaatttataaggatttaggttttaaagatgtaatacttaagtattctgataggccaaatttaagagttggtgcagatgaaatttgggataaagccgaagatgctttgctacaagctataaacagttctaagttagaatatactataaataaaggtgaaggtgcattttatggtccaaaaatagaatatgttttaagagatgcaattggtcgagactggcaatgtggaactttacaagttgatttaaatttaccaggaagactaggtgcttcttatgtagataaagatggatcaaaaaaaattcctgtgatgctacatagagctttatttggttcattagaaagatttattggtattttaattgaacattattctggaaaacttcctttttggatatctcctttgcaaactgtagttatcccagtttctaacgattttgatgactatgcaatgaaagttcacaataaaattataaaatcaggaataacaagccaagtagatctaaaaaatcacaatttaaactacaaaataagagaacattcactatctaaaataccattacttttaatttgtggaaaaaaagaagttgacagcaacacggtaaccattagaagattggattctaataaacaagagaatatggaattaaaagaatttctaaaaaaattttctgctttcagcaaagcaccttctatctaag

SEQ ID NO: 303286 - DNA, 811 bp, Unknown
  Bacterial polypeptide expressing nucleotide sequence isolated from the Sargasso Sea
aaaataagtaaatctctagcaaagcaagctttaataatgagtgttaacggagagctaaaagacttatattttactattgataaagatagttctgtaaaaatttataccgcaaaagatcctgaaggattagaagttattaggcatgatacagcacatattatggctatggctgttcaagaattatatccaggaacacaagtgactattggaccagtaatagaaaatgggttttattatgactttgctagaaaagaaccttttacaaaagatgatcttaaaaatattgaaaaaagaatgtcagagataattgacaaagatgtaaaaacaagaagagaagtttgggaaagagaaaaagcaattagtcattttaaaaaaattggtgaaaaatataaagctgaaataattgaaagtattccacaaaatgaaaaacttaccgtttatcatcatggcaatacttggcatgatttgtgcagaggtccacatttagagtcctctggcaaaattggtaaagcttttaaattgacaaaagtttcaggagcatattggcgaggagactctaagaatgaaatgctacaaagaatttatggtacaggctgggcaagccaaaaggatttagatgtatatcttaaaagaatagaagaagctgaaaaaagagatcatagaaaattaggaaaagaaatggatttatttcattttagagaagaaagtccaggttcagttttttggcatcaaaaaggatggaacctttttcaaaaattagtttcttatatgagaatgaaacaagatcatgcgggttatgaagaaataaata

SEQ ID NO: 303287 - DNA, 852 bp, Unknown
  Bacterial polypeptide expressing nucleotide sequence isolated from the Sargasso Sea
catgcccaatataaaattaccagatggtaaaaagatcccattttcaaaaagcattaacggctttgagcttgcaaaaaaaataagcaagtctttagcaaaagatgcttgcgttatgagtgttgatggaaagcttaaagatttagatttttcaatagataaagatgttcaagttaagataatcacacaaaaggacaaagaaggattagaagtaattaggcacgatgccgctcatattttggctatgtctgtacaagaattatttccaggcacacaggttataattggtccagttattgaaaacggtttttattatgatttttccagaaaagagtcctttactgaagaagatcttaagaaaatcgaaaacaaaatgaaagaaatagttgatcgagacgaacccactagaagagaagtatggaaaagagatgtagcaataaagcatttcaaaaaaataggggagcattacaaggcaaagataatagaagatattccagaaaatgaagaaatttctatttatcatcacggaaaatggcatgatctatgtagaggtccacatcttccatctactggaaaaattggcaaagcctttaaacttacaaaagtttccggagcatactggagaggtgactcaaaaaatgaaatgttacaaagaatatatggaacatgttggcgtagtaaaaaagaactagacgaatatcttttaagattggaagaagccgaaaagagagatcacagaaaacttggaaaagaaatggatttattccatttccgtgaagaaagcccaggtgcagtattttggcatgacaaaggttggactttatttcgtagtcttgtcgattatatgcgtaaaaa

SEQ ID NO: 303288 - DNA, 322 bp, Unknown
  Bacterial polypeptide expressing nucleotide sequence isolated from the Sargasso Sea
aatgcttaacataacattaccagacggaaaaaaattaacttttgaaaaaaaagtttctggaacaaagattgcagaaaaaataagcaaatctttagccaaagaagcgctagttatgagcgtagatggaatcttaaaagatctcagctttgaaattgacaaagattgttctgtgaaaattttaacttcaaaagacaaagatggcttagatattataagacacgatacagcccatattttagcaatggcagttcaagaattatttccaggcacccaagtaactatagggccaactattgaaaatggtttttattatgatttttcc

SEQ ID NO: 303289 - DNA, 601 bp, Unknown
  Bacterial polypeptide expressing nucleotide sequence isolated from the Sargasso Sea
aatgactccattggaagaaataaggcattccgccgctcacgtcctcgccaccgcggttctacgcttgtatcccgacactcagctggacatcgggccaccgacggattccggtttttactacgatttcgactcggaaattccgttcacgcccgaggttatcgaggcaatcgaggacgagatgaaaaaaatcatcaaggaaaaccagagatttgaaaaaatcgaagtttcccgggaggaagcgattgaaataatcaaggaaatgggccaagagacctacaagctcgggaggctcgaagatattccggaaggagaggaaatctcgttctatcgaaacggcgaattctccgatctttgcgccggaacgcacgtttcctacaccaagaaaataaaagcattcaagctcctgcaagttgccggttcctaccaccgcggaaattcggaaaacaagcaactccaacgtatttacggaacagcctttgcatccaaggacgaattaaaggattaccttgagcgtctggaggaagcgaaaaaagagatcatcgaaacatcggtcgtgaactcgggctcttccacatcgacgatatgcttggccaaggtttga

SEQ ID NO: 303290 - DNA, 580 bp, Unknown
  Bacterial polypeptide expressing nucleotide sequence isolated from the Sargasso Sea
aaagcatcaaagttagaatatagtattaacaagggagaaggagcattctacggtcctaaaattgagtttgttctaagggatgcaattggtagagattggcagtgtggaactttgcaagttgatttaaatttacctgaaagattaggggcttcctatatcgataaagatggaactaaaaaaattcctgtaatgttgcacagagcactatttggatctttggagagattcattggaatcctaattgaaaattattctggtaaatttccattctggatatcacctttacaaacaatggtaattcctatttcagaagaatttaataattatgctcttgagatatctaaaaaaattaaaaatgtaggtataagttcttctgttgatttaaaaaatcaaaatttaaattataaaataagagatcattcattagctaaaatacctcttttattaatttgtggtaaaaaagaagttgactccaactctgtaacgattagaagattagactctaacaaacaagaaaatatggacatagacgcattcttaaaaactttttctgctttaaacaaagcatcctcaaactaag

SEQ ID NO: 303291 - DNA, 856 bp, Unknown
  Bacterial polypeptide expressing nucleotide sequence isolated from the Sargasso Sea
aaaagatctacattttttagtaaaaaaagattgttcagtaaaaatttttactgcaaaagaccccgaaggtctgaaagttattagacatgacgctgctcacattatggcgatggctgttcaagaattataccctggcacacaggtaactattggaccagtaattgagaatggtttttactatgattttgctcggaaagaaccttttacagaaaatgatttaaaaaaaattgaaaaaagaatgtcagaaataattgacaaagatgtaaaaaccagaagagaggtttggaaaagagataaagcaataagccatttcaaaaaaattggtgaaaaatataaagcagaaataatagagagtataccggagggcgaagaactaaccgtttatcatcatggtgatacatggcatgatttgtgtagaggtccacacttagtttcatctggcaaaattggtaaggcttttaagcttacaaaagttgctggagcatattggcgtggagattcaaataatgaaatgttacaaagaatttacggaactggctgggcctctcaaaaagatttagatgattatttaaaaagaattgaggaagcagagaaaagagatcacagaaaacttggtaaagaaatggatttgtttcatttcagagaggagagcccaggatctgttttctggcatgagaagggttgggcattatttcaaaaattgattaattacatgcgagctcgtcaagatgcagcaggatacaaagaagtaaataccccagaagtattagatagattattatgggaaaaatcgggccattgggaaaaatatggggaaaatatgtatacttctgagactcctgacgaaaaagttttt

SEQ ID NO: 303292 - DNA, 828 bp, Unknown
  Bacterial polypeptide expressing nucleotide sequence isolated from the Sargasso Sea
gaaggtctcatcaatttatacaaacacgaagaatacatcgacatgtgtagagggcctcacgttcctaacactagacatttgagacactttaaattactcaaattatcaggttcatattggagaggtaatagtgagaatgaatcattacagagaatatatggaactgcatgggcaaaagagaaagaactcaaagattatttaacaagaatcgaagaagcggaaaaaagagatcatagaaaacttggtaaaaaacattcactatttcatatacaagaagaatctccaggaatgattttttggcatccaaatggatggaaaatctatcaagtattggaaaattacataagagaaatactcaatcaaaatgattatttagaaatcaaaaccccgcaagctgttgataaatctctttgggaaaaatctggtcattgggagaaatttagagacgatatgttcactactgcatcagaaaatcgaacatatgcgattaaaccaatgaattgtccatgccatattcaagtatttaatcaaggtttaaaaagttataaagatttaccaatccgtcttgctgaatttggttcttgtcacagaaacgagccctcaggcgcactacatggcttaatgagagtaagaaactttactcaagatgatgcacacatattctgcacagaagagcaaattcaagaagaggtatctacttttatagatcttgttttcgaagtttataaaacttttggttttgatgaaatcattataaaattatcaactcgtcctgaaaaaagggtaggtagtgaagatatttgggataaatcagaagaggctcttact

SEQ ID NO: 303293 - DNA, 804 bp, Unknown
  Bacterial polypeptide expressing nucleotide sequence isolated from the Sargasso Sea
ttcaggtcactgggagaaatacgcccaggccatgttcaccacccagtccgaaaaccgcgagtacgccatcaagccgatgaactgcccgggtcacgtgcagattttcaaccagggtctgaaatcctaccgcgatctgcccctgcgcatggccgaattcggctcctgccaccgcaacgagccgtcaggctccctgcacggcctgatgcgggtacggggtttcacccaggatgacgcccacatcttctgtaccgaagagcagatcatggaagaggtgtctgcgtgcatccgcatggtctatgacgtctacggcaccttcggtttcgaaaacatcgtggtcaagctctcgacccgtccggagcagcgtatcggctctgatgaagcctgggatcgtgccgaggccgcgctggccgaggcgctggaactcaacggcctgaagtacgacctgcaaccgggcgagggggctttctacggtcccaagatcgagttcaccctgcacgattgccttgatcgtgcctggcagtgtggtaccgtgcagctcgactttgccctgccgggccgtcttggcgccacctatgtgggcgaagacaacgagcgccacatccccgtgatgatccaccgcgccattctgggctcgctggagcgcttcatcgggatcttgacggaagagtacgccggtctgttcccgacctggctggcgccgacccaggccgtggtcatgaatatcacggataaccaggccgattatgctgtgaaagttgccaaggcattgaatgatgcgggccttcgcgcaaaagcggacttgag

SEQ ID NO: 303294 - DNA, 791 bp, Unknown
  Bacterial polypeptide expressing nucleotide sequence isolated from the Sargasso Sea
tatgtctcaattaaataataaccttgatacactgcggcactcaacttcgcatgttttggctcaagccgttttaaaattatttccatcagctaagcttggtatcggtccagctatttcagatgggttttattatgattttgatcttgaaacaacaattactgaagatgatctgccaaaactagaatctataatgcatgatattatcaacgaaggacagtcatttgctcattttacgcttaataaagaaacatcattaaagaaacttcaagaatcaaatcaaacttacaaatgtgagttaattcaagatcttcagctagatacttattctttttatgaaaatggtccattcactgatctttgcaaaggacctcatatcgaaaatacaaaccaaattaaagcatttaaattactcaaagtttcaggagcttactggaaagggtctgaagaaaataaaatgttgcagcgaatttacggaactgcattttttaatacaaaagatttaaaggtatatttacatcagcttgctgaagcaaagaaaagagatcatagaaaacttggtaaagagctagatttatttagtattaaaaacgaaattggtggcggtttaatattatggcaccctaaagggtctattatgcgaaatctaattgaaacatattggaaaaatcaacatattaaacaaggatatgatctagtatatacgccacatatcggaaaagctgatttatggaaaacatctggccatttagatttttatgaagaaaatatgtacgataaaatgtctattggaa

SEQ ID NO: 303295 - DNA, 739 bp, Unknown
  Bacterial polypeptide expressing nucleotide sequence isolated from the Sargasso Sea
atgccagttattactcttcctgacggaagcaagcgctccttcgataaccctgtctcagttttagatgttgccaacgatatcggtcctggtctggctaaagccaccgttgccggtaaagtgaatggtgaactggttgacgcggttgatatcattgaacacgatgcagacttacagatcctcaccgttaaagacgaagaaggtctggaaatcgttcgtcacagctgcgcgcacttattagggcatgcaatcaaacagctctatccggatgttaaaatggccattggtccggtcatcgacaacggcttttactacgacgtggatatggagcactcgctgacccaggaagatattcagcagcttgaaaagcgcatgctggaactggctaagactaactacgacgtagttaagaaaaccgttagctggcaggaagcccgtgatgcgtttgtagagcgccatgaaccttacaaaattgaaattctggatgaaaacatcagccaggatgacaagccaggcctgtatcatcacgaagaatacgtggatatgtgtcgcggtcctcacgtaccaaacatgaagttttgccatcactttaaactgatgaaagtggccggtgcttactggcgtggcaaaagcgacaacaaaatgctgcaacgggtttacggtacagcctgggcagataagaaacagttaaaagcttacctgacacgtctggaagaagcagaaaagcgcgatcaccgtaaaa

SEQ ID NO: 303296 - DNA, 388 bp, Unknown
  Bacterial polypeptide expressing nucleotide sequence isolated from the Sargasso Sea
tatgcttgaaattacacttcctgatcaatccaaaagaaaatttgataaacctatatccatagaagatttagcttcggatattggccctggtctagctaaagcaaccgtagcaggtcgaataaatggcgttcttgtagatgcttctgaacttataacaatagatgccaaagtagagatcattacttctaaggatgatgaagggattgaggtagtaaggcattcttgtgcacatttgttagcacatgcccttaaacagctttaccctcaagttaagttggctatagggcctgttatagacaatggcttttattatgatattcagcttgataaagctttaaatgatgacgatcttcaggccatagaagatcgtatgcataaattagcaaaa

SEQ ID NO: 303297 - DNA, 640 bp, Unknown
  Bacterial polypeptide expressing nucleotide sequence isolated from the Sargasso Sea
aatgccagatataaaattgtcagatggtaaaaagatatctttttcaaaaaaaattgatggttttgaaatagcaaataaaattagcaagtcattagctaaggaagcttgcattatgagtgttgatggcgttcttaaagatctaagctatatcattaataaagatgttacggtaaaaataattacgtctaaggataaagaaggtttagaggtgatcagacatgatgcagctcacgtattagcgatggctgtgcaagaattgtttcccggaacacaagttacaattggtccagttatacaagatggtttttactatgatttttctagaaaaactccatttactaatgaagatttagaaaaaatagaagacaaaatgaaagaaatagttgatcgcaatgaattaactaaaagagaggtttggaaaagaaaagatgcaataactcattttaaaaaaattggtgaacattataaggctcaaatcatagaagatattccagaaagtgaagaaatttctgtttatcatcatggaaaatggcatgacttatgtaaaggcccacatcttccttctacaaaaaaaattggaaaagcttttaaactaacaaaagtttcaggcgcgtactggagaggtgattcaaaaaacgaa

SEQ ID NO: 303298 - DNA, 565 bp, Unknown
  Bacterial polypeptide expressing nucleotide sequence isolated from the Sargasso Sea
gaatattcaataaacaaaggcgaaggtgcattttatggtcctaaaatagaatttgtacttagagacgcaataggcagagattggcaatgtggaactttacaagttgatttaaacttaccaggaagactaggagctagctatgttgataaagacggatcaaaaaaaattccagttatgctccatagggctttatttggatcattagaaagatttattggaatattaattgaacattattcgggaaaacttcctttttggatttctcccttacaaactatgattataccagtttcaaatgaatttgataattatgctagagatgtaaatgaaaaaattaaaaaagctggtatatcaagtgaagttgatttaaaaaatcacaatctaaattacaaaattagagaacattcgctaaataaagtaccaattctcctgatattgggtaaaaaagaagttgactctaatggagtaactattagaagattggattctgataaacaagaaaatatggatttaaactcgttcttaaaaaaattttcacctcaaagccaatctccaaagaaataag

SEQ ID NO: 303299 - DNA, 592 bp, Unknown
  Bacterial polypeptide expressing nucleotide sequence isolated from the Sargasso Sea
atgagtgaaaagataataattacatttccagatggaaataaaaaggaagttgaaaaaggcatcagtggtcttgaattggcaacgcaaatttctaaatctcttgccaaagaatcagtcgctataaaaattaataatgagataaaagatattagtttacctattaatgctgatgcatctgtatcaattttaaaaagagatagcgaggaagcacttgaattaatacgacatgattgtgctcatgtaatggcagaagctgtccaagaattattccctggaacgcaagttacaattggtccagcaattgaaaatggtttctattatgattttgcaagagatgaaccttttactgttgctgatcttccaaaaattgaaaagaagatgcatgatatcattcaaagaaataaaaattttataagagaagtatggtctaaagatgaatcaataaaacattttaaagataaaggtgaaaactacaaagttgaattaattaatgatctgcctgataatgaggaaatcagtatttacaaacaaggtgattggttagatttgtgcagaggtcctcatatggtttcaacaaaacaaattggtaaag

SEQ ID NO: 303300 - DNA, 955 bp, Unknown
  Bacterial polypeptide expressing nucleotide sequence isolated from the Sargasso Sea
aatcctgagggcttagaaactataaggcatgacacagctcatattttagctatggctgttcaagaattatttcctggaacacaagttacaattggacccgtgattgacaatggattttattatgattttgctagaaaagaaccatttacagaggatgatcttgttaaaattgaaaataaaatgaaagagattgtcgataggaatgaaacaacaaaaagagaagtttgggatagaaacaaagcaattagccattttaaaaaaaaaggagaaatttataaagccgagttaattgaagcgatacctgaaaatgaagatgtatcaatttattttcacggagaatggcatgatttatgtagaggcccacatttatcctctacaggtaaaatagggaaatattttaaacttacaaaagtatcaggagcatattggagaggagactctaataatgaaatgttgcaacgaatatatggtacgagttgggcaactcaaaaagatctagatgaatatttgaaaagaatagaagaagccgaaaaaagagatcacagaaaattaggtagagaaatggatttatttcattttagagaagaaagccctggctcagtattttggcatgaaagaggatggggtttgtttcaaaagctcattaactacatgagaagcaaacaagatgcggctggttataaagaggtcaatactccagaggtactagatagacaactatgggaaaaatctgggcattgggaaaaatatggagaaaacatgtatacttctgaaacaccagatgagaaagtttttgcaattaaaccaatgaattgccctggtcatatccaggtatttaatcaaggcttaaaaagttacagagatcttccgttacgttttgctgaatttggaaaggttcatcgttatgagccatcaggcgctttgcatggtttattaagagtaagagccttactca

SEQ ID NO: 303301 - DNA, 886 bp, Unknown
  Bacterial polypeptide expressing nucleotide sequence isolated from the Sargasso Sea
gaaaaatataaagcagaaataattgaaagtattccaggaaatgaagaactttctgtttatcatcatggtgaaacatggcatgatttatgtagaggtcctcatttagtatcatctggaaaaattggtaaagctttcaaattaatgaaagtttcaggagcatattggagaggagattctaataatgaaatgcttcaaagaatttacggaacaagttgggcaaatcaaaaagagttagatggttatttgaaaagaattgaagaagctgaaaaaagagatcatagaaaacttggaaaagaaatgaatttatttcattttagagaagaaagtcctggatcagtcttttggcatgaaaaaggatgggccttatttcagaaattaattaactatatgagaaatagacaagatgcagcaggttataaagaggtaaatacaccagaaatattagacagacaattatgggaaaaatctgggcactgggaaaaatatggggaaaatatgtatacctcagaaacaccagatgaaaaagtatttgcaattaaaccaatgaattgccctggtcatatccaagtatttaatcagggattaaaaagttacagagatttacctttacgtattgcagaatttggaaaagtacatcggtatgaaccatccggcgccttacatggattattaagggtaagagcgttcactcaagatgatgctcatatattttgctctgaagatcaaattactagtgaatgtttagaggtaactaatttaattttagacatttataaagatcttggttttgaaaatgtaattcttaaatacgctgatagaccagaggtaagagttggagatgataagatttgggataaagccagaggcttccttgctgaagcagtaa

SEQ ID NO: 303302 - DNA, 850 bp, Unknown
  Bacterial polypeptide expressing nucleotide sequence isolated from the Sargasso Sea
aaaatcctataaagacttgccattaaagtatgcagaatttggtttatgtcatagatatgagccttctggaactatgcatggtttgatgagggttagggcctttactcaagatgatgggcatattttttgtactgagaaccaaatagaatcagaaacaggcttgttcattgaatttctttcaagcatatatgctgatttaggatttaaaaatttcgatattaaattatctaccagaccagagatgagagttggctcagatgagacatgggataaagctgaacaggcacttgaagcagcaattaaaaatttaggatattcatacagaattgatgaaggtgatggtgcattttatggaccaaaactagattttgttctcaccgatgcaataggaagagaatggcaatgtggtacttttcaattagatttcaacctagccgaaaggcttgatgccagttatgttggagaagatggaaaaaaacatataccagttatgatacatagggctgttttagggtcatttgagagattcattggtatcttaattgaaaattatgctggaaagcttcctttttggttatctcctcaacaagttgttgtggcatcaattatttctgatgtaaatgattattcattaggaatcgtggaatctcttaaaaaagagggcattctggcagaagctgacctcaggaatgaaaagattagttataaaattagggagcatagtgttagaaaagttccaattattttagcaattggaaataatgaaaaaaaagataaaactgtttctattagaagaattggaagtactgatactgaggttgttgatctaaaagatgctataaaagaaatt

SEQ ID NO: 303303 - DNA, 832 bp, Unknown
  Bacterial polypeptide expressing nucleotide sequence isolated from the Sargasso Sea
taaagacgggttttattacgacatcaaacttgacaaaaatctgtcagacgaagacttagaggctatagagaacagaatgaaaaagctcgctaagactaaatatgatgtcaggagagaagtcgtatcacaaaaaaaagctataaagactttcaaagagagaaatgaaccttataaagtaaacctggcagaagaaataccagatgatgaagtaattgcgttatatcatcatgaagaatacatagatatgtgcagaggaccacatgttaccaatatgagacatctgcaggcatttaagctcacgaaagtgtcaggtgcttattggaggggagactcaaaaaatgaaatgcttcaaagaatatacggcacagcttggcctaattcaaaagacttggagaagtatattctccaacaggaagaagcggaaaagagagatcataggaaattaggaagacaactagatttatttcattttcaagaggaagcacccggtatggttttttggcatcctaagggatggtctatttattcagctctaaaagactttataaaaattaaacaagacgaatatgactatcaagaaatcaatactcctcaaattgttgatagaaagttatgggaggcttccggacactgggataaatatagagaaaatatgtttattacggaaatcgatgaagatcatgcaaacgaaaagagaacaaatgccctaaagccaatgaattgtccttgtcatgttcaaatatttaatcaaggtctaagatcttataaagatttacctattagattttctgaatttggttcatgtcatagatatgaagcttctggaactcta

SEQ ID NO: 303304 - DNA, 649 bp, Unknown
  Bacterial polypeptide expressing nucleotide sequence isolated from the Sargasso Sea
aatgatgcaattgaacattttaaaaaaaagggagaaatatataaagctgagataatagaaagtattccagaaggtgaagatgtatccttatattttcatggagattggcacgatttatgcagaggccctcatttaagttcgactggtaaaattggcaaatattttaaattaacaaaagtctcaggcgcttattggagaggcgattctaataatgaaatgttgcaaagagtatacggaacaagttggtctacgcaaaaagagttagatgattatttaaatagaatagaagaagccgaaaaaagagatcacagaaaaattggtaaagaaatggatttattccatttcagagaagaaagtcccggatctgtattttggcatcaaaaaggctggagtttatttcaaaaacttatttcatatatgagaatgaagcaagaaactgcagggtatcaagaaataaatactccagaaatattagatcgctcactctgggaaaagtcgggtcattgggaaaaattcggtgctaatatgtatacttctactacacctgatgaaaaagtatttgcaataaaaccaatgaattgtccaggttgcgttcaagtttttaatcaaggtttaaaaagttatcgagatttaccattaaaaatgtcag

SEQ ID NO: 303305 - DNA, 814 bp, Unknown
  Bacterial polypeptide expressing nucleotide sequence isolated from the Sargasso Sea
tcaatttacgaacaaaaagagactggttttattgatttatgtcgtggcccgcatctaccatcattggaatatattggagaatttaagcttacaaaaatttcgggagcttattggaaaggtaattctgaaaatgagatgctcacacgaatatatggaactgcctggagaacaaaaaaggaacttgattcctacattgaaaaaatacaaaaagctgaagaggttgaccatagaaagctcggcaaagaaatggatttatttcactttcaagaagaagctccagggatggttttttggcatccaaaaggatggagcatctatacacaattgcaatattacgttagaaaaatgcaaaaaaatgctggatatagcgaagtgaatactcctgaggtagttgacagaaaattatgggagaaatcaggtcactgggaacaatatagagagaatatgtttataactgaaatagatgaagaacatgccaatgaaaaacgcactaatgctttaaaacctatgaactgccctaatcatgttcagatatataatcaagatattcgctcttatcgtgatcttccttttagactttgtgaattcggtaaatgtcatagatatgaaccatcaggtactatgcatggtttgatgcgtgtaagaggttttgctcaagatgatgcacatatattctgtacagaaaatcaaattgaaagtgaaacagcaaacttcattgctttactatcaaaaatgtacagtgacttaggttttaatgaattcaaaataaagttatcaacaagacctgaaaaaagagttggcagtgatgccagct

SEQ ID NO: 303306 - DNA, 919 bp, Unknown
  Bacterial polypeptide expressing nucleotide sequence isolated from the Sargasso Sea
tgtggatttagatgattcgctaactcaagacgatttacaaaagattgaattacgtatgaaagagttggcttcttccgcgtatccagttaaaaaagaagttgttccaaaaaaagttgcagaggaagtttttaaaaaaagaaaagaaagctataagttagaaatcttaaaagacattgacgatgaagaaacggttggactgtatcatcacgaagaatatgttgatatgtgtagaggaccacatgttgattccatgagacatgttaaagcttttaaattgtctcatgttgctggagcttattggcgcggagactcaaaaaataaaatgctgcaaagagtttacggaactctgtggaattcggataaagaattaagaaaacatttaagcaatctggaagaagcttcaaagcgcgatcatagaaaactaggacaaaaattcgacctgtttcattttcaggaagaagcgccaggaatggttttttggcatcctaagggctggactatttttagaatcttggaagattttataagagaaaaacaattaagggcgggatatgaagaaattagaacgcctcaagttattgatcgtaagctgtgggaaaaatcaggccactgggaaaaatatagacagaatatgtacattaccgagatcgatgaagaacaagctaacgaaaaaagagtgaatgcgcttaaaccaatgagttgccccggacatgttcaaatttacaatcaaggcataaaatcttatagggatttaccagtgagattggctgaatttggttgttgtcacagacatgaagcttctggaactttacatggcttgatgcgagtaagacaattgactcaagacgatggacatatattttgtactgatgaaccaatagaatctgaaacaaaagagtttattaaaattcttttctga

SEQ ID NO: 303307 - DNA, 577 bp, Unknown
  Bacterial polypeptide expressing nucleotide sequence isolated from the Sargasso Sea
aaagaaatggatttattccattttagagaagaaagtccaggatctgttttttggcatgagaaaggttgggcactatttcagaaattaatagactatatgagaatgaaacaggatattgcaggctataaagaaataaacactccagaagttctagatcgaactttatgggaaaaatcaggacattgggaaaaatttggtgcaaatatgtacacatcaactactccagatgaaaaggtatttgctataaaacctatgaactgtcctggatgtatagaagtttttaatcaaggcatcaaaagttataaagatctgcctctgaagatgtcagaatttggaaaagtacatcgttatgaaccctctggagcgttgcatggtttattgagggtaagagcatttacccaagatgatgcgcacatattttgtaccgaagaccaaattacaaaagaatgtttgatagtaacaaatcttattttagaaatttataaagatttaggttttgaaaatgtaattcttaaatattctgatagacctaatttaagaaagggggatgacagtgtatgggataaagctgaaagtg

SEQ ID NO: 303308 - DNA, 895 bp, Unknown
  Bacterial polypeptide expressing nucleotide sequence isolated from the Sargasso Sea
ggacatggggagaaattcggggaaaacatgttcacagcgaacacccaagatgacaaaacattagctctaaagccaatgaactgcccgggtcacgttcagatttacaggcaaggtgtaaaatcatatcgcgatttgccgctgcgcatggcagagttcggctcttgtcacaggaatgagccatctggagcgttgcatgggattatgagagtacgtgcttttacacaagatgatgctcatattttttgtacagaagagcaaattaattcagaatctgtggcattttgtaatctattaaaggaaatttataaagattttggattcacagacatcagggttaaattttcggaccgtcccaaagtgcgcgccggagatgacgccacttgggataaggcagaacaagcattgtctgctgcaactgaagctgccggtattgaaacatctctaaaccaaggggagggtgcattctacggccccaagttagagtttgtgcttacggatgctattggacgcgactggcaatgcggtaccttgcaagcagattttattttgcctgagcgacttggtgcagaatatgttgacgaagatggtcagcgcaaacgccctgttatgctgcatcgcgcgattttggggtcgttggaaagatggattggaatattaattgagcaatattctggcaaaatgccggcatggctttctcccgttcaagtagttattgctcccatcacagaaacagcaaatgactatgcaaatacagtttatcagatgctaaataacgctggtattagagtgcaaacggaccttagaaatgagaaaattgggtataaaatcagagaacatagcacagcgaaagttccctatatacttgctgttggcgcgcgtgaggcagaggctaaaa

SEQ ID NO: 303309 - DNA, 887 bp, Unknown
  Bacterial polypeptide expressing nucleotide sequence isolated from the Sargasso Sea
tgaatctcaagatggtctagaaattatgcgacatactcttgctgcccaagtgcttgctagagcattaaaaaatttatatccagattccaaacttgctattggacctactattgataacggtttttactacgatgttgagtgccctaagacaatttctattgatgatttagaaaaaatagaaaaggaaatgcataacattgttaaatctaaatcatctataactaaaaagcttttatcaaaatcagatgctctaaatgtttttaaatctctgggcgagtcttacaaacaagaaattattaatgattctgagcaagaaaatgattttcagctttattatcaagataatgatgagtttgttgatttatgtagaggaccccatttaccaaatttaagttttataggcgcatttaagcttacaaaagtatctggagcctattggaagggtgattcaaataacaaaatgcttaccagaatatatggaactgcatggaatactgaaaaagaactaaataaatatttaaatgaactagaagaggctgagaaaagagatcacagaaaaattggaaaagagatggatttatttcattttcaagatgaagctcctggaatggtattctggcattccgatggatggaccatatatagaaatttgagaaattttgttagatcacgattacaagaaagtggctatattgaagtaaatactcctcaagttatcgacagaaagctctgggaggcatctgggcattgggataaatatagagaaaatatgttcattactgaaattgatgaggagcatgcaaatgagaaaagagtgaatgctctaaagcccatgaattgtcctggccatgttcaaatttacaacccaagggataaaatcatataaa

SEQ ID NO: 303310 - DNA, 789 bp, Unknown
  Bacterial polypeptide expressing nucleotide sequence isolated from the Sargasso Sea
ggcccgcacctgccgtcgacgggccggatcagcaaggccttcaagcttatgaaggtagccggggcctactggcgcggcgattccgcaaacgaaatgctgcagcgtatttatggcaccgcctggcggacggaaaaggagctgagagctcatctccacatgcttgaagaggccgaaaagcgtgaccaccggcgcttgggccgagaaatgaaactattccatttccaggaagaggcaccgggcgctgttttttggcacccacatggctggaccttgttctccaagttgatcgactacatgcgtatgcgccaggagcgggctggatacgttgagatctccacgccgacggtcatggatcgctcactctgggaacggtctggccactgggaaaagtttggtgagaacatgtttctgacgcagactgaagacgaccgcatgttcgcattgaaacccatgaactgcccaggcggcatccaggtcttcaagcagggaaccacttcgtaccgcgacctgccccggcgtatcgccgagttcggcaaggtaaaccgttatgagccgtcgggtgccctgcacgggctgatgcgggtacgcgagtttacccaggatgacgcccacattttttgcgtacccgagaagatggaggaggaatgccggatcgtcgtcgaattaattttggacatttacaaggatttcggtttcgaagatgtgcgcatcaagttttccgatagacccgaaaagcgcatcggctccgatgccgtctgggatcagcttgaagctgccctcaaaggtgct

SEQ ID NO: 303311 - DNA, 610 bp, Unknown
  Bacterial polypeptide expressing nucleotide sequence isolated from the Sargasso Sea
aagtctgaggctgctctgcttgaggcagttaaagctacaaaattagagtatagtattaataaaggtgaaggagctttttatggtccaaaaattgaatttgttttaagagatgcaattggaagagattggcagtgtggaacattgcaagtagatcttaatttaccagaaagattaggtgcatcttatgttgataaagatggatcaaaaaaagttccagtaatgcttcacagagcattatttggatcgctagaaagatttattggaattctaattgaaaattatgctggcaagctacctttttggataagccctttgcaggtcgttgtaataccagtatcagatgattttgatgattatgctaaaaaagtttctaatgagataaatgataagggtataaattgtatagtagatttaaaaaaccataatttaaattacaaaataagggaacattcactttcaaagataccagttctattaatttgtggtaaaaaagaagttgacagtaatagtgtaactattagaaagttagataataataaacaagaaaatatgaagctagataaatttttagaactatatactgctttaagtcaagcaccttcaaactaag

SEQ ID NO: 303312 - DNA, 340 bp, Unknown
  Bacterial polypeptide expressing nucleotide sequence isolated from the Sargasso Sea
atgccccaaattcagctattagacggtaaaaaaattttattcaataaatcaataactggttttgaattaacaaaaaaaattagcaaatctttagaaaaatctgctttgattatggaggtaaatggagaattaaaagatctaagctttgaaataaaaaaagactctaaagtaaaaattataactggaaaagataaagaaggattagatgttataagacatgatgctgcacatatcatggcaatgtctgttcaagaattatttccagatactcaggtaactattggacctgtgattgaaaatggtttttattatgattttgctagaaaagagccattcacaa

SEQ ID NO: 303313 - DNA, 633 bp, Unknown
  Bacterial polypeptide expressing nucleotide sequence isolated from the Sargasso Sea
aatgcctaatataactttacctgatggaaaaaaattagcctttaaagaaaaagtttcgggactaaaagttgctgaaaaaattagtaaatctctcgccaaggaagctttagttataagtgtcgatggaaaattgaaagatttaagttacgaaattgaaaatgattgcgaagtaaaagttttaacttcaaaagataaagatgggcttgatactatcagacatgacacagcgcatattttggcaatggcagttcaagaattatttcctggaactcaagtgacaatcggaccaactattgaggatggtttttattatgacttttctagaaaagaaccttttactgaagcagatttaaaaaagattgagataaagatgtcagaaattgttgatagagatgagccaacttatagagaagtttgggatagggacaaagccatttcacatttcaaaaaaattggtgagaattataagtcagaaattattcaagatattcctcaaactgaggaaatttctatatactttcatggtaaatggcatgacctttgtcgaggtccacatttatcatcaacaggtaaaattggtaaaaattttaaattaacaaaagttgcaggagcatactggaggggtaactcaaa

SEQ ID NO: 303314 - DNA, 358 bp, Unknown
  Bacterial polypeptide expressing nucleotide sequence isolated from the Sargasso Sea
gaggtggacgagcgggaataccagctcaagccaatgaactgcccgttccacgtgctcacctacgccagcaaactgcgcagctatcgagagctgccgatccgctgggcggagctgggaacggtgtatcgctacgagcgccccggcgtgatgcatggcttgatgcgggtgcgcggcttcacccaggacgacgcccacgtgttctgtcttcctgaacagatcagtgatgagatcctgcgcatccttgatctcaccgagcgcatcctctccaccttcgatttcaacaactacgaaatcaacctctccacccgaccggagaaatccatcggggatgtcgccgtgtgggacctggccaccaagg

SEQ ID NO: 303315 - DNA, 454 bp, Unknown
  Bacterial polypeptide expressing nucleotide sequence isolated from the Sargasso Sea
tcttatattaaatatttataaagaccttggatttgaaaatgtaatattgaaatattatgatagaccagatcttagagttggagaagacgaggtttgggataaagcggaaaaagctttattagaagcagttaaagctacaaaattagaatatagcatcaataaaggggaaggtgcattttatggtccaaaaattgaatttgttttgagagatgcaataggaagagattggcagtgtggaactattcaagttgacttgaatttaccaggaagacttggtgcatcttttgttgataaagatggatcaaaaaaagttccagtaatgttgcatcgagctttatttggttctcttgaaagatttattgggatattaattgagaattactctggaaaacttccgttctggattagtccatcacaaatcatggtaataccagtttcagaagatttttatgat

SEQ ID NO: 303316 - DNA, 564 bp, Unknown
  Bacterial polypeptide expressing nucleotide sequence isolated from the Sargasso Sea
aaattttagatcgacaattatgggaaaaatctggtcactgggaaaaatatggagagaatatgtacacatcagaaactcctgatgaaaaagtgtttgcgataaaaccaatgaattgtcctggtcatatacaagtatttaatcagggcttaaaaagttatagagatcttccattacgtatcacagaatttggtaaggttcatcgttacgaaccatcaggtgctttacatggtttacttagagtaagagcttttacacaagatgatgcgcatattttttgtgcggaagatcaaattacgagtgagtgtttaaatgtaacaaatttaattttagatatttataaagaccttggttttgaaaatgtaattttaaaatatgcagatcgaccagaagttagagttggagatgatgaggtttgggacaaggcagaagcttcacttcttgaagcagttaaagcctctaagttagaatatagtattaataaaggcgaaggtgctttctacggaccgaaaattgaatttgttttaagagatgctattggaagagattggcaatccgttaattaat

SEQ ID NO: 303317 - DNA, 412 bp, Unknown
  Bacterial polypeptide expressing nucleotide sequence isolated from the Sargasso Sea
aatgccgataataacattacctgacggaaataatattgattttcctaataaagttactggatttgaagtagctgaaaaaattagcaaatcattagctaaacaagctatggtcataagcgttgatggcgagcttaaagatcttgattttctaattgaaaatgattgttctgtaaaaatttttacctcaaaaaatcctgagggcttggaaactataaggcatgacacagctcatattttagctatggctgttcaagaattatttcctggaactcaagttacaattggacccgtgattgaaaatggattttattatgactttgctagaaaagaaccatttacagaggatgatcttcttaaaattgaaagcaaaatgaaagagattgttgataggaagaaaaaacaaaaagagaag

SEQ ID NO: 303318 - DNA, 547 bp, Unknown
  Bacterial polypeptide expressing nucleotide sequence isolated from the Sargasso Sea
aaaggcgaaggtgctttttatggtccaaaaattgaatttgttttaagagatgccattggaagagactggcaatgtggaactttacaagtggatttgaatttgccagatagacttggcgctacatttgttgataaagatggaactaaaaaagttcctgtaatgattcatagagctttatttgggtcattggaaagatttattggaattttaattgagcattatgaaggtaaattacctttttggatttctccactgcaagcggttattatacctatttcagatgaatttgatgattatgcaaaaaaaatttttaaattggcaagtcagtctggaataaattgtgagattgatttaaaaaatcataacttaaattataaaataagagaacattcactgtcaaaagttccattattgttgatatgtggaaaaaaagaagttgacagtgataccataactataagacaattagattctaaaaaacaagaaactatgaaaactaaagattttttaaaaaattattcgtctctgaataaagccccattataat

SEQ ID NO: 303319 - DNA, 679 bp, Unknown
  Bacterial polypeptide expressing nucleotide sequence isolated from the Sargasso Sea
tgtagacggttttgaactcacaaagaagataagctcttcacttgagaaaactgctttagttatggaagtaaatggaattttaaaagatttaagctttaaaataacaaccgattccaaagtaagaattattactgccaaagacaaagaaggcctagaggtaatccgtcatgatgcagcacatataatggctatggcggttcaagaactatatcccggaacacaagttacaattgggcctgtaatagaaaatggatttttttatgatttttcaaggaaagaaccttttacaagtgatgatttaaagaaaatagaaaaaaaaatgtcggaaataatagatcgtaatgtcaaaacgagaagagaagtatggaaaagaaaagaagcaataaatcattttaaaaaaataggcgaaaagtataaagctgaaataattgaaggcataccagagaatgaagaactttcggtttaccatcatggagactcttggttggatctttgtagaggtccacatcttgcttcatctggaaaaataggtaaagcatttaaacttacaaaagtttctggagcctattggagaggaaattctaataacgaaatgcttcaaagaatatacggaacatgttggagtaataaaaaagacttagatgactatctccatagacttgaagaagctgaaaaaaga

SEQ ID NO: 303320 - DNA, 895 bp, Unknown
  Bacterial polypeptide expressing nucleotide sequence isolated from the Sargasso Sea
agtggcaggagcttactgcgagggagattcaaataacccaatgcttcaaagaatttatggcacagcttgggaaacacaagaagatcttgaaaattatctgaatttgttagaggaagctgaaaaaagagatcatagaaaacttggcaaagagttagatttatttcattttcaagaagaggctccaggttcagttttctggcacgcaaaaggttggacattatttaggacacttattgattatatgcgtcagcgacaagaagaggctgggtatgaagaaattaatactcccgatattatggataagtcattatgggaaagatccggacaccttgaaaaattcggtgacaatatgtttaccacagaagcaagggaagaacgtgtttatgctctaaaaccaatgaattgtcctggctgtgtacaagtatacaagcaaggactgaagagttatagagatttaccgttaagggttgctgagtttggaaaagttcacagatatgagccatcgggcgcccttcatggtttaatgagagtcagggcatttacacaagatgatgcacatatattttgtactgaagatcaaattactgaagaaagcaaaaaggtatgcgatttagttttaagtatttataaagatttcggatttgaaaatgtatcaattaaattttctgaccgtcctgaaaaaagagtcggcaatgatgatgtatgggataaatctgaggctgctcttcgtgaggcaatggaagctacaggattaaaatatactttaaatccaggtgaaggagcattttatggtcctaaattagaatttattctaaaggacgccattggtagagagtggcaatgtggaacattgcaagttgatcttaacttgcctgaaagactcggtggtcattat

SEQ ID NO: 303321 - DNA, 910 bp, Unknown
  Bacterial polypeptide expressing nucleotide sequence isolated from the Sargasso Sea
taatgctttaaaacctatgaattgtcctggacatgtgcaggtttacaaccaaggcataagatcatataaagagcttccattaaggttatgtgaatttggttcatgtcatagatatgaagcatcagggactatgcatggcttaatgagagtcagagggttcacacaagatgatggtcatattttccttacagaagatcaaattgaatcggaaacagagatttttatagatttattatctaaggtctatgctgaccttggatttaacgaatttgaaattaaattatcgacacgcccagaaaaaagagttggatctgatgagatttgggacaaagctgagctttctctaaaaaatgcgatcgaaaaacttggattgaaatacagaatagatgaaggagatggggcattttatgggccaaaactagattttgtattaacagatgctattggaagaaaatggcaatgcggaactcttcaattggattttaatcttgctgatcgtttagatgctcaatacgttgcagaggatggaaataaatataacccagttatgtttcatagagcgattctgggttcttttgaaagatttattggtattttaattgagaactatagcgggaatcttcctttatggcttgctcctactcaagtgactatttgttcaattacagatgaagctgacgattatgtaaaagagataacagaaattctaagaagcaaaaatattcgatgcaattcagatttaagaaatgaaaaaattagctataaagtcagagagcatagcgtctcaaaggtaccgataattgttgctgtgggtaaaaaagagatttcagagagaactgtatcagtaagaaagcttggaaaagaccacacatatgaatactctcttgatggctggaatcttcagtgctga

SEQ ID NO: 303322 - DNA, 760 bp, Unknown
  Bacterial polypeptide expressing nucleotide sequence isolated from the Sargasso Sea
gaacaagattgtgatgtggttattgtaacgagaaaggacgcagttgctctggaccttatcaggcatgattgcgcacatgttatggcggaagcagtaacggaactgtatcccgaaacgcaggtcacaattggccccgcaatagagaatggtttttattacgacttttacagggaaaagcctttcacggagggcgatctcgagacaatagaaacaaaaatgcatgaaatcgtagacagaggagatccattcgagagagaggtatgggctcgtgatgaggcgatgtcccattatgagaagatcaaagaacccttcaaagttgagttgatacagggtattccagatgatgaacaaatttctttctatagacagggcaactttttggatttatgtcgaggcccgcatgcaccatcaacaaaacatgttggccacgctttcaaactaatgagcgtggcgggcgcttattggcgcggggactcgtcaaacccaatgctgcagcgaatttacggtacagcttggccagatgaaaaaaagttaaaagcctacctaaatatgttagaggaagcggaaaagcgcgatcatcgtcggttaggtagagagttagacctttttcatatgcaagaagaggccgtgggttcgatattttggcacccacggggctggtcactatacagagaaatcgaagcgcatgtgcgccgaagacttgaggagggagattataacgaggtaaagacaccgcaattgatagatagatcactatggg

SEQ ID NO: 303323 - DNA, 129 bp, Unknown
  Bacterial polypeptide expressing nucleotide sequence isolated from the Sargasso Sea
gaatttggttcgggtcatcgtaatgaaccatctggagcgcttcatggtctaatgcgggtaagaaattttgttcaggaagatgcgcatattttttgtactgaggaccaaatagaaagggaaacagtcaat

SEQ ID NO: 303324 - DNA, 475 bp, Unknown
  Bacterial polypeptide expressing nucleotide sequence isolated from the Sargasso Sea
tggaacattgcaggtagatttaaatcttcctaagagacttggtgctacatacattagcaacgacggatcaaaaaaaattccagttatgttacatagagctttatttggatctttggagaggttcattgggattttaatagaacactatgccggaaaactacctttgtggttgtcaccattacaagccatagttttacctatttcttcagagtttgacaattatgcaaaaaaaatatttgaagaatttgaaaaagcaggtataaacaccgaaatggatttaaagaatcaaaagataagtttcaaaataagagagcattccttatcaaaagttcctatacttcttatttgtggagagaaggaaaagaataaaaaaagtgttacaattagaagacttggttctgaaaaacaggaaactctttcattaaaaaaagcaattgaaaaaatatctaaagaatctaaattattaataaattaa

SEQ ID NO: 303325 - DNA, 1002 bp, Unknown
  Bacterial polypeptide expressing nucleotide sequence isolated from the Sargasso Sea
atttcctggtactgaattcgcagtaggacctccaatagaagacggcttttattatgattttttgtttaaagagaatattaaagaaagcgacctttcatcaattgaaaatgaaatgaaaagaattaataaagcgaaccaactttttattcgtgaagagataacgattaatgatgcgaaaaataagttcttaaagcagcaatttaaacaggaattaattactactgctgatccttctgagggtgtccaaggggataatatatcaatttacaagaatgataattttgaagatctttgtagaggacctcatgtttcaagtacaagccaaataaaccattttaagttaacaaaattagctggggcttattggcgtgggatagaaacaaatcctcaactgcaaagaatttatggtactgcatggttctctaaagaagaattagataattatttagcacgacaaaaagaagctgaaaaaagagatcatagaaaactaggtaatgaattagatttgtttgttaatactgatgaaatagggccaggtcagtttttatggaaacctaaagggtcaatcctaagacaaaatattgaagattattcaaaaaaagctcatgcagataatggttatgagtatgcatacactccacacattggacgttcagtcctttgggaaacttctggtcatcttgattattacaaagaaggaatgtacccatcattgaaaagtgaggataataaagatgatgaatactatttaaaaccaatgaattgtccttttcatattttaatttataaaagtgacataaggtcatacaaagaattaccattacgtttttttgaactgggttctgtttatagatatgaaaaggctggagtcttgcacggactgttaagagcaagaggattcacacaagatgatgcacatattttttgtactaatgatcaaattgaagaagagatactaaatctcttaacatttttcataaaactacttaatgcgtttggttt

SEQ ID NO: 303326 - DNA, 646 bp, Unknown
  Bacterial polypeptide expressing nucleotide sequence isolated from the Sargasso Sea
atggtttctattactttgccagataacaggatgctttcgttctctggccctgtttctggtgctgatgttgcctctgccataggagcaggcctcgctaaggctgcaatcgctgcacgtgtaaacgacgaagtgtgggaccttgaacgcccgattgagcatgatgcgcgggtagccctgatcacgctcagggatgatgatgatacggtctacgatcttttgcggcacgactgcgcccacgtcttggctgaggcagttcaggagctataccctgaaacacaagtcacgatcggccccaacgtggaagacggcttttactacgatttctctcgcgatgagccgtttacacctgaggatttggtaaagatcgaggcgcgcatgatggaaatcgttgcccgggatgagcccgtgaaacgcgaaatctggggccgcagcgaggcggttcagttttttcaagataagggtgagcactataaggctgaaatcatccacggattgcccaaagaagaaacggtaacgctctatcgtcagggagagttcgtcgatctttgtcgaggccctcatctaccatccacgggaaaattggggacatcctttaaactgatgaaggttgccggcgcatattggcgtggagattccagccaatgag

SEQ ID NO: 303327 - DNA, 915 bp, Unknown
  Bacterial polypeptide expressing nucleotide sequence isolated from the Sargasso Sea
aaaaaaataaattttgaaaaaagtatttcgggatttgaagttgcagaaaaaattagcaagtctctatcaaagcaagctttattgataagtgttgatggagaattaaaagatttaaatcatagtatttacaaagactcttcaattaagatatttacatcaaaagataaagaaggtttagagactataagacatgatactgctcacatactcgctatggcagttcaagaattatttccagggacacaagttacaatagggccagttattgaagatggcttttattacgattttgcaagaaaagaaccttttacaacagaggatttagaaaaaattgaaaacaaaatgaaagaaatagttgatcgagatgaaaaaacttacagagaagtttggaaaagaaatgatgcaattgaacattttaaaaaaaagggagaaatatataaagctgagataatagaaagtattccagaagacgaagatgtatccttatattttcatggagattggcatgatttatgcagaggccctcatttaagctctactggtaaaattggcaaatattttaaattaacaaaagtctcaggtgcttattggagaggcgattctaataatgaaatgttgcaaagagtgtacggaacaagttggtctacgcaaaaagagttagatgattatttaaatagaatagaagaagccgaaaaaagagatcacagaaaaattggtaaagaaatggatttattccatttcagagaagaaagtcccggatctgtattttggcatcaaaaaggctggagcttattccaaaaacttatttcatatatgagaatgaagcaagaaactgcagggtatcaagaaataaatactccaagaaatattagatcgctcactctgggaaaagtcgggtcattggaaaaattcggt

SEQ ID NO: 303328 - DNA, 742 bp, Unknown
  Bacterial polypeptide expressing nucleotide sequence isolated from the Sargasso Sea
tctggtcattgggaaaaatatggagagaatatgtatacatctgaaactccagacgaaaaagtttttgcaataaagcctatgaattgccctggtcatattcaagttttcaatcaaggtttgaaaagttatagagatttgcctttgagaataacagaatttggaaaagttcatcgctacgaaccatcaggtgcacttcacggtttactgagagttagagcatttactcaagacgatgcacatattttttgctctgaagatcaaattacgagtgaatgtttaaatgttacaaatttgatcttagatatttataaagatttaggttttgagaatgtaattttaaaatatgctgacagaccagaagttagagtaggtgatgataaagtttgggatagggctgaagcttcattattagaggcagtaaaagcttctaaattagaatatagtattaataaaggtgaaggtgcattttatggacctaaggtggagtttgttttaagagatgcaataggtcgagattggcagtgtggcacactacaagtagattttaatttaccaggaagattagaggctacatacgttgataaagatggaactaagaaagtaccagtaatgttgcatagggcattatttggctctcttgaaagatttattggaattttgattgaacattatgcaggaaagtttccattttggatttctccattacaaacagttgttataccaatctcagaagattttaatg

SEQ ID NO: 303329 - DNA, 766 bp, Unknown
  Bacterial polypeptide expressing nucleotide sequence isolated from the Sargasso Sea
tcttttctgtcgtccgtcacagattgaagaagagatcaccaaggttcttgatctcattgtttttgttttacagtcgttcggtttccatgagtacaaaatttatttgagcacacgtccggaaaaatatgttggctccgatagcggatgggagtctgcaacgaaagctttggaaaccgcgcttaaaaacaagaatctggaatttgaagtagacccgggcgagggcgttttttacggtcccaagattgacattaaaattaaggacagtttgaatcgttattggcaggtttcaacagtacaagtcgattttaatcttcctgaaaagtttgatatctcttatattgaggaggatggtcaacgccgtcaacctataatgcttcaccgtgccctaatgggttctttggaacgtttttttggttgtctaattgagcattatgcaggcgcttttccgttatggctggctccggttcagataatcttattgccaattaccgataatcataccgaatataccgataaaatagcagaagagcttgaagaatcaggaattcgggtagaaaaagacttgcgaaatgagaagattgggttcaaaatacgcgaggcccagttacagaaaatcccctatatgattgttttgggggataaagaagtggaaacatctactttaagtgttcgtaggcgacggtctaaagaaacgcgaacccttgatttgaaaacgtttttaaatgaagttaatgaagctgtaagaaaccggacaattgatacatag

SEQ ID NO: 303330 - DNA, 412 bp, Unknown
  Bacterial polypeptide expressing nucleotide sequence isolated from the Sargasso Sea
atgccgataataacattacctgacggaaacaatattgattttcctaataaagttactggacttgaagtagctgaaaaaattagcaaatcattagccaaacaagctatggtcataagcgttgatggtgtgcttaaagatcttgattttcttattgaaaatgattgttctgtaaaaatttttacctcaaaaaatcctgagggcttggaaactataaggcatgacacagctcatattttagctatggctgttcaagaattatttcctggaactcaagttacaattggacccgtgattgaaaatggtttttattatgactttgcaagaaaagaaccatttacagaggatgatcttaataaaattgaaaataaaatgaaagagattgtcgataggaatgaagtaacaaaaagagaag

SEQ ID NO: 303331 - DNA, 892 bp, Unknown
  Bacterial polypeptide expressing nucleotide sequence isolated from the Sargasso Sea
aatggcgtggccttatggcgggtggttgaagactatatgcgcgatagcaataaccgttatggttgtgaagaaattaaaaccccgctgattatggatgaatctttgtggcaacaatctggccataagagtaagtactcggatgaaatgtttgatacggtggtagaaaaacgtaattatgtgattcgtccaatgaattgcccagggggtatgcaagtttttaatcagcatcttcactcttatcgtgatttacctattcgcatggcagagtttggtatcgtgcatagaaatgagccatctggatccttacatggtcttatgcgcgcacgcagctttacccaggatgatggtcatattttctgtacggaatctcaggttcaagaagaagtgattcaaatgattaatcaatcttttgaagtgtatcgtgattttggttttaaagagattgcggttaaattagctacccgtccagaaaatcgtattggtgatgacgctgtttgggataaatctgagcaatctttagaagatgccttaaaagcccatggggtagattttgagtttttaccaggtgagggtgcgttttacggtccaaagattgagtttcatattaaagatgctattggcagaagctggcagtgcggtacgattcaagttgatttttcaatgccagagcgcttaggcgctgagtatatcgatgaaaacagtaaaaaacagcatccagtgatgctacaccgtgctattgttggttccttagagcgttttattgcagttgttattgaacattacgcaggatctttgccactatggttggctccggtacaattagtagtgcttggtgtgtcgcaaaaacacgacgattatgttaaaaaaatagtagccgatctaaaaagaaagg

SEQ ID NO: 303332 - DNA, 758 bp, Unknown
  Bacterial polypeptide expressing nucleotide sequence isolated from the Sargasso Sea
aatgccagcaataactttaccagacggaaacaaaataaattttaagaaaaatatttcaggtctagaagtagcagaaaaaattagcaaatcacttttaaaagcagctctaattatgagcgtaaacggagagttaaaagatatgaactatgttattaccaaagatagttcggtaaaaatttttacgtctaaggatcaagaaggtttagatgcaattagacatgatacaacgcatataatggctatggcagtacaagaattatttccagaaaccaagatagcaattggacctgctataaaagatggtttttattatgatttttttagaaaggaaccttttactccacaagatctagaaaaaattgaaaaaaaaatgaaagaaattgtagaaaaagatgaaccaacacgcagagaagtttgggaaagagaaaaagcgaaaaatcattacaaaaaaattaacgagaaatacaaggttgaacttgtagatagcattcctaaagaacaagaagtctcaatatattatcacggtaaatggtatgacctttgtagaggaccacatttaaattctactggtaaaattggaaaatattttaaacttacaaaagtttcaggtgcttattggagaggtgattctaaaaatgaaatgctacaaagaatttatggaacagcatggccatctcaaaaggaactagatgaatatcttataagattagaagaagcagaaaaaagagatcatagaaaattaggtaaagaaatggatt

SEQ ID NO: 303333 - DNA, 904 bp, Unknown
  Bacterial polypeptide expressing nucleotide sequence isolated from the Sargasso Sea
tcaaaagaagatgctatagcctattttacaaagaaaaacgatccatataaactcgaattaataaatgatctaaatgatggagaaataactttttatagtcaaggtaatttcacagatttatgcagaggaccccacatacctcacaccggtttcattaaagctgtcaaacttttaaacattgctggcgcttactggagaggtgatgaaaacaacaaacaacttactagaatttatggagtaacttttcaaaaacaaaaagaattaaatcttcatttagaacaaattgaagaagctaaaaagagagatcatagaaaattaggaaaggaattggaactttttactttttcagaaagagttggaatgggacttcctttatggcttcctaaaggagcagaacttagagaaagattgatggattttcttaaaaaagctcaagttaacgcaggctatctttcagtttcaactcctcatattggacataaagacttatacatttgttcaggacattatgacaaatatggtgaagattcatttcaacctattaaaacacctcatgagggtgaagaattcctaatgaaaccaatgaattgcccacaccattgtgaagtatttaaagcatctccaaaatcttataaagatttacctgtaagatatgcagaatttggaactgtatatcgttacgaacaaagtggtgaacttcatggactaacaagagtaagggggtttactcaagatgatgcacatatattttgtagacccgaccaattagaagatgaatttaaaaaggtaattgacttggtcttgtatgtatttaaagcattgaactttaaagactttgttgtacaagtttcattgcgtgatccagaaaaaccagaaaaatatattggtaaggaagaaaattgaa

SEQ ID NO: 303334 - DNA, 961 bp, Unknown
  Bacterial polypeptide expressing nucleotide sequence isolated from the Sargasso Sea
gattttgctagaaaagaaacttttacaaaagatgatttaattaaaattgaagataagatgaaagagattattgatagagatgaaattacaaaaagagaagtctgggatagaaacaaagcaatttctcattttaaaaaaaaaggagaaatttataaagcagaattaatagaatcaattccagaaaatgaagaagtatcaatttactttcatggagattggcatgatctttgtagagggccacatctttcatcaacgggcaaaataggtaaatattttaagcttactaaagtttctggtgcttattggagaggagactctaaaaatgaaatgttacaaagaatttatggtactagctgggcgagtcaaaaagatttagatcaatatttaaaaagaatagaagaagccgaaaaaagagatcataggaaattaggaagagagatggacttatttcattttagagaagagagtccaggatcagtattttggcatgaaaaagggtgggctctttttcaaaagttaataaattacatgagaagtaggcaggatgctgcaggctataaagaagtaaatactcctgaattattggatagacagttatgggaaaaatcaggtcattgggaaaaatatggagaaaatatgtatacatctgaaactccagacgaaaaagtttttgctataaagccaatgaactgtccaggtcatatccaggttttcaatcaaggtttaaaaagttatcgagatcttcctttaagaataacagagtttggtaaagttcataggtatgaaccatcaggggcattacatggactattgagagttagagcatttactcaagatgatgctcatattttttgttcagaagatcaaatcacaagtgagtgtttagaagttactaatttaattttagatatttataaagatcttggttttgaaaacgttatattgaagtatgcagatagac

SEQ ID NO: 303335 - DNA, 808 bp, Unknown
  Bacterial polypeptide expressing nucleotide sequence isolated from the Sargasso Sea
atgcctacaataacattaccagatggaaacaatataaatttttcaaaaaaagttaccggagcggaagtagctgagaaaataagtaagtctttagctaaacaagcaatggttataagcgttgatggtgaacttaaagatttagattatttaatagataaagattgttcagtaaaaatttttacttctaaaaatccagaagggttggaaacaattagacatgatacagctcatattttggcaatggctgttcaggaattgtttccaggtacacaggttacaattggtccagttattgaaaatggattttattatgactttgccagaaaagaaccattcactgaagatgatttagtgaaaatagaaaataaaatgaaagaaattgttgatagagatgagattaccaagagagaagtttgggagagaaataaagctattgatcatttcaaaaaaaaaggtgaaatttataagtctgaattaattaaagctatcccagagaaagaagatgtatcaatttattttcatggtgattggcatgatctttgtagaggtccccacttatcctcaacaggtaaaataggaaaatattttaaactaacaaaagtttcgggtgcttattggaggggtgactcaaaaaatgaaatgcttcaaagaatatatggtactagttgggcaacccaaaaagatttagatgaacatcttaaaagaatagaggaggcagaaaaaagagatcatagaaaattaggaagagaaatggatttatttcattttagagaagaaagtccaggatctgttttttggcacgaaagag

SEQ ID NO: 303336 - DNA, 861 bp, Unknown
  Bacterial polypeptide expressing nucleotide sequence isolated from the Sargasso Sea
aaaaaaattggtgaaaaatataaggcagaaataatgaaaagcattccagagagtgaagaactaagtgtctatcatcatggtgatacttggcacgatttgtgtagaggtccacacttagtttcttctggaaaaataggtaaggcttttaagttaacaaaagttgccggagcttattggcgaggagactcaaaaaatgagatgttacaaagaatttatggaactggctgggcatctcaaaaagatttagataattatttgaaaagaattcaggaagctgagaaaagggatcataggaaactcggtaaagaaatggatttatttcattttagagaagagagtccaggatctgtcttttggcatgagaagggttgggcattatttcaaaaattgattaattatatgaaaatgaaacaagatgctgctggctataaagaaataaataccccagaggttttagacagaagtttatgggaaaaatcagggcattgggaaaaatttggagcaaatatgtatacatcgactacgccagacgacaaggtattcgctattaaacctatgaattgcccaggttgtgtagaggtatttaatcaaggtcttaaaagttataaggatttacctttaaaaatgtctgagtttggtaaggtgcatcgttacgaaccttcaggcgctctccatggtctattaagagtaagagcatttactcaagatgatgctcacatattctgcactgaggatcaaataacacaagaatgtttaatagtaacaagtcttatattagaaatttataaagatcttggttttgaaaatgttatcttaaaatattctgatcgaccagaattaagagttgggaatgataatgtt

SEQ ID NO: 303337 - DNA, 527 bp, Unknown
  Bacterial polypeptide expressing nucleotide sequence isolated from the Sargasso Sea
aattagtaaatcgctctcaaaacaagccttagtcattagtgttgatggaaatttaagagatttgaattatgaaatagacaaagattgtactgttaaaatccatacagcaaaagataaagaaggactagaaactataagacatgatacagcgcatgttttagcaatggctgtacaggaactttttcctggtacgcaagttactattggaccagtaatcgataatggattttattatgacttcgcaagaaaaaaaccatttacagaagaagatttacgaaaaattgaaaaaaaaatgttagaaattgtagaaagagatgagcctactcatagagaagtttggaagcgagataaagcagtcgaacactttaagaaagcaggagaactttataaggctgaaataattaaagatataccaaaagaagaagaagtttcagtttactttcatggaaaatggcatgatttatgtagaggtcctcatttaatgtctactggaaaaattggaaaatattttaaacttatgaaagttt

SEQ ID NO: 303338 - DNA, 883 bp, Unknown
  Bacterial polypeptide expressing nucleotide sequence isolated from the Sargasso Sea
aaaatgaaaaaagaaatgcggaagattattgcagaagatgaagcgtttgaacgagtggaagtcgatcgtgagaaggcaattgaaattgttcgtgacctcgatcagccacttaaggtggaacatattgaaactggtttagtggaccacccgtcgctttcattttatcggcaaggtgagtttgttgatctctgtcgcggtccgcatgtcccgagtcccgggtgtattggtggcttcaaattgacaagccttgccggtgcctactggaagggtgatgcaaacaatgcgcagcttcagcgactctatggaacagcctggttcacgcagcaagatctagaccgccacctcgaagcattagaggaagcgcggaagagagatcaccgtgtgcttggaaagcagttggacctctttacgattaaccctttggttggttccgggcttgtcctctggatgcccaaaggcgcgatgttgcgaagtgtgcttgagggatttgttcgagaagaactcacggctcgtggatatgaacaggtttacacgccacatatcggaaaagtcgatctctacaagatttcaggtcactatccctattacgctgaaagccagttcaagccaatcgagatgcatgaagatgagcagtatcttctaagacccatgaactgtcctcaccatgtgatgatttataaagctcggccacgaagttatcgtgaattgccattacgacttgctgagtttggcacagtctatcgatatgagcagtccggtgaactcggtggattgacacggggcaggggttttacccaagacgatgctcatattttctgcaccccagaccaggttgaacaggaggtagcaggctgcatcgattttacacagaaggctccttgaa

SEQ ID NO: 303339 - DNA, 586 bp, Unknown
  Bacterial polypeptide expressing nucleotide sequence isolated from the Sargasso Sea
aatgccaaatataactttacctgatggaaaaaagttaagtttcaaaaacaatgtaaccggattacaggttgctgaaaagattagtaaatctttatcaaaacaagcacttataataagtgtagacggagagttaaaagacttaaatttttcaattaataaagactcttctgtaaaaataattacaaataaagacaaagaaggtttggatgtaataaggcatgacgctgctcacataatggcaatggctgttcaagagttgtttccaggaacgcaagttactattggtcctgtaatagaaaatggtttttactatgattttgctagaaaagaaccatttacaagtgaagatctaaaaaaaattgaaaaaaaaatgactgaaataattgataaagacgttaaaacaagaagagaggtatgggaaagaaaaaaagcaatagaacattttaaaaaaattggagaaaagtataaggcagaaattattgaaggtattccagaaaaagaggaactttcaatttatcatcatggggatacctggcatgatttatataggggacctcatttaacatcttcaagtaaaataggcaaa

SEQ ID NO: 303340 - DNA, 926 bp, Unknown
  Bacterial polypeptide expressing nucleotide sequence isolated from the Sargasso Sea
tgaccttgcacacattatggctcgagcggttcaagaaatttggccggatgtcaaagttaccattggtcccgtcatcgaaaacggatggtattacgattttgacaggcacgaccctttcacaccggaagacctcggtacaatcgaaaaaaaaatgaaagatatcatcaattcgcgcgacccagtacggacagaagtgtgggatcgatcagcggcaattgctcattataaaaagagcaatgagccctacaaagtagaactgatcgaagccattcctggagacgagccactgcgaatgtactggcatggagattggcaagatttgtgtcgtggtccacatcttcaaaatactggccaggtacctggtgactcatggaaactaatgtccgtagcgggcgcatattggcgtggtgacagtgagcggcccatgcttcagcggatttacggcgttgcctttaaaaacaaagaggacttgcgtgcgcatctaaactttctggaggaagcagcaaagcgcgatcacagaaaactaggacgcgaaatgaatctatttcatttcgaagaagtagcaccagggtctgttttctggcatccaagcggctggcacctatttcagactttgataaactatatgcgccgtcgtcaggaaaaagcaggatatgtcgaggtcaacacgccagacatcatggatcgagccttgtgggaaacctcagggcattggtttaactacatggaaaatatgtttctcgcacaaactcatgatgatcgcgattatgcgcttaaaccgatgaactgcccaggccatatgatgatctacaacgaaaatcttcgcagttatcgtgacttaccgatgaagatttctgaatttggcaaggtgcaccgctacgagccttcaggagcattgcatggattgctgcgtgtacgcagtttta

SEQ ID NO: 303341 - DNA, 898 bp, Unknown
  Bacterial polypeptide expressing nucleotide sequence isolated from the Sargasso Sea
cttatatataagagcgaatattcgttcgtataaagagttgcctctaagatattttgagttaggttctgtgtacagatacgaaaaatctggtgttttacatggcctattaagagctagaggttttacacaagacgatgctcatattttttgtacaacagaccaaattgaagatgagatacttaacctattaacattttcaataaagttattaaaatcatttggctttgactcaattgaagcagatctttctacaagacctgaaaaatcaattggaaataatgatgattgggagaaagcaacaaatagtcttaagtctgcgctcgagaatcaaaatatttcttatgtaacagctcatggagaaggtgcattttacggtccgaaaatagacttacatgtaaaagatgcaattggtagacgatggcaattatcaacaatacaagttgattttgcacaacctgataatttcgatctgcaattcgttgatagtaataataaaagagtcaaaccagttatgattcacagagcattgcttggatctattgaaagatttactggaattcttattgaaaattatgcaggagaatttccaggttggttatccccagtacagataaaagttcttaccattggtgatgtaagtaattatttaaataaaatttttaaatcattaaaaggatttagatatgaagttgacgatcgaaacttacgacttggtgaaaaattacatgatgcgtcaaaagataagatccctatcactctaattgttggtgaaaaagatgaattatcaaatactttagctataaatatacgttcacaagaaaaccagcaaaatgtgaaatacgaagacgctattaaacaaataaaagctaatcttaagacacctatttttaaaatataa

SEQ ID NO: 303342 - DNA, 677 bp, Unknown
  Bacterial polypeptide expressing nucleotide sequence isolated from the Sargasso Sea
tgaaaatgttttattaaaatattctgataggccaaaaataagagttggtgatgataaagttggggataaatcagaatctgccttgctagaggcaatcaaaaaatcaaaattaaaatatgaaattaataaaggagaaggtgcattttatggacccaaaattgaatttgttttaacagatgctattgggcgtgattggcaatgtggaactttacaagtagatttgaatttaccttcaagacttggagctgcatatgttgcaagcgatggatcaaaaaaagtaccagtaatgttacatcgtgctttatttggctctttggaaagatttattgggatactaatagaacattatgctggaaagttaccattgtggcttgctccaataaaagccgttgttcttccaattgctttagaatttgataattatgcaaaaaaaatatttgaacaatgcatgaaagcaggtataaacaccgaagtggatttaaaaaatcaaaaaataaattataaaattagggaacactctttatccaaggtaccactcttgttaatctgcggagaaaaagaagttaaagacaatactgttacaattagaaaattaggttcagaaaaacaagaaacactttcacttgagcaggctattagaaacatatctcaaaaaaacaaatttcctattaattaag

SEQ ID NO: 303343 - DNA, 190 bp, Unknown
  Bacterial polypeptide expressing nucleotide sequence isolated from the Sargasso Sea
ctgcttcgagtaagggcttttacacaagacgatgctcatattttttgcacagaggatcagataactcaagagtcattaaccgtcacaaatctgattttggaaatttataaagcacttggatttgaaaatgtaatactaaaatactctgatagaccagaaaaacgagttggagatgataatatatgggata

SEQ ID NO: 303344 - DNA, 316 bp, Unknown
  Bacterial polypeptide expressing nucleotide sequence isolated from the Sargasso Sea
atgccagctataacattgtcagatggtaaaaagatttcattttcaaaaaaaattgatggttttgaaataacaaataaaattagcaagtctttatccaaagaagcttgcataatgactgtagatggcgagcttaaggatctaaatttttcaattaataaagacgctaaagttaaaataatcactgcaaaagacaaagagggtttagaggtcatgagacatgatgctgctcatgtactagcgatggcagttcaagagttatttcctggaacacaagtaactatcgggccagttattgaggatggtttttattacgatt

SEQ ID NO: 303345 - DNA, 742 bp, Unknown
  Bacterial polypeptide expressing nucleotide sequence isolated from the Sargasso Sea
ataaaaccaatgaactgtcctggctgtgttcaagtttttaaccaaggcttaaaaagctacagagatttaccactaaaattgtcagagtttggaaaagtgcatagatatgaaccatcaggtgctttacatggattattgagagtaagagcttttacacaggatgatgcgcatattttttgtactgaagatcaaataactgaagaaacattagaggtaactaatttaattttagaaatttataaggcgcttggatttgaagacgtaatattaaaatattcagatagaccagaaaaaagagttggtgatgacagtgtttgggacaaatctgaagccgctctcttatcagcaataaaaaaatcaaaacttgaatactctattaacaaaggcgaaggagctttctatgggccaaaaatagaatttgttttaagagatgctatcggtcgagattggcaatgtggaacattacaagttgatttaaatttgccaaatagattaggcgcaacatttgttgataaagatggaacgaaaaaagttccagttatgttacatagagctttatttggatctctagagaggtttataggaattttaatagaaaattatgcaggaaaattgcctttttggttatctccagcacaagctgttgtgtgtccaatagcagaagaaaacaatgattatgttaaaaaaaaatttgaagatttatttaaagacaggtataaaatgcgaagtggattaagaaacg

SEQ ID NO: 303346 - DNA, 714 bp, Unknown
  Bacterial polypeptide expressing nucleotide sequence isolated from the Sargasso Sea
agaaaattgggaaaagaaatggatctttttcattttagagaagaaagtccaggatctgttttttggcacgaaaaaggttgggcactatttcaaaagctaatagattacatgagaatgaagcaagatattgctggctataaagaaataaatacaccagaggttttagatcgaactttgtgggaaaaatctggacattgggaaaaatttggatctaacatgtacacttcaataacacctgatgagaaagtttttgcaataaaacctatgaattgtccaggctgcatagaggtttttaatcaaggtcttaaaagttacaaagatttacctttaaaaatgtcagagtttggcaaagtacatcgttacgaaccatctggggcattgcatgggttattgagggtcagagcatttacacaagatgatgcacatattttttgtactgaggatcaaattacaaaagaatgtttgatagtaactaatcttatcttagaaatttataaagatttaggttttgaaaatgttattttaaaatattccgatagacccaaattaagagttggagatgatagtgtgtgggataaagctgaaaatgctttgttagaggctgtcaaagcaactaaactagaatatacaataaatacaggagaaggtgcattttatggacctaaaattgaatttgttttaagagacgccataggaagagattggcaatgtgga

SEQ ID NO: 303347 - DNA, 674 bp, Unknown
  Bacterial polypeptide expressing nucleotide sequence isolated from the Sargasso Sea
catatcttctgcatggaaagccagatcgaggaagaaacgaagctgttcatcgatctgctgtcgtccgtttaccgcgacttcgggttcgaggattttgccgtcaaattcgccgaccggccggaagtgcgcgcgggcgaagacgctgtctgggaccgcgccgaaaaagcgcttatggatgcgacgaaagcagcgggtatcgaaatggacatgaacctcggagaaggcgcgttctacggtccaaagcttgagttcgtgctgcgcgacgcgatcggtcgggaatggcaatgcggcacgctgcaggcggatttcgtactacccgaacgccttgacgccagctatgtcggcgaagatggcgaacgccaccggcccgtcatgcttcatcgcgcgatcctcggctcctttgagcgattccttggcgtcctgctcgagcattttgccggtcgcctgccgctctggttgtcgcccgtgcagacgacgattgcgacgatcacgagcgacgccgacgattacgcccaggatgtgttggatgcttgcctaaaggccggggttcgcgccgaagcggatcttcggaatgaaaagatcaactacaagattcgcgagcacagcgtcgcaaaggttccgacgatacttgtcgtcggcaaacgcgaggcggaagaacgtactgtggccctgcg

SEQ ID NO: 303348 - DNA, 880 bp, Unknown
  Bacterial polypeptide expressing nucleotide sequence isolated from the Sargasso Sea
caccatgttgcagcgcatttacggcacggcatttttcgataagaaggacctcaaaaaacacctgcaccgtctcgaagaggcgaagaagcgggatcatcggcgtctcggtcgggaactcgggcttttcgcagtgagcgagaagggcgatttgtaccacgatgaggcgtcgggtcgatccttctttgaggagatcggacaaggcttggtgttgtggctgccgcgtggtgctcgcgtccgcagcctgctcgaagacttttggcgttcaacgcaccgccgtgcgggctatgagccggtgtattcaccgcatattgcccacgccgatctgtggcgcatttcagggcatttgggcttctacaacgagagcatgtacaagcccatcgcggtggacgatgaggagtatctcctcaagccgatgaactgccccttccatgtcatgatctacaaaaaccaagcgcattcgtatcgggaccttccggttcgattggctgagctggggacggtttatcgttacgaattggccggggcccttcatgggatgatgcgggtacgtggctttacgcaggacgatgcccacatcatttgtgcggaggagagtctggaagctgaactcagcaaggtgctgaaattggccttgggttacctgcgagccttcgggtttgaggcctttgatgtgatgctttcaacacgccctgagaaatttgtgggggaacccggcttgtggtcccgcgccgaagatgccctgcgtcactccattgaggccaatggcctggagtttggtgtggatgaagggggcggcgcattttacggccccaaaattgacgtcaaaattaaggacgccattggtcgcacctggcaatgcagtaccattcaactcgattca

SEQ ID NO: 303349 - DNA, 865 bp, Unknown
  Bacterial polypeptide expressing nucleotide sequence isolated from the Sargasso Sea
agagaaatactcaaaaaaaatgattatttagaaattaaaaccccacaagctgttgataaatctctttgggaaaaatccggtcattgggaaaaatttagagatgatatgttcactactgcatcagaaaatagaacttatgcaattaagccaatgaattgtccatgccatattcaagtatttaatcaaggtttaaaaagttataaggatttacctattcgtcttgctgaatttggttcttgccacagaaatgaaccttctggtgcactacacggcttaatgagagtaagaaactttactcaagatgatgcgcacatattttgtacagaagagcaaattcaagaagaggtatcaacttttatagatcttgttttcgaggtttataaaacttttggatttgatgaaatcattatcaaattatcaacccgtccagaaaaaagggtaggtagtgaagagatttgggataaatcagaggaggctcttaccaaagctctcgataataagaacctaaaatgggaactccagccaggagagggggctttttatggtccaaaaatagaattctccttaaaagattgtcttaacagagtttggcaatgcggtactattcaggttgatttctcaatgcctattagattggatgcaacttatatagatattgataatgagaaaagaaatccagttatgttgcatagagcaattttaggatcctttgaaagatttataggaatcttaattgaacaatatgaggcaaaattcccaatttggcttgcgccttatcaaataattttattgagcattactgatagaaatattgaaaaatgtttaaagtttaatgaattaataaataaaaatgggttatcgatca

SEQ ID NO: 303350 - DNA, 840 bp, Unknown
  Bacterial polypeptide expressing nucleotide sequence isolated from the Sargasso Sea
aatatatggtacgagttgggcaactcaaaaagatctagatgaatatttgaaaagaatagaagaagccgaaaaaagagatcacagaaaattaggtagagaaatggatttatttcattttagagaagaaagccctggctcagtattttggcatgaaagaggatggggtttgtttcaaaagctcattaactacatgagaagcagacaagatgcagctggttataaagaggtcaatactccagaggttctagatagacaactatgggaaaaatctgggcattgggaaaaatatggagaaaacatgtatacttctgaaacaccagatgagaaagtttttgcaattaaaccaatgaattgtcctggtcatatccaggtatttaatcaaggcttaaaaagttacagagatcttccgttacgttttgctgaatttgggaaagttcatcgttatgagccatcaggcgctttacatggtttattaagagtaagagcctttactcaagatgatgcccatattttttgcactgaagatcaaattactagcgaatgtttaattgttacaaatctaatactagatatttataaggagcttggttttgaaaatgtgattctaaaatatgcagataggccagaagtaagagttggtgatgattcagtttgggataaagcagaagcctctttgcttgaagccgttaaagcttctaaattagaatatactattaataaaggtgagggagcattttatggtcctaaaattgaatttgttttacgagatgctattggcagagattggcaatgtggaactttacaagtagatttaaatttacctggaagattggatgcttc

SEQ ID NO: 303351 - DNA, 826 bp, Unknown
  Bacterial polypeptide expressing nucleotide sequence isolated from the Sargasso Sea
tggagagttaaaagatttaaatttttctattactaaagatgcagatgtaaaaataatcacgtcaaaagataaagaagggctggaagttataagacatgatgctgcacatgtattagcaatggctgtacaagaattatttcctggcacccaggtaacaattggacctgtcattcaagatggtttttattacgattttgcaagaaaggaaccatttacaaatgaagatttacaaaagatagaaaacaaaatgaaagagatagtagatcgtaatgacctaactaaaagagaaatttgggaaagagataaagctattaaacattttgaagaaataggagaacactataaatcaaaaataatacaagatattccaaaaggtgaaaaaatttcaatttatcatcatgggaaatggcatgatctttgcagaggtccacatcttccctcaacaggaaaaattggaaagtcctttaagcttataaaagtttcaggtgcttactggagaggagattcaaaaaatgaaatgttacaaaggatttatggaacatgctggagaagtaaaaaagaattagatgattatcttttaagattagaagaagcagaaaaaagagatcacagaaaattgggtaaagagatggatttatttcatttcagagaagaaagcccgggcgcagtattttggcatcataaaggatgggccctatttcaaacgcttataagttacatgagacaaaaacaaaaaaacgctggttataaagaaattaatacaccagagatacttgataaaactctatgggagcagtcaggacattgggaaaaattggagagaata

SEQ ID NO: 303352 - DNA, 793 bp, Unknown
  Bacterial polypeptide expressing nucleotide sequence isolated from the Sargasso Sea
gctcatattttttgtacaactgaccaggttgattcagaatttaaaaacactattgatttagttttatatgtatttaaatctttaggattcagtgatttttatgctcaagtctcattaagagatccggataatccagaaaaatatataggatcaaacgaaaactgggaaattgctgaacaagcaattttaaattcagcaaaagaaaaggatttaaattataaagttgaatatggagaagccgctttttatggacctaagcttgattttatggttaaagatgcacttggcagaagttggcaactaggtactatacaggtagattacaacctgcctgaaaggttcgacctaacatataaaggaaaaaataatgaagatcttagacctgttatgcttcacagagcaccatttggtagcatggaaagatttgttgcaattcttttagaacatacaggcggattatttccactatggcttgcatcaactcaggtggagatcttaattgtaagtgagaactttaaaaattatgcccaaaaagttttaaatatcttagaaaatcacgaaattcgcgcccacttagatgatagaaatgagactgttggaaagaaaattagagaatctgagataaataaggttccttttatgattgttgttggtgaaaatgaagtgaaaaatgaaacaatctctatcagaagacatcatggagaagatctaggtgaaatgaaggttgaaaaatttattgatataattagtaaagagatttcagattgtatcccaaaatttaatattaactaaa

SEQ ID NO: 303353 - DNA, 719 bp, Unknown
  Bacterial polypeptide expressing nucleotide sequence isolated from the Sargasso Sea
aatgttacaaagaatttatggaacatcttgggcatcccaaaaagaacttgatgactatcttaaaagaatagaagaagctgagaaaagagatcatagaaaattaggtaaagaaatggacttatttcattttagagaagaaagtccaggagcagtattttggcatgataaaggatgggcactttttcaaaagcttgttagttatatgagagtgaagcaagaaaatgctgaatataaagaaataaatactcctgaaatattagatagatctttatgggaaaaatcaggacactgggaaaaatttggagaaaatatgtacacatccacaactccggatgaaaaagtttttgcgataaaaccaatgaattgcccgggctgcgttcaagtttataatcaaggattaaaaagttatagagaccttccattaaaaatgtcagaatttggtaaagtgcataggtatgaaccatctggagcgcttcacgggctattaagagttagagcatttactcaagatgatgcacatatattttgtaccgaagatcaaataacagaagagtgtttgagtgttacaaacttgatattagaaatttataaagatttgggatttgaaaatgtaattttaaaatattctgatagaccagaagttagagttggtgaggatagcgtatgggataagtcggagacagctttattaaaagctatcaaagaatctaaattagaat

SEQ ID NO: 303354 - DNA, 871 bp, Unknown
  Bacterial polypeptide expressing nucleotide sequence isolated from the Sargasso Sea
gtctatttattcaactctaaaatcttatatgtcagatatgcaaaagaaagctgactataaggaaattaatactccattagtgatagataggaagctttgggaaaaatcgggacattgggataaatatagagaaaacatgtttattactgaaatcgatgaagagcatgcaaatgaaaaaagagtaaatgctttgaaacctatgaattgtccaggacatgttcaagtttataaccaaggcgtaagatcatataaagaacttccatttagattatgtgaatttggttcatgtcatcgatatgaagcatcaggtaccatgcatggtttaatgagagtaaggggtttcacgcaagatgatgggcatattttccttacagaggatcaaatcgagtcggaaacagcgatctttattgatttactatcaaaggtttatgctgaccttggatttaatgaatttgaaattaaactgtcaacacgtcctgaacaaagagtcggatctgatgaaatttgggacaaagctgaattgtctctaaaaaatgcaatcgaaaaacttggattggaatatagaattgatgaaggagatggagcattttatggtccaaaattagattttgtattaacagatgctattggaagaaagtggcaatgcggaactcttcagctagatttcaatcttgctgatcgactagatgctcaatatgttgcagaggatggaaataaatataatccagttatgttccatagagcaattcttggttcttttgaaagattcataggtattttaattgagaactacagtggaaatcttcctttatggctagctccaactcaagtgactgtttgttcattacagatgaggctgatgattatgtaa

SEQ ID NO: 303355 - DNA, 739 bp, Unknown
  Bacterial polypeptide expressing nucleotide sequence isolated from the Sargasso Sea
ttcgataacgctgtttctgtattagatgttgcaaatgatattggccctgttttagccaaagcaaccattgcaggaaaagtaaacggtgagttagttgacgccgttgatatgattgacgcggacgcacaacttcaaattattactgcaaaagacgatgaaggtttagaaattcttcgtcacagttgcgcgcacttgttaggtcacgctatcaaacaactttggcctaacaccaaaatggctatcggcccagttatcgacaacggtttctattacgacgttgatatggaagaaagcctaacccaggaagatttagccaaactagaaaagcgtatgcttgaactggctaaaaccaattacaacgtggttaaaaataaagtcagctggcaagaagcacgcgacgcatttgaagcacgcggtgaaagctacaaaatggaaattcttgatgagaacatcagcaaggacgaccgcccggcactttatcaccatgaagaatacacagatatgtgtcgtggcccacacgtgccaaacatgaagttctgccaccacttcaaattgatgaaagtggcaggtgcttactggcgtggcgacagcgacaacaaaatgcttcagcgtatttacggtactgcgtgggcagataagaagcagcttaaatcttacctacagcgcttagaagaagctgaaaagcgcgaccaccgtaaaattggtaaagccctaaaccttttccattggcaagagagaa

SEQ ID NO: 303356 - DNA, 579 bp, Unknown
  Bacterial polypeptide expressing nucleotide sequence isolated from the Sargasso Sea
tatgccaaaagttactcttcctgacggctcttctcgtgactattccgaagctatttcaatttttgatgtcgctagtgacatcggcccagggttggctaaagcagcccttgcggggaaggtggacggagagctggtagacacctccttcataataaaaaaagatgccgaacttgcgatcgttacctctaaaaacgacgaagcattagagctaataagacatgatgcggcccacgtgatggcgcaagcggtccaggaattattcccggggacacaagtgactattggtcccgccatagaagatggcttctactatgatttcgcaaggcaagaaccttttagtctggaggatctcgagaagatcgagggtcgaatggaagacatagtcagcaggaatttgctgattgaacgcgaggtttgggagagagatgaggcaaagcgagtttttgccgagatcggagaaaaatacaaagtcgagataattgaggacattattccagaaggggaggaagtctcagtatatcgccagggggattggttcgatgtttgccgaggtccgcatttgccgagcactggaaatct

SEQ ID NO: 303357 - DNA, 822 bp, Unknown
  Bacterial polypeptide expressing nucleotide sequence isolated from the Sargasso Sea
ctggtgcactacacggcttaatgagagtaagaaactttactcaagatgatgcacacatcttctgcacagaggagcaaattcaagaagaggtttctaattttattgatcttgttttcgaggtttacaaaacttttggttttgatgaaatcattatcaaattatcaacccgtcctgaaaaaagagtaggtagtgaagagatttgggataaatcagaagaggctctttctcaagctctcgataataagaacctaaaatgggaactccaacctggagaaggtgctttttatggtccaaaaattgaattctctttaaaagattgtcttaatagagtctggcagtgtggaactattcaggtagatttctcaatgcctattagattagatgcaacttatatagacattaataatgaaaaaagaaatccagttatgcttcatagagcaattttaggatcctttgagagatttatcggaattttaattgaacaatatgaggcgaaattcccaatttggcttgctcctcatcaaattattttattgagcattactgatagaaatattgaaaagtgtttaaagtttaatgaattattaaataataatggttacagatcaaaagttgatattaggaatgaaaagataggatataaaataagggaggctactcttggtagagttccgttaattgctgttattggagataaagaagaggaaattgattcagtcgccttaagagctttggacggaagaaatttaggaattttcaatttacctaatctatacaagttaattaatgaattagtagaaaaaaaaggtagaacagagtaat

SEQ ID NO: 303358 - DNA, 730 bp, Unknown
  Bacterial polypeptide expressing nucleotide sequence isolated from the Sargasso Sea
gagtggcattagtgtgactaaattaattttagacatctataaggatttaggattcaaaaaagtttttttaaagtattcagacagacctgaaaaaagagtcggggaagactctgtgtgggataaatcagaaaaagcattactagctgctattaaaaaaacaaaattagaatacactataaataaaggtgaaggagctttctatggaccaaaaattgaatttgttttaagggatgcaatcggaagagactggcaatgtggaacactccaggtcgatttgaatttacctggtagacttggagcaactttcgtagataaagatggcagtaaaaaaacacctgtaatgcttcatcgagcgttatttggttctttagaaagatttattggaattttaattgaaaattatgctggaaagtttccgctatggctttcaccattacaagctgttgtattacccattgccgaggaacacaatgactatgcaaaaaaaatatttgaagaactcttcaaagaaggtataaattgcgaagtggatttaagaaatcaaaaaattaattataaaataagagaacattctttatcaaaaattccattattgttaatatgtggaaaaaaagaaatttcagataaaagtattactataagaaaattgggttctgagaaacaggaaactttaaaatttacagaagctttgaaatccatcaaaacattaaataaacttccaattaaataa

SEQ ID NO: 303359 - DNA, 927 bp, Unknown
  Bacterial polypeptide expressing nucleotide sequence isolated from the Sargasso Sea
tttcattttagagaagaaagtccaggagctgttttttggcacgaaaaaggctgggcattgtttcaaaaacttgtttcatacatgagatacaaacaagatcaagcgggatacaaagaaataaatactcctgaaattttagatagatctttgtgggaaaaatcaggacactgggaaaagtttggtgcaaatatgtatacttctgaaactccagatcaaaaaatatttgctattaaacccatgaattgtcctggatgtgttcaagtatttaatcaaggtttaaaaagttacagagatctaccttttaaaatgtctgaattcggaaaagttcacagatatgaaccatcaggtgctttgcatgggcttctaagagtaagagccttcactcaggatgatgcacatattttttgtaccgaagatcaaattactgaagagtgcttgtcagttacaaatttaatattagaaatatataaagatttaggatttaaagatgtaatattaaaatattcagatagaccagatttaagagttggagatgatgcggtatgggataaatcagaggctgcactgatcaaagcggtagaagaatcaaaattagaatatagtattaataaaggagaaggtgctttttatggaccaaaaatagaatttgttttaagagatgcaatcggtagagattggcagtgtggaaccttgcaagttgatttaaacttaccaggaagattgggagctagttatgtcgataaagatggatcaaaaaaaattccagtcatgcttcatagagctttatttggttcactagaaagattcattggaattctgattgaaaattatgcaggtaaattgccattttggatttcaccgcttcagactgttgtaatacctatttcagaggattttaatgaatatgctttgtctgttcataaaaaa

SEQ ID NO: 303360 - DNA, 637 bp, Unknown
  Bacterial polypeptide expressing nucleotide sequence isolated from the Sargasso Sea
agagtcggagacgatagtatttgggataagtctgaagcagctctattatcagcaattaaaaaatctaaacttgaatatacaattaacaaaggtgaaggagccttttatggaccaaaaatagaatttgttttaagagatgcgataggacgagattggcaatgtggaactctacaagtagatttaaatttaccaaatagattaggagcaacgtttgttgacaaagacggaacaaaaaaggttccagttatgttacacagagctctattcggttctttagagagatttataggaattttaatagaaaattatgcaggaaaattgcctttttggttgtcaccatcacaagcagtggtgtgtacaatcgcagaagagaataatgagtatgtaaaaaaattatttgaagatttatttaaagaaggtataaaatgtgaagtggatttaagaaacgagaaaataaattataaaattagagaacattctctagctaaagtaccagtgattattgtttgtggaaaagaagaggttgctggtaacactgttacaattagaagactgggatctgaaaaacaagaaaagatgaaaagagaagacctgattaaaaatatgcttaaagaaaataagttgcccttaaactaag

SEQ ID NO: 303361 - DNA, 339 bp, Unknown
  Bacterial polypeptide expressing nucleotide sequence isolated from the Sargasso Sea
gcgcaagcccgccatggttgtctccgaagcaggtctcaatcctgaatatcacagacagtcaggccgaatattgcacggaaatcgccgaaaaactcaaagctgcgggcttcagggccgatgcggacttgagaaatgagaagatcggctttaaaatccgcgagcatactttacacaaggtccctttccagctcgtggtgggggacaaagaaaaagaaacaaacactgtcgcagtgcgcacccgtaagggtgaagacctcggtacaatgagtgtcgacgagtttattgccatcctcgagaaggcgattgcagaacgcggccggtttggaatggagaactgat

SEQ ID NO: 303362 - DNA, 841 bp, Unknown
  Bacterial polypeptide expressing nucleotide sequence isolated from the Sargasso Sea
aactttaaaggcaaagtaaacggtttacaggttgctgaaaaaataagtaaatcactttctaaacaggctttagtaattgctgttgatggaaatttaaaagatttaaattatgaaatagataaagattgttcagtcaaaatttatacatcaaaagataaagaaggattagaaaccataagacatgatacagcccatatattggcaatggctgtacaagaactttttcctggtacacaagtaactattggaccggtaattgaagatggattttattatgactttgcaagaaaagaaccatttaccgaagaagatttaagaaaaatagaaaaaaaaatgttagaaattgtagagagagacgaacctactcatagagaagtatggaagagagacaaggctgttgaacactttaaaaaagcaggagaaatttataaggctgaaataattcaagatataccaaaagaagaagatgtttccgtttacttccatggaaaatggcatgatctatgtagaggacctcatttgacatctaccggaaaaattggaaaatattttaaacttatgaaagtttccggtgcttactggagaggtgattcaaataatgaaatgctccaacgaatttatggaactagctggtctacacagaaagagttagatgattatttgcttagaattgaggaagcagaaaggagagatcatagaaaattaggaaaagaaatggatttgtttcattttagggaagaaagtccaggatcagttttttggcacgaaaaaggttggttattatttcagaaacttatcgaatatatgagatctaaacaaaaattatctggttacaaagaaa

SEQ ID NO: 303363 - DNA, 643 bp, Unknown
  Bacterial polypeptide expressing nucleotide sequence isolated from the Sargasso Sea
gatgaaaatttgggaaaaagcagaaaatgctatcatcagcgcagcaaaagacaaaggtctaaatactgttgttgaatatggtgaagctgctttttatggacctaaattagattttatggtaaaagatgcattaggtagaagttggcaacttggaacaatacaagttgactataatttacctgagcgttttgacctaacatataaaggtgctgatgataaattacatcgcccagttatgattcatcgtgctccttttggttcgatggaacgttttatagcaattttattagaacataccgcaggaaatttcccattatggttaatgcctgagcaagctattatattgtctttgagtgagaaatatgaaaattatgcaaaaaaagttttagaattgctagaaaatcacgaaattcgcgccctaattgataaccgcaacgagactattggcaagaaaattagagatgccgaaatgcaaaaattgccattcatgctgattgttggtgaagaagaagagaaaaatggaaccatttcagttcgtcgacacggacaagaaggaaaaggaaacataaccgtttcaattgaagaattcgtatcaattgcaaacgaagaaataagtaatacactaaaaacatttgaagtttaa

SEQ ID NO: 303364 - DNA, 375 bp, Unknown
  Bacterial polypeptide expressing nucleotide sequence isolated from the Sargasso Sea
aatgcctcaaattcaattattagatggaaaaaaaatttcttttacgaaatcaatcaatggttttgatttaacaaaaaaaattagcaaatctttagagaaggctgctcttattatggaggtcgacgggcaactaaaagatttaagccatgaaattacaaaaaactctaaagtaagaattattacatcaaaagataaagagggtttagaggtcataagacatgatgcagcacatataatggcgatggcagttcaagagttatttccaggaactcaagttacgataggcccggttattgaaaatggtttctattatgattttgccagaaaggaaccttttactagcgatgatttagaaaaagtagaaaaaaaaatgtc

SEQ ID NO: 303365 - DNA, 662 bp, Unknown
  Bacterial polypeptide expressing nucleotide sequence isolated from the Sargasso Sea
taaatattctgatagaccggatttaagagttggagatgatgcagtttgggataaatctgaagcagcattacttaaagcagtggaagcttcaaagttagaatacagtattaataaaggtgaaggggccttttacgggccaaagatagaatttgtattaagggatgcaatcggaagagattggcaatgtgggactttacaggttgatttaaatttacctggtagattgggtgctagttatattgacaaagatggtacaaaaaaaattcctgttatgcttcatagggctttattcggttctcttgaaagattcataggtatacttatagaaaactatgctggaaaattacctttttggatttctccattgcaaacagttgtaattcccatatcagaagattttaatgattatgctttatcagttcatagaaaaattaaaaatgctggtatttcttgcgatgtagatttaaaaaatcataatttaaattataaaattcgtgaacattctaactcaaaggttccaatgctattaatatgcggaaaaaaagaagttgactctaatgctgtaactattagaagattggattctaataaacaagaaaatatgttaattgacgagtttataaaaaaatataccgatttaaacaaagcttcatctatttagt

SEQ ID NO: 303366 - DNA, 754 bp, Unknown
  Bacterial polypeptide expressing nucleotide sequence isolated from the Sargasso Sea
acagaagatgatctaaaaaaaatagaaaaaagaatgtcagaaataatcgacaaagatgtaaaaacaagaagggaagtttgggaaagagataaagcaattaaccattttagaaaaattggtgaaaaatataaagcagaaattatagaaagtatcccggaaaatgaggagctatctgtttatcatcatggagatacttggcatgatttatgtcgaggtccacacctaatatcttctggaaaaattggtaaagcttttaaactcacaaaagttgcaggagcttattggcgtggagactcaaaaaatgagatgttacaaagaatttatggaactggttgggcttctaaaaaagacttagatgaatatttaaaaagaattgaggaagctgagaaaagagatcatcgaaaacttggtaaagaaatggatttatttcattttagagaggaaagtccaggatcagttttttggcatgaaaagggttgggctttatttcaaaaattaataaattatatgagaactcgtcaaaacgctgcaggatatcgagaagtaaatactccagaggttttagatagattattatgggaaaaatcaggtcattgggaaaaatatggagagaatatgtatacttccgagactcctgatgaaaaagtctttgctataaaacctatgaactgcccaggtcatatacaagtttttaatcagggtttaaaaagttatagagatttaccattaagaataacagaatttggtaaagtaa

SEQ ID NO: 303367 - DNA, 835 bp, Unknown
  Bacterial polypeptide expressing nucleotide sequence isolated from the Sargasso Sea
tataaaataccaacttgttaaagatattcctgaaaatgagcagatttctatgtattggcacggtcattggcaagatctttgtagaggtccccatttagcaaatactggccaagttcctggggattgttttaaactgatgaacatagccggggcctattggaagggtgacagcaataataaaatgttacaacgaatttatggggtcgcttttagaaataaagaagaactaaaaaaacacctcattttcttagaagaagcaaaaaagagagatcatagaaatattgctaaagaaatggaactctttcatatgcaggaagaagccccaggaatggttttctggcaccctaatggttggcgaatttaccagattcttcaaagttatatgcagagagagttagaaagaggtgggtattcagaagttaaaactccgcaagtagtaggtagaaaattatgggaagactcaggtcattgggataaatttcaggaacatatgtttatagtagaagtagaagaagaaggagttaaagaaaaaaaaattaatgctcttaaaccaatgaattgcccttgccatatccagatatacaaccaaggtattaaatcatacagagatttgcctcttagaatggcagagtttggttcttgtcatagatatgaaccatctggtgctatgcatggtataatgagagtaaggggatttgtacaagatgacgctcatattttttgtacagaagaacaaatagaaaatgaaactaaaaaatttattgaattattatcaaaaatttatcaagacttgggatttaaagaatataaaattaaattctcggacagaccagaa

SEQ ID NO: 303368 - DNA, 839 bp, Unknown
  Bacterial polypeptide expressing nucleotide sequence isolated from the Sargasso Sea
aaagaactagatgagtatttgaaaagaattgaagaatctgaaaaaagagatcatagaaaattaggcaaagaaatggatttatttcattttagagaagaaagtccaggtgcagttttttggcatcacaaaggatgggctttatttcaaaaacttgttggatatatgagacaaaaacaaaaaaatgctggttataaggagattaatactccagaaatattagacaagtctctttgggaacagtcgggtcattgggaaaaatttggtgaaaatatgtttacctcagaaacaccagatgaaaaaacttttgcaatcaaacctatgaattgcccaggatgtattcaagtatttaaccagggtttaaaaagttatagagatcttcctctcaaactttccgaatttggaaaagtacacagatatgaaccttcaggggcactacatggtttgttaagagtaagagcatttacccaagacgatgcacatattttttgcacagaagatcaaattactgaagaatgtttaagcgtaactaacttaatattagaaatttataaagaccttggattcgaaaatgttctattacaattttctgatagacctcaaaaacgagtaggagatgataaaatttgggacaaagcagaatctgcattactaaaagcaataaaacaatcgaagttagaatatgaaatcaataaaggcgaaggagcgttctatggtccaaaaatagattttgtacttcgggatactattggacgtgactggcaatgtggaaccttgcaggtggatttaaatcttccatcaagacttggagcatcatatgttgctagcgatggatcaaaaaa

SEQ ID NO: 303369 - DNA, 715 bp, Unknown
  Bacterial polypeptide expressing nucleotide sequence isolated from the Sargasso Sea
gcaaaacaagccatggtcataagtgttaatggtgaactaaaagatcttgattatttaattgaaaatgattgttctgtaaaaatttttacctccaaaaaccctgagggcctagaaattataagacatgacacagctcatattttagctatggctgttcaagagttatttcccggaacacaggttacgattggaccagtaattgaaaatggattttattatgattttgcaagaaaagaaccatttacagaagatgatctaattaaaattgaaaataagatgaaggagattgttgatagaaacgagataacaaaaagggaagtttgggatagaaataaagcaataagtcattttaaaaaaaagggagaaacttataaagcggagctaattaaagctattcctgaaaatgaagatgtatcaatatattttcatggagaatggcatgatttatgtagaggtcctcatctttcctcaactggaaaaattggaaagaattttaaacttacaaaagtttcaggagcgtattggagaggagactctaataatgaaatgttgcaaagaatttatggtacaagctgggcaacacaaaaagatctagatgaatatttaaaaagaattgaagaggcagaaaaaagagatcatagaaaacttggaaaagaaatggacttatttcattttagagaagaaagtcctggatcagtatttggcacgaaaaggg

SEQ ID NO: 303370 - DNA, 823 bp, Unknown
  Bacterial polypeptide expressing nucleotide sequence isolated from the Sargasso Sea
agaaagccctggctctgtattttggcatgaaaaaggatggaacctttttcagaaattaatctcctatatgcgaactaaacaagatcacgcaggatataaagaaataaatacaccagaaattcttgatcgttcattatgggaaaaatctggtcattgggaaaaatttggtgcaaatatgtatacatctacaacacctgacgaaaaagtttttgcaataaaaccaatgaactgtccaggatgtgttcaagtgtttaatcaaggactaaaaagttacagacacttaccattaaaaatgtcggaatttggaaaagttcatagatatgagccatctggcgcattgcatggattgttaagggtaagagcattcacccaagatgatgcacatatattttgtactgaagagcaaattactcaagaatgcctatcagttacaaatttaattttagaaatttataaagatttgggatttgaaaatgtaatattgaaatattcagaccgaccagatctgagagttggagatgatgctgtatgggataaatcagaagctgctcttttagaggcaattaaagaaacaaaactagaatacactataaataaaggcgagggtgctttttatggtccaaaaattgagtttgttttaagggatgcaattggaagagattggcagtgtggaaccttacaagtagatttaaatttacctggaagattaggagcaacttacgttgaaaaagatggatcaaagaaaatacctgtaatgttgcatagagcattgtttggctccttggagagatttataggaatcttaattgaaaattattcaggt

SEQ ID NO: 303371 - DNA, 679 bp, Unknown
  Bacterial polypeptide expressing nucleotide sequence isolated from the Sargasso Sea
tataataagtttggctttgatgatttaaagattgagttatctacacgacctgaaaaaagagtagggagcgatgaaatatgggataaggctgaaagtagcttaatagaggcattggaggcaaataacatcaaatatttggaaaatccaggcgacggagctttttatggccctaaaattgacttttcacttaaagattctctctctagagtctggcaattgggcactattcagcttgatttttccatgcccgggagactagacgcatcatatgtcgacaaagagggtaataaagatgtgcctgtaatgatacatagggcaattttaggctcactagagaggtttgtgggaatattaatcgagcattattctggaaatctccctttttggctatctcctgtgcaagtgatgacactaaatataactgataaacatagatcttatgcagaagaggttaatagtaaattgttagattatggcatcagatcagaatgtgactacagcaacgaaaagattagctataaaattagaaatcatgctattactagggtaccatacatggttattgtcggtgataaagaactggaaaatcaaatgatttcagttagagatagatccggtaatgatttaggaagtttgcaacttgaggagtttgttgacttactgaaaaaaaatatttaac

SEQ ID NO: 303372 - DNA, 907 bp, Unknown
  Bacterial polypeptide expressing nucleotide sequence isolated from the Sargasso Sea
gatgatctaagaaagatagagttaaaaatgaaagatatagttgatcgtaatgaaataacaaaaagagaagtttgggaaagagacaaagcaataagtcatttcaaaaaaaaaggagaaatatacaaatcacaattaattgaaagtattccagatgacgaagaaatatcaatttatttccatggaaaatggcatgatttatgtaggggcccacatttatcctccacaggtaaaattggaaaatattttaaacttacaaaagttgctggagcatattggagagggaactctaataatgaaatgttacagagaatttatggaacctcttggtcttcaaaaaaacaattagatgaatatctaaaaagaatcgaagaggctgagaaaagggatcacagaaaaattggtaaagaaatggatctatttcattttagggaggaaagtccaggatcagtattttggcatcaaaaagggtggagtttgtttcagaaacttatttattatatgagagaaaaacaaaatcttgctgggtacaatgaaataaatacaccagaaatattagatagatccttgtgggaaaagtctgggcactgggaaaaatttggtgcgaatatgtatacaactactacaccagatgaaaaagtttttgctataaaaccaatgaattgtcccggttgtgttcaggtatttaatcaaggtcttaaaagctatagagatttaccacttaaaatgtcagaatttggaaaagttcatagatacgaaccttctggatcgttgcatggtttgttaagggtcagagcttttactcaagatgatgcacatattttttgtactgaagaacaaataacacaggagtgtttggctgtaacaaacttaatattaagcatttataaagatttaggtttgaaaatat

SEQ ID NO: 303373 - DNA, 364 bp, Unknown
  Bacterial polypeptide expressing nucleotide sequence isolated from the Sargasso Sea
aatgccagatattacgctcccagatgggtcattgcggtcatatgacggaccggtaacgccagcgacaattgctgctgacattgggccaggtcttgccaaagctgcattattggctgttgttgatgatgtcgaatgggacttaacccgtccgattgaagatgatgcgcgtttgtcgcttgtgacagccaaagatgagagggcgctggcattgttgcgccatgattgtgcgcatgtgatggccgaagcggttttggaactgtttcccgaaacacaggtgactatcgggccagcaatcgaaaatggcttttattatgattttcaccgtgaaaaaacctttagcgaagatgatcttgcggcgattgag

SEQ ID NO: 303374 - DNA, 945 bp, Unknown
  Bacterial polypeptide expressing nucleotide sequence isolated from the Sargasso Sea
aatgccgataataacattacctgacggaaacaatattgattttccaaataaagttactggactggaagtagctgaaaaaattagtaaatcattagctaaacaagccatgatcatgagtgttgacggtgagcttaaagatcttgattttcaaattgagcatgattgttctgtaaaaatctttacttcaaaaaattctgagggcttggaaactataaggcacgacacagcccatattttagctatggctgttcaagaattatttcctggcactcaagttacaattggaccagtgattgaaaatggattttattacgactttgctagaaaagaaccatttacagaggatgatcttattaaaattgaaaataaaatgaaagagattgttgacaggaatgaaattacaaaaagagaagtttgggatagaaaaaaagcaattagccactttaaagaaaaaggtgaaatttataaagctgagctgatagaatcgatacctgaaaatgaagatgtatcaatttattttcatggagaatggaatgatttatgtagaggcccacatctctcttccacaggtaaaattggtaaatattttaaacttacaaaagtgtcaggagcatattggagaggagattcgaataatgaaatgttacaaagaatatatggtactagttgggcgactcaaaaagatttagacgaatatttaaaaagaatacaagaagctgaaaaaagagatcatagaaaattaggtagagaaatggatttatttcattttagagaagaaagccctggttcagtattttggcatgaaagaggatggggtttatttcaaaagcttattaactacatgagaagcagaacagatgctgctggttataaagaagtaaataccccagaggtacttgacagacaattatggggaaaatctgggcattgggaaaaatatggaga

SEQ ID NO: 303375 - DNA, 662 bp, Unknown
  Bacterial polypeptide expressing nucleotide sequence isolated from the Sargasso Sea
aatgcctaatattaaattaccagatggaaattcaattaattttgaaaaaaatgttactggattgcaagtagcagagaagattagtaagtcactttcaaaacaagccttagttattagtgttgatggaaatttaaaagacttgaactatgaaatagataaagactgttctattaaaattcatacagcaaaagataaagaaggactagaaacaataagacatgatacagcgcatattttagcaatggcagtacaggaaatttttcctggtactcaagttacaattggaccagtaattgatgatggtttttattatgattttgcaagaaaagaaccatttactgaagaagatttaagaaaaatagaaaaaaagatgttagaaattgttgagagagatgagcctacccatagagaagtatggaagcgtgataaggccattgagcattttaagaaagtaggagaaatttataagtctgaaataattaaagatattccaaaagatgaagaggtttctgtttacttccatggaaaatggcatgacttatgcagaggaccacatttgatgtctactggaaaagctggaaaatattttaaacttatgaaagtttcaggtgcctactggagaggtgactcaaataatgaaatgctacaaagaatttatggaa

SEQ ID NO: 303376 - DNA, 760 bp, Unknown
  Bacterial polypeptide expressing nucleotide sequence isolated from the Sargasso Sea
gaagaggccgaaaaaagagatcacagaaaaattggaaaagaaatggatttatttcatttcagagaagagagccctggatctgtattttggcatcaaaaaggatggagtttatttcaaaaactcatttcatatatgagaatgaagcaagaaattgcaggatatcaggaaataaatactccagaaatattagatcgctcactctgggagaaatctggtcattgggaaaaatttggcgccaatatgtatacttctactactcctgatgaaaaagtatttgcaataaaaccgatgaattgtccaggctgtgttcaggtatttaatcaaggtttaaaaagttatcgagatttaccactaaaaatgtcagaatttggaaaggttcatagatatgaaccatctggagcgcttcatggattattaagagttagagcttttactcaagatgatgcacatattttttgtacagaagaacaaattaccgaagaatgtttaactgtaactaatttaattttggaaatttataaagatttaggctttgaagaagtaattttaaaatattctgatagaccagaattaagagttggggatgatcaagtttgggataaatcagaggctgctttacttgaagcaattaaagcaacaaaattagaatattctattaataagggtgaaggcgctttttatggtccaaaaatagaatttgttttaagagatgcgattggaagagattggcaatgtggaactttgcaagtagatttaaaaa

SEQ ID NO: 303377 - DNA, 579 bp, Unknown
  Bacterial polypeptide expressing nucleotide sequence isolated from the Sargasso Sea
aagaatcaaaattagaatatagtattaataaaggtgaaggtgctttttatggtcccaaaattgaatttgttttaagagacgcaataggtagagattggcaatgtggaactcttcaggtggatttaaatttaccagaaagacttggtgcatcatatgttgataaggatggatcaaaaaaaattccagtaatgctacatagagcattatttggatcacttgaaagatttataggaattctcatagaaaactatgctggaaaatttcctttttggataagtcccttacaagtagttgtcatacctgtatcagatgattttgatgaatactctaatgaagtagcaaataaggttaataatagtgggataaactgtcaagttgatttaaaaaatcacaatttaaattataaaataagagaacattcattagcaaaggtgcctattttgttaatttgcggaaaaaaagaagttgacactaacagtgtaaccattagaaagttggattctaatgatcaagaaaatatgaagttagataaatttttagaaaaatacaccgctttaaataaagcagtatcaaattaag

SEQ ID NO: 303378 - DNA, 814 bp, Unknown
  Bacterial polypeptide expressing nucleotide sequence isolated from the Sargasso Sea
tggtgcactacatggacttttaagagtaagagcttttactcaggacgatgcacacatattttgcactgaagagcagataacagatgaatgtattagtgttactaaattaatattagatatttataaagatctggggtttgaaaaggtatttcttaaatattctgacaggccagagaaaagagtcggggatgataaagtctgggataagtcagaaaaagctctgcttgaagcgattaaaaaaacaaaactggaatatactgttaataaaggagagggtgctttttatggtcccaaaatagaatttgttttgagagatgctataggaagggactggcaatgtggaactttacaagtagacttaaatttaccaggaagacttggagcgacttttgttgataaagatggaaccaaaaaaatacctgttatgctacacagagctctttttggatctttggagagatttattggtataattatagaaaattatgcaggcaaacttcccttctggctatcaccgtcacaaattgttgtgttacccatagctgaagagcacaatgattatgcaaaaaaaatatttaaagacatgtttaaagagggtataaaatgcgaagtggatttaagaaatcaaaaaattaattataaaattagagatcactctttgtcaaaagttccgtttctattaatatgcggaagtaaagaaataaaagataaaagtgtaacaatacgtaaattaggatccgaaaaacaagagactaaaaaaattaacaatgccattaaagaatttaaacaattaaataaccctccaataaattaa

SEQ ID NO: 303379 - DNA, 895 bp, Unknown
  Bacterial polypeptide expressing nucleotide sequence isolated from the Sargasso Sea
ttgcacgaaaaaggatggtcgctatttcaaaaacttgtctcatatatgagacacaaacaggatcaagcgggttataaagaaataaatacccccgaaattttagatagatctctttgggaaaaatctggtcactgggaaaagtttggtgcaaatatgtatacttctgaaacaccagatcaaaaaatatttgctatcaaaccaatgaattgtccgggctgtgttcaggtattcaatcagggtttaaaaagttatagagatttaccttttaaaatgtctgaatttggtaaagtgcatagatatgaaccgtccggtgccttacatggacttttgagagtaagagcctttacgcaggatgatgctcatattttttgcacagaagatcaaattacagaagagtgtctctcagtcacaaacttaattttagaaatttataaggatttaggatttgaaaatattattcttaaatattcagacagaccagacctaagagtaggcgatgatgcagtatgggataaatctgaagctgcattaataaaagcagttgaagcatcaaaacttgaatatagtattaataaaggagaaggtgctttttatggtccaaaaattgaatttgttttaagagatgcaattggaagagattggcaatgtggaactttacaggttgatttaaatttacctggaaggctaggtgcaagttatgtagatagagatggatcaaaaaaaatacctgttatgcttcacagagctttatttggatcacttgaaagatttataggaatattaattgaaaattacgccggtaaattacctttttggatttcgccattacaaactgttgttattccaatatctgaagatttcaatgattatgctatatcagttcataataaaatta

SEQ ID NO: 303380 - DNA, 709 bp, Unknown
  Bacterial polypeptide expressing nucleotide sequence isolated from the Sargasso Sea
acatacaagatttttaatcaaggtttaaaaagctatagagatcttccattaagaattactgagtttggaaaagttcatagatatgagccctctggagcacttcacggattattaagagttagggcatttacacaagacgatgctcatattttttgttctgaagatcaaattacaagtgaatgtttaaatgttacaaatttaattttagatatttataaagatttaggatttaataatgtaatattaaaatatgcagatcgtcctgaagttagagttggtgaagataaagtgtgggataaagcagaagcttcattgttagaagcggttaaagcctcaaaactagagtatagtatcaataaaggtgaaggagcattttatgggccaaaaatagaatttgttttaagagatgctattggtagagattggcaatgtggaacccttcaagttgatttaaatttacctggaagattagatgcatcttacgttgataaagatggaacaaaaaaagttccagttatgttacatagagctttatttggatctttagaaagatttataggaattttaatagaacattatgcaggtaaatttcctttttggatttcaccattacaaacagttgtaataccaatatccgaagattttgaagattatgcaaataaagtttctaaaaaaattaaattagcaggaatgagttcttatgttgatt

SEQ ID NO: 303381 - DNA, 818 bp, Unknown
  Bacterial polypeptide expressing nucleotide sequence isolated from the Sargasso Sea
aaaagataaagaaggtcttgaaacaatacgacacgatacggcacatattttagcaatggctgtacaagagttgtttccaggaacacaagttacaataggtcctgtcattgaagatggcttttactatgattttgctagaaaagaaccttttacagaagatgacctaaataaaattgaatataaaatgaaagaaatagttgagagggacgaaaaaactaaaagagaggtatggccaagaaaaaaagccattgatcattttaaaaaaattggtgaaatttataaagctgaaattattaaaagtattccagaaggagaagaggtttcaatttattttcatggaaaatggcatgatctttgtagaggtccacatctaacatctacaggaaaaataggaaagtattttaagctaacaaaagtttctggagcatattggagaggagactcaaataatgaaatgcttcaaagagtttatggtacaagctgggctacacaacaagatctagataattacttaaaaagaattgaagaagctgaaaaacgtgatcatagaaaattaggaaaattgatggatctttttcattttagagaagaaagtccaggtgcagttttctggcatgaaaaaggatgggcattatttcaaaaactagtttcttacatgaggcataagcaaaatcaagctggttataaagaaataaatacaccagaaattttagatagatctttgtgggaaaaatcaggccattgggaaaaatttggcgctaatatgtatacatccgaaacacctgatcaaaaaatatttgctattaaaccaatgaatt

SEQ ID NO: 303382 - DNA, 704 bp, Unknown
  Bacterial polypeptide expressing nucleotide sequence isolated from the Sargasso Sea
tttggatatttataaagatttaggttttaaaaaagtttttttaaaatattctgacagaccagaaaaaagagtaggagacgatgctgtctgggacaaatcagaaaaagctctactcgaggcaattaaaaaaactaaattagaatatactatcaataaaggagagggggcattttatggtccaaaaattgagtttgttttgcgcgatgctataggtcgtgattggcagtgtggaacgcttcaggttgatttaaatttaccaaaaagactcggtgcaacttttgtagacaaggacggaacaaagaaaacacctgttatgttacatagagctttatttggatctttagaaagatttattggaattttaattgaaaattatgctggaaaacttccattttggctatccccattacaagcagttgtgttacctatagcagaagagcacaatgattatgcaaaaaaaatatttgaagacctctttaaagaaggtataaaatgcgaagtggatttaagaaatcaaaaaataaattataagattagagaacactctttagccaaaacacctctcattttaatttgtggtaagaaggaaatctctgagaaaagtgttacaatgagaaaactaggttctgaaaaacaagaaaaaattaaatttacgaaagctgtcgaaaaattgaaaatgctaaacaatctgccaattaaataag

SEQ ID NO: 303383 - DNA, 526 bp, Unknown
  Bacterial polypeptide expressing nucleotide sequence isolated from the Sargasso Sea
atgccaaacattaaattaccagacggaaattcattaaactttgataaaaaaattactggtttccaaatagctgaaaaaattagcaaatcactttcaaagcaagccttggtaattagtgttgatggaaatttaaaagatttaaattttgaaatagatcatgattgttcagttaaaatatatacagccaaagataaagaaggactagaaacaatcagacatgatacagcccatgttttagctatggctgtgcaagaaatatttcctcaaactcaagtgactattggacctgttattgaaaatggattttattatgactttgcaaggaaagatccatttacagaagaagatttacgtaaaattgaaaaaaagatgttagaaattgttgaaagagatgaaccaactcgaagagaggtttggaaacgtaataaagcaattgaacattttaaaaaggctggagaaatttacaaagcagaaataattaaggatattccaaaagaagaagaggtttcagtttattttcacggaa

SEQ ID NO: 303384 - DNA, 619 bp, Unknown
  Bacterial polypeptide expressing nucleotide sequence isolated from the Sargasso Sea
ggataaatcagaagacgctcttaccaaagctctcgacaataagaatctaaaatgggaactccaaccaggggaaggggctttttatggtccaaaaatagaattctctttaaaagattgtcttaatagagtctggcaatgcggaactattcaggttgatttctcaatgcctattagattggatgcaacttatgtagatattgataatgaaaaaagaaatccagttatgcttcatagagcaattctaggatcctttgaaagatttatcggaatcttgattgaacaatatgaggcaaaattcccaatttggctttcgccttgtcaaataattttattgagcattactgatagaaatattgaaaagtgtgtaaagttcaacgaattaataaataataatggttatcgatcaaaggttgatattaggaatgaaaaaataggatataaaataagagaggcaactctaggaagagttcctttaattgcagttattggtgataaagaagaggaaattgattctgtcgccttaagagctttgaatggaagaaatttaggaattttcaatttacctaatctttacaaattaatggatgaattaatagaaaaaaaagggagaacagaatag

SEQ ID NO: 303385 - DNA, 742 bp, Unknown
  Bacterial polypeptide expressing nucleotide sequence isolated from the Sargasso Sea
atgcctataattacactaccagatggaaaaaatattgaatttccaaaagaagttacaggtttggatattgcagaaaaaataagtaagtcattatcaaaacaagcattgataatgagtgtgaatggtgagcttaaagatctatatttttcaattaaaaaagattgttcagtaaaaatttttactgcaaaagacccggaaggtcttgaagttataagacatgacactgctcacataatggcgatggctgttcaagaattataccctggcacacaggtaactattggaccagttattgagaatggtttttactatgattttgcccgtaaagaaccttttacagagaatgatttagaaaaaatagaaaaaaaaatgtcagaaataattgacaaagatgtaaaaacaaaaagagaggtttgggaaagagataaagcaataagtcatttcaaaaaaattggtgaaaaatataaagcagaaataatagagagtataccggagggcgaagaactaactgtttatcatcatggcaatacatggcatgatttgtgcagaggtccgcacctagtttcatctggcaaaattggtaaggcttttaagcttacaaaagttgctggagcatattggcgtggagattcaaataatgaaatgttacaaagaatatatggaactggctgggcctctcaaaaagatttagatgattatttaaaaagaattgaggaggcagagaaaagagatcacagaaaac

SEQ ID NO: 303386 - DNA, 793 bp, Unknown
  Bacterial polypeptide expressing nucleotide sequence isolated from the Sargasso Sea
tagagttagggcttttacacaagatgacgctcatattttttgttcggaagatcaaatcactagtgagtgtttaaatgtaactaatttaattttggatatttataaagatttaggttttgaaaaagtggtattaaaatatgctgataggccagaagtaagagtgggtgaagataaagtctgggataaagctgaggcatcattattagaagcagtcaaagcaacaaaattagagtacagtataaataaaggagaaggtgctttttatggtcccaaaatagaatttgtattaagagatgcaattggtagagattggcaatgtggaacagtacaagttgatttaaacttacctggaaggttagacgctacttatgttgacaaagatggaacaaaaaaagttcctgtgatgttacacagggcattgtttggatcgcttgaaagatttattggaattctaattgagaattatgctggtaagtttccattttggatatctccactacaaacagtagtaattccaatctcagaagattttgaggaatatgctagtaaagtttcaaagaaaataaaagaagctggaatgagctcaatagtggatttaaaaaatcataatttaaattataaaataagagaacattctcttgcaaaagtccctattttattaatttgtggtaaaaaagaagttgacagtaactccgtaaccattagaagattggattctaataaacaagaaaatatggaattaaataaatttttaaaaacattttctgctttaaataaagcgtcttcaatttaa

SEQ ID NO: 303387 - DNA, 655 bp, Unknown
  Bacterial polypeptide expressing nucleotide sequence isolated from the Sargasso Sea
atgccgaatattactttgtcagacggaaaaaaattaaattttaaaaacaatgtaactggatatgaggttgctgaaaaaattagtaagtccctttcaaaacaggctcttatagtaagtgtggatggagagttgaaagatttaagcttttcaattcaaaaagactcctctgttaaaatcataactagtaaagataaagagggtttagatgtgattagacatgacgcagcacacataatggcaatggctgttcaagaattatttccaggaactcaagtaacaataggtcctgttatcgagaatggttttttttatgattttgcaagaaaggaaccatttacaaaagatgatttaaaaaaaattgagaggaaaatgtcagagattgttgacagagatgtcaaaacaaaacgtgaagtatgggaaagaggtgaagcaatagaacatttcaaaaaaattggtgaaaactataaagctgagattatcgagagtatccctgaaaacgaagaactatccatttaccatcatggagatacttggcacgatctatgtagaggtccacatttagtttcgtcaggaaaaataggtaaagcttttaaattaacaaaagtttctggtgcctattggagaggagattcaaataatgaaatgctacaaagaa

SEQ ID NO: 303388 - DNA, 757 bp, Unknown
  Bacterial polypeptide expressing nucleotide sequence isolated from the Sargasso Sea
aggtctaaacaagacagcgcagggtataaggaaataaatacccccgaagttctcgataggtctttatgggaaaaatctggtcactgggaaaaatttggggaaaatatgtatacttcaaaaacaccagatgaaaaagtttttgcaataaaacctatgaattgtccaggatgtgttcaagtttttaatcaaggtttaaagagttatagagatctacctttaaaaatgtcagagtttggaaaagttcatagatatgagccatcaggggcattacatggattacttagggttagagcatttacccaagatgatgcacatattttttgcactgaaaatcaaattactgaagaatgtgtttcagttacaaatttaattctcgaaatatataaagatttaggttttgaaaatgtaattttaaaatactctgatagaccagaagttcgagttggagaagataagatttgggacaaatctgaggcagctcttttgaaagcaatagaggcaacaaatcttgaatacacgattaacaaaggagagggtgctttttatggaccaaaaatagaatttgttttaagggacgcaataggaagagattggcaatgcggtacacttcaagtagatttaaatctcccaggcaggctaggcgcttcatacgtagataaagatggaacaaaaaaagttccagtaatgcttcatagggctctatttggttctctagaaagatttataggtatactcatagaacattactcaggaaaac

SEQ ID NO: 303389 - DNA, 799 bp, Unknown
  Bacterial polypeptide expressing nucleotide sequence isolated from the Sargasso Sea
gtatttaaccaaggtttaaaaagttatagagacttaccttacaaaatgtctgaatttggaaaggttcatagatatgaaccatctggcgcattacatggtttgttaagagtaagagcctttacccaagatgatgcacatatcttttgcacagaagatcaaattacagaagagtctctatcagttacaaatcttattttaaatatttataaagatcttggatttgaaaacgtaattttaaaatattctgatagaccagatcttagagttggagaggacgaggtttgggataaagcagagaaagctctattggatgctgttaaagctactaaattagaatatagcatcaataaaggagaaggcgcgttttatggtccaaaaatcgaatttgttttgagagatgcaataggaagagattggcaatgtggaactcttcaagttgacttaaatttacctggaagattaggcgcatcttttatagataaagatggatcaaaaaaagttccagtaatgctacatagagctttatttggttctcttgaaagatttattggaatattaattgaaaattattctggaaaacttcctttctggataagcccatcacaaattatgataatacctgtttctgaagactttaatgattattctgttgaagttaataaaaagcttatagcatctggtttaaattcagaagttgatttgaaaaatcataatttgaattacaaaataagggaacattcgttatcaaaggttccaatactcttaatttgtggaaaaaaagaagtgacagcaacagtgt

SEQ ID NO: 303390 - DNA, 766 bp, Unknown
  Bacterial polypeptide expressing nucleotide sequence isolated from the Sargasso Sea
atgccaataattacattaccagacggaaaaaatcttaatttttctaaagatgttacaggattagaaattgcagaaaaaattagtaagtcattgttgaagcaggcacttattatgagtgttaatggggaattgaaagatttatattactctatcaacaaagactcatcagtaaaaatttttactgcaaaagatcccgaggggttggaagtaattaggcatgacactgcacacataatggctatggcagtacaggaattgtatcctggtacacaagtgactattggaccagtaattgaaaatggtttttactacgactttgcaagaaaagaaccatttactgagagcgatcttaaacaaattgaaaaaagaatgtctgcaattatagataaagatgttaagactaagagagaggtatggggaagagaaaaagctattgatcattttaaaaaaattggtgaaaaatataaagctgaaataattcagagtattcctgaaaatgaggaattatccatatatcatcatggtgatacttggcatgatttatgtagaggtccacatttagtgtcttcaggtaaaattggcaaggcatttaaattgactaaagttgctggggcttactggcgtggagattccaaaaatgagatgctacaaagaatttatggaactggttgggcttcacaaaaagatttagataattaccttaaaagaattgaagaagctgagaaaagagatcatcgaaagttaggtaaagagatggatctatttc

SEQ ID NO: 303391 - DNA, 838 bp, Unknown
  Bacterial polypeptide expressing nucleotide sequence isolated from the Sargasso Sea
agattagaggaagcagaaaaaagagatcatagaaaacttggtaaagaaatggatttgtttcattttagagaagaaagtccaggtgcagtattttggcatcaaagaggatggacattgtttcaaaaactaattgattacatgagaaaaaaacaaaatgaagcaggctataaagaaattaataccccagaagttttagatagatctttgtgggaaaaatctggtcattgggaaaaatttggtgcacatatgtatacatctgaaactccagatgaaaaaatatttgccataaaacctatgaattgcccagggtgtgttcaagtatttaatcaaggtttaaaaagttatcgagacttaccttacaaaatgtctgaatttggaaaagttcatagatatgaaccatcaggagcactacatggtttgttaagagtgagagcctttacccaagatgatgcgcatatcttttgtacagaggatcagatcacagaagagtctctatcagttacaaatcttattttaaatatttataaagaccttggatttgaaaatgtaattttgaaatattctgataggccagaccttagagttggagaggacgaggtttgggataaagcagaaaaggctttattggaggcggttaaagctacaaaattagaatacagcatcaataaaggtgaaggtgcattttatggtccaaagatagagtttgttttaagggatgcaataggaagagattggcaatgtggaactcttcaagttgacttaaatttaccaggaagactaggtgcatcttttgtagataaagatggatcaaaaaaagttccagtaatgttgcatcgag

SEQ ID NO: 303392 - DNA, 289 bp, Unknown
  Bacterial polypeptide expressing nucleotide sequence isolated from the Sargasso Sea
tggactttaagagtaagagcttttactcaggacgatgcacacatattttgcactgaagagcagataacagatgaatgtattagtgttactaaattaatattagatatttataaagatctggggtttgaaaaggtatttcttaaatattctgacaggccagagaaaagagtcggggatgataaagtctgggataagtcagaaaaagctctgcttgaagcgattaaaaaaacaaaactggaatatactgttaataaaggagagggtgctttttatggtcccaaaaatagaa

SEQ ID NO: 303393 - DNA, 439 bp, Unknown
  Bacterial polypeptide expressing nucleotide sequence isolated from the Sargasso Sea
gaggatcaaattacaagtgagtgtttaattgtcactaatttaattttagatatttataaagaccttgggtttgaaaatgtaattcttaaatatgcagatcgacccaaagtgagagttggtgacgatgaagtttgggacaaagcagaagcatccttacttgaagcagtgaaagcatcaaagttagaatatagtattaacaagggagaaggagcattctacggtcctcaaattgagtttgttctaagggatgcaattggtagagattggcagtgtggaactttgcaagttgacttaaatttacctgaaagattaggagcctcttatgttgataaagatggaactaagaaaattcctgtaatgttgcacagagcactatttggatctttagaaagatttcttggaatcctaatagaaaattatgctgctaaatttccattct

SEQ ID NO: 303394 - DNA, 829 bp, Unknown
  Bacterial polypeptide expressing nucleotide sequence isolated from the Sargasso Sea
aattggcaaagcattcaaactaacaaaagtatcaggcgcgtattggagaggagactctaataatgaaatgctacaaagaatttatggaacttgttggacatccaaaaaagaacttgacgattatcttcatcgtttagaagaagctgaaaaaagagaccacagaaaacttggaaaagaaatggatctttttcattttagggaagaaagtccaggagcagttttttggcatgagaaaggatggttgttatttcaaagactcgtagaatatatgcgtgctaaacaaagacttgctggttataaagaaattaatacacctgaacttttagataaaactctttgggaaaaatctggtcattgggacaaatttggagaacatatgtttacttctgagacaccagacgaaaaaacttttgcagtaaaacctatgaattgtccagggtgtgttcaagtattcaatcaaggcttaaaaagttatagagatctacctcttaaactttcagaatttggtaaagtacatagatatgagccatccggagcattacatggattattaagagtaagggcctttactcaagatgatgctcatattttttgtacggaagatcaaataactgaagagtcattatcagtaacaaatttgattttagaaatttataaagatttaggttttgaaaatgtaattttaaaatactcagatagaccagaaaaaagagttggagacgatagtgtttgggataaatctgaggcagcacttcttgctgcaattaaacaatcaaaacttgaatacacaataaataaaggagagggagctttttacggacctaaaatg

SEQ ID NO: 303395 - DNA, 778 bp, Unknown
  Bacterial polypeptide expressing nucleotide sequence isolated from the Sargasso Sea
atttttgcaattaaacccatgaactgtccaggttgcgtacaagtttttaatcaaggattaaaaagttatagagacttacctcttaaaatgtcagaatttggaaaggtacatagatatgagccatcaggtgccttgcatggattaatgagagtaagagcttttactcaagatgacgcacatattttttgcactgaagatcaaattactcaggagtccctgtcagtaactaatttaattttagatatttataaagatttaggttttaaagacgtgattttgaaatattcagataggccagaagtaagagttggtgatgataaagtttgggacaaatctgaagctgctttgcttaaagcagttaaagaatcaaaattagaatatagtattaacaaaggcgaaggtgctttttatgggccgaaaattgaatttgttttaagagatgcaataggcagagattggcagtgcggaactttacaggtggatttaaatttaccagaaagacttggtgcatcatatgtagataaggatggatcaaaaaaaattccagtaatgctacatagagcattatttggatcgcttgaaagatttataggaattcttatagaaaattatgctggaaagtttcctttttggataagtcctcttcaagtagttgttatacctgtatcagatgattttgataaatactctaaagaggtagcaaataaggtaagtaatagtggaataaattgtcaagttgatttaaaaaatcacaacttaaattataaaataagagaac

SEQ ID NO: 303396 - DNA, 406 bp, Unknown
  Bacterial polypeptide expressing nucleotide sequence isolated from the Sargasso Sea
aagaaagttcccgttatgttgcaccgcgctctgtttggctctttagaaagatttacaggaatattaatagagcattatgctggacatttaccattatggttatctccatctcagatagtagttgctacaataacgtctgaatcagataattatgcttttgatgtaaaagatcagctaagtaaaaatggattgcgcgctgagacagacattagaaacgaaaaaataggttataaaattcgtgaacatagtaatgctaaaatacctatcattcttgctgttgggaaaaaagaagcagaagaaaaaactgtttctgtcagacgcttaggtagtcaagaaacattagttgtaaagattgatgaattaattagtgatttaaaaaaagaatctctttctcctattaattaat

SEQ ID NO: 303397 - DNA, 376 bp, Unknown
  Bacterial polypeptide expressing nucleotide sequence isolated from the Sargasso Sea
aatgcctgaaattcaattattagacggaaaaaaaatttcttttataaaacctataagtggatttgaacttacaaaaaaaattagtaaatcacttgagaagtcagcattaattatggaagttgacggtgagttaaaagaccttagccatgaaattaaaaaagactcaaaagtaagacttataacatcaaaagataaagaaggtttagaagtcataagacatgatgctgctcatattatggctatggctgttcaagaactatatccaggtacccaagtaactattggccctgtaatagataatggtttttattatgattttgcaagaaaagaaccttttactagcgatgatttaaaaaaaattgaaaaaagaatgtca

SEQ ID NO: 303398 - DNA, 289 bp, Unknown
  Bacterial polypeptide expressing nucleotide sequence isolated from the Sargasso Sea
tttggagactataagacatgatactgctcacatactcgctatggcagttcaagaactatttccagggacgcaagttacaataggtccagttattacagatggcttttattacgatttcgcaaggaaagaaccttttacagcacaagatttaaataaaattgagaataaaatgaaagaaatactagatcgagatgaaaaaacctacagagaagtttggaaaagaaatgatgcaattgaacactttaaaaaaaagggagaaatatataaagctgagataatagaaagcatc

SEQ ID NO: 303399 - DNA, 850 bp, Unknown
  Bacterial polypeptide expressing nucleotide sequence isolated from the Sargasso Sea
ctgaatttaatacgacatgattgtgctcatgtaatggcagaagctgttcaagaattattccctggaacacaagttacaattggtccagcaattgaaaatggtttctattatgattttgcaagagatgaaccttttactgtttctgatcttccaaaaattgaaaagaagatgcatgatatcattcaaagaaataaaaattttataagagaagtatggtctaaagaagaatcaataaaatattttaaagacaaaggtgaagactataaagtcgaattaattaatgatctgccagataatgaagaaatcagtatttacaaacaaggtgattggttagacttgtgccgaggccctcatatggtttcaaccaaacaaattggtaaagcatttaaattaatgaaagttgctggcgcttactggcgaggtgattcatctaatacaatgctaacaagaatttatggaaccgcctgggcaacagaaaaggatcttgaacaacaccttttacaaattgaagaagcagaaaaaagagatcaccgaaaaataggaagagaaatgaatttatttcattttcaagaagaggctcctggagctgttttttggcatcctaagggttgggcattattccaatcgttaataaattatatgcgaaacagacaagacaaggcaggttatgtagaaactaatacgcccgacatgatggataagtcactatgggaaacgtctggtcactgggacaaatttagtgacatgatgtttagaactgaaacaaaagacgataaaatttatgctattaaaccaatgaattgccctggtgctgtagaaatttttaaacagaggattaaaaagttataga

SEQ ID NO: 303400 - DNA, 589 bp, Unknown
  Bacterial polypeptide expressing nucleotide sequence isolated from the Sargasso Sea
gacaaatataaagataatatgtatagaactattatcgatgatagagaactcatgatcaaaccaatgaattgtccaggacatgttcaaatatataatcaaggaataaaaagctataaagatttacctcttcgaatggccgaatttggttcgtgtcatcgtaatgaaccatctggagcacttcatggtctaatgcgggtaagaaattttgttcaggatgatgcgcatattttttgtactgaggaccaaatagaaagtgaaacagtcaatttttgtaaattacttcaagaagtatataacgaattaggctttaatgaagtttcaataatgtatgctgataggcctgagcagagggtaggttcggatgagatttgggataaagctgagaatgcacttttgaatgcctctaaagctacaggaattccttttgataaaaatagcggtgatggagctttttatggaccaaagttagacttttatttacatgacgctattggtagaaaatggcaatgcgggacattacaggttgattttaatatgcctggaaggttaggggcaagttatgttggtgaagataatgaaaagcacacac

SEQ ID NO: 303401 - DNA, 690 bp, Unknown
  Bacterial polypeptide expressing nucleotide sequence isolated from the Sargasso Sea
aatgcctataattactttaccagatggaaataatttaaattttccaaaaaaagttactggactagaggtagctgaaaaaataagtaaatcattagcaaagcaagctatggttataagtgtagatggagagcttaaagacttagattttttaattgaaaaaaactgttctataaaaatatttacctctaaaaataacgaaggtcttgaaacgattagacatgatacagcacatatattggctatggccgttcaggaactttttcccggaactcaagtcacgattggacctgtaattgaaaatgggttttactacgattttgcaagaaaagagccttttacagaagaagacttaaaaaagattgaagagaagatgaaagaaatagttgatcgtaatgaaaaaactaaaagagaagtttgggatcgagataaagctattaaacattttaaaaaaaagggggagatatataaagcagaattaatcgagagcatcccaaaaggtgaggaagtttcaatttattttcatggtgattggcatgatttatgtagaggcccacacttgtcttctacaggtaaaattggcaaattttttaaattaacaaaagtttcaggggcatattggcggggagactcaaacaatgaaatgcttcaaagaatatatggaactagttgggcaagtcaaaaagatttaga

SEQ ID NO: 303402 - DNA, 942 bp, Unknown
  Bacterial polypeptide expressing nucleotide sequence isolated from the Sargasso Sea
attgggaaaaatatgaagagaatatgtacacttcagaaactccagatgaaaaagttttcgcgattaaaccaatgaattgcccaggtcatattcaagtatttaaccaaggattaaaaagctatagagatttaccaatacgaatagctgaatttggaaaagttcatagatacgaaccatctggtgctttacatggcttgctgagagtaagagcatttacacaagatgacgctcatatattttgttcagaggatcaaattacaagtgagtgcttagaggtaactaatttgattttagatatttataaagatcttggttttgaaaatgtaatattaaaatatgcagatagacctgaagtaagagtaggtgatgatgaaatttgggataaagcggaagcatcattgctagaagcagttaaagcttcaaaacttgagtatagtattaataagggtgaaggcgcattctatggacctaagattgaatttgttttaagagatgcaattggtagagattggcagtgtggaactttacaagtcgatttaaatttaccaggtagattagatgcttcttatgtagataaagatggaactaaaaaagttcccgtcatgttgcatagagcgttatttggttctctagaaaggtttataggaattttaattgagaactatgcaggaaaatttcctttttggatatctcctttacaaactatggtaatacctatttcagaagaattcaatgactatgcagttgaagtgtctaaaaaaataaaaaaagcaggtatcagttcagcagtagatttaaaaaataataatttaaattataaaattagagatcattctttggcaaaaataccagttttgttgatttgtggtaaaaaagaagttgactccaattcagtaacgattagaagattagactctaataaacaagaaaataggacataga

SEQ ID NO: 303403 - DNA, 814 bp, Unknown
  Bacterial polypeptide expressing nucleotide sequence isolated from the Sargasso Sea
tatgtttactacagaaattgatgatgagcatgctaatgagaaaagagtaaacgctcttaagccaatgaattgtccaggccatgttcaaatatataaccaaggaataaaatcatacaaagatttaccattaaggtatgctgaatttggtctttgtcatagatatgagccttcaggaacaatgcatggcttaatgcgggttagagcattcacacaagatgatggacatattttttgcacagaagatcaaatagagtcagaaacaggcttatttataaattttctgtcagatatctatgctgatttaggatttaaaaattttgatatcaagttatctactaggcctgagatgcgagttgggtctgatgaaacttgggataaagcagagcattcgttggaaacagctattaagaatttaggacatccttataggatagatgagggtgatggtgcattttatggaccaaagcttgattttgttctaacagatgctataggaagagaatggcaatgtggcactttccaattggactttaatttagctgataggctcgaagctaaatatattggtgaagatggaaaaaaatatacacctgttatgattcacagggctgtgttgggatcttttgaaagatttattggtattctcattgagaattatgctggaaaattaccattttggctggctccacaacaagttgttatagcatcaataatttcagacgttaatgattattcattagagataatggaattactgaaaaaagagggcatttcagttgatgttgatctaagaaatgagaaaataagtttataa

SEQ ID NO: 303404 - DNA, 824 bp, Unknown
  Bacterial polypeptide expressing nucleotide sequence isolated from the Sargasso Sea
tatcaaacccatgaattgtccaggatgtgttcaagtttttaatcaaggattaaaaagttatagagacttacctttacgaatgtcagaatttggaaaagttcatagatatgaaccatcgggtgcattgcacggtttattaagagttagagcatttacacaagatgatgcacacatattttgcactgagaaacaaattacagaagaaagtctttctgtaacaaagttgattttagatatttacaaagatttaggttttgagaatgttattttaaaatattcagacagacctgatttaagagttggcgaagatcacatttgggacaaagcagaggaagctttactgaaagcaattaaagcttcgaaattagaatatagtgtaaataaaggagagggagcattttatggaccaaaaatagaatttgttttaagagatgcaattggaagggattggcaatgtggaacattgcaagtagatctcaatttaccagaaagacttggtgcatcatatgttgataaagacggatcaaagaaagtacctgtaatgttacatagagctttatttggatctttagaaagatttattggaatacttatagaaaattattctggtaaacttcctttttggatctctcctttgcaaactactgttataccagtttcaaatgattttgatgaatatgcaaaagaagtaactaataaaataaaaaaaaatggaatatcttgtgaagcagacttaagaaatcacaatttaaactataaaatcagggaacattctttaaaaaaaataccaatattattaatttgtggaaaaaaagaaagttgac

SEQ ID NO: 303405 - DNA, 845 bp, Unknown
  Bacterial polypeptide expressing nucleotide sequence isolated from the Sargasso Sea
aaatggtttctattacgattttgcaagagatgagccttttactttatcggatctacccaagattgaaaaaaaaatgatggagataattaataaaggagaaaaatttacaagagaagtttggtcgcgtgaagaggcaattaaatattttaaagaaaaaggtgaaaattacaaagttgagttaattgaagatctagatcctaatgaagaaatttcaatttataggcaaggggattggttagatctttgtcgtgggcctcacatgttaaatactaaacaaatcggtaaaggatttaagttaatgaaagttgctggagcatattggagaggtgactcaaaaaacactatgcttacacgtatttatggaactgcatggaggaatgcaaaggagttagaaaactatattcaacagattgaagaagctgaaaaaagagatcatcgtaaacttggtaaagagatggacttatttcattttcaagaagaagcacctggtgcagttttttggcacccaaaaggttggcaactgtttcagtcacttataaattatatgagattaagacaagataaagcaaattatgttgaaacaagtacaccagaactattagataaatctttatgggaagcatcaggtcattgggaaaaatttggtgacaatatgtttacaacagaccctaaagaagaaaaggtttttgctataaaacctatgaattgtcctggcgctgttgaaatatataaacagggtttaaaaagttatagagacttaccactaagaatgtcagagtttggaaaagttcatcgatatgaaccatctggtgctctccatggattaatgcgagtaagagctttta

SEQ ID NO: 303406 - DNA, 949 bp, Unknown
  Bacterial polypeptide expressing nucleotide sequence isolated from the Sargasso Sea
aaacagatatacccaaatgcacagatggcaataggccctgtcataaaagacggattttattacgacataaaacttgataaaaatctatcttatgaggatttggaagtcatcgaaaaaaggatgaagcaacttgctaaaactaagtacgatgtagtacgcgaagtagtttcaagaaaacaggctattgatacctttaaaagcagaaatgagccttacaaggttaatcttgcagaagaaatatcggaagaagaggtaatagctttataccatcatgaagaatatatagacatgtgtcgtggacctcacgttacgaacatgcgacatctgaaggcatttaagctaactaaaatttcgggagcatactggaaaggagattctaaaaacgaaatgcttcaaaggatatacggaactgcctggccagattccaaggatttagataattatttattgcagcaagaagaagccgaaaaaagagatcatcgtaaacttggcagacaacttgatttgtttcattttcaagaagaagctccaggaatggttttctggcatcctaaagggtggtctatttactctgctcttaaaaactttatcaaagaaaaacaagatgaatacgactatcaagaaattaatacaccacaaatcgtagatagaaaattgtgggaagcttctggccactgggataagtatcgagaaaacatgttcattaccgagatagatgaagaacatgctaatgaaaaaaggaccaatgccctcaagccaatgaattgtccatgtcatgttcaggtcttcaatcaagggttgagatcttacaaagatcttcctatcaggttttctgagtttggctcttgccatcgatatgaagcttcaggaaccttgcatggattgatgagagtaagaggatttacgcaggatgatggacatatcttctgtacagaagatcaaatcaaga

SEQ ID NO: 303407 - DNA, 915 bp, Unknown
  Bacterial polypeptide expressing nucleotide sequence isolated from the Sargasso Sea
gcattgggataaatttggaagcaacatgtatacttctataactccagatgagaaagtatttgctataaaaccaatgaattgtccaggctgtgtccaggtttttaatcaaggtttaaaaagttatagggatttacctttaaagatgtctgaatttggtaaagttcatagatatgaaccttcaggatctttacatgggttattaagagtaagagcttttacacaagacgatgcacatatattttgcactgaagatcaaattaccgaggaatgcttatcagttaccaatttaattttagaaatttataaagacttaggatttgaaaatgtaatattaaaatattcagatagacccgatttaagagtaggagaagatcatgtttgggataaatctgaaaatgccttattaatggcaattaaagaaactggtttagaatatagtattaataaaggggaaggagcattttacggtcctaaaattgaatttgttctaagagatgctattgaaagagattggcaatgtggaactttacaagttgacttaaatttacctggaagattaggagctagttatgttgataaagatggttcaaaaaaaattccagtaatgttacatagggcgctatttggatcgcttgagagattcattggaattttgatagaaaattattcgggcaaacttccattttggttatcaccattacaatcaatggtaatacctatttctggagattttgatgattatgcaaaaaaagttaacaatgaacttaaaaaatctggaattaatagcgaagtagatttaaaaaatcataacctaaactacaaaattagagaacattctctaaaaaaaataccaatattattgatttgcggaaaaaaagaagttgactctaacacagtaactattagaaaattagg

SEQ ID NO: 303408 - DNA, 844 bp, Unknown
  Bacterial polypeptide expressing nucleotide sequence isolated from the Sargasso Sea
aaaaattagcaaaactttagaaaaaagtgctctaataatgaaagttgatggagagttaaaagatctaagttatcaaatagaaaaaaattctgaagtgaaaattattacttctaaagatgatgaaggtttagatgctatgagacatgatacgacgcatattatggcaatggcagttcaagaactatttcctggaacaaaaattgctattggcccagcgattaaagatggtttttattacgacttttctagaaaagatccttttactccacaagatctagaaaaaattgaaaaaaagatgaaagaaattgttgataaagatgagcccacaaaaagagaagtttgggaaagaaaaaaagccaaagatcactacaagaaaattggagaaaattataaagctgaactcgttgacagcataccacaaaatgaggatgtttcagtatactatcatggaaaatggtatgatctttgtaggggtcctcatcttacatctactggaaaaattggaaaatattttaaacttacaaaagtatccggtgcttattggagaggtgattctaataatgaaatgctacaaagaatttatggaacgtcatggccatctcaaaaagaacttgatgaatatttaaaacgacttgaggaggcagaaaaaagagatcatagaaaacttggtaaagaaatggatttatttcacttcagggaagaaagtccaggatcagtgttttggcacgaaaaaggttggcgtttgtttcaatctttaatttcttatatgagagaaaaacaaaatcgtgctggatataaagaaataaatactcctgaaatattagataaatctctatgggaaaag

SEQ ID NO: 303409 - DNA, 655 bp, Unknown
  Bacterial polypeptide expressing nucleotide sequence isolated from the Sargasso Sea
tgcagataggccagaagtaagagttggtgatgattcagtttggaataaagcagaagcctctttgcttgaagccgttaaagcttctaaattagaatatactattaataaaggtgagggagcattttatggtcctaaaattgaatttgttttacgagatgctattggcagagattggcaatgtggaactttacaagtagatttaaatttacctggaagattagatgcttcttatgttgataaagatggtactaaaaaagttcctgttatgttacaccgagcattatttggttctctagagagatttattggaattttaattgaaaactatgcaggcaagtttccattttggatatctcctttacagactatggtaatacctatttcagaagaatttaatgactatgcggtcgaagtatcaaataaaattaaaaattcaggcataagttctgcagtagatttaaaaaatcataatttaaattataaaattagagatcattctttagcaaaaataccgcttttattaatttgtggtaaaaaagaagttgactccaattcagtaacgattagaagattagactctaataaacaagaaaatatgggtatagatcaattcttaaaaacgttctctgctttaaataaagcatcatcaaactaa

SEQ ID NO: 303410 - DNA, 943 bp, Unknown
  Bacterial polypeptide expressing nucleotide sequence isolated from the Sargasso Sea
aaatccggtcattgggaaaaatttagagacgatatgttcactactgcatcagaaaatcgaacttatgcaattaaaccaatgaattgtccatgccatattcaagtatttaatcaaggtctaaaaagttataaggatttacctattcgtcttgctgaatttggttcttgtcacagaaatgagccctctggtgcactacacggattaatgagagtaagaaactttactcaagatgatgcacatatattctgtacagaagagcaaattcaagaagaggtatctacttttatagatcttgttttcgaagtttataaaacttttggttttaatgaaatcattatcaaattatcaacccgtcctgaaaaaagggtaggtagcgaggatatttgggataaatcagaggaggctcttaccaaagctcttgataataaaaatctaaaatgggaactccaaccaggagaaggtgctttttatggtccgaaaattgaattctcgttaaaagattgtcttaatagagtctggcaatgcggaactattcaggttgatttttcaatgcctattagattagacgcaacttatgtagatattgataatgagaaaaggaatccagttatgcttcatagagcaattttaggatcctttgaaagatttatcggaatcttaattgaacaatatgaggcaaaattcccaatttggctcgcgccttatcaaattattttattaagcattactgatagaaatattgaaaagtgtttaaagtttaatgaattaataaataataatggttatcgatcaaaagttgatattaggaatgaaaaaataggatataaaataagggaggcaactctagggagagttcccttaattgcagttattggaggtaaagaagaagaaattgattcagtcgccttaagagctttggatggaagaaatttaggaattttca

SEQ ID NO: 303411 - DNA, 382 bp, Unknown
  Bacterial polypeptide expressing nucleotide sequence isolated from the Sargasso Sea
atgcctcaaatacaactattagacggtaaaaaaatttcctttgtaaaatcaattaacggttttgaattatcaaaaaaaattagtaaatctttagataagttagctcttattatggaagtcgatggagagttaaaagacttaagccaccaaattataaaagactcaaaagttagaatcattactcacaaggataaagagggcctagaagtaataagacacgatgctgcacatattatggctatggctgtgcaagaattatttcctggcactcaagttactattggtccggttattgaaaatggattttattatgattttgcaagaaaagaacctttcactagcgatgatttaaaaaaaatgaaaaaaaaatgtctgaaataat

SEQ ID NO: 303412 - DNA, 712 bp, Unknown
  Bacterial polypeptide expressing nucleotide sequence isolated from the Sargasso Sea
atgcctataataacattacctgacggaaaaaatattgattttcctaataaagttactggaatggaagtagctgaaaaaattagtaaatcattagctaaacaagctactgtaataagtgttgacggtgagcttaaagaccttaattatttaattgaaaatgattgttctataaaaatttttacctctaaaaaccctgaaggcttggaaactataagacatgacacagctcatattttagctatggctgttcaagagctgtttcctggaacgcaagttacgattggaccagtgatagaaaatggattttactatgactttgctagaaaagaaccttttacagaagatgatttagttaaaatagaaaacaagatgaaagagattgtagataggaatgaaataacaaaaagagaagtttgggatagaaacaaagcaattagccattttaaaaataaaggagaaatttataaagccgagctgatcgaagcaatacctgaaaacgaagatgtatcaatttattttcatggtgagtggcatgatttatgtagaggtccgcatctttcttcaacaggtaaaattggaaaatattttaaacttacgaaagtatcaggagcatattggagaggagactctaataatgaaatgttgcaaagaatatatgggacgagctgggctagccaaaaagatttagatgaacatttaaatagaatcgaag

SEQ ID NO: 303413 - DNA, 973 bp, Unknown
  Bacterial polypeptide expressing nucleotide sequence isolated from the Sargasso Sea
aagtcaggacattgggacaaatttggtgccaacatgtacacatcaattactccagatgaaaaagtttttgcgattaaaccaatgaactgccctggatgtgttcaagtttttaatcaaggattaaaaagttatagggatttaccattaaaaatgtctgaatttggaaaagtacatcgatacgaaccatccggtgcattacatgggctgttgagagtaagagccttcacccaagatgatgctcatatattctgtacagaagaacaaataactgaagagtgtttaacagtaacaaatcttattttagaaatttatagagaattgggttttgataaagttattttaaaatattctgatagaccagatcaaagagttggcgatgatagcgtttgggacaagtcagagaaagctttactagaagcaattaaagcatcaaaactcgaatattcaattaacaaaggcgaaggagctttctatggtccaaagatagaatttgttttaagggatgcaataggtagagattggcaatgtggaaccttacaggttgatttaaatttaccgggaagattaggagcatcatatgttgcttcagatggaacaaaaaaaattccagtaatgttacatagagcgctttttggttctttagaaagatttattggaattttaattgaacattatgctggtaaattacctttttggatttctcctcttcaggcagtaattattcctgtatcaaatgaatttgatacttatgccaaaaatttgaaaaaaaaaataaaaaaatcaggaataagctgtgaagtagacctaaaaaatcacaatttaaactacaaaataagagaacattcattaacaaaagtgccattacttttaatttgtggaaaaaaagaagttgactctaattctgtaaccattagaaagatcggtgttaataaacaagaaagcatggaagtaaaaaaatttttagaaaaatatt

SEQ ID NO: 303414 - DNA, 619 bp, Unknown
  Bacterial polypeptide expressing nucleotide sequence isolated from the Sargasso Sea
agtttgggataagtcagaggctgcattgttagaagcaatcaaagcgacaaagttagagtactcaattaacaaaggtgagggcgcattttatggaccgaaaattgaatttgttttaagagatgcaatcggtagagattggcagtgtggaaccttgcaagtagatttaaatttaccaggtagattaggagcttcttttgttgataaagatggaactaaaaaagtacctgtaatgttacacagagcattatttggatctttagaaaggttcataggtatccttatagagaattatgcaggcaagttgccattttggatctcacctttacaggctgtagttattccaatctctagtgattttgacgaatatgctaaaagtgtagctaaagaattaaaacggagtggtttgattgtcgaggtggatcttaaaaatcataatttaaattataaaataagagatcattctttaacaaaagtaccaatgttgttgatttgtggaaaaaaagaagttgactccaacagtgtaactattagaagattggactctaataaacaagaaaatatggctttgaaagaatttataaaaaaatatttagatctaaataaagccccttcaatctaa

SEQ ID NO: 303415 - DNA, 928 bp, Unknown
  Bacterial polypeptide expressing nucleotide sequence isolated from the Sargasso Sea
aagtttaaattttaaagataaagttacaggttttaagattgctgaaaaaataagtaaatcactttcaaaagaagcattaataattagtgttgatggaaattttaaagatttaaattatgaaatagataaagactgtttagtaaaaatctatacatcaaaagataaagaaggattggaaacaataagacatgatactgcacatatattagcaatggctgtccaagaactttttcctggcacacaagtaactattggtccagtaattgataatggattttattacgactttgcaagaaaagaaccattcactgaagaagatttaagaaaaatagaaaaaagaatgttagaaattgtagaaagagatgagcctacccatagagaggtatggaaacgcgacaaggccgttgagcattttaaaaaagctggagaaatttataaagctgaaataattaaagatatacctgaagaagaagaggtttcagtttacttccatggaaaatggcatgatctatgtagagggcctcatttaacatctactggaaaaattgggaaatattttaaacttatgaaagtttctggtgcctattggagaggagactcaaacaatgagatgcttcaaaggatttatggaacatcatggccatctaaaaaggaattagatgattatttgaacagaatagaagaagcagaaaaaagagatcatagaaaattaggaaaagaaatggatctatttcattttagagaagaaagtccaggctctgttttttggcatgaaaaaggttggaatttatttcaaaaattaatttcatatatgagagcaaaacaagacgaagctggatataaagaaataaatactccagaagttttggatagaactttatgggaaaagtctggccattgggaaaaattggagctaatatgtatacat

SEQ ID NO: 303416 - DNA, 850 bp, Unknown
  Bacterial polypeptide expressing nucleotide sequence isolated from the Sargasso Sea
ttttttaattgaaaatgattgttctgtaaaaatttttacctcaaaaaatcctgagggcttagaaactataaggcatgatacagctcatattttagccatggctgttcaagaattatttccaggaacacaagttacaattggacccgtgattgaaaatggattttattatgactttgctagaaaagaaccatttacagaggacgatcttgttaaaattgaaaataaaatgaaagagattgtcgataggaatgaaataacaaaaagagaagtttgggatagaaataaagcaattagccattttaaaaaaaaaggagaaatttataaagccgagctaattgaagcgatacctgaaaatgaagatgtatcaatttattttcacggagaatggcatgatttatgtagaggcccacatttatcctctacaggtaaaatagggaaatattttaaacttacaaaagtatcaggagcatattggagaggagactctaataatgaaatgttgcaacgaatatatggtacgagttgggcaactcaaaaagatctagatgaatatttgaaaagaatagaagaagccgaaaaaagagatcacagaaaattaggtagagaaatggatttatttcattttagagaagaaagccctggatcagtattttggcatgaaagaggatggggtttgtttcaaaagctcattaactacatgagaagcagacaagatgcggctggttataaagaggtcaatactccggaggtactagatagacaactatgggaaaaatctgggcattgggaaaaatatggagaaaacatgtatacttctgaaacaccagatgagaaagtttttgcaattaaa

SEQ ID NO: 303417 - DNA, 882 bp, Unknown
  Bacterial polypeptide expressing nucleotide sequence isolated from the Sargasso Sea
aagatttaataaaaatcgaaaatagaattaataaattaataaaaacaaactatgacgttgaaattttacaagtttctaaagaagaggcaattaaaacttttaaagaaagagatgagacttttaaattaagaataattgaagaaattcctgaagaaggtctcatcaatttatacaagcacgaagaatatatcgacatgtgtagagggcctcacgtaccaaacacaagacatttaagacactttaaattacttaaattatcaggttcatactggagaggtaatagtgagaatgaatcattacagagaatatatggaactgcatgggcaaaagaaaaagaactcaatgactacttaacaagaattgaggaagcggaaaaaagagatcatagaaaacttggtaaaaaacattcactatttcatatacaagaagaatctccaggaatgattttttggcatccaaatggatggacaatctaccaagtactggaaaaatacataagagaaatactcaaaaaaaatgattatttagaaattaaaaccccacaagctgttgataaatctctttgggaaaaatccggtcattgggaaaaatttagagacgatatgttcactactgcatcagaaaatcgaacatatgcaattaaaccaatgaattgtccatgtcatattcaagtatttaatcaaggtttaaaaagttataaggatttacctattcgtcttgcggaatttggttcttgtcacagaaatgagccctctggagcacttcatggcttaatgagagtaagaaactttactcaagatgatgcgcacatattttgtacagaagagcaaattcaagaagaagaatctatttttatagatcttgttttcgaaggtatataaa

SEQ ID NO: 303418 - DNA, 553 bp, Unknown
  Bacterial polypeptide expressing nucleotide sequence isolated from the Sargasso Sea
aatgttcgaaattcaacttttagatggaaaaaaaataccttttaaaaaatcaattaatggttttgaattatcaaaaaaaataagcaaatctctagaaaaaatagctttaatcatggaagttgatggtgagctaaaagacttaagccatgaaattacaaagaattcaaaggtaagaattattacaccaaaagacaaagaaggtctcgaagtcattagacacgatgctgcccatataatggcgatggcagttcaagaattatttcctggaacacaagttacaattggacctgttattgaaaatggtttttattatgactttgctagaaaagaaccgtttactagtgaagacttaaaaaagatagaaaaaaaaatgtcagaaataattgatagagatgtaaaaacaaaaagagaagtttgggagagaaataaagcaatagctcattttaaaaaaatcggagaaaaatataaagccgaaattattgagagcatacccaaaaacgaggaactttctgtttatcatcatggagatagttggcatgatttgtgtagaggt

SEQ ID NO: 303419 - DNA, 817 bp, Unknown
  Bacterial polypeptide expressing nucleotide sequence isolated from the Sargasso Sea
aaattaaacttgtttcatttacaagaagaggcagtaggatcagtattctggcatccaaaaggatggagtatttttttagagattgaaaattatattagaagaaaattaaaaaataataattatctagaggtaaagacacctcaaattatcgatagaaaactatgggaaaagtcaggtcattgggataaatttaaagagaatatgtttatggcaactggtgatgatgacagatttttggcattaaaaccaatgaattgtccaggacatgttcaaatttataaacaaggaattaaatcttataaagatttacctttgagaatgtctgagtttggttcttgtcacagaaatgagccatcaggagctttacatggtattatgagagtaagacaatttacacaggacgatgcacatatattttgcactgagagtcaaataactgacgaagctttaattttttgtgatcttctgaaagaggtctataaagatttcggcttctcggatatcaaagtgaaattttcagatagaccagttataagagcgggtgatgatagtgtttgggatagatctgaaaaagctcttttgcatgcagtaaaaaaagcaaatttaaattttgaattgaatccaggtgaaggagctttttatggcccaaagcttgaatttgttcttactgactcgataggtagggactggcaatgtggtacattacaaatggacttcgtacttcctgaaagacttcaagcaacttacatagatgaagcaggaattaaaaaacatccagttatgcttcatagagctattattggatcatttgagagat

SEQ ID NO: 303420 - DNA, 823 bp, Unknown
  Bacterial polypeptide expressing nucleotide sequence isolated from the Sargasso Sea
tatgctccaaagaatctatggaacggcatggagaaaccctaaagagctgagactgtatctaaacaaaattgaagaagctgaaaaaagagaccatagaatattaggtaaaaatatgaatctttttcattttcaagccgaggcacctggagcagttttctggcataacaaaggttggatactttttcagaatttgattaatttcatgaggaaaaaacaaaatgacgcaggttatatagagattaatacaccagatataatggatatatctttatgggaagcttctggacacaaggaaaaatttggcgataacatgtttactacagaagcaaaagaagacagagtttatgctcttaaaccaatgaattgccctggacacgtgcaagttttcaagcaaggtcttaaaagttatagagatcttcctttaaaattctctgagtttggtaaagttcatcgatatgaaccttcaggtgcacttcacggcttaatgagggtcagagcttttactcaagatgatgctcatatattttgtactgaggatcaaattacagatgaatgtctagaagtttgcagtctagtccttgatatttataaagattttggttttgaagatgttcatataaaattttctgatagacctaaaaaaagagttggcaatgatgatatttgggaaaaatcagaaaaagcattgcagactgcaatagatgcaactggactaccttataagttgaattcaggtgaaggtgctttttatggtccaaaacttgaatttgttttaagagatgctattggccgggattggcaatgtggaaccttacaagtagat

SEQ ID NO: 303421 - DNA, 349 bp, Unknown
  Bacterial polypeptide expressing nucleotide sequence isolated from the Sargasso Sea
gaggaagcaaagaaaagagaccatcgaaaacttggtaaagagcttaatcttttttcaattactgatgaaattgggccagggctaattttatggcatccaaacggagccataatcagaagaattattgaagattattggagaaaggaacacgatgagtctggctatagtctaatttttactcctcatattgccaaagcagatttatgggaaacttcaggtcatactgaattttatagcgaaaatatgttttcacaaatggatattgattctaataaatatcaaacaaaacctatgaattgcccatttcatattatgatttacaaaagtgaattaagaagctataaggatt

SEQ ID NO: 303422 - DNA, 487 bp, Unknown
  Bacterial polypeptide expressing nucleotide sequence isolated from the Sargasso Sea
atgcccaaaattcaattattagatggaaaaaaaatagattttaaaaaaactatttctggttttgaattaataaaaaaaatcagtaagtctctcgaaaaaaatgctttaatcatggaggttgacggagacttaaaagatttaagccatcaaataactaaagacgctaaagtaagaattattactccaaaagacaaagaaggtttagaagttataagacacgatgctgctcatataatggccatggctgttcaagaattatttccaggcacacaagttactataggaccagttattgaaaatggtttttattatgactttgcaagaaaagatccttttacagaagaagatttgaaaaaaattgaaaaaaaaatgtcagaaattattgatagagatgtaaaaactaaaagagaagtttgggaaaggagcgaagctataaagcattttaaaaaaattggggaaaagtacaaagcggaaattatagaaagta

SEQ ID NO: 303423 - DNA, 866 bp, Unknown
  Bacterial polypeptide expressing nucleotide sequence isolated from the Sargasso Sea
aatgaggcattccgctgcacacgtactcgcagaagctgtcctagagatgtttcctgaagcgaaatatgcgattggtccaccaattgatacaggtttttactatgatttcgatttacctcgaacactgacacctgacgacttaaagattttacaaaaacgcatgaagaaatcagtgaagaaaaatcttgctattactggtgagcaaatatcaaaaaaagacgcaaaaaagatttttgctaaccaaccatataaattagagcttattgaagacattgaagaagagacggtcggtcattttacacacggtgactttgaagatctctgtcgtggtggtcatgctgcatctactggacaaatcggtgcctttgagctcacacatgttgcaggtgcttactggaaaggtgatgaaaataacccaatgttgcaacgagtatatggtgcgttgtttgcgaccgatgatgaattgcaagcgtatctcaaggctcgtgaagaagcagcggagcgtgatcatagaaggctaggacgagaacttgatctctttttcttagatcctttgtcccctggctccccatttttcttaccaggaggcacgttcgtagtaaatgagctcacaaattatttacgagagctctacattaagtacggatatgatgaagttatcacgccgcaattgtttagttctgaactttggaaaacatctggtcactatgaaaactttcaaggtgacatgttcttagtgccaatcgatgaccaggagatgggcattaagccaatgaactgccctgggcattgtgtcctgtataacaatacgcgacattcgtatcgtgaattgcctatgcggatagcagaatttacaagactgcata

SEQ ID NO: 303424 - DNA, 853 bp, Unknown
  Bacterial polypeptide expressing nucleotide sequence isolated from the Sargasso Sea
aatgccaactattacactaccaaatggaaatagactaaattttccaaataaagttactggaattgaagtagctgagaaaataagcaaatcattagcaaaacaagcactaataatgagtgtagatgaagagttaaaggatttatatttttcaataaataaagattgttcggtgaaaatttttacagcaaaagatcctgagggattagaagtcattagacatgacactgctcacattatggctatggctgttcaagagttatacccaggcactcaagttacaattggtccagtaattgaaaatggttttttttatgactttgctaggaaagaaacttttacagaggatgatcttaagaaaattgaaaaaagaatgtctgagataattgataaagatataaaaacaagaagagaggtttgggaaagagaaaaagcaattgaccattttaaaaagatcggtgaaaaatataaagctgaaataattgaaagtatcccaaaaaatgaggaactttctgtttatcatcacggtgatacttggtatgatttgtgtagaggcccacatctcacttcttctagtaaaattggtaaagcatttaaattaacaaaagtttcgggcgcttactggcgtggagattctaataatgagatgcttcaaagaatatatggtactagctgggcatctcaaaaagatttagatgagtatttaaagaggatagaggaggcagaaaaaagagatcatagaaaacttggtaaggagatggatttatttcatttcagagaagaaagtccaggatctgttttttggcatgaaaagggttgggcattattccaaaagttaatagattatatgaggatg

SEQ ID NO: 303425 - DNA, 719 bp, Unknown
  Bacterial polypeptide expressing nucleotide sequence isolated from the Sargasso Sea
tgtaactaatttaattttggaaatttataaagatttaggatttgaagaagtaattttaaaatattctgatagaccagaattaagagttggtgacgatcaggtttgggataaatcagaggccgctttattagaagcaattaaagcaacaaaattagaatattctattaataagggcgaaggagctttttatggtccaaaaatagaatttgttttaagagatgcaattggaagagattggcaatgtggaactttgcaagtagatttaaacttaccaggtagattaggcgcctcttttgttgatagcgatggaaataaaaaagttcctgtaatgcttcaccgagctttatttggatcattagaacggtttattggaattttaattgaaaattattcagggaaattacctttttggctttgtccagttcaaacaatagtaattcctatctcgagtgattttgatgattatgcaaaagaagtaaatagccagttaaaaaatgcagggatttcttctgaagtagatttaaaaaatcataatttaaattataaaataagagaacattcattaactaaagttccaatgctactaatatgtggaaaaaaagaagttgacagtaacacagtaactattagaagattggattctaaaaaacaagaaactatggatttaaaagaattcttaaaaaaatactctgctcttaataaagcaccttcaatctaag

SEQ ID NO: 303426 - DNA, 902 bp, Unknown
  Bacterial polypeptide expressing nucleotide sequence isolated from the Sargasso Sea
agaggtttttaatcaaggtctaaaaagttataaagatttacctttgaaaatgtctgagtttggaaaagttcatcggtatgaaccttctggtgcacttcatggtctattaagggtaagagcatttacacaagatgatgctcatatattttgcactgaggatcaaataactgaagaatgtttaactgtaacaaatctcatattagaaatttacaaagatcttggttttgaaaatgtgattctaaaatattctgatagaccagatttgagagttggagatgatagtgtatgggataaagctgaagcggccttgttgaaagcagttaaagcaaccaaattagaatacacaattaacaaaggtgaaggtgcattttacggacctaaaattgaatttgttttaagagatgcgattggcagagactggcagtgtgggactttgcaagttgattttaatttacctggtagactaggcgcttcatatgttgataaagatgggtcaaaaaaagttccagttatgttgcatagagcattatttggttctttagagagatttatcggtatattaatagaaaattatgcaggtaagtttcctttttggatatcacctttacagactatggtgatccctatttctgaggaatttaatgaatatgcaactaaggtttctaataaaattaaaaatgtgggcattagttcagcagtagatttaaaaaataataacttaaattataaaataagagatcattcattagcgaaaataccacttttattaatttgtggtaaaaaagaagttgactccaattcagtaacgattagaagattggactcaagtaaacaagaaaatatggacttagactcattcttaaaaaaattttctgctttaaataaagtatcttcaaattaag

SEQ ID NO: 303427 - DNA, 868 bp, Unknown
  Bacterial polypeptide expressing nucleotide sequence isolated from the Sargasso Sea
aaagaaatggatttattccatttcagagaagaaagtcccggatctgtattttggcatcaaaaaggctggagcttattccaaaaacttatttcatatatgagaatgaagcaagaaactgcagggtatcaagaaataaatactccagaaatattagatcgctcactctgggaaaagtcgggtcattgggaaaaattcggtgctaatatgtatacctctactacacctgatgaaaaagtatttgcaataaaaccaatgaattgtccaggttgcgttcaagtttttaatcaaggtttaaaaagttatcgagatttaccacttaaaatgtcagaatttggaaaggttcataggtatgaaccatcaggtgcacttcatggattattgcgagttagagcttttacacaagatgatgcacatattttttgtaccgaagaacaaattactgaagaatgtttaactgtaactaatttaattttggaaatttataaagatttaggatttgaagaagtaattttaaaatattctgatagacctgaattaagagttggtgacgatcaggtttgggataaatcagaggctgctttattagaggcaattaaagcaacaaaattagaatattctattaataggggcgaaggagctttttatggtccaaaaatagaatttgttttgagagatgcaattggaagagattggcaatgtggaactttgcaagtagatttaaacttaccaggtagattaggtgcctcatttgttgatagcgatggaaataaaaaagttcctgtaatgcttcacagagctttatttggatcattagagaggtttattggaattttaattgaaaactactcagggaaattacctttttggc

SEQ ID NO: 303428 - DNA, 811 bp, Unknown
  Bacterial polypeptide expressing nucleotide sequence isolated from the Sargasso Sea
atgccaaatataaaactaccagatgggaattcattaaaatttgatacaaaagttactggatttcaaatagctgaaaaaattagcaaatctctttccaagcaggctctgataattagcgttgatggaaatttaaaagatttaaattatgaaatagataatgactgttctgtcaagatttataccgctaaggacaaagaaggattagaaacaataagacatgatacagctcatgtactagctatggccgttcaagaactttttcctaaaactcaagtaacaatcggaccagtaattgataatggattttactatgactttgcaaggaaagatccatttactgaagaagatttacgtaaaatagaaaaaaaaatgttggaaattgttgaaagagacgagccaacccatagagaagtttggaaacgtgataaagcaattgaacattttaagaaagcaggagaaatttataaggcagaaataattaaagacattccaaaggaggaggaggtgtcagtttattttcatgggaagtggcatgatttatgtagagggccacatttgagttctaccggcaaaattggaaaattttttaaattgactaaagtatcgggagcatattggagaggagactcaaacaatgagatgcttcaaagaatatacggtacatcttggacttcacaaaaagagcttgatgaatacttaaaaagaatcgaagaagctgaaaaaagagatcacagaaaactaggtaaagaaatgaacttatttcattttagagaagaaagcccaggctctgttttctggcatgaaagaggat

SEQ ID NO: 303429 - DNA, 850 bp, Unknown
  Bacterial polypeptide expressing nucleotide sequence isolated from the Sargasso Sea
aagcaagctttattgataagtgttgatggagaattaaaagatttaaatcatagtatttacaaagactcttcaattaagatatttacatcaaaagataaagaaggtttagagactataagacatgatactgctcacatactcgctatggcagtgcaagaattatttccagggacacaagttacaatagggccagttattgaagatggcttttattacgattttgcaagaaaagaaccttttacaacagaggatttagaaaaaattgaaaacaaaatgaaagaaatagttgatcgagatgaaaaaacttacagagaagtttggaaaagaaatgatgcaattgaacattttaaaaaaaagggagaaacatataaagctgagataatagaaagtattccagaagacgaagatgtatccttatattttcatggagattggcatgatttatgcagaggccctcacttaagttctactggtaaaattggcaaatattttaaattaacaaaagtctcaggcgcttattggagaggcgattctaataatgaaatgttgcaaagagtgtacggaacaagttggtctacgcaaaaagagttagatgattatttaaatagaatagaagaagccgaaaaaagagatcacagaaaaattggtaaagaaatggatttattccatttcagagaggaaagtcccggatctgtattttggcatcaaaaaggctggagcttattccaaaaacttatttcatatatgagaatgaagcaagaaactgcagggtatcaagaaataaatactccagaaatattagatcgctcactctgggaaaagtcgggtcattggaaaaattcggtgctaa

SEQ ID NO: 303430 - DNA, 703 bp, Unknown
  Bacterial polypeptide expressing nucleotide sequence isolated from the Sargasso Sea
tttggaaatttataaagatttaggctttgaagacgtaattttaaaatattcagatcgaccagatataagagtaggagatgataatgtttgggataaatcagaagctgcactgcttgaagctataaaggtttcaaaattagaatatacaataaataaaggagagggagcattttatggtccaaaaatagaatttgttctaagagatgccattggaagagattggcaatgtggaacattgcaagttgacttaaatttacctgaaagattaggagcaacatatgttgcaaaagatggcactaagaagattccagttatgcttcatagggcattgtttggatcattagaaagatttataggtatattaattgagaactatgcgggcaagttacctttttggttaactcctcttcaaacagttgtaataccaatttctagtgattttgatgattatgccaaggatgtttataaacagattaaaaaaataggaatttcatctgaggtagatcttaaaaaccataatttaaattacaaaattagagatcattctttaacaaaagttcctttattattaatttgtggaaaaaaagaagttgacactaactcagtaactattagaagattggattcaaataaacaggaaaatatggaattaaaagaatttcttaaaaaatattctgctcttaacaaagcaccttcgatctaa

SEQ ID NO: 303431 - DNA, 713 bp, Unknown
  Bacterial polypeptide expressing nucleotide sequence isolated from the Sargasso Sea
gaatataattttagaaatttacaaagatttaggttttaaaaatgtaatactgaagtattcagacaggccagaaaaaagagttggagaggacaaaatttgggataaatctgaggctgctcttttatctgcaattaaaaaatcaaaacttgaatatactatcaataaaggagaaggagccttttatggtcctaaaatagaattcgtattaagagatgctatcggaagagattggcaatgtggaactttgcaggttgacctaaatttacctgatagacttggggcaagttttgtagataaagatggatcaaaaaaagtgcctgttatgttacacagagctttatttggatcgcttgaaagatttataggaattctaatagaacactacgcaggaaagttgccactttggctttccccttcacaagttatggtattaccaatttcagaagataacaatacttatgcaaaaaaggtgtttgaagaactttttaaagaaggtataaaatgtgaagtggatttaaaaaaccaaaagataaattataaaataagagaacactctttagctaaagtgcccatactattaatatgtggtaaaaaagaatctacaaataatactgtcacaataagaagattagggtcagacaaacaagaaaatatgaaaacttcaaaattccttaaagagattttaaatgctaataagcttcctttaaaataag

SEQ ID NO: 303432 - DNA, 794 bp, Unknown
  Bacterial polypeptide expressing nucleotide sequence isolated from the Sargasso Sea
gaaaatgaagatgtatcaatttattttcacggagaatggcatgatttatgtagaggcccacatttatcctctacaggtaaaatagggaaatattttaaacttacaaaagtatcaggagcatattggagaggagactctaataatgaaatgttgcaacgaatatatggtacgagttgggcaactcaaaaagacctagatgaatatttaaaaagaatagaagaagccgaaaaaagagatcacagaaaattaggtagagaaatggatttatttcattttagagaagaaagccctggctcagtattttggcatgaaagaggatggggtttatttcaaaagctcattaactacatgagaagcagacaagatgcagctggttatagagaggtcaatactccagaggtactagatagacaactatgggaaaaatctgggcattgggaaaaatacggagaaaacatgtatacttctgaaacaccagatgagaaagtttttgcaattaaaccaatgaattgccctggtcatatccaggtatttaatcaaggcttaaaaagttacagagatcttccgttacgttttgctgaatttggtaaagttcatcgatatgaaccatcaggtgctttacatgggttattaagagtaagagcctttactcaagatgatgcccatattttttgcactgaagatcaaattactagcgaatgtttaattgttacaaatctaatactagatatttataaggaccttggttttgaaaacgtgattctaaaatatgcagataggccagagataagagt

SEQ ID NO: 303433 - DNA, 767 bp, Unknown
  Bacterial polypeptide expressing nucleotide sequence isolated from the Sargasso Sea
gtcagagtttggaaaagttcatagatatgaaccatcaggggccttgcatggacttttaagagtaagggcatttacacaggatgatgcacatatattttgttccgaagaacaaattacagaagaatgtttaaatgtaacaaatttaattttagaaatttataaagacttaggttttgaaaatataattttaaaatattctgatagacctgatgtaagagtaggagatgataacgtatgggataaatctgaaaaagcactattagaagcaattaaagcttctaaacttgagtacagtataaataagggtgaaggtgcattttatggacctaagatagaatttgtattaagagatgcaattggtagagattggcaatgcggaacacttcaagtagatttaaatttacctgaaagacttggagcttcatttgttgataaagatggatcaaaaaaagttccagtcatgttgcacagagctttatttggatctcttgaacgatttattggaatattaattgaaaattattcaggaaaattaccattttggatatcaccactacaaacaatgattattccagtatcatcagaatttgataattatgctaaagaagttaataaaaaaataaaaaaagaaggaattacatcagaggtagatttaaaaaatcataacttaaaatataaaatacgtgaacattctttgtcaaaaatacctattttattaatatgtggaaaaaaagaagttgactccaatacagtaactattagaagat

SEQ ID NO: 303434 - DNA, 888 bp, Unknown
  Bacterial polypeptide expressing nucleotide sequence isolated from the Sargasso Sea
aagcttttaattacaaaagtttcaggtgcatactggagaggtgattcaaataatgaaatgctacaaagaatttatggcacatgctggagttcaaagaaagaattagatcaatacctaaatagattggaagaggctgaaaagagagatcatagaaagctaggaaaagaaatggacctttttcattttagagaagaaagtccaggatcagtattttggcatgaaaaaggatggaacttatttcaaagacttatagagtatatgagattaaaacaaagaattgcaggctatagagaaatcaatacacctgagttattagataagagtctttgggaaaaatcaggacactgggataaatttggtgatttaatgtttacatctgaaacaccagatgaaaaagtttttgcaataaaaccaatgaattgtcctggttgtgttcaaatatttaatcagggcttaaaaagttatagagatctacccttaaaactttctgagtttggaaaagttcatagatatgaaccgtcaggagctctacatggccttttaagggtaagagcttttacacaagatgatgcacatatattttgtacagaagaacaaataactgaagagtgtataaatgttacaaaactaatattagatatttataaagatttaggatttaaaaaagtatttttaaaatattctgataggcctgaaaaaagagttggaaatgatagtgtgtgggataaatctgaaaatgctttacttgcagcgattaaaaaaaccaaactagattatagtattaataaaggagaaggtgccttttatggacctaaaatagaatttgttctaagagatgcaataggaagagattggcaatgcggtacactacaggtggatttaaactta

SEQ ID NO: 303435 - DNA, 700 bp, Unknown
  Bacterial polypeptide expressing nucleotide sequence isolated from the Sargasso Sea
atgcctattattacattacctgacggaaataatattgatttcccaaataaagttactggattagaagtagcagaaaaaattagcaaatcattagctaaacaagcaatggtgataagcgtagatggtgaattaaaagacttagaacatttaattgataaagattgttcaataaaaatttttacatctaaaaatcctgaaggtctggaaactattagacatgatacagctcatatattggcaatggcagtacaagaattgtttccaggaacacaagttacgattggcccagtaattgaaaatggattttattatgattttgcgagaaaagatccatttactgaagaagatttaacaacaattgaaaataaaatgaaagaaattgttgatcgagatgagattaccaaaagggaagtttgggacagaaataaagccatagatcattttaaaaaaaaaggtgaaatctataaagctgagttaattgaagcaataccgaagaatgaagatgtttcaatttattttcatggagattggcatgatctttgtagaggaccacatctttcatcaacaggtaaaattggaaaatatttcaaattgatgaaagtttcaggagcttattggagaggtgattcaaataatgaaatgctacaaagaatttatggtacaagctgggcttctcaaaaagatttagatgaatattaaa

SEQ ID NO: 303436 - DNA, 658 bp, Unknown
  Bacterial polypeptide expressing nucleotide sequence isolated from the Sargasso Sea
aatgacaaatattatacttcctgatggaaagacaataaagtttgataaacctgtaactggcttagaggttgcagaaaaaataagcaaatcattagcaaagcaagctttaataatgagcgtaaatggagagcttaaagacttatatcataaaattgaagatgacagctctataaaaatttttactgccaatgatcctgagggattagaagttattagacatgatgctgctcacataatggctatggctgttcaagaattatatccaggaacacaagtgactatcggtccagtaatcgaaaacggtttttattatgattttgcaagaaaggagcctttcacaagtgaagatctgaataaaattgaaaatagaatgtcagagatagttgataaaaatgtgaaaacaagaagagaagtttgggaaagagaaaaggcaataaatcattttaaaaagattggtgaaaaatataaagccgaaataatagaaagcataccaaaaaatgaggagcttacaatttaccaccatggtgatacttggtatgatctatgcagaggcccacatttagtgtcatctggaaaaattggtaaagcttttaaacttacaaaggtatcaggagcgtattggcgtggcgactctaaaaacgaaatgttcaaagaattt

SEQ ID NO: 303437 - DNA, 733 bp, Unknown
  Bacterial polypeptide expressing nucleotide sequence isolated from the Sargasso Sea
aaagtaactggtctggaggtagctgagaaaataagtaagtcattagcaaaacaagcaatgataattggagttgatggagaattaaaagatttagattttattatagataaagattgctctgtaaaaatttttacctcaaaaaatgaagaagggctcgagacaataaggcatgatacagctcatattatggctatggcagttcaggaattatttccaggaacccaagttacaattggtccagtaattgaaaatggtttttactatgattttgcaagaaaagaaccttttacagaagatgatctaaataaaatagaagtaaaaatgaaagaaattgttgatagagacgaaattacaaaaagagaagtttgggaaagggacaaagctatagaacattttaagaaaaagggtgagatttataaggcagagctgattaagaatattcctcaaggggaggaagtgtctatttactttcatgggaaatggcatgatctttgtagaggacctcatttatcttcaacaggtaaaataggtaaattttttaaattaacaaaagtttctggagcctattggagaggggattctaataacgagatgcttcaaagaatttatggaactagttgggcgagtcagaaagatttagatatatatttaaaaagaattgaggaggcagaaaagagagatcatagaaaattaggaaaggaaatggatctatttcattttagggaagaaagtc

SEQ ID NO: 303438 - DNA, 817 bp, Unknown
  Bacterial polypeptide expressing nucleotide sequence isolated from the Sargasso Sea
aacaggaaaaataggtaaagcatttaaacttacaaaagtagccggagcttattggaggggtgattcaaaaaatgaaatgttacaaagaatatatggaacttgttggcgtaacaaaaaagagttagatgaatatattttaaaattggaagaagcagagaaaagagatcatagaagactcggtaaagaaatggatctgtttcattttcgcgaagaaagtcctggagcggttttttggcatcataaaggttggattttattccaaacactaatttcctatatgaggcaaaaacaaaaaaaagctggttacaaagaaattaatacaccagaaattttagataaaagcttatgggaacaatcaggtcactgggaaaagtttggagaaaatatgttcacttctgaaactccagataaaaaaatattcgcaattaaacctatgaattgtccaggagggattcaagtatttaatcaaggtttaaaaagctacagagatcttcctcttaaattatcagagtttggtaaagttcatagatatgaaccttcaggtgctttacatggtttattgcgagttagagcttttacgcaagacgatgctcatattttttgtacagaagatcaaattactgatgaatgtctaaacgtaacaaatttaatattggaaatttataaggatcttggttttaaaaatgtattgttacaattttctgacaggcctcaaaaaagagtcggtgatgacaaaatttgggataaatcagaatctgcattattaaaagcaataaaacaaacaaaattaaaatatgagattaataaaggcgaagga

SEQ ID NO: 303439 - DNA, 793 bp, Unknown
  Bacterial polypeptide expressing nucleotide sequence isolated from the Sargasso Sea
aatgagggtaagggcctttactcaagatgatggacacattttctgcactgaggaccagatagaatcagaaacaggactatttatagagtttctatcaagcatatatgctgatttaggatttaaaaattttgatatcaagttatctaccagacctgagatgagggttggttcagatgagacatgggataaagcagaagcggctctcgaagcagcaattaaaaatttgggatacctatatagaattgatgagggtgatggcgcattttatggaccaaaattagattttgtgctcactgatgcaataggcagagaatggcaatgtggaacttttcaattagatttcaatttagccgaaaggctagatgctagctatgttggagaagatggaaaaaaacatataccagtaatgatacatagagcagttttaggatcttttgagagattcataggtatcttaattgaaaattattctggaaagcttcctttctggttatctcctcaacaggttgttgtggcttcaatagtttcagatgtaaatgattactcattagagatagtggaattactcaaaaaacagggcattttagccgaagccgacctcaggaatgagaagattagttataaaatcagagaacacagcaatagaaaggtcccaattattttagcaattggaaataatgaaaaaaaagacggaactgtatctgttagaagaattggaagcactgaaaccaaagtcttagaactcaaagaagctataaaacaaatcactaaagaaaatttaattcttaactaa

SEQ ID NO: 303440 - DNA, 736 bp, Unknown
  Bacterial polypeptide expressing nucleotide sequence isolated from the Sargasso Sea
aatgcctgtaattacccttcctgatggaagccaacgcgctttcgataacgctgtttctgtactagatgttgcaaatgatattggccctggtttagccaaagcaaccattgcaggaaaagtaaacggtgagttagtcgacgccgttgatatgattgacgcggacgcacaacttcaaataatcactgcaaaagacgatgaaggtttagaaattcttcgtcacagttgcgcgcacttgttaggtcacgctatcaaacaactttggcctaacaccaaaatggctatcggccctgttatcgacaacggtttctactacgatgttgatatggaagaaagcctaacccaggaagatttagccaaactagaaaagcgtatgcttgaactggctaaaaccaattacgacgtggttaagaacaaagttagctggcaagaagcacgcgatgcatttgaagcgcgcggtgaaagctacaagatggaaattcttgatgagaacatcagcaaggacgaccgccccgcgctgtatcaccacgaagaatacacagatatgtgtcgtggccctcacgtgccaaatatgaagttctgccatcacttcaaactgatgaaagtggcaggtgcttactggcgtggcgatagcgacaacaaaatgcttcagcgtatttacggtactgcgtgggcagataagaagcagcttaaatcttacctacagcgcttagaagaagctgaaaagcgcgaccaccgt

SEQ ID NO: 303441 - DNA, 805 bp, Unknown
  Bacterial polypeptide expressing nucleotide sequence isolated from the Sargasso Sea
aggtcttgatgttataaggcatgatgctgcacatataatggcaatgtctgttcaagagctatttcctggaactcaagtgactataggtcctgtaatcgaaaatggtttttattatgatttttctagaaaagaacctttcacaacagacgatttaaagaaaattgagaaaagaatgtcagaaataattgatagagatgtaaaaactaagagagaggtgtgggagagaaataaagctataggtcattttaaaaagattggagaaaaatataaagctgaaataattaaaagtattcccgaaaaagaggagctttcaatttatcatcacggagacacctggcatgatttatgtagaggaccacacctagcctcatcaaaaaaaattggaaaagcttttaaactaaccaaagtatcgggagcatattggagaggggactctaataatgaaatgttgcaacgtatttatgggacatgttggagttctaaaaaagaattagatgcttatctacatagactagatgaagctgaaaaaagagatcataggaagcttggcaaagaaatggatttgtttcatttcagagaagaaagtccaggatcagtattttggcatgaaaaaggttggaatttatttcagagattaatcgagtacatgagactaaaacaaagaaatgcaggttatcgtgaaataaatacacctgaactattagataaaagcttatgggaaaaatctggacattgggacaaatttggagacttaatgtttacatctgaaactcctgatgaaaaaacttttgctataaaacctata

SEQ ID NO: 303442 - DNA, 746 bp, Unknown
  Bacterial polypeptide expressing nucleotide sequence isolated from the Sargasso Sea
aatggaagatttagaaaaattaaggtttaatataaggcattctgcagctcatataatggctgaagcagttatgaaattatttcctggcacaatgattggaattggcccaccaacaagcgatggattttattatgattttgattgccctcaccagataactaaagaagattttaaaaaaatagaatctgagatgaaaaaaattataaaatctaaaagaaaattctcaggtactgtaactacaagggctgaggcttctaaattattttctagccaaccctacaaacttgaaataataaataatatcccgaaagatgaagaggttaccatatggagtcacgaaagctgggaagatatttgtcgtggagaacatgtagaacatacaggaaatattaaggcttttaaacttttagatgttgctggcgcatattggagaggtgatgaaaaaaataagatgcttcaaagagtgtatgggaccgcctgggaatcaaaagaagaacagaaaaaacatttagataaattagaattagcatctaaaagagaccaccgaaaactgggcacgagtcttgatttattttattttgatgaattttctccggcaatgccattttttcttccaaaagggacatttataatgaaccagttaacaacatatatgagagataaatacaataaatatggttatcaggaagttattactccgcaaatttttagttctaaattgtgggatttatctggacactccagcc

SEQ ID NO: 303443 - DNA, 759 bp, Unknown
  Bacterial polypeptide expressing nucleotide sequence isolated from the Sargasso Sea
agtaactattggaccagtaatagagaatggtttttattatgattttgcaagaaaagaacctttcactagcgatgatttaaaaaagatcgagattagaatgtctgaaattattgacaaagatgttaaaacacgaagagaagtatgggaaagagaaaaagcaatcagtcattttaaaaaaattggagaaaaatataaggcagaaataattgaaagcattccagaaaatgaagaactttctgtctatcatcatggtgacacgtggtatgatttgtgtagaggtccccatttagtgtcttctggtaaaattggaaaagcttttaaattaatgaaagtatcaggagcatattggcgtggagattctaataatgagatgcttcaaagaatttatggcactggttgggcaactcaaaaagagctaaatctatatcttgaaagaattgaggaagctgaaaaaagagatcatagaaaaattggaaaagaaatggatttatttcattttagagaagaaagtccaggaacagttttctggcatgaaaaagggtgggcgctatttcaaaaattaatttcatatatgagaaaaagacaagacgaagctggatataaagaagttaatacccctgaagttttggacagattgttatgggaaaagtctggtcattgggaaaaatatagagaacatatgtacacatcacaaactccagatgaaaaaatatttgcaattaaacctatgaattgtccaggtcacatagaagtttttaa

SEQ ID NO: 303444 - DNA, 832 bp, Unknown
  Bacterial polypeptide expressing nucleotide sequence isolated from the Sargasso Sea
aatgaaaataactttggctgatggcaaaatcaaggatttcgatgaggcggtaactgccaaagctgtagctgttagtataagcactgtgttggcaaaatccgcggtggctgtgcgagtcaatggtaatttgtgtgatttgagtaccaacctttgtgatggtgatcaggttgtgtttgtgaaagctggtgacccagaagctctggaggttttgcggcactctgctgcacatctcatggccgatgcaattttgcgcctttaccccaaagctcagctgactataggacctgttgttgaagatggtttttactatgatatttacctgccagaagggaagataactccagaagattttcctaaaattgaaaagcagatgaaacacttaagtaagaagtctttggcttttaaaaggttttgttcaagttatgatcaagcagacgaacactaccaacgttatcaacaaatagatggtggtaacaataagtttaaacaagaaatagttgcacagatcaaagaaaaacaagaacaacttagtttttatcagcacggagattttattgatttgtgtcgaggccctcatgttcctcacagcggatggcttaaatacagcaagctattaagggtgtcaggctcttattggcgtgctgatgcggagcgtgaacctttgaccagggtttatggtactgctttttttaataaagaagatttggatgagtatttaaattttttgcaagaatctaaaaaacgcgatcaccggattcttggggagaaattagatctttttagttttagtgaagatgctccagggtttcctttttctttcccaagggagctt

SEQ ID NO: 303445 - DNA, 854 bp, Unknown
  Bacterial polypeptide expressing nucleotide sequence isolated from the Sargasso Sea
tatgaaagtttcgggagcttactggaggggagattctaaaaatgaaatgcttcaaagaatttatggaacaagctggtctactcaaaaagaattagacaattatttaaatatgattgaagaagctgaaaaaagggatcatagaaaattaggtaaagaaatggatctatttcattttagagaagaaagcccaggttcagttttttggcatgaaaaaggttggaatttatttcagaaattaattgcctacatgaggtcaaaacaagacgatgcaggatataaagaaataaatacaccagaaatattggatcgatcattgtgggaaaaatcaggccattgggaaaaatttggtgcaaatatgtatacatctacaacgccagatgaaaaagtatttgcaattaaaccgatgaattgtccaggctgtgttcaagtttttaatcaaggattaaaaagctatagagatttaccgcttaagatgtcagagtttggtaaggtccacagatatgaaccatcaggcgctttgcatggacttttaagagtaagagcttttacccaagatgatgctcatatcttttgttccgaggatcaaattactcaggaatgtttaaaagtaacaaatctaattttagaaatttataaagatttaggttttgaaaatgtaattttaaaatattcagataggccagagacacgtgttggtgatgataaagtttgggataaatcggagaaagcattattggaagcaattaaggcttctaaacttgaatatagtgttaataaaggagaaggtgcattttatggaccaaagatagaattcgtattaagggatgcgattggaagagattggcaatgtggaa

SEQ ID NO: 303446 - DNA, 938 bp, Unknown
  Bacterial polypeptide expressing nucleotide sequence isolated from the Sargasso Sea
cccacatttaagttcaactggtaaaataggaaaatattttaaattaacaaaggtctcaggtgcttactggagaggcgattctaataatgaaatgttgcaaagagtttatggaacaagttggtctactcaaaaagaattagatgattatctagaaagaatagaagaggctgaaaaaagagatcacagaaaaattgggaaagaaatggatttatttcatttcagagaagagagtcctggatctgtattctggcatcaaaaaggatggagtttatttcaaaaactgatttcatatatgagaatgaagcaagaaattgcaggatatcaggaaataaataccccagaaatattagatcgctccctttgggagaaatcaggtcactgggaaaaatttggtgccaatatgtatacttctactacacctgatgaaaaagtttttgctataaagccaatgaattgtccaggttgtgttcaggtttttaatcaaggtttaaaaagttatcgtgatttaccactcaaaatgtctgaatttggaaaggttcataggtatgaaccatctggagcgcttcacggattattgagagtaagagcttttactcaagatgatgcacatattttttgtactgaagaacaaattaccgaagaatgtttaactgtgactaatttaattttagagatttataaagatttgggatttgaagacgtaattttaaaatattctgatcgaccggaattaagagttggtgatgatcaagtttgggataaatcagaggctgctttacttgaggcaattaaagcaacaaaattagaatattctattaataaaggtgagggagctttttatggtccaaaaatagaatttgttttaagagatgcgattggaagagattggcaatgtggaactctacaagtagatttaaacttaccgggcagattaggtg

SEQ ID NO: 303447 - DNA, 778 bp, Unknown
  Bacterial polypeptide expressing nucleotide sequence isolated from the Sargasso Sea
tgaaaaagtatttgcaataaaaccgatgaattgtccaggttgcgttcaagtttttaatcaaggtttaaaaagttatagagatttaccacttaaaatgtcagaatttggaaaggttcataggtatgaaccatctggagctcttcatggactgttaagagttagagcttttacacaagatgatgcacatattttttgcactgaagaacaaattactgaagaatgtttgacagtaactaatttaattttagaaatttataaggatttagggtttgaagatgtaatattaaaatattctgacagaccagaattaagagttggtgatgatcaagtatgggataaatcagaagctgctttactagaagcaattaaagcaacaaaattagaatattctatcaataagggcgaaggagctttttatggtccaaaaatagaatttgttttaagggatgcgattggaagggattggcaatgtggaactttacaagttgatttaaacctaccaggcagattaggtgcttcatttgttgatagtgatggaaacaaaaaagttcctgttatgttacatagggcattatttggatctttagaaagatttattggaattttaattgaaaattattcaggaaaattacctttttggctttgcccagttcaaacaatagtaatccctatttcgagtgattttgatgattatgcaaaacaagtcaatagtcagttaaaaaaagtaggactttcttctgaagtagatttaaaaaatcacaatttaaattataaaatt

SEQ ID NO: 303448 - DNA, 814 bp, Unknown
  Bacterial polypeptide expressing nucleotide sequence isolated from the Sargasso Sea
atatcaatttataaacagggtgaatggttggatctttgtcgtggacctcacatgaataatacgaaacaaattggaagaggttttaaattaatgaaagttgccggtgcctattggcgtggtgattcgaaaaatgtaatgctcactcgaatatatggaactgcttggagaaatgaaaaggagttagagagttatttaaaacaaattgaggaagctgaaaaaagggatcacagaaaacttggaaaaaaaatgaatctttttcactttcaggaagaagcgcctggtgctgttttttggcatcctaagggatggaaactattccaatcattaataaattatatgcgcttaagacaagacaaggcgggatatgttgaaactaacacgccagatcttttagataaatcgttatgggaaacttcaggacattgggaaaagtttggtgacaatatgtttacaacagacccaaaagaagaaaagatttttgcaataaaaccaatgaattgtcctggtgcggttgaagtatataaacaaggtcttaaaagttatagagacttgccattgcgcatgtctgaatttggtaaagtacatagatatgaaccttctggagctttgcatgggttaatgagagtaagagctttcactcaagatgacgcacatattttttgtacagaggatcaaataactgaagaaagcaaaacaatttgtgatcttatacttagtatatacaaagactttggatttgatgatgtaagtattaaattttctgacagacctaataaacgagtaggtgaagatactgttgggataaggctgaaga

SEQ ID NO: 303449 - DNA, 609 bp, Unknown
  Bacterial polypeptide expressing nucleotide sequence isolated from the Sargasso Sea
tatggaagaaactatagaaaatatcagatataaaataaggcactcaactgcacacgtaatggctgaagccgtgactaatttatttcctggcacaaaaattggaatggggccacctacagaaaatggtttctattatgactttgattgtcccaaatctctatcgcaagaagatttaaaaattattgaaaaagagatgaaaaagataataaagaaaaaaagtaaattttcaggaatggttgtatctagagaagaagcaaaaaaaagattcattggacaagattataaattagaaataattaatggcattccagatgatgaaaaaattagtatatggagccatgaaagctgggaagacatttgtcgaggcgagcatgtagatagtacaaaaaatattactgcatttaaacttctagatgttgctggtgcttattggaaaggagatgaaaaaaatactatgcttcaaagagtttatggaacagcttgggaaactaaagatgctttaaaagagtatttaaaaaaactggaactcgctgcaaagagagatcatagaaaattaggtgtatccctagatttattctactttgatcaacttgctccatcaatgccatt

SEQ ID NO: 303450 - DNA, 801 bp, Unknown
  Bacterial polypeptide expressing nucleotide sequence isolated from the Sargasso Sea
aatgaaagagattgttgataggaatgaaataacaaaaagagaagtttgggatagaaacaaagcaattagtcattttaaaaaaaaaggagaaatttataaagccgagttgattgaagcaatacctgaaaacgaagatgtatcaatttattttcatggaaaatggcatgatttatgtaggggtccacacctttcctctacaggtaaaataggaaaatattttaaacttacaaaagtgtcaggagcatattggagaggagactctaataatgaaatgttgcaacgaatttatggtacgagttgggcaactcaaaaagatctagatgaatatttgaaaagaatagaagaagcggaaaaaagagatcatagaaaattaggtagagaaatggatttatttcattttagagaagaaagccctggctcagtattttggcatgaaagaggatggggtttatttcaaaagctcattaactatatgagaagcagacaagatgctgctggttataaagaggtaaatactccagaggtattagatagacaactatgggagaaatctggacattgggaaaaatatggagaaaatatgtatacttctgaaacaccagatgagaaagtttttgcaattaaaccgatgaattgtcctggtcatatccaggtatttaatcaaggcctaaaaagttatagagatcttcctttacgttttgctgaatttggaaaagttcatcgttatgagccatcaggcgctttgcatggtttattaagagtaagagcctttacccaagatgatgcccatatttttttgta

SEQ ID NO: 303451 - DNA, 558 bp, Unknown
  Bacterial polypeptide expressing nucleotide sequence isolated from the Sargasso Sea
caattaataaaggagaaggagcattctatggtccgaaaatagagtttgttttaagagatgcaattggaagagattggcaatgtggaacattgcaagttgatctaaatttacccgaaagattaggggctacttatgttgcaagagatggttcaaagaaaattccagtaatgttacatagagctttgtttggttcattagagagatttattggtatattgattgagaattatgccggtaagttgcctttttggataacgcctcttcaaacagttgttataccaatttctagtgattttgatgattatgcaaaagatgttaataaacaaataaaaaaagcaggaataacatctgaagttgatcttaaaaatcataatttaaattataaaattagagatcattcattgacaaaagtccctttgcttttaatttgtggaaaaaaagaagttgacactaactctgtaactattagaagattggattcaaataaacaagaaaatatggaattaaaagaatttctaaaaaaatattctgctttaaataaggcgcattcaatttaag

SEQ ID NO: 303452 - DNA, 562 bp, Unknown
  Bacterial polypeptide expressing nucleotide sequence isolated from the Sargasso Sea
tatgccaacaattaccttacctgatggttcaaaaaaagttttcgaaaaatcagtaactattcttgaaattgcacagagtataggatctggattagctaaagcaacaattgctgggaaagtaaatgatgtacttcttgatgcaactcttcctataaataaagattccaaagttgtaatcatcacatctaaagataaagaaggaattgaaataataagacattcatttgctcatcttattggtcatgcagtaaaacaaatttatcctaatatccaaatggcaattgggcctgtaattgaagatggtttttattacgacattttttctgaatacagatttactcctgaagatttaataaaaattgaagaacgaattaacaacctaattaaaacaaactatgacgtagaaattttacaagtttcaaaagaagaggcaattaaaacttttaaagaaagacatgagacctttaaattacgaataattaaagagattcctgaaggaggtctcatcaatttatataagcacgaagaatatatagacatgtgtagaggacctcacgtaccc

SEQ ID NO: 303453 - DNA, 922 bp, Unknown
  Bacterial polypeptide expressing nucleotide sequence isolated from the Sargasso Sea
cttaagttatgaaataattaaagactcaaaagtaagaattataacttctaatgatcaagagggtcttgaagttataagacatgacgcagctcatataatggctatggctgttcaagagttgtttccaggaacacaagttacaattggaccggttattgaaaatggtttctactatgactttgccagaaaagacccttttacaagtgatgacttattaaaaattgaaaaaaaaatgtctcaaataattgacaaagatgtaaaaactaggagagaagtctgggagagggaaaaagcaataaaacattttcttaagattggtgaaaaatataaagctgagattattgaaagcataccacaaggtgaagaactctccatttatcatcatggtgatacttggcatgatttatgtagaggacctcatttagcttcttcaagtaaaattggtaaggcatttaaattaactaaagtgtcaggagcttattggagaggcgactctaataatgaaatgttacaaagaatatatggaacttgttggagttcaaagaaagatttagatgactatcttcatagattagaagaggctgaaaaaagagatcatagaaagctaggtaaggaaatggatttatttcatttcagagaagagagtcccggttcagttttttggcatgaaaaaggctggttattatttcaaaggctaattgaatatatgagaatgaaacaaaggctcgcaggatataaagaaattaatactcctgagcttttagacaaatcactgtgggaaaaatcaggacattgggaaaagtttggtgagcatatgtttacttcagatacaccagatgaaaagacttttgcagttaagcctatgaactgtccaggatgtgttcaagtatttaatcaaggtttaaagagttatagagattta

SEQ ID NO: 303454 - DNA, 823 bp, Unknown
  Bacterial polypeptide expressing nucleotide sequence isolated from the Sargasso Sea
catgttttagcaatggcagtacaagaactttttcctggaactcaagtaactataggaccggtaatagaaaatggtttttattatgattttgcgagaaaagaaacttttactgaagaagatcttcaaaaaatagaaaaaaaaatgaaagaaattgttgaaagagatgaacaaacgcatagagaagtgtgggaaagagataaagctatagaacattttaaaaaagctggagaaatttacaaagctgaaataatcaaaagtattccaaaaggagaagaagtatccatctattttcatggaaaatggcatgatttatgtagaggcccacatctaacttcaacgggaaaaattggaaagtattttaagctaatgaaagttgccggtgcgtattggagaggtgactcaaaaaatgaaatgttgcaaagaatttatggaacagcatggtcatctcaaaaagaacttgatgaatatttaaaaagaattgaagaggcagaaaaaagagatcatagaaaattaggaaaagaaatggatttatttcatttcagagaagaaagcccagggtcagttttttggcatgaaaaaggttggtctttgtttcaaaaattaattgactacatgagaagtaaacaaaaacaagctggttataaagaaataaatactcctgaaatattagatagatctttatgggaaaaatcaggacattgggaaaaatttggtcaacatatgtatacctctaccactcctgacgaaaaagtatttgcaatcaaacccatgaattgtcctggttgtgtccaagtgtttaaccagggattaaaaagttatagag

SEQ ID NO: 303455 - DNA, 612 bp, Unknown
  Bacterial polypeptide expressing nucleotide sequence isolated from the Sargasso Sea
gggatcaggcagaagctgctttagaatctgcaattaaaaaactagatatcccatatacagttgaagtaggagagggggctttttatggtccaaaactggattttgttttaactgacgcaataggtcgcgaatggcaatgtggaacttttcaagcagattttaatctcccagatagactagacgcagaatatattggtgaagatggttcaaaatatagaccagtaatgatgcatagagcaatccttggttcttttgagaggttcattggaattttaattgaaaactattctggaaaattacctctatggttagctccgacacaattagccatattgactgtcactgaagaagttaatgagtacgctaagactttaaagcaaaagtttgatgattttaatcttcgtgttgatctagatctaaggaatgaaaagataggttataaaatcagagagcacagtaatgcaaaggttccatttatggcggttattggaaaggatgaggtgttagctcagactgtttctatccgaaatttaagtgaaaataaaaccatcacttattccattaacgaagctgtttcaaagttatttgaagagtcaaaaactcctaactagg

SEQ ID NO: 303456 - DNA, 973 bp, Unknown
  Bacterial polypeptide expressing nucleotide sequence isolated from the Sargasso Sea
ggaaaaattgcaaaagctttcaaattaacaaaagtttctggagcatattggagaggtgactctaacaatgaaatgttacaaagaatttacggtacttgttggagctcaaaaaaagaattagatgaatatttaaatagattggaagaagcagaaaaaagagatcatagaaagttaggtaaagaaatggatctttttcattttagagaagaaagccctggagcagtattctggcatgagaagggttggaatttatttcaaagactcatagaatatatgagacaaaaacaaagaaacgctggttataaggagattagcacacccgaactcttggataaaagtctttgggaaaaatctggacactgggaaaaatttggtcatcatatgtttacttcagaaacaccagatgaaaaggtgtttgcagtaaagccaatgaattgtccaggatgtgttcaagtatttaatcaaggtcttaaaagctacagagatcttccacttaaactgtcagaatttggaaaagtacatagatatgaaccgtctggcgcattacatggtcttttaagagttagagcctttacacaagatgatgctcatatattttgtacagaagaacaaataacacaggaatgtattagtgttacaaatttaatcttagaaatatataaagatcttggatttaaaaaagtttttctgaagtattcagatagacctgagacaagagtaggtgatgataaaatttgggataagtcagaaaaggcattacttgcagcgattaaaaaaacaaaattagagtataaaattaataaaggagagggagctttttatggtcctaaaatagaattcgttttaagggatgctattggtagagactggcagtgtggtactttgcaagtagatttaaatttacctggtagacttggagcaacctttgttgacaaagatggtagtaaaaaagttcctgttatgttgcatagag

SEQ ID NO: 303457 - DNA, 384 bp, Unknown
  Bacterial polypeptide expressing nucleotide sequence isolated from the Sargasso Sea
tatgcctgttattacccttccagacggctccaaacgcgagttcgatcaacccgttaccctgatgcaagttgccgaagatattggccctggtctcgccaaagcgaccgtatgtggtcgtattaacggtgaactggtcgatgcctgtgagctgatcaccgatgacgccgatgtcactctgatcaccggtcgcgacgaagaaggtctggaagttatccgtcactcattcgctcacctcgttggtcatgccgttaagcagctgtacccaacggctaagatggccattggcccggtgatcgaaaacggcttctattacgatattgattacgagcgtccatttacacccgaagacctcgaagccatcgagaagcgtgttaaagagctgat

SEQ ID NO: 303458 - DNA, 472 bp, Unknown
  Bacterial polypeptide expressing nucleotide sequence isolated from the Sargasso Sea
aatgcctataattacattacctgatggaaaaaatttagattttccaaaaaaagttactggatcacaagtagctgaaaaaataagtaagtcattagcaaaacaagcaatggttattagtgttgatggagaacttaaagatttagattttattatagaaaaagattcttcagttaaaatattcacttcaaaaaatgaggagggtctcgaaacaataagacacgatactgctcatattttagcaatggcagttcaggagttgtttcctggaacacaagtcacaattggtcctgtgattgaaaatggtttttactacgattttgctagaaaagaaccttttacagaagatgatttgttacaaatagaaaaaaaaatgagagagatagttgatagggatgaaaaaacaaaaagagaaatttgggatagtgataaagccattaaacattttaagaaaaaaggagaaattacaaagcag

SEQ ID NO: 303459 - DNA, 788 bp, Unknown
  Bacterial polypeptide expressing nucleotide sequence isolated from the Sargasso Sea
gagaggcgattctaataatgaaatgcttcaaagaatatatggaacttgttggagcaataaaaaagaacttgaagaatatctaaatcaattagaagaagcggagaaaagagatcatagaaaaattggaaaagaaatggatctttttcattttagagaggaaagtccaggtgcagttttctggcatgaaaaaggatggactttatttcaaagattaatcgaatatatgagaatgaaacaaagattagcaggctataaagaaataaatacacctgaacttttagataaaacattatgggaaaaatctggccattgggaaaaatttggtgagcatatgttcacgtcagaaacgcccgatgaaaaaactttcgcaattaaacctatgaattgcccaggatgtgtgcaggttttcaaccaagggttaaaaagttatcgagacctacctctaaaactttcagaatttggtaaggttcacagatacgaaccttcgggcgcattacatggtttgttaagagtaagagcatttacacaagatgatgctcatattttttgcactgaagatcaaataacgcaagagtccttgtcagtaactaatttaattctagatatttacaaagatcttggttttgaaaatattattttaaaatattcagatagacctgaaaaaagagtgggcgatgataagacatgggacaaatcagaagcagctttattgtcagccataaaaaaatcaaaacttgactatacaataaacaaaggggaaggtgccttttatggtccaaaaaattgaa

SEQ ID NO: 303460 - DNA, 843 bp, Unknown
  Bacterial polypeptide expressing nucleotide sequence isolated from the Sargasso Sea
agttgctggggcttattggagaggagattctaaaaatgagatgcttcaaaggatttacggaacatcttggtcctctcaaaaagaactcgatacctatttagaacaaatagaagaagcagaaaaaagagatcacagaaaacttggtaaggaaatggacctttttcattttagagaggaaagtccgggttctgtattttggcatgaaaagggatggaaactttttcaaaaattagttgcttatatgagagcgaggcaagatttagctggctataaagaaattaatacccctgaagttttagatagagcattgtgggaaaagtctggccattgggaaaaatatggcgagcacatgtatacttcccaaactcctgatgaaaaagtatttgcgataaaaccaatgaattgtccaggacatgtgcaagtttttaatcagggcttaaaaagttatagagatcttccgctgagaatttctgagtttggaaaagttcatagatatgaaccttctggagccttacatggattgttgagggtaagagcttttactcaggatgacgcacatatcttttgtactgaggatcaaataaccaatgaatgtttgatagtgacaaatttaattttagatatctataaagatcttggatttgaaaatgtaattttaaaatattcagacagaccagatttaagagttggagatgataaagtttgggacaaagcagagaaagctttgttggacgctgtaaaagcatctaagcttaaatatacaattaataaaggagaaggagcattttatggtcctaaaattgaatttgttctcagggatgctataggaagagattggcaatg

SEQ ID NO: 303461 - DNA, 896 bp, Unknown
  Bacterial polypeptide expressing nucleotide sequence isolated from the Sargasso Sea
tgtagatggcaatgattattatgtaaaacctatgaattgtccacatcatcataaaatttatgatgcaacaccaaaaagctatagagatttaccttatcgaattgcagaatatggaacgtgctatcgttatgaaaaatctggacaattatttggcttaatgcgagtcaggagtatgcaaatgaatgatgctcatatatattgctctcagtctgattttaatgaagaatttttagatgtctgtaacatgtatttagaatattttaaaatatttggtatagaaaaatatgaaatgagactaagccttcatgatccaagtaaattaggagaaaaatatattgatgaacctgaactttggattgaaactgaaaaatctgttaaggatgctttaactaagggaggtattaattataaagaaatacctggagaggcagcattttatggtccaaagatcgacgttcaagtctggagtgcgataggtaaagaatttactttagcaactaatcaagtagactttgctattcctcgaagatttaacctgacttatactgataaaaatggaaacgatcagacgcctttatgtattcatcgagcgccacttagtacacatgagagatttataggatttttaattgaacactatggaggagattttccattatggctatctcctactcaagtatcaatcctgccggtttctgaaaaatcacatgcttatgcaaaaactattaaaagtaaatttaaaaatgctggaatacgtgtaaatttagatgaccgtgcagataaaattggtgctaaaatcagatcagctgagcttaaaaaagttccagtaatgttgattattggtgaaaaagaagaagaaaataatagtgcaactgtacgtagaagatttgtaaaag

SEQ ID NO: 303462 - DNA, 418 bp, Unknown
  Bacterial polypeptide expressing nucleotide sequence isolated from the Sargasso Sea
gaggatggaataaaaaaaacaccagttatgcttcatagagcgctctttggttctctagaaagattcacagggatacttattgaacattacgctggtcatctgcctctttggctctcaccattacaagtaatggtggcaacaattacttctgatactgatgattatgccattaacgttaaaaatgaattgatcaaaaatggtattagggctgatgtagatttaagaaatgaaaaaataggctataaaattcgagaacatagcaatagcaaggtccctataataatcgctgttggaaaaaaagagtctcaagaaaacacaacttcagttagaagaattggatcatcagaaacaaaaacctttaaattagatgaaattgttactaccttatctaaagaaacaaaatcacctatagaataaa

SEQ ID NO: 303463 - DNA, 670 bp, Unknown
  Bacterial polypeptide expressing nucleotide sequence isolated from the Sargasso Sea
gttattttaaagtattctgatagacctgagacaagagttggtgaggataaagtttgggataaagcagaagaagccttactaaaagcagttaaagcatcaaaacttgaatatagtgttaataagggtgaaggagcattttatggtcctaaggttgagtttgttttaagagacgcaattggaagagactggcagtgtggaacattacaagttgatttaaatttacccggaagactgggtgctacgtacgttgaaaaggatggatcaaaaaaagtacctgttatgcttcatagagcattatttggatcgttagaaagatttattggaatattaattgaaaattttgctggcaaactacctttttggataactccacttcaggctataattataccaatttcaaatgagtttgatgcctacgcaaaaaatgtttataaaaaggtaaatgagacaggaattaactgtgaaatagatttaaaagatcacaatttaaattacaaaattagagaacatttaatgtcaaaaattccattattattgatttgtggaaaaaaagaagttgactctaacagtataactattagacaattgggttctgaaaaacaagaaattatgcaattgaatacttttctaaaaaaattctctgctttaaacaaagctccttctttctaag

SEQ ID NO: 303464 - DNA, 723 bp, Unknown
  Bacterial polypeptide expressing nucleotide sequence isolated from the Sargasso Sea
aatgcctataattacattaccagatggaaaaaatattgaatttcccaaagaagttacaggtttagatgttgcagaaaaaataagcaaatcattatcaaaacaagcattgataatgagcgtcgatggtgagttaaaagatttgtatttttcaattaaaaaagattgttcagtaaaaatctttactgcaaaagatccagagggtcttgaagttataagacacgatacggctcacattatggcaatggctgttcaagaattataccctggtacacaagtaactataggaccagtaattgaaaatggtttttactatgattttgctcggaaagagccttttacagagaaagatctagaaaaaatagaaaaaaaaatgtcagaaataattgacaaagatgtaaaaacaagaagagaggtttggaaaagagataaagcaataagccatttcaaaaaaattggtgaaaaatataaagctgaaattatagagagtataccagagagtgaggagctaacagtctaccatcatggtgatacttggcatgacttgtgtagaggtccacacttagtttcttctggaaaaattggcaaagcgtttaagcttacaaaagttgctggagcatattggcgtggagactcaaaaaatgagatgttacaaagaatttatggaactggttgggcgtctcaaaaagacttggatgcttatttaaaaagaattgaggaggcaga

SEQ ID NO: 303465 - DNA, 681 bp, Unknown
  Bacterial polypeptide expressing nucleotide sequence isolated from the Sargasso Sea
attcttataaactctcaacaagaccagagaaaagagttggaagcgatgatgtatgggacaaatcagaaaaagcgctttcagatgctctagattcaaaaggattagattggtctttactgcctggagaaggggctttctatggtccaaaaattgaattctccctcaaagattgtcttaacagagtctggcaatgtgggacaattcaagtagatttctcaatgcctgaaaggctaaattcaagctacatagatgttgatgggaagaaacaaccccctgtcatgttgcatagagcaattttaggttcatttgagagatttattggtattttaattgagaactattctgggaacttgcccatatggttatgcccacttcaaatcgtagtaatggggataactgacagaaataatgatgcatgcttggatactaaatctaaattaataaaatatggttttagagcttctgttgacacaaggaatgaaaaagtgggatttaagataagagagcatacaatgcaaagaatacctttcttgataattattggagataaagaagaagagaataatgaaatctcggtaagaacacgtgagggaaaagatcttggtaaaatgactttggataagttcaaacttataatggatgaatcaatcagcaaaaagagtttggttgagagtaaataat

SEQ ID NO: 303466 - DNA, 900 bp, Unknown
  Bacterial polypeptide expressing nucleotide sequence isolated from the Sargasso Sea
ggaggaggactagccgtatggcacccgaaagggtcccgagtgaggaagctaatggaagatttcagccgccagcgccatgaaagcggcggctatgaatttgtgtacacaccacatatagctaacgctgagctattccgaaccagtgggcatctagatttttactcggaagggatgtacccaccgatggaaatggacaatggggaatactatcccaagccaatgaattgtcccatgcattgcctcatctatcgagcaggaacaagatcgtacagggatctcccaattcgcttatttgagcttggcaccgtttaccggtatgaaagagctggaactctacatggactgatgcgtatacgaggattcactcaggacgatgcccacatcttcacaaccgaagaaggcctaggacaagaaatagagaatctccttgaatttgttatgtcggtccttcgggctttcggatttgaagaatttacatttagtctctcaactaggaatccagagaaatcggttggaagtgatgaaatatgggaacacgcaaccgcagctctacaagaagctatagaacggcacggcctcccgtatagtaccaaagtaggcgacgcagcattttatggtccaaagatagatattgatgtcgcagatgctattggaaggtcctggcagctatcaacaattcagttagatttcaatcttcccgagagattcaacctgcgttacataaattcatcgggagagagaaaacgcccggtgatgatccaccgtgcgttgatgggatcaatagagcgcttctttggcgttctcattgagcattacgcaggagcctttccattatggctcgcacccacccaagtctccgttctgcccgtagcggaagagtacgaggcgtatgcaaaggaa

SEQ ID NO: 303467 - DNA, 853 bp, Unknown
  Bacterial polypeptide expressing nucleotide sequence isolated from the Sargasso Sea
agaaataattagacattcatgtgctcatttatttggccatgctttgaagcaattatatcctgaggcaaaaatggctatagggccaacaatagaaaatggcttctattacgatattgatcttgaagaatcacttagtgaaaatgatttggaaaaaattgaattaagaatgaaagagttagctaaaacaaattatgatgttgttagagaagttgtaacaagaaaaaaagcacttgatacatttaaaaatagaaatgaaccctataagattgaaataattaatgaaattcctgatgatgaaattatagctctttatcatcataatgagtacatcgatatgtgcagaggtcctcatgttacatcagttaggcacttaaaagcttttaaattaacgaaaattgctggagcatattggagaggcagttctgataataaaatgcttcaaagagtatatggaactgcatggtcatctgaaaaagagctaaaaaaacatcttgttcttcttgaggaagcagagaaaagagatcatagaaagcttggaaaagaattggatctttttcactttcaagacattgcgcctggtatggttttttggcatgcaaacggttggtcgatttacaaagagttagaagattatattcgaagaaaaatttcaaaagaaggatataaagaaattaaaactccacaaattttagataaagatttatgggttgagtcaggtcattgggataaatataaagacaatatgtataaaacaattattgatgatagagaattgatgattaaacctatgaactgcccaggacatgttcaaatatataatcaaggtataaagagctataaagatcttccattg

SEQ ID NO: 303468 - DNA, 901 bp, Unknown
  Bacterial polypeptide expressing nucleotide sequence isolated from the Sargasso Sea
tttcctattaatgaagattcagaaataaaaatacttaaaaaagatgctaatattgctttagagattattagacatgattgtgctcatgttatggctgaagcagttcaagaattatttccaggtactcaggttactataggtccagctatagatcatggtttttattatgactttgcatttcctaaaccttttttatcagaagatttagtaaaaattgagaaaaaaatgattgaaattattgataaaggtttaccatttgaacgtgaagtttggaatcgtgatcaagctattgattattttgatagtcaaggtgaagattataaaagtgaaattattaaagatttaccaaatgatgaagaaattactgtttataggcaaggggagtggcttgatttatgtagaggacctcacttacctaccactaagcatattggaaagtcatttaaattaatgaaggtagcaggagcatattggcgtggtgatgaaaataatgagatgcttactcgtatttatggaacttgttggagaaatgataaagagcttaatagttatttagatatgcttaaagaggcagagaaaagggatcatcgaaaaattggtaaagaaatgaaactttttacttttgatgaagaggttggaccaggacttcctttatggttacctaatggctctgtagtaattgaagagcttgaaaagcttgcaaaagaaacagaagaaaaatcaggttatgatagagtaaaaacacctcatatcacaaaaggttctttatatgaaaaatcaggtcatttatcacattataaagatagtatgtttccagccatggatattgatggaaatgaatattaccttaaaccaatgaattgccctcatcatcataagatatatgctagtttacctagga

SEQ ID NO: 303469 - DNA, 730 bp, Unknown
  Bacterial polypeptide expressing nucleotide sequence isolated from the Sargasso Sea
gaatgtttaaacgttactaatttaattttagaaatttataaagatctaggttttgaaaatgtaattttaaaatattcagatagaccagatgtacgtgttggggaagataatgtttgggataaatctgaaaaagctttgttagaagcaattaaagcctctaaacttgaatatagtacaaataaaggagaaggtgcattttatggacccaaaatagaattcgtattaagggatgcgattggaagagactggcaatgtggaacacttcaagtagatttaaatttacccgaaaggcttggtgcatcatttgttgataaagatggatccaaaaaagtacctgttatgctacatagagctttgtttggatcattagaaagatttataggtatattaatagaaaattattctggcaaacttcctttttggatatcaccacttcaaactatggtaattccagtgtctgaagattttgataactatgcaaaagaagttaatcaaaaaataaaaaaagtaggaattaattcagaggttgacctaaaaaatcataacttaaactataaaataagagaacattctttatcaaaaatacctattttacttatatgtggaaaaaaagaagttgacagcaatactgtaactattagaagattggattctaataaacaagaaaatatggaattaaatttattcttaaaaaaattctctgatttaagcaaagcaccctcgaactaag

SEQ ID NO: 303470 - DNA, 934 bp, Unknown
  Bacterial polypeptide expressing nucleotide sequence isolated from the Sargasso Sea
tatggtactagttgggcatcacaaaaagacttagatgaatatttaaagaggatagaagaagcagaaaaacgagatcatagaaaaataggtaaggaaatggatttatttcattttagagaagaaagccctggctctgtcttttggcatgaaaagggctggtctttatttcaaaaattaataaattatatgagagctagacaagatgctgctggatacaaagaagtaaatacacctgaagttttagacagattattgtgggaaaagtctggtcactgggaaaaatatggagagaatatgtatacttcagaaactccagatgaaaaagtttttgcaattaaaccaatgaattgtccaggccatatccaagtttttaatcaaggtttaaaaagctatagagatctacctctacgaataacagagtttggaaaagttcatcgatatgagccatccggagcacttcatgggcttctaagagtaagagcctttacccaagatgatgctcatatcttttgttctgaggatcaaattactagtgagtgcttaattgttacaaatttaatattagatatttataaagatttaggatttaaaaatgtagttcttaaatatgcagatagaccagaagtgagagtgggtgatgataaagtttgggataaagctgaagcctcattattagaagcagtcaaagcatcaaaattggaatatagtataaataaaggtgagggtgctttttacggtccaaaaattgagtttgttttaagagatgcaattggcagagactggcaatgtggaactttacaagttgattttaacttacctggaagattggatgcttcatatattgacaaagatggaacaaaaaaagttcctgtgatgttacaccgagctttatttggctcccttgaaagatttattggaattttaattgaaaatt

SEQ ID NO: 303471 - DNA, 811 bp, Unknown
  Bacterial polypeptide expressing nucleotide sequence isolated from the Sargasso Sea
ctaccgtcaaggagaatggtacgacctatgtcttggcccccacgttccaagcactgccaagttgatgcacagtcgattgttatccgtttcaaccgcttattggagaggtgaccagagtagggagtctttggttcgaatctatggtaccgttttcccagacaagcacatgcttaagcagcatcttcagaggatggaggaagcaaagaagcgcgaccaccgcaagttgggcaaggacctacaattgttccacatttctgagaaggttggacagggtctgattctgtggactccacgcggttctgttgttcgtcaggagttgcaggattttatcgctcaagaattgagaagacagggctacagtcaagtcttcacgcctcatattggaaagttggacctctaccgcactagtggccatttcccttactatcaggattcacaatatccacctttggtggagagggatctgatgaagaaattagccgatgagggctgttcctgttccgaattgtcgaacttgatggaggaaggcgacatcgatgggtacttgctcaagccgatgaactgtccacaccatacgcaaatctatgcatctcaggcgcgttcgtatcgcgacctaccactacgtttggccgaattcggaactgtgtaccgctgggaacaatccggagagatctccggtatgacccgagtcagaggtttcacccaagacgatgcccacctctttgttactgaggaacaaatcgctgaggaggttctgggttgtatcgagttggtacagattatcttcggaaccttgggaatggaggattac

SEQ ID NO: 303472 - DNA, 728 bp, Unknown
  Bacterial polypeptide expressing nucleotide sequence isolated from the Sargasso Sea
tatggtactagttgggggatcacaaaaagatttagatgaatatttaaagaggatagaagaagcagaaaaaagagatcatagaaaactagggaaggaaatggatttgtttcattttagagaagaaagtccaggatctgttttttggcatgaaaagggttgggcattatttcaaaaattaatcgattatatgagaatgaaacaagaaattgcaggctataaagaaataaatacaccagaggttttagacagaacactatgggaaaaatctggacattgggaaaaatttggagcgaacatgtatacttcaacaactccagatgaaaaagttttcgcaattaaacctatgaactgcccaggatgtatagaagtttttaatcaaggtcttaaaagctataaagatttgccattaaaaatgtcagagtttggaaaagtacatcgttatgaaccgtcaggcgcgttacatggtttattgagagtaagagcattcacacaagatgatgcacatatattttgtacagaagatcaaatcacaaaagagtgtttaattgttacagatcttattttggaaatatataaagatttaggttttaaaaatgtaattttaaaatactctgataggccagaaaagagggttggagatgatagtgtttgggataaagctgagagtgcattgttagaagctgtaaaagcaaccaaattagaatatagcataaataaaggtgagggtg

SEQ ID NO: 303473 - DNA, 768 bp, Unknown
  Bacterial polypeptide expressing nucleotide sequence isolated from the Sargasso Sea
atgcacacatattttgtactgaagagcagataacagatgaatgtattagtgttaccaaattaatattagatatttataaagatctagggtttgaaaaagtatttcttaaatattctgatagaccagaaaagagagttggtgatgataaagtatgggataagtcagaaaaggctttgctcgaagcgattaaaaaaacaaaattggaatacactattaataagggagaaggtgctttttatggtcctaaaattgaatttgttttgagagatgctataggaagagactggcaatgtggaactttacaagtagacttaaatttaccaggtagacttggagcgacttttgtagataaggatggagcaaaaaaaatacctgttatgttacatagagccctttttggatctttagagagatttattggtataattatagaaaactacgcaggtaaacttcccttttggctatcaccatcacaaattgttgtgttacccatagctgaagagcacaatgattatgcaaaaaaaatatttaaagatatgtttaaagagggtataaaatgtgaagtggatttaagaaatcagaaaattaattataaaattagagatcattctctttcaaaagttccgtttctattaatatgcggaagtaaagagataaaagataaaagcgtaacaatacgtaaattaggatccgaaaaacaagaaacaaaaaaactaaacaatgccattaaagaatttaaacaattaaataacctgccaataaattaag

SEQ ID NO: 303474 - DNA, 481 bp, Unknown
  Bacterial polypeptide expressing nucleotide sequence isolated from the Sargasso Sea
aatgccaataataaaattaccagatggaaaagatttagtctttgataaaaaagtaagtggatttgaaatttcagaaaaaattagtaagtcactttctaaacaagctcttattatgtctgttaatggagagctgaaggatttaagtgaaataattgaaagtgattctaatgtaaaaatttatactaataaagataaagaaggtttagaaactataagacacgatactgcacatatacttgctatggctgttcaggaaattttcccaggtacccaagttactattggaccagttattgaagatggtttttattatgatttttcaagaaaagaaccttttacagaagatgatttagtcaagattgaatctcggatgaaagaaatagttgatagagatgaaataaccaaaagagaagtttgggatagaagtaaagctatttcttattataaagaaaaaggagaaatttataaagcagaaataatt

SEQ ID NO: 303475 - DNA, 652 bp, Unknown
  Bacterial polypeptide expressing nucleotide sequence isolated from the Sargasso Sea
aatgattaaagtaggattcccagatggcaatgaaataaagtatgatgatggaataacaccatatgaaattgctgaaaaaattagcccagcacttgcaagagaaatcttaagcgctgagtacaatggtaaaactattgaattaagaacacaactttttaaggatggtaacataaagttttttaaatgggaagatcgtgagggaaaaatggtgttttggcactcaactgcacaccttttagcccaagtgattcttaacttatatccagattcaaaactgactataggtcctgcaattgaaaatggtttttattatgatgtagattttcaaaatacatcattctcagaaaatgattttataaagattgaaacaaagatgattgaagaagcaaggaaagatcattcctttaagatgagagaagtttcaaataaagaagctttagagtactacgaaaagcaacaaaataaatataagcttgaattaattcagggtcttgatggtgaaaaaataactttttgtgatcatgctgacttcactgatttatgcaaaggtggtcacattccctccacaaaatttatcaaaagcgtaaaattattgaatatcgcaggtgcttattggaggggtgatgaaaataataaacagttgacaagaatt

SEQ ID NO: 303476 - DNA, 939 bp, Unknown
  Bacterial polypeptide expressing nucleotide sequence isolated from the Sargasso Sea
aaaaaattcctttttcaaaatctatcagcggttttgagctttcaaaaaaaatcagtaagtctctcgaaaaatctgctctgattatggaggtcgatggtcatttaaaagatctaagtcatgaaattacaaaagactctaaagtacgaataattacttctaaggataaagaagggctagaagtaattaggcacgacgcagcacacataatggcaatggcagttcaagaactatatcctggaactcaagttacaataggacctgtaatagaaaatggtttttattacgattttgcaaggcaagagccttttacaagcgaagatcttaaaaagattgaaaaaaaaatgtcagaaataattgacagggatgtaaagactagaagagaagtttggaagagaccagaagctattgctcatttcaaaaaaataggtgaaaagtataaagctgaaattatagaaagtattccaaaaaacgaagaactttcagtttatcaccatggtgatacttggcatgacctctgtagaggcccccacttagcttcatcaagtaaaattggaaaggcattcaaacttacaaaagtttcaggagcctattggcgcggagactctaataatgaaatgttacaaagaatttacggtacttgttggagcactaaaaaagaattagatgattatttacatcgactagaagaagctgaaaaaagagatcacagaaaattaggtaaagaaatggacttatttcactttagagaggaaagtccaggatcagttttctggcacgaaaaaggttggttgttatttcaaagattagttgagtatatgagaatgaagcaaaggttagctggttataaagaaattaacacacctgaactattagacaaaacattatgggaaaaatcaggtcattgggaaaaatttggagagcaatatgtttacctctgag

SEQ ID NO: 303477 - DNA, 913 bp, Unknown
  Bacterial polypeptide expressing nucleotide sequence isolated from the Sargasso Sea
ctggctgcgttcaaagtttttaatcaaggattaaaaagttatagagatttacccttaaagctttctgaatttggaaaagtacatagatacgaaccctcaggtgccttacatggattattaagagttagagcatttacacaagacgatgcacacatattttgcactgaggatcaaatcacacaagagtgcctgtcagtaacaaatctaatcttagaaatatataaagatttaggttttaataatgtcatattaaaatattcagatagacctgatcaaagagttggtgaagattatatatgggataaatcagaggctgcccttttagcagcaataaaaaaatcaaaattagaatactcaataaataaaggagaaggcgctttctatgggcctaagattgaatttgtcttacgagatgcaattggaagagattggcaatgtggaactttacaagtagatttaaatttacccagcaggttaggagcatcctatgtatctaaagacggaactaaaaaggttccagttatgttacatagagcattgtttggctctttagagaggtttataggaattttaatagaaaactacgctggtaagttaccactttggttatcaccagcacaagctgtagtgtgttcaatagcagaagagaacaataattatgctaaaaagttatttgaagatttgtttaaagaaggtataaaatgtgaaatggatttaagaaatgaaaaaattagttataaagtaagagagcattctcttgcaaaaattccttatataattgtttgtggaaaaaaagaagttgcagataatactgtgactgtgagaaaacttggctcagacaaacaagagattatgaaaaaagaagatctgattaaacatatgctagacctaaataagttgccattaaactaag

SEQ ID NO: 303478 - DNA, 736 bp, Unknown
  Bacterial polypeptide expressing nucleotide sequence isolated from the Sargasso Sea
gagacaggagccgtatgcagtcttctcttgaatatttaccgtgatatgggttttgaggacatcatcattaagtttgctgatcgcccagaacgaagagttggagcagatgacgtttgggacagagcggaagatgcattaaaacgggcaatggaaagtttagggattgactatacctataaccctggcgaaggcgcattctatggaccaaaaattgagtttgtattacgagatgctattggccgtgactggcagtgtggaacacttcaggttgatttaaatctacccggtagattaggtgctgcctatattggagaagatggaaaccgtcatactcctgttctccttcatagagcaatatttggttctctagaacgtttcatcggcatcatgctggaacactatgcaggaaatctgcctttttggttagctcccaaacaagttgttatagctacaattacttcagatgctgacgaatatgctgaagaagtaacccagcagatggagaatgctggcttacgcactgaaatggatctcagaaatgaaaaaattaactacaaggttcgtgagcatagcctaatgaaaacacccgttttaattgcattaggcaaacgtgaggtagaggaagggactgtctccattcgccgactgggacagaaaggccaaaaagttgtatcgctagccgaagcaattcgtaccctttctgaggaatctcgttcacatactttgtctacctaat

SEQ ID NO: 303479 - DNA, 713 bp, Unknown
  Bacterial polypeptide expressing nucleotide sequence isolated from the Sargasso Sea
aatgtttacatctgaaacacctgacgaaaaaatttttgccgtaaaaccaatgaattgtccaggatgtattcaagtatttaatcagggactaaaaagttatagagatttgccattaaaattatcagaatttggaaaggttcatagatatgagccatccggtgcactacatggacttttaagagttcgagcattcacgcaagatgatgctcacattttttgtaccgaggaacaaataactgaggagtgtataaatgttactaagttgattttagatatatatagagatttaggatttaaaaaagttttcttaaaatattccgataggcccgaaaaaagagttggtaatgataaaatttgggacaagtcagaaaaagcattactcgcagcgataaaaaaaacaaaacttgagtacagtgtaaacaaaggggaaggggctttttacggaccaaaaattgaatttgttttaagagatgctatcggaagagattggcaatgtggtactttgcaagttgatttaaatttgccagaaagactaggtgcaacttttgttgataaggacggaagcaaaaaggtgccggttatgttgcatagagcactttttggttctttagaaagatttataggaatcctaatagaaaattatgcaggaaaactccccttttggctgtcaccatcacaagctgttgtgttgcctattgcagaagaacataatg

SEQ ID NO: 303480 - DNA, 445 bp, Unknown
  Bacterial polypeptide expressing nucleotide sequence isolated from the Sargasso Sea
aggctcgatgcaaactacgtaggtgctgatggcgtaaagcaccggcccgtgatgttgcatagggcgattcttggatcatttgagagatttattggtattttaatagaaaattatgcgggccgtctgcctatctggttgagtcctgtgcaagttgcagtagtatctataaccgatgcaaacataaactacggagaaaaagtactcgaagaatttaactcgaggggtataaggacaatttctgattttcgaaatgaaaaaattaattataagatcagggagcactctgcgcaaaaaatcccagttattgtagttgttggagataaggaagaaaaagaatcaagtgtctcaattaggagattgggggattctaggcaagaaatagttgcgctcactgacgcaattgataaactggaggagcaagcgagagtacctgttgcttgctaaa

SEQ ID NO: 303481 - DNA, 472 bp, Unknown
  Bacterial polypeptide expressing nucleotide sequence isolated from the Sargasso Sea
actgcaagtagatcttaatatgcccgaaagacttgaagcacattatgtaggtgaagatggtcaaaaatataatccagtaatgcttcacagagcgctatttggatctttagaacggtttacaggcatactaattgaacactacgcaggcgcacttccactttggttatctcctgtgcaagcgatcgttacaccgataacttcagaaatcaatgaatatggtgaagaagtttataagagtctaaagaaagctggcataagagttgaaaaagatctgcgcaatgaaaaaattagttataaaataagagagaattcattaaaaaaaattccatttcaattaattcttggaaagaaggaaattgaagaacgttctataacaatgagagtatttggaagcgataagcaagaaaaaataaagtttgaaaatttaaatgatttttttataaaaaaatgtatgatgccttcacaacaatag

SEQ ID NO: 303482 - DNA, 871 bp, Unknown
  Bacterial polypeptide expressing nucleotide sequence isolated from the Sargasso Sea
tacaaagatcttcctattaggttttctgagtttggctcttgccataggtatgaagcttcaggaaccttgcatggattgatgagagtaagaggatttacgcaggatgatggacacatcttctgtaccgaagatcaaattcaagatgagactaagagctttatagggcttttatcagatatttacgctcaattgggttttgaggcctttgaaataaagctttctaccagaccagaagtgagagcaggtacagatgaaatttgggataaggcagaattagctcttgaaaatgctattaagaatttaaaacttccttatgaagttgtggaaggggatggagccttctatggtcctaaattagacttcgttcttatcgatgctctaggaagggaatggcaatgtggtacttttcaagcagattttattctgcccgaaagattagatgctaagtttgttggtcctgatagcgagcgatatcatcctgtcatgattcatcgagccgtcttaggatctttcgagagattcttaggagttttaattgagcattatggtggtgctctacctgcttggttatctccgattcaagcagaaattcttaatattactgataaacaggctgaatattgtcaaaaaatagccgatttattgaaaaaaagtggatttagagctcattcagacttgaggaaagagaagatcacttataaaattcgcgaccactctttacagaagacaccttttcttttgatagctggaaacagagaaatggaaaataacaccatatcagttagggctagaggaggagaagatcttggagagatgtcaatagatgacttcatccaaaagcttcataatgtagtggatgaaaaaaaatagt

SEQ ID NO: 303483 - DNA, 727 bp, Unknown
  Bacterial polypeptide expressing nucleotide sequence isolated from the Sargasso Sea
atgcctaatataaaattaccggatggtaaaacaattttattttcaaaaaaagttgatggtcttgaaatagcaaaaaaaataagcaaaactttagaaaaaaatgcgttaataatggaagttgatggtgagttaaaagatttaagttatcaaatagaaaaagattctaaagtcaagattataacttctaaaaatcaagaaggattggatgctatgagacatgacactacacatatcatggcaatggcagttcaagaattgttccccggtacaaaaattgctattggaccagcaatcaaagatggtttttactatgatttttctagaaaagaaccatttaccccacaagatttagaaaagattgaaaaaaaaatgaaagagattgttgaaaaagacgaacccacaaaaagagtggtttgggaaagaaaaaaagcaaaagatcactataaaaaaattggagaaaattataaagttgaacttgttgatagcataccagaggatcaagaagtttctgtatattatcatggaaaatggtacgatctctgcaaaggacctcacctcacatctaccggaaaaattggaaaatattttaaacttacaaaaatatcaggagcttattggagaggagattctaaaaacgaaatgttgcaaagaatttatggaacatcttggccatctcaaaaagaacttgacgaatatttaaaacgactgaagaagcagaaaaaagaga

SEQ ID NO: 303484 - DNA, 1252 bp, Unknown
  Bacterial polypeptide expressing nucleotide sequence isolated from the Sargasso Sea
ttatcatcatggagaaagttggcacgatttatgtagaggcccacatttagcctcttccggaaaaattggcaaagctttcaaattaacaaaagtgtcgggtgcttattggaggggtgactcgaataatgaaatgcttcaaagaatatacggtacttgctggagctcaaagaaagatcttgatgattatcttaatagattagaggaggcagaaaagcgagatcatagaaagcttggaaaagaaatggatttatttcatttcagagaagagagcccaggatctgttttttggcatgaaaaaggatggctgctttttcagagattagttgaatatatgagagtgaaacaaagattggctggctataaagaaattaatacacctgaattattagataaaactttgtgggaaaaatctggtcattgggaaaagtttggagaacatatgtttacatccgaaacccccgatgaaaaaactttcgcagtgaaaccaatgaattgtcctggatgtgtacaaatatttaatcaggggttaaaaagttacagggacttaccattaaaattgtcagaatttggaaaagtacatcgatatgaaccgtctggagctctccatggattattaagagttagggcattcacccaagacgacgcacatattttttgtacagaggatcaaattactgaggagtctttgtcagttacaaacttgatattagaaatttataaagatttgggttttaaaaatgttgttcttaagtattccgatagaccagaaaaaagagtaggagatgatagcatttgggataaatcagagaaagctcttttaacagcaattaaaaaatctaatcttgaatattcaattaataaaggtgaaggtgcattttacggtcctaaaattgaatttgttttaagagatgctattggtagagattggcaatgcggaacgttgcaagtagacttaaacttacctgctagattgggcgcatcttatgtatcaaaagatggaacaaaaaaagttccagtaatgcttcatagagctttgtttggatcattagagagatttattggaattttaattgaaaactacgcaggaaaattaccattttggctatcaccttcacaagcagtggtatgtccgatcgctgaagagaacaatagctatgttaaaaagctatttgaagatttgtttaaagaaggtataaaatgtgaagtggatttaagaaatgaaaaaataaattataaagtaagagaacattcc

SEQ ID NO: 303485 - DNA, 1301 bp, Unknown
  Bacterial polypeptide expressing nucleotide sequence isolated from the Sargasso Sea
gagaggagattcaaataatgaaatgttacaaagagtttatggaaccagttggtctacacaaaaagagctagatgattatttggttagaatagaagaagcagaaaaaagagatcatagaaaactaggtaaggagatggatttatttcattttagagaggaaagtcctggctcagtattttggcatcaaaaaggatggaatttatttcaaaaacttatttcttatatgagaatgaagcaagaagctgcgggataccaagaaattaatactccagaaatattagatagatcactttgggagaaatctggccattgggaaaaatttggagcaaacatgtatacatctacaacaccagatgaaaaagtctttgcaataaaaccgatgaattgtcctggatgtgttcaagtatttaatcaaggtttaaaaagttatcgagatttgcctcttaaaatgtcagaatttggaaaagtccacaggtatgaaccatctggagcacttcatgggctattacgtgttagagcttttacacaggatgatgcgcatattttttgtaccgaggaacaaattactgaagaatgtttgagtgtaactaacttaattttagaaatttataaagatttaggatttgaagatgtaattttaaaatattcagaccgaccagaattaagagttggtgatgacaaagtttgggataaatcagaagcagctttaatagaggcaattaaagaaacaaagttagaatattctataaataaaggagagggtgcattttatggcccaaaaatagaattcgttttaagagatgcaattggaagagattggcaatgtggaacattgcaggtagacttaaatttacctggaagattgggtgcgtcttttgttgacaaagatggaaacaaaaaaattccagttatgcttcatagagcattatttggttcactagaaagatttattggaatattaatcgaaaactactcaggaaaattacccttttggataactcctttgcaatcagtagtgatacctgtttcgaatgatttcgacgactatgcaaaaaaagtttgtgaacaattaaaaaaatcaggaatatcttcagaagcagatctaaagaatcataatttaaactataaaataagagatcattctttatcaaaagtgcctttgctattaatttgtggaaaaaaagaagttgacagtaactcagtaacgattagaagattggattctaataaacaagagaatatggaactaaaagaatttctaaaacaatactctgctcttaacaaagcaccttcaatataag

SEQ ID NO: 303486 - DNA, 1042 bp, Unknown
  Bacterial polypeptide expressing nucleotide sequence isolated from the Sargasso Sea
gatggcgggccccgaacgcaaactggtgagcagcgctgcagcaaccaccccagccccttcagcttcggtggtactgcccaaaaccagcgaaagctcacagctgctcaaaatccgccactcgatgagccacgtgatggccatggcggtgcaacagctcttccccaaagcccgcgtgactatcgggccctggaccgaatccggtttctactacgacttcgacaaccccgaccccttcaccgaatccgatctcaaggcgatcaagaaggggatgatcaagatcatcaacaaaaaggtcccgctcgagcgtgtcgaggtgacgcgcgccgaagctgaaaccaagatcaaggcccagaacgagccttacaagctggagatccttgaaggcctccaggagccgattaccctctacaccctcggagaggattggtgggacctctgcgccggcccccacgtggaccacaccggtcagctcaacgccaaggccttcgaactggagagcgtggcgggggcctactggcgcggcgatgaaaccaaggcccagttgcagcggatctacggaaccgcctgggaaacccccgaacaactggccgagcacaagcgccgcaaggaagaggccctgcgccgtgaccatcgccgcatcggcaaagaccttgatctgttctcaatcgaggatgaagccggcgctggtctggtgttctggcacccccgcggctgcccgcatgcgtctgctgatcgaggacttctggcgccaggcccatttcgagggtggctacgagctgctttacacaccccacgtggccgacatcagcctctggaagacctccggccacctcgacttctacgccgagagcatgttcggccccatggaggtggacgagcgggagtaccagctcaagccgatgaactgcccgttccacgtgctcacctacgccagcaagctgcgcagctaccgggaactgccgatccgctgggccgagctgggaaccgtctaccgctacgagcggccgggcgtgatgcacggcttgatgcgcgtgcgcggctt

SEQ ID NO: 303487 - DNA, 1131 bp, Unknown
  Bacterial polypeptide expressing nucleotide sequence isolated from the Sargasso Sea
aaagacaaagagggtttagaagtaatgagacacgacgctgcccatataatggcaatgtcagttcaagaactttttcctggaacccaagtaacaatcggaccggttattgaaaatggtttttactacgactttgctagaaaggaaccatttacaagtgatgatcttaaaaaaatcgaagaaaaaatgttagagataattgatagagatgtaaaaactagacgcgaggtatgggaaagagatcaggcgataaaacattttaaaaagataggagaaaattacaaagcagaaattgttcagagtatacctgaaagcgaggaattatctatttatcatcatggtgatacttggcatgatttatgtagaggtcctcatttagtttcatccagtaaaattggaaaagcttttaaattaacaaaagtttcaggcgcttattggagaggtgactcaaataacgaaatgttacaaagaatctacggaacatgctggagctccaaaaaagaattagacgattatttaaatagattggaagaagctgaaaaaagagatcatagaaagttaggtaaagaaatggatctatttcatttcagagaggaaagtcccggtgcagttttttggcatgaaaaaggatggactttatttcaaagacttattgagtatatgagattaaaacaaagatatgctggatacagagaaataaatactccagaattactagacaagactctttgggaaaaatctggacattgggataaatttggcgacttaatgtttacatcagaaacacccgatgaaaaagtttttgcagtaaaaccgatgaactgccctgggtgcgttcaagtttttaatcaaggattaaaaagctacagagatcttcctttgaaactttctgagtttggaaaagtacacaggtatgaaccttcgggtgctttacatggtttgttaagagtaagagcttttacccaagacgatgctcatatcttctgtacagaagaccagataacagatgagtgtataactgttacaaaattaattttagatatttacaaagatttaggttttaagaaagtttttttaaaatactcggatagaccagaaaaaagagtcggagacgatgctgtttgggataaatca

SEQ ID NO: 303488 - DNA, 1165 bp, Unknown
  Bacterial polypeptide expressing nucleotide sequence isolated from the Sargasso Sea
aatgccgataataacattacctgacggaaacaatattgatttttctaataaagttactgggcttgaagtagctgaaaaaattagcaaatcattagccaaacaagctatggtcataagcgttgatggtgagcttaaagatcttgattttctaattgaaaaagattgttctgtaaaaatttttacttcaaaaaatcctgagggcttggaaactataaggcatgacacagctcacattttagctatggctgttcaagaattatttcctggaactcaagttacaattggacccgtgattgaaaatggattttattacgactttgccagaaaagaaccattcacagaggatgatctattaaaaattgaaaataaaatgaaagagattgttgataggaatgaaataacaaaaagagaagtttgggatagaaacaaagcaatcagccattttaaaaaaaaaggagaaatttataaagctgagctgattgaagcgatacccgaaaatgaagatgtatcaatttattttcatggagaatggcatgatttatgtagaggtccacatctatcctctacaggtaaaataggaaaatatttcaaacttacaaaagtatcaggagcatattggaggggagactctaataatgaaatgttgcaacgaatatatggtacgagttgggcaactcaaaaagatctagatgaatatttgaaaagaatagaagaagcggaaaaaagagatcatagaaaattaggaaaagaaatggatttatttcattttagagaagaaagccctggctcagtattttggcatgaaagaggatggagtttatttcaaaagctaattaattatatgagaagtagacaagatgctgccggttataaagaggtaaatactcctgaggtactagatagacaactatgggaaaaatcaggtcattgggaaaaatatggggaaaacatgtatacttctgaaactccagatgagaaagtttttgcaattaaaccaatgaattgccctggtcatattcaggtatttaatcaaggcctaaaaagttacagagatcttcctttacgttttgctgaatttggaaaagttcaccgttatgagccatcaggcgctttgcatgggttactaagagtacgagcctttacccaagatgatgcccatattttt

SEQ ID NO: 303489 - DNA, 1008 bp, Unknown
  Bacterial polypeptide expressing nucleotide sequence isolated from the Sargasso Sea
cctggatggaaaaactttaaatttccaaaaagaagttactggattggaaattgcagataagattagtaaatctctctcaaaacaagcactaattatgagtgtagatggtcaattaaaagatttgtatttttctattgataaagattgctcagttaaaatttttacctcaaaagatcctgagggtttagaagttattcgacacgatactgcacatataatggccatggctgttcaagaattgtatccaggaactcaagtaactatagggccagtaattgaaaatggcttctattatgattttgcccgaaaagaaccctttacagaggatgatttaaaaaaaatagagaaaaggatgtcagaaattattgacaaagatattaaaacaagaagagaggtttgggaaagagataaagcaataggccattttaaaaaaatcggtgagaaatataaagcagaaataattgagagtattcctgaaaatgaagagctttctgtttatcatcacggtgaaacatggcatgatttatgcagaggtcctcatttagtatcgtctggtaaaattggtaaagcatttaaactaacaaaagtttcgggagcctattggcgcggagactcaaataatgaaatgctccaaagaatttatggaacaagctgggctaatcaaaaagacttggatgatcacttaaatagaattgaagaagcagaaaaaagggaccatagaaaattgggaaaagaaatggatttatttcattttagagaagagagcccaggttctgttttttggcatgaaaaaggttgggcattatttcaaaaattaattaattatatgcgagcacgccaagatgcagcaggatataaagaagtaaatacccctgaggtactggatagaatgttatgggagaaatcagggcattgggaaaaatataaagaaaatatgtatacttctgagactcccgatgaaaaaatctttgcaattaaacccatgaattgtcctggtcacatacaagt

SEQ ID NO: 303490 - DNA, 970 bp, Unknown
  Bacterial polypeptide expressing nucleotide sequence isolated from the Sargasso Sea
tatgttcacttcagaaacaccagatgacaaaacatttgcaattaagcctatgaattgtccaggatgtgtccaagtatttaatcaaggattgaaaagttacagagatttacctcttaaactttcagagtttggaaaagttcatagatatgagccttcaggagcgttgcatggtttactaagagtgagagcatttacacaagatgatgctcatatattttgtacggaagatcaaataactcaggagtctctttcggttacaaatttaatattagaaatttataaagatttgggttttgaaaatgtaattttaaaatattcagacaggccagagaaaagagtaggagatgatagcgtgtgggataaatcagaagcagcacttcttgctgctattaaacaatctaaactggaatatacaatcaataaaggagagggagctttctatggccctaaaattgaatttgttttaagagatgcgataggcagagactggcaatgtggaactttacaagttgacttaaatttgccgaaaagattaggagcttcttatgttgctaaagatggtaataaaaaagttcctgtaatgttacaccgagcgttatttggttctttagagagatttataggaatattaattgaaaattacgcaggtaaattacctttttggttatctccagcacaagctgtagtatgtccaatagccgaagaaaacaatgactatgtaaaaaagttatttgaagatttatttaaagaaggtataaaatgtgaaatggatttaagaaacgaaaagataaattataaagttagagaacattccttggcgaaaattccatttataattgtttgtggaaaaaaagaagttaaagaaaatactgtgacagttagacaattaggttcagacaaacaagagattatgaaaagagaagatttgataaaaactatgcttgcctcaaataagttgcccttaaattaa

SEQ ID NO: 303491 - DNA, 385 bp, Unknown
  Bacterial polypeptide expressing nucleotide sequence isolated from the Sargasso Sea
atgccaataatcaccttgcctgatggttcaaaaaaggtttttgaaaaatctgtaactattttagaaattgctgagagtataggctctggattagctaaagcaacaattgctggaaaagtaaatgatgttcttcttgatgcaactattcctataaatagagattccaaagttgtaatcatcacatcaaaagatagagaaggtattgaaataataagacattcctttgctcacctcattggtcatgcagttaaacaaatttacccaaatattaaaatggcgattgggcctgtaatagaagatggtttttattacgatattttttcggaatacagatttactcctgaagatttaataaaaatcgaaaatagaattaataaattaataa

SEQ ID NO: 303492 - DNA, 1180 bp, Unknown
  Bacterial polypeptide expressing nucleotide sequence isolated from the Sargasso Sea
agagtcggacaaggactaccactttggttaccaaacggaacagagttaagagataggttgcaagattttcttgaagatgctcaaaaaagagctggttataagaaagttatgtcctcacacataggtgcaaaagaattatatgaaatttctggacactatgagaagtatggagcagatagttttcaaccaatatatacccccaatgattctgaaacttttattttaagaccaatgaattgtcctcaccattgtgagatttataaagctaagcctcagagttacaaagatcttcccttaagacttgcagagtttggtactgtttatagatatgaacagagtggagaattacatggtctgagcagggtgagaggatttactgttgatgatgcacatattttttgcacacctgaacaagtagattcagaatttaataataccattgatttagtactttttgtttttaaatcactagggtttgataattattccgcacaagtatcactcagagatcctgaaaatccagaaaaatatattggatccgataagaattgggaaatatctgagcaagcaattcttaattctgctaaagaaaaaggcctagaatacaatgttgaattgggtgaagcagcattctatggaccaaaacttgactttatggttaaagatgctcttgggagaaagtggcagcttgggactatacaggtagattacaaccttccagaaagatttgatttaacatataaagggagtaataatgaagatttaagaccagtgatgattcatagagcaccatttggaagtatggaaagatttgttgcaattttacttgagcatactgcaggagtttttcctttatggcttacaactactcaagtagaaattttaattgttagtgaaaactttaaaaattatggtcaaaaagttttaaatatcttagaaaatcacgaaattcgcgcgcacttggatgatagaaatgagactgttgggaagaaaatcagagaatctgagataaaaaagattccttttatgattgttgtaggagaaaatgaagtaaaaaataactcagtctcaataagaagacatcatggagatgatctaggtgaaatgaaaattgaagagtttgtggatataatcaagaaagaaatttctgaatgtataccaaaatttaatattaattaaa

SEQ ID NO: 303493 - DNA, 1345 bp, Unknown
  Bacterial polypeptide expressing nucleotide sequence isolated from the Sargasso Sea
atgacaaatattacactccctgatggaaagacgattaagtttgaaaaacctgtaactggttcagaagttgctgaaaaaattagtaaatctttagcaaagcaagctttaattatgagtgtaaatggagaacttaaagatttatatcatataattaaagaagatagttctgtaaaaatttttaccgctaaagatcctgaaggattagaagttattagacatgatgctgctcacataatggctatggctgttcaagaattatatccaggaacacaggttactataggtccagttatcgaaaatggtttttactatgattttgctagaaaggagccttttacaagtgaagatctgaataaaattgaaaaaagaatgtcagagattgtcgataaagatgtgaaaacaaaaagagaagtttgggaaagagaaaaagctataaaccattttaaaaagattggtgaaaaatataaagctgaaataattgagagcattccaaaaaatgaggaactttcaatttatcatcatggtgaaacttggcatgatttgtgtagaggtcctcatttggaatcttcagggaaaattggcaaagcttttaaattaacaaaagtctcaggagcatattggcgtggagactcgaaaaatgaaatgcttcaaaggatttacggtactagttgggctaatcaaaaagatttagatacttatttaaaaagaatagaagaggctgaaaaaagagatcatagaaagcttggaaaagaaatgaatctgtttcattttagagaagaaagtccaggctcagttttctggcatgaaaaaggatggagtctttttcaaaaacttgttgattatatgagagataggcaaaaaaaagcgggttataaagagataaatactccagaaattctagacaggtctctttgggaaaaatctggtcattgggataaatttggagaacacatgtatacatctaccactcctgatgaaaaagtgtttgcaattaaaccaatgaattgtccaggatgtgtacaagtttttaatcagggactaaaaagttatagagatttacccttaaaaatgtctgagtttggaaaagtccacagatatgaaccttcaggagctttacatggacttatgagagtaagagcatttacccaagatgatgctcatattttttgtacagaggaacaaattacagaagagtctttaagcgtaacaaatttaatattagatatttataaagatttaggctttaaaaatgtaatattaaaatattctgaccgacctgagataagagttggagacgataaagtttgggacaaatctgaagctgcattattaaaagcagtgaaag

SEQ ID NO: 303494 - DNA, 826 bp, Unknown
  Bacterial polypeptide expressing nucleotide sequence isolated from the Sargasso Sea
aatgtcaaagtttccgttatcaacaattcgtcatagtgctgctcatattttagcgcaagcaattcaaagtaagtatgaaaatgtaaaattagcaattggccctgcaattgatgatgggttttattatgatattgataccccaacaccaattactgaagatgatttaaaagcacttgaaaaagaaatgaagcgaattattaaagaaaaacaaaaatttaaacaatataacatgtctaaacaagacgctttacagttttttgaagaaaaaaaagaaagttataaagttgaattgattaatgaattagaggttgatgaggtttcaatatatgaaaatggtccatttattgatttatgcaaagggccacacattgaacatacgaaacaagttaaagccataaagttgctaaaagtttcaggtgcatattggcgtggaaacgaaaagaataagatgcttcagcgaatttatggcactgcttttgaatcaaaagatgaactagcaacatatctagagcaagttgaggaagcaaaaaagcgtgatcatcgtcgcttaggaaaagaattacagctattcagtattcaagaagatattggtggcgggcttgtattatggcatccaaaaggagcccgagtaaggcaggtgattgaggatttatggcgcgctgagcatgaaaaaaataattacgaaatggtattttcaccacatattggaaggcaacaattatgggaaacgagtggtcacttagatttctatgaagaaaacatgttcacatcaattgatattgataacgacccatattatttaaagccaatgaactgtccgtttcat

SEQ ID NO: 303495 - DNA, 628 bp, Unknown
  Bacterial polypeptide expressing nucleotide sequence isolated from the Sargasso Sea
atgccaaatattaaattaccagacggaaattcattaaactttgataaaaaagttactggatttcaaatagctgaaaaaatcagcaaatctctttcaaaacaagccttgttaattagtattgatggaaatttaaaagatttgaattatgaaatagattatgattgttcagttaaaatatatactgctaaagataaggaaggattagaaacaattagacacgatacagctcatgttttagctatggccgtacaagaaatatttcctaagactcaagtaactattggaccagtgattgataatgggttttactatgactttgcaagaaaagatccatttactgaagaagacttacgtaaaatagaaaagaagatgatggaaattgtcgagagagacgagcctactcacagagaagtttggaaacgtgataaagcaattgaacattttaaaaaagctggagaaatttataaagctgaaataattaaggatattccaaagggagaagaggtttcagtttattttcatggaaagtggcatgatttatgcagagggccacatttaagttctactggaaaaattggaaagtattttaaacttacaaaggtttcgggcgcatattggagaggcgact

SEQ ID NO: 303496 - DNA, 1912 bp, Unknown
  Bacterial polypeptide expressing nucleotide sequence isolated from the Sargasso Sea
atgccaaaaataaaattaccagatggatcagtaaaagaattcgataaaccaattaattttgatgaacttgcatcttcaattggatcggggttagctaaagcaactgttgctggtgtgcttaatggaaaacttgtagatgcatctgagcttattgaatcagactctgatgcaattttaatcacaaatagtgatgaagatggagtagagataattaggcattcatgtgcccatttatttggtcatgctttgaaacaattatatcctaaggcaaaaatggctataggaccaacaatagaaaatggtttctattacgatattgatcttgaggagtcattaagtgagaatgatttagaaaaaattgagttaagaatgaaagagttagctcaaacaaattatgctgttgttagagaagttgtaacaagaaaaaaggcacttgatacatttgagaatagaaatgaaccttataaagttgaaataattaatgaaattcccaatgatgagattatagctctatatcaccataatgaatatattgatatgtgtagaggacctcatgttacatcagttaggcacttaaaagcttttaaattaacaaaaattgctggagcatattggaggggtagttctgataataaaatgcttcaaagagtatatggaacggcgtgggcatctgaaaaagagttaaaaaaatatctcattcttcttgaggaagcagagaaaagagatcacagaaaaataggaaaagaattagatctttttcactttcaagacattgcgcctggaatggttttttggcatgcaaatggttggtccatttataaagagttagaagactatattcgaagaaaaatttcaaaagagggatataaagaaattaaaacaccacaaattttagataaagatttatgggttgagtcaggtcattgggataaatacaaagataatatgtataaaacaattattgatgatagagaattgatgattaaacctatgaactgtccggggcatgttcaaatatataatcaaggtataaaaagctataaagatcttccactgagaatggcagaatttggttcatgtcatcgtaatgaaccatctggtgcgttgcatggtttaatgagagttaggaattttgttcaagatgatgcgcatatcttttgtactgaagatcaaatagagagtgaaactataagtttttgtaaattacttcaggatgtatacagagaattgggttttgaagaggtttcaataatgtatgctgataggccagaacaaagggtaggtgaagatgagatctgggataaagctgaaaatgcacttttgaatgcttctaaagcaacaggcataccctttgatataaatagtggtgatggcgctttttatggaccaaagttagatttttatcttcatgatgctattggtagaaaatggcaatgcggaacattacaggttgattttaatatgccaggaagattaggtgcaaattatattggagaagataatgaaaaacatacgccagttatgcttcatcgcgctattttaggaagtttagagagatttacaggtattttaattgagcattatgagggaagattccctgtttggttagctccaatccaagtggtggttgctactataacatctaaagcagataaatatgctcataagatagaagaaaaatttatagaaaaaggaataagagttattttagattctcgaaacgaaaaaattaattataaagttcgagaacattcggtaaataaaataccatttatttttgttgttggagttaatgagatgaatgatggaactgttgcaatcagaaaacttggctcagataagcaagaaatacttagcatacaagatagtgtaaatttaattcttaaagaaacagctgcaccagacagttgat

SEQ ID NO: 303497 - DNA, 1237 bp, Unknown
  Bacterial polypeptide expressing nucleotide sequence isolated from the Sargasso Sea
atgcctataattacattaccagatggtaaaaatattgaatttccaaaaggggttacaggtttagacattgcagaaaaaataagtaagtcattattaaaacaagcattaattatgagcgttgatggtgagttaaaagatttatatttttcaattaaaaaagattgctcagtaaaaatttttactgcaaaagaccctgaaggacttgaggttattagacatgataccgctcacattatggcgatggctgttcaagaattataccctggtacacaagtaaccattggaccagtaattgaaaatggtttttattatgattttgctcgcaaagaaccctttacagaggatgatctagaaaaaatagaaaaaagaatgtcagaaataattgacaaagatgtaaaaacaaaaagagaggtttggaaaagagataaagcaataagccatttcaaaaaaattggtgaaaaatataaagcagagataatagagagtattccagataatgaagaactgactgtttatcatcatggtgatacttggcacgacttgtgtaggggtccacacttagtttcctctggaaaaattggcaaggctttcaagctcacaaaagttgcaggagcatattggcgcggagactcaaaaaatgaaatgttgcaaagaatttatggaactggctgggcatcccaaaaagatttagatgattatttaaaaagaattgaggaagcagagaaaagggatcataggaaacttggtaaagaaatggatttatttcattttagagaagagagcccaggttctgttttctggcacgaaaaaggttgggcattattccaaaaattaattaattacatgcgggcacgtcaagatgcagcaggatacaaagaagtaaacactccagaggtattagataggttattatgggaaaaatcaggacattgggaaaaatatggagaaaacatgtatacttcagaaactcccgacgaaaaagtttttgctataaaaccaatgaattgtccaggtcatatccaagtttttaaccaaggtttaaaaagttatagagatttaccattaaggattacagaattcggtaaagtacatagatatgaaccttcaggtgctttacatggacttctaagagtaagagcttttacacaagatgatgcacatattttttgttcagaagatcaaataactagtgagtgtttaaatgttactaatttaattttggatatttataaagatt

SEQ ID NO: 303498 - DNA, 1132 bp, Unknown
  Bacterial polypeptide expressing nucleotide sequence isolated from the Sargasso Sea
ggtaactcaaaaaatgagatgttgcagaggatctatggaacttcatgggcatcaaaaaaagatttagataattatattaaaagattagaggaagctgaaaaaagagatcatagaaaacttggtaaagaaatggatttattccatttcagagaagaaagtccgggtgcagtattttggcatcaaagaggatggacattatttcaaaaacttatcgattacatgagaaaaaaacaaaatgaagcaggttataaagaaattaacaccccagaagttttagatagatctttgtgggaaaaatctggccattgggaaaaatttggtgcccacatgtatacatctgaaactccagatgaaaaagtatttgccataaaacctatgaattgcccaggatgtgttcaagtatttaatcaaggtttaaaaagttatagagacctaccttataaaatgtctgaatttggtaaggttcatagatatgaaccatcaggggcattacatggcttattaagagtaagagctttcactcaagacgatgcgcatatcttttgcacagaggatcaaattacagaagagtctctatcagttacaaatctaatcttaaatatttataaagatcttggatttgaaaatgttattttaaaatattctgatagaccagaccttagagttggagaggacgaagtttgggataaagcagaaaaagctttattggaagcagttaaagctacaaaattagaatatagtattaataaaggagaaggtgcattttatggtccaaaaattgagtttgttttaagagatgcaattggaagagactggcaatgtggaactcttcaagttgacttaaatttaccaggaagattgggagcatcttttgtagataaagatggatcaaaaaaagttccagtaatgctacatcgagctttattcggttctcttgaaagatttattggaatattaattgaaaattactctggaaaacttccattttggattagcccatcacaaatcatggtaatacctgtttctgaagactttaatgattattctgtaaaagttaataaaaagcttattgcatctggtttaaattcagaagttgacttgaagaaccacaatttaaattacaaaataagag

SEQ ID NO: 303499 - DNA, 952 bp, Unknown
  Bacterial polypeptide expressing nucleotide sequence isolated from the Sargasso Sea
aatgaaaaaacttgatacaaattcgaatctctacaaaattaggcattcgcttgcgcatgtgctggcacaggcagttttggaaatacgacctgatgctaaacttggtttcggacctccggttgataatggattttattatgattttgatctcgaggaaccattgacgcctgaagacttgcccaaacttgaaaaacgtatgaagcatattattaattcaggacaggtttttgaacatgaagaattagaccaagagaaaatggttaaacttttgagcagtgaaaatcagcattacaaaattgagcaggttgaggatcttgttgcccaaaacgaaataataagtctctaccgtaatggtcctttctgggatttgtgcgaaggccctcatgttaaaaaaacaagtgaaattccaaaaaactgcttttcgctagattctctggctggagcatattggaaaggatctgaaaaaaataacatgatgcagagggtttacggcttagcatttgaaaatagggaacagctaaatgaatataaggccaagcggagcttagcaatgcaacgagatcacaggaaactgaacaaaaatcttagttattatactatctgtgaagaggttggaaaaggcctgcccttatggatgccaaatggaaccgtgattagggatgaactagaaaaactagccagggaaaaagaatttcttgcaggatacaaacgtgtatcaactccccatataacaaaagaggatttatattttacttccggacacctgccttattatcaggaaagcatgttccctcctatggaaatggatggggaacgtctttttctcaagccaatgaattgtcctcatcatcacatgatttataaagcagagcccaggagttatcgagatcttccccttcgtctggcagaatacggtacttgctatcgttatgaacagtctggggaactagct

SEQ ID NO: 303500 - DNA, 1408 bp, Unknown
  Bacterial polypeptide expressing nucleotide sequence isolated from the Sargasso Sea
cattgataacggtttttattatgatgttgaatggtctgacacaatctcagttgatgatctagaaaagatagaaagcgaaatgcatgagattcttaaatctaaatcatccattacaaaaaaacttttttctaaaaaagatgctttaaaagtttttaaatcattagatgagccatacaaacaagaaattattaatgaatctaatcaagagaatgaatttcaactttattaccaagacaagaataattttgttgatttgtgtaaagggccacatttaccaagcttaagtctaattggttcttttaaactgacaaaagtttctggagcctattggaaaggcgattcaagaaataaaatgcttacaagaatttatggcacagcatggaattcagaaaaggatttaaacagctacttaaatgatcttgaagaagctgagaaaagagatcacagaaaactaggaaaagaaatggacttatttcattttcaagatgaagcaccaggaatggtattttggcatcctgatggatggactatctatagaaatttaagaaattttgttagaaataggttgcaaaagaataattatattgaagttaatacccctcaagttattgatagaaagttatgggaggcttcaggacattgggataaatatcgtgaaaacatgttcatcactgaagttgatgaagagcatgcaaatgaaaagagagtcaatgctctaaagcctatgaattgtcctggccatgttcaaatatacaatcaaggaataaaatcatataaagatctgcccttaaaatatgctgaatttggtttatgtcatagatatgagccatctgggactatgcatggcttaatgagggttcgtgcatttactcaagatgatggacatattttttgcactgaagatcaaatagaatctgaaacagggttgttcatagagtttttatcagatctatatgctgatctaggatttaaagaatttgatatcaaattatctacaagaccagaaatgagagttggatctgacgaaatatgggataaagctgaagatgcgcttgaggccgcaattaagaatttgggttatccgtatagaattgatgaaggagatggggcattttatggacctaaattagattttgttcttactgatgcaattggaagagagtggcaatgtggcacctttcaattagatttcaatcttgcagaaagattagatgctaaatatgttggtgaagatggtaaaaaacatactccggttatgatacatagagcagttttaggttcttttgaaagatttataggcatcctcattgaaaattatgctggaaaactcccattttggcttgctccacaacaggttgttgttgcttcaattatttctgaagtgaatgattattcaattgagattttg

SEQ ID NO: 303501 - DNA, 1510 bp, Unknown
  Bacterial polypeptide expressing nucleotide sequence isolated from the Sargasso Sea
ctttaaaagcagaaaagaggattacaagcttgaaatactcaaagatatcgatacatcagaaaaagttgccctttatcatcatgaggaatacgtagatatgtgtcggggaccgcatattcctaatatgagttttataaaagcatttaaactgacgcatgttgctggcgcttactggaggggtaaatcggataataaaatgctccaaagagtctatggaactgcatggaattccaaaaaagaacttgacgatcatttacatatcaaagaagaagcatccaaaagggaccataggcttcttggaaaaaaatatgatttattccatctacaagaagaagctcctggcatggttttttggcatcctaaaggatggagtatttatactgcggttgaaaaatatatgagagaaaaacaagtttatgcaaattactctgagataaaaactccacaagtcatcgacagaaaattatgggagaaatcaggccactgggaaaaatacagagaaaatatgttcatcacagaaattgatgaagaacatgcaaatgaaaagagaacaaacgctttaaaacccatgaattgtccaggccacgttcaaatttataatcaatcgttaaagtcatacagagacttaccgattaggtttgcagagtttggcagctgccatagatacgaaccttcagggaccatgcatggactaatgcgggttagaggcttcactcaagacgatggacacattttttgcaccgaagatcaaatccaagaagagactgcctcatttatttcgcttctttacgatgtttatgaggatttcggctttaaaaaaattgatatcaagctttcaacaaggccagaagtaagagttggctctgataagatttgggataaagctgaaaaagctcttaagaatgcaatcgaggcgttagacatcgattatgaaattgcagaaggcgacggagctttttacggaccaaaaatcgattttgttcttaccgatgctctaaaaagggaatggcagtgcgggacttttcaagcagactttaatttgcctgaaagacttgatgcttcttatgtaggagaggatggcaaaaaacatagaccagtcatgatgcacagagcaattcttggatcttttgagagatttattggaattttaattgagcaatacgatggatcatttcctttgtggttatctcctattcatgcagtcgtcatgaatgtgtcggaaaaacacactgatagagttgttgaaatcaccgaaatattgaaaaaaaatgaaataaaagtcatttcagacttgaggaatgagaaaatcacttataaaatccgcgaccactctatacaaaaaataccatatcagattgtgataggtgataaggaggttgaagcgggttctattagcgttagagatagacaatctcaaaagcaatctttcatgtcagagagtgacttctccaaaatggttttgagaaaaataagatccaaaggaggtctgattggtaaaattttccgttag

SEQ ID NO: 303502 - DNA, 1099 bp, Unknown
  Bacterial polypeptide expressing nucleotide sequence isolated from the Sargasso Sea
tatgcctctgattactttaaatgacgggaagcaaataaaatatgaaaaacctgttactggagataaaatagctaaggatattagcccttcactttttaaaaaatctttggccattaaagtaaatgaagaattaaaggatttaagtagtacaataagcaaagattctaaaatacagataatcacaattgatgataaagatgccatagagctattgagacatgactcggcccacacaatggcaatggcagttcaagaactttttcctggtactcaagttacaattggcccagtaatagaaaatggtttttattatgattttgcaagagacgaaccttttactgaagatgatttaataaaaatagaaaataaaatgaaggagattgttgaaaaagatccaaccacacgacgtgaggtttgggaaagacaaaaagcaattaagcactttaaagatattggtgagcattttaaggcagaaattattgaaagtattccgcagagcgaagaaatatcaatatattttcacggtgactggcatgacttatgtcgaggccctcatttacctagtttaggaaaaatcggaaaagcttttaaattgatgaaagttgcgggtgcttactggagaggtgactctaataatcaaatgctacaaagaatatatggtacatgctggaaaaataaaaaagatctagacttgtacttagagagattagaagaagcagaaaaaagagatcatagaaaaattggcaaaactatggatttgtttcattttcaagaggaaagtccgggagctgtattttggcataaaaaaggttggaatttatttcagtctttaatttctttcatacggaatacacagctaaaggctggatatcaggaagtgaatacaccagaaattttagatagatcactttgggaaaaatcgggtcattgggaaaaatttaaggattacatgtacacaacagaaacgcctgatgaaagaacgttcgccattaaaccaatgaattgtccgggtcattgtcaaatttataatcaaggtttaaaaaggtataaagacttgccaattaaaatctctgaattggaaaagttcatagatacgaac

SEQ ID NO: 303503 - DNA, 577 bp, Unknown
  Bacterial polypeptide expressing nucleotide sequence isolated from the Sargasso Sea
agcatcaaaactaaaatatacaattaataaaggagagggagcattttatggaccgaaaatagaatttgttcttagagacgctataggaagagattggcaatgtggaacattgcaagttgatttaaatttacctggaagattaggagcttcatatgttgcaaaagatggttctaagcaagttccagttatgctacatagagcattgtttggttcattagaaagatttataggtatattaatcgaaaactatgctggcaagttacctttttggataacacctcttcaaacagttgtaatacctatttctaatgattttgatgattatgcaaaaaatgtttatcaacaattaaaaatagtaggaatatcatctgaagtagatcttaaaaaccataatttaaattataaaattagagatcattcattatcaaaggttcctttgcttttaatttgtggaaaaaaagaagttgacactaactcagtaactattagaaggttggattcaaataaacaagaaaatatggaattaaaagaattcttaaaaaaatactctgcttttaataaggcaccctcaatttaa

SEQ ID NO: 303504 - DNA, 1279 bp, Unknown
  Bacterial polypeptide expressing nucleotide sequence isolated from the Sargasso Sea
atgcttcaaagaatttatggaacaagttggtcaacccaaaaacaattagatgattatttgaaaagaattgaagaggctgaaaaaagagatcatagaaaattaggaaaagaaatggatttatttcattttagagaagaaagtccaggagcagtattttggcatgaaaagggttggaatttgtttcagaaactaatttcttacatgagagcaaaacaagatgaagcaggatacaaagaaataaacactccagaagtattggatagatccttatgggaaaaatctggtcattgggaaaaatttggcgctaatatgtacacttctactacacctgatgaaaaaatatttgcaataaaaccaatgaattgtcctggatgtgttcaagtatttaatcaaggtttaaaaagctatagagatctacctttgaaaatgtctgaatttggaaaagtgcatagatatgaaccttcaggcgctcttcatggtcttctaagagtaagggcttttacccaagatgatgcccacattttttgtacagaagaacaaataactgaagaatgcttaagcgttactaatttaatattagaaatttataaagaccttggatttgagaatgtaattttaaaatattctgacagaccagacttaagagtgggagatgataacgtttgggataaatctgaaaaagctttattagaggcaataaaagcatctaaactagaatacacagtaaacaaaggcgaaggtgcattttatggacctaaaatagaatttgttttgagagatgcaattgggagagattggcagtgtggtacactacaagtagatttaaatttacctggtcgtcttggagcctcttttattgataaagatggatcaaaaaaaattccagttatgcttcatagggcgttgtttggatctttagaaagatttattggtatcttaattgaaaattatgcaggtaaacttccattttggatttctcctcttcagacagttgttattcctgtatcaagcgattttgacacctatgcaaaagaagtaaataaaaaaattaaaaaaaaaggcatttcatctatagttgatttaaaaaatcataatttaaattacaaaataagggaacattctttatctaagataccaattctgcttatctgtggaaaaaaagaagttgacagtaacacagtaactattagaagattggattctaataaacaggaaaatatggatttaaatttattcttaaaaaaatattctgctttaaataaagtaaactcaaaataag

SEQ ID NO: 303505 - DNA, 1537 bp, Unknown
  Bacterial polypeptide expressing nucleotide sequence isolated from the Sargasso Sea
cctgtcactatagatgatatagcgaaagacattggtgcaggccttgcaaaggctgcggtagcaggaaaaatcgatggccaattagttgatgcgtcagaaattatttctgatgattgcaatgtagaaatcataacagtaaaagatgatgaagggcttgaaatagtcagacactcatgcgctcatcttttggctcatgccttgaagcaattatatccagatgcccaaatggcaataggccccgtaattaaagatgggttttattacgacatcaaacttgataaaaacctatcagatgaagacttagaggctatagagaagagaatgaaaaagcttgctaagacaaaatacgatgttaagagagaagtcgtatcgcaaaaaaaagctatcaagactttcaaagagagaaatgaaccttataaagtaaaccttgcagaagaaatacctgatgatgaagtgatagctttatatcatcatgaagaatatatagatatgtgcagaggaccacatgttacgaatatgagacatcttcaagcttttaagctcatgaaagtatcaggtgcttattggagaggagactcaaaaaatgaaatgcttcaaagaatatacggaacagcttggcctaattcaaaagatttggagaattatattctccaacaggaagaagcggaaaagagagaccataggaaattaggaagacaactagatttatttcattttcaagaagaagcacccggtatggttttttggcatccaaaggggtgggctatttattcagctctaaaaaccttcatacaatccaaacaagccgaatacgattatcaagaaattaatactcctcagatagttgatagaaagttgtgggaagcttccggacactgggataaatatcgagaaaatatgtttattacggaaatcgatgaagaacacgctaatgagaagaggacaaatgcccttaaaccaatgaattgtccttgccatgttcaggtatttaatcagggactgaggtcctataaagacttaccaataagatatgccgagtttggctcatgtcatagatatgaagcttcaggaacacttcacggtctcatgagagtcagagggtttactcaagatgatgggcatatattttgtactgaagatcagattcaagatgagaccaagaaatttatagaattactaacggacatatatgctcaactaggatttgatgagtttgatataaaactttcaactaggcctgaggttagggctggttcagagcaagtttgggatagagcggaacaagcgttggagaatgctataaaaaatctgaatttaccgtatgaagtagttgatggtgacggtgctttctatggtccaaagttagactttgttcttattgacgcattaggcagagaatggcaatgtggaactttccaactagattttatcttgcctgagagattagatgcaaaatttgtcgactctgatagtgaaaaatacaacccagtattaattcacagagccgttctaggttctttcgagagattcctaggtg

SEQ ID NO: 303506 - DNA, 1630 bp, Unknown
  Bacterial polypeptide expressing nucleotide sequence isolated from the Sargasso Sea
atgcctgatattcaacttttagatggaaaaaagatatcatttactaaaagcattaatggtttcgatatagtaaagaaaattagcaaatctctagaaaaaaaagctctgataatggaagtagatggaaaacttacagatttaagttttgatattataaaagactcgaaggtaagaattatcacctcggctgacaaagatggtttagatgttttaagacatgacgcagcacacataatggccatgtctgtccaagaattatttcctggcactcaagtaacaattgggccagtgattgaaaatggtttttactatgattttgcacgtaaagaaccctttactgcggatgatttaaaaaaaattgaaaaaaaaatggcagaaattattgacagagatgtaaaaacaaaacgagaagtttgggatagaaataaggcgctaaaacattttaaaaaaataggggaaaaatataaagctgagataatagagagtattccaataaaagaagaattatcaatttatcatcatggtgaaacttggcatgatttatgcagaggcccacatttaccttcatcaggaaaaataggcaaagcttttaagttaactaaagtctcaggagcatattggcgaggtgactcaaaaaatgaaatgcttcaaagaatatatggaacgtgttggagtaataaagaacaactcgaactatatttaaaaaggttagaggaggctgaaaaaagagatcacaggaaattgggaaaagaaatggatttatttcatttccgagaagagagccctggctcagtattttggcacgataaagggtggatactatttcaaagattagttgagtatatgagatttagacaacgattagcaggttataaagaaatcaatacccctgaattattagataaaactttatgggaaaagtctggtcattgggagaaattttccgaacatatgtttacatcagaaacgccagatgaaaaaacgtttgcgattaaacctatgaactgtccaggctgtgttcaaatatttaatcaaggattaaaaagttatagagatttaccactaaaactatcagaatttggtaaagttcatagatatgaaccctcaggtgcactgcatggactactaagagtaagagcatttacgcaagatgatgcacatatcttttgtactgaagagcaaattacacaagaatgtttgagcgtaacaaatttgataatagatatttataaaagtcttggtttcaaaaaagtcatattaaaatattctgatcgtcctgaaaaaagagttggagatgataaaatatgggataagtccgaacaagcattgttaacagcaattaaagaatcaaagctagaatattcaattaataaaggcgaaggggcattttatggaccaaagattgaatttgttttacaagatgcgatcggtagagattggcaatgtggaactttacaagttgactttaatttaccagggagacttggagcatcttatgttaacaagtctggagaaaaacaagttccagtaatgctccacagagcactatttggttctttagaaagatttataggtattttaattgaaaattatgcaggcaaattgcctttttggttatcaccaaatcaag

SEQ ID NO: 303507 - DNA, 763 bp, Unknown
  Bacterial polypeptide expressing nucleotide sequence isolated from the Sargasso Sea
catattttttgtactgaagatcaaattacagaagaatgtttaagtgtaacaaatttaattttagaaatttataaagatctaggctttgaaaacgtaatattaaaatattctgatagaccaaacataagagtaggaaatgatgatgtttgggataaatcagaaaaagctttgttagaagcaattaaagcatctaaacttgaatatagtgttaataaaggagagggcgccttttatggaccaaaaatagaatttgtgcttagagatgcgattggtagagactggcaatgtggaacattacaggtagatttaaacttacctggtcgtcttggagcatcttatgttgataaagatggatctaaaaaagtcccagtgatgttgcatagagcattatttggatctcttgaaagatttattggaatattgatcgaaaattatgcaggaaaacttccattttggatttcacctttgcagacaacagtaattccagtttcaaatgattttgatgactatgctaaaaaagtccaaaaagaaattaaaaaaattggtataagttctgaggtcgatttaaaaaatcataatctaaattacaaaataagggaacattccttatcaaaaataccaattctgctaatttgtggaaaaaaagaagttgacactaacactgtaacaattagaagattggattctaataaacaagaaaatatggatttaaaattattcttaaaaaaatattctgctttaaataaagccccatcaaactaag

SEQ ID NO: 303508 - DNA, 1443 bp, Unknown
  Bacterial polypeptide expressing nucleotide sequence isolated from the Sargasso Sea
ttgaaagtattccaaaaaatgaagaattgtctatttatcatcatggcgatacgtggcatgatttatgtagaggacctcacttaacatcttcaagtaaaattggaaaagcatttaaattaacaaaagtatcaggagcctactggcgtggagactcaaataatgaaatgttgcaaagaatttatggaacatgctggagctcaaaaaaagaattagaggattacttaaagagattagaagaagcggaaaaaagagaccatagaaagctaggtaaagaaatggacttatttcattttagggaagaaagcccaggatcagtattttggcatgaaaagggttggctgttatttcaaaggttaatcgaatatatgagaatgaaacaacgtttagctggttacaaagaaataaatacgccagaacttttagataaaacattatgggaaaaatcgggtcattgggaaaaatttggtgaacatatgtttacttctgaaacgccagatgaaaaaacttttgcaataaaaccaatgaattgccctggctgtgtccaagtttttaatcaaggattaaaaagttacagagatttacctttaaaattgtctgagtttggaaaagtacacagatatgaaccatctggtgctttacatggattattgagagtgagagcttttacacaagacgatgcacatattttttgcactgaagatcaaataactcaagaaactttatcagtaaccaatttgattttagaaatttataaggcccttggatttgaaaatgtaattttaaagtattctgatagaccagaaaagcgagttggagacgacagtgtctgggacaagtcagaggctgctttattgtctgcaataaaaaaatcaaagctagaatactctattaataaaggtgagggagctttttatggacctaaaatagaatttgtattgagagatgcaattggtcgtgattggcaatgtggaacgttgcaagtagatttaaatttaccagaaagattaggcgcaactttcgttgacaaagatggagcaaaaaaagttcctgttatgttacatagagctctatttggatctttagagaggtttattggaattctgatagaaaattatgctggaaaattgcctttttggttatcaccggcacaagctgtggtatgcccaatcgcagaggaaaacaacgattatgttaaaaagttatttgaagatttatttaaagaaggtataaaatgcgaagtggatttaagaaacgagaagataaactataaaattagagaacattctctagcgaagattccaatgattattgtttgcggtaaaaaagaagttgctgaaaatactgttacaattagaagactcggatcggataaacaagagaaaatgaaaagagaagaattaattaaaagtatgcttaaagcaaaccagttgccattaaattaag

SEQ ID NO: 303509 - DNA, 742 bp, Unknown
  Bacterial polypeptide expressing nucleotide sequence isolated from the Sargasso Sea
caaattacacaagaagagtaaaacggtatgtgatttgatacttagtatctataaggactttggttttgataatgttagaattaaattttctgaccgtcctgaaaaacgtgtgggtgatgatgctatttgggataaagctgaggctgcattaatgcaagccatggaagcaacaggtcttgagtatacactcaacccaggagaaggtgcattttacggtccaaaattagagtttgttttacgtgatgcaattggcagagactggcaatgcggaacactgcaagtagatttaaatttacctggaagattgggagctacttatattggagaagatggaaataaaaaaataccagtcatgttgcatagagctctatttggttccttagagagattcaccggtattctaattgaacattatgcgggccatcttccgttttggctttcaccattgcaagctgtagttgctacaattacatcagatactgatgagtatgcatatgaggtacaaaaggcattagtatcaaaaggaattagggccgaaatagatacgcgtaatgaaaaaattggttataaaatacgtgaacacagtaacagtaaggtgccagcaattattgctgttggaaaaaaagaagctcaagacaaaacagtatctgttagaagaattggctcgtctgaaacaaagacctttaaattagaggatattgttactagcttatctaaagaatcaaaatcaccaatagaataa

SEQ ID NO: 303510 - DNA, 1518 bp, Unknown
  Bacterial polypeptide expressing nucleotide sequence isolated from the Sargasso Sea
gatgaataaaatcaacattacgcttccggataactctgttcatgagcataattctggtgtttatgcattagacattgcaaaaagcattggcgaaaggctttctatgagcaccgttgctgcaacggtaaatgatgttttggtagatgctacaaaaccaatcaacgaagacgctagcgttgttattcatactgcagattcaaaaattggacacgatgttcttttgcatagtactgcccacttaatggctcaagctgttaaaaaattgtggccaaatagtcaaatgacaataggaccagttattgaaaatagattttactatgactttgatattgatggcacgttttccgatgaagatctatctaaaattgaagatgagatgcgaaatattgctaaacaaaattatgaggttttcagacacgagcttgatagagacgatgctgttaagattttttctgatttaaatgaattttacaaaattgaaataattaatgatattgaagatagcgatcagatttccgcatataaacaaggtgaatttattgacttatgtagaggtcctcatgttccatttacaggtaatataaaatatttcaaacttttgactacctcgggcgcatattggagaggtgatgagaaaaataaaatgcttcaacgaatttatggtacagcgttttcttcgaaatctaagcttaaagattatttagcttttcttgaggaggcaaaaaaaagggatcatagaaaaataggcaaagagttagctatttttactttcgatgatgaggtggggcctggtttacctttatggcttccaaatggtggtgtaatactgaatgaattggaacaactggccaaagaaactgaagacaggcatggataccaacaggtcagaacccctcatttaaccaagggtgatctatataaaaaatctggtcatttagatctctataaagatgctatgtatcctgctatggatgtagatgggacagattattatgtaaaaccaatgaattgtcctcaccatcataagatttacagtgcatcacctaaaagctatcgcgatctaccatttagaatatctgagtatgggacttgttacagatatgaaaaatctggtcaattatttggtttaatgagagttcgaagcatgcaaatgaatgatgcacatatttattgttcaaataatcaatttagcacagaattcttagatgtttgtaatatgtatttagagtacttcgaaatctttggcatagagaaatacgaaatgcgtttaagcttgcacgatccaaaagacttgggcaaaaaatatataaacgaaccagagttatggcttgagactgaagctattgtacggcaaaccttaacagaaggaaaaattaattttgttgaaattccaggagaagcggcattttatggtccaaaagttgatgttcaagtatggagcgctattggtaaagagtttacgctggcaaccaatcaagtagattttgccataccaaagcgttttggtcttacatttat

SEQ ID NO: 303511 - DNA, 1441 bp, Unknown
  Bacterial polypeptide expressing nucleotide sequence isolated from the Sargasso Sea
ggcttatcgtcagggagatttcattgacctctgcaaaggccctcatgtctcactgacctctcaattgaggtggttcaagctaaccagcaccagccaggcatactggagggcggacaaggacagggagtcgctggtcaggatttacggaatgtgctatccttccaaggatggtctgaaggaacgagagaggcagatacaagaggctgcaaggagggaccacaagaagatagggaaggagatgggactatacatgattaacgagctgatagggaagggcctccctgtttggctaccgtatggcgaggtgctgaagtcggagatagagaacttcgcgatagagacagaggaggcatatgggtacgacagagtgactaccccggttcttgggaagaaggagcttttcgagacatccggccatctgccgcactacgctgaggggatgtacccgccaatgaagatggatgatggtgattactacctcaaagcgatgaattgtccgatgcaccacctagttttcacgaatagcaagaggtcctacagggatctcccaattagaatcgcagagtacggtactgtgtacaggaacgagttgtccggaacgttagccggacttctgagggtcaggatgctgtcgatgaacgatgcccatgtctattgtaccttggatcaagtggcaagtgaggttcgaagcaacgtcaggatggcacaggaatactacgaaacgttcggcttcgatgactatgacttccgcttgtccttgtgggacccggacaacaaggacaagtacatcgatcagccagagaactgggaggctacccagaaccatctgagagagatcatggatggcttaggggtcgaatacaccgaggcagtcggcgaggctgcattctacgggcccaagatagacatacaattcaggacagctttgggaagggaggagtcgatgtccacgatacaactagacttcgctgccaaggagaggttcggactatcgtacatggacgagactggaaatgagaacggggaggtcttcgtaatccacagggccccgctatccactcatgagagattcgtggccttccttctggagcagtgggctggaaatctacctacctggctttcccctgtgcaagctcaggtaatcaccatctcggagaagcacaaggagtatgcagagcacgtaagagagactctgaagatcgcaggagtcagagtgaaagtggatgattcggacaacacaatagggaagaagatcaggatgcacaggaagagtcgccctgcttacatgctaattctcggtgatgacgagatgaagggggagtctgtctcaataagaagcagggacggcaatcagaagaatggcgttccccttgagcagttcgtttcggatatcttcgcagagatttccaaccgaaccaaggacctatccctggtggagtga

SEQ ID NO: 303512 - DNA, 772 bp, Unknown
  Bacterial polypeptide expressing nucleotide sequence isolated from the Sargasso Sea
catgaatgttgacattacattacctgatggttcagtacgaaattatgaatcacccgttactggttatcagattgctgaaagcataggtcctaggttacttaaagacgctatttgtgttgaaatagataataaatttcaagacttatcttttgaaatatcagaaaacataaatctaagagtagtaactacgaaggatctagatgcattgcacatattaaggcattcttctgcacatatactcgctcaagcagtattaaacctatatccaaatgcacagtttggagtaggcccaagtatagaaaatggtttttactatgattttctctttgaaactccaataaaagagaatgaacttgaaaacatagagaaagaaatgaaaagaattgctaaaagtgcacaaagtttcattagatctgaaataacaaaaaaagatgctaaaaagatatttaaaaatcaaaaattaaaattagagctaattgaatcagcagagtctgatgagggtgttggtgaagagatagtatctacatataccaatgatgaatttatagatttgtgcatgggaccgcatgtaccatcaacaagtatacttaaacattttaaactaacaaaagtttcaggtgcttactggcgtggtgatgaatctaatgtacaactacaaagaatatatggtacatcatggttttctaaagaggatttagatcaatacttaattcaacaagatgaagcagaaaaaagagatcatagaaagttaggtaatgaattagatttatta

SEQ ID NO: 303513 - DNA, 997 bp, Unknown
  Bacterial polypeptide expressing nucleotide sequence isolated from the Sargasso Sea
atgtattcgccgatggatgtgacggggcagtcgtattttgcgaagcctatgaactgtcctttccacagcatgatatacaagaacaaacgacgaagttacagggagctcccgtttcgatgggcagagatgggaacggtgtatcgctacgaggcctctgggacacttcacggtctgatgcgggtacgtggcttcacgcaggacgatgcgcatattttctgccgaccggatcaggttgagagcgagatcgaacgtgtcatcgacttcacgctgttcgtgctccggtcgtttggtttcgaagactacagcatgtatatcagtacgcgtccggagaaggccgtgggcgagcccgaggactgggatatggccaccgaagcgctgaaacgagcggtggacaagcattcgctcccgtatttgattgacagaggcgggggtgctttttacggcccgaagatcgatgtgaagataaaagactcgctgaatcgtgaatggcagtgcacgacgatccagtttgatttcaacctgcccgagcgattcgatctgactttcgtcggtcaggacggtaagtatcacagaccgtttatggtgcaccgagccctgctcggttcgatggagcgtttcttcggtacgctcgtcgagcattatgcaggaaacttccctgtttggctcgcccctgttcaggctgtcgtcttgccgatctcggatcagcagatggacttcgcacaggagattggtcagacgttgagcgaaggcggcgttcgttgcgaagtcgacgatcaggacgcgaagctcggctacaagattcgcgaagccgagacgcagaaggtgccgtacatgttggtcgtcggtaaagaagaagtattatctggtcaggtgtctgtccgccgtcacggtgatggcgatcttggcaagatgaatatcgaggatttcgtttcccgcattcaggaggagacgacttccaagacagatagaaccccaactggaggatgttcgcattaac

SEQ ID NO: 303514 - DNA, 826 bp, Unknown
  Bacterial polypeptide expressing nucleotide sequence isolated from the Sargasso Sea
aatgccgaatattactttaccagacggaaaaaaattaagttttaaaaacaatgtaactggatacgaggttgctgaaaaaattagtaagtcactttcaaaacaggctcttatagtaagtgtagatggagtgttgaaagatttaagtttttcaattcaaaaagactcctctgttaaaattataactagcaaagataaagatggtctcgatgtaataagacatgatgcagcacacataatggcaatggctgttcaagaattatttccaggaacccaagtaactataggtcctgttattgagaatggcttcttctatgattttgcaagaaaggaaccatttacaaaagatgatttaaaaaaaattgagaagaaaatgtcagagattatcgacagagatgtcaaaacaaaacgtgaagtatgggacagagataaagcaatagcacattttaaaaaaattggtgaaaagtataaagctgagattatcgagagcatccctaaaaatgaagaattatcaatttatcatcatggagatacttggcacgatctttgtagaggtccgcatttagtttcatcaggaaaaataggaaaagcttttaaattaacaaaagtttctggagcttattggagaggggactcaaataatgaaatgctacaaagaatttacggaacatgttggggttctaaaaaagaattagatgaatatttacacagactagaagaagcagaaaaaagagatcataggaagttaggtaaagagatggatctttttcatttcagggaggaaagtcctggatctgttttttggcacgagaagggctggaatttattt

SEQ ID NO: 303515 - DNA, 1207 bp, Unknown
  Bacterial polypeptide expressing nucleotide sequence isolated from the Sargasso Sea
atgaataaacttgatacaaattcgaatctctacaaaattaggcattcgcttgcacatgtgctggctcaggcagttctggaaatacgccctagcgctaaacttggtttcgggcctccggttgataatggattttattatgattttgatctcgaagaacctttgacgcctgaagacttgcccaaacttgaaaaacgtatgagacatattataaattcaggacaggttttcgaacgtgaagaattaggccaggagaaaatggttgaacttttgagtagtgagaatcagcattacaaaattgagcaggttgaggatcttgtcgcccaaaacgaaataataagtctataccgcaatggtccattctgggatttgtgtgaagggcctcatgttaaaaaaacaagtgaaattccaaaaaactgcttttcgctagattctctggcaggagcatattggaaaggatctgaaaaaaacaacatgatgcagagggtttatggcttggcatttgaaaatcgggagcagctaaatgaatataaggagaagcgcagcttagcaatgcaacgtgatcacaggaaacttaacagcaaacttagttattatactatcagtgaagaggttggaaaaggcctgcccttatggatgccaaacggaactgtgattagggatgaactggaaaaactggccagggaaaaagaatttcttgctggatacaaacgggtatcaactcctcatataacaagagaggatttatattttacttccggacatctgccttattaccaggaaagcatgttcccgccgatggaaatggatggggaacgtctttttctcaagccaatgaattgtcctcatcatcacatgatatataaagcagagcccaggagctatcgtgatcttccccttcgtctggcagaatacggtacatgctatcgttatgaacagtctggggaactagctggattactccgcgtgcgtggcatgaccatgaatgatgctcatatttactgtactcctgagcaggctaagtcagagtttatcaatgttatgaatctgcatacagaatattacaagatgttcggattgagtaatttctggttgagactttctcttgctgaggaagataaaggtaaatttgtagatgagccagaactatggcaaaaggccgaaactcttgtttcaaaagtaatggaagaagtaggtattccctatgaag

SEQ ID NO: 303516 - DNA, 487 bp, Unknown
  Bacterial polypeptide expressing nucleotide sequence isolated from the Sargasso Sea
gagtggcagtgtggaactctacaagttgacttaaatatgccggagagattaggtggaacttttattgctgaagatggtaagaaatatcatcccgttatgcttcatagagccttatttggatcactagagagatttacaggtattcttcttgaacattatgctggaaatcttccgctctggctaagtccagttcaagctgttgtagctccaattacatctgaaattgatgactatgctgtggaaatacaagaaacattgaaaagctcaggtttcagagttgaaatggatctaagaaacgaaaaaataagttataagataagagaaaactcacttcaaaaaattccttttttattgattgtaggaaaaaaagaaatggaagagaaatctgtaaccctcaggacatttggcagtaaagatcaggaaaaaataaaacttgataatttaactgatttttttgaaaaaaaatgtatgattccaggtcattaaa

SEQ ID NO: 303517 - DNA, 1395 bp, Unknown
  Bacterial polypeptide expressing nucleotide sequence isolated from the Sargasso Sea
tggggagcagagagatctcatagacgaacttcctgataactcatcagtttctatcatcactatccaatctgacgagggcttagagataatgagacatacattaacagcccaagttcttgcaaaagctataaagaatttatattcagattctaggttagctataggaccaacaattgaaaacggcttctactatgatgtttctactgaaacacctatatccattgaagatcttccaaaaatagaaaatgaaatgaaaaggatactagaaaataagtctaatattgttaaatcacttcactccgaaaaagatgcaaaaaaaatgtttaaagagaaaggagagactctcaagatagaaattatagatgatgcagaacaaactgataattttcagatttatacaaatgctgatgaagattttattgatttatgcagaggacctcatttaccaaatctatcttttattggagcatttaaacttactaaagtctctggagcatactggaagggagattcttcaaatgaaatgcttacaagaatttatggtacagcatggagaaatgaaaaagagcttcaagaacatctaaaatctattgaggaagctgaaaaaagagatcatagaaagattggaaaagatatggatcttttccatttccaagatgaagctccaggtatggttttttggcatccaaagggctggactatttattcaactttaaaatcttacatgtcagatatgcaaaagaaagctgattataaagaaattaatactccatcagtgatagataggaagctttgggaaaaatcaggacattgggataaatatagagaaaacatgtttatcactgagattgatgaagagcatgcaaatgagaaaagagttaatgccttgaagcctatgaattgtcctggacatgttcaggtttataaccaaggcataagatcatataaagaacttccatttagattatgtgaatttggcacatgtcatcgatatgaagcatcagggaccatgcatggcctaatgagagtaagggggttcacacaagatgatggacatattttccttactgaagatcaaattgagtcagaaactgcgacctttatagatttattgtctaaggtttatgctgaccttgggttcaatgaatttgagattaaactatcaacgcgcccagaacaaagagttggatctgatgagatttgggacaaagctgaattgtctttaaaaaatgcaatcgaaaaacttggattggaatacaggatagatgaaggagatggagcattttatggtccaaaattagattttgtattaacagatgctattggaagaaagtggcaatgcggaactcttcagctagattttaatcttgctgaccgtctagatgctcagtatgt

SEQ ID NO: 303518 - DNA, 1189 bp, Unknown
  Bacterial polypeptide expressing nucleotide sequence isolated from the Sargasso Sea
aatgccggatataactctacctgatggaaaaaagttaagttttaaaaatgaagtaacgggtttagaggttgcttcaaaaattagcaaatccctttcaaagcaagcacttattatcagtgtaaatggtgaattaaaagacttgagtttttcaattcaaaaagattcttctgtaaaaataattactcaaaaggataaagaaggcttagatgttataagacatgacgctgctcacatcatggcgatggcagttcaagaattatttccaggaacccaagttacaattggtccagtaattgaaaatggtttttattatgattttgcaaggaaagagccatttacaagtgatgatttaaataaaatagaaaaaaaaatgtcagaaataattgatagagatgtaaaaacaaaacgagaagtatggaaaagaggtgaagcaataactcacttcaaaaagataggagaaaagtataaggctgaaattatagagagcataccagaaaatgaagaactttcagtttatcatcatggagatacttggcatgatttatgtagagggcctcatttagtttcttctggcaaaattggtaaagcttttaaattgacaaaagtttcaggtgcttattggagaggtgattccaacaatgaaatgttacagagaatttatggaacttgttggagttccaaaaaagatttagatgattatttgcacagattagaggaggctgaaaagagagaccatcgaaaacttggaaaagaaatggatctttttcattttagagaagagagcccagggtcagtattctggcacgaaaaaggttggaacttgttccagaggcttattgaatatatgagactaaaacagagaaatgcaggttataaagaaattaatactccagaattattagataaaagtctttgggaaaaatcaggtcactgggataaatttggcgagctaatgtttacatctgaaacaccagatgaaaaaatatttgcagtaaaaccgatgaactgccctggatgtatccaggtatttaatcaaggtcttaaaagttacagagatttaccattaaaattatctgaatttggaaaagtacatagatatgaaccctcaggtgcgctacatggattgcttagagtaagagcttttacccaggacgatgcacatattttttgcactgaagaacaaatcacc

SEQ ID NO: 303519 - DNA, 1618 bp, Unknown
  Bacterial polypeptide expressing nucleotide sequence isolated from the Sargasso Sea
gatgagtgaaaaaataataattacatttccagatggaaataaaaaggaagtcaataaaggcattagtggaattgaattagcttcacaaatttctaaatctcttgctaaagagtcagttgctataaaaattaataatgagataaaagatattagtttaccaattaatgacaacgcatcagtagaaattttaaaaagagatagtgaggaagctcttgaattaattcgacacgattgtgctcatgtaatggcagaggctgttcaagaattatttcctgggacacaagttactattggtccagctattgaaaatggtttttattatgattttgcaagagatgaaccctttactcttgctgatcttccaaaaattgaaaagaagatgcatgatatcatacaaagaaataaaaattttgttagagaagtatggtctaaagaagaatcaatcaagcattttaaagataagggtgaggactacaaagttgaattaataaatgatttatctgataatgaggaaattagtatttacaaacaaggtggttggttggacttatgccgaggtccacatatggtttcaacaaagcagattggtaaagcatttaaattaatgaaagttgctggtgcgtattggagaggagattcgtctaatgcaatgcttacaagaatttatggtacggcatgggcaactgagaaagatctagaacaacatctaatacaaattgaagaagcagaaaaaagagatcaccgaaaactcggaaaagaaatggatctatttcatttcagagaagagagtcctggttcagtcttttggcacgaaaaaggttggttattatttcaaagattggttgaatatatgaggatgaaacaaaggttggcaggctataaagaaataaatactccagaacttctagacaaaacgctttgggaaaaatctgggcattgggataaatttggagaacatatgtttacctctgaaacaccagatgaaaaaactttcgcagtcaaaccaatgaactgcccaggatgtgttcaagtattcaatcaaggattaaaaagttatcgagacttaccattaaaactttcggagtttggtaaagttcataggtatgaaccatctggagcactacacgggttattaagagtaagagcatttacacaggatgatgctcacatcttttgcactgaagatcaaataactgaagagtcattatcagtaacaaatttaattttagaaatctataaggatttaggatttaaagatataattctaaaatactcagatagaccggaaaaaagagtcggtgatgatagcatttgggataaatcagaggcagctcttttaacagctataaaaaagtcaaaacttaaatacactatcaataaaggcgagggcgcattttatggacctaaaattgagtttgttcttagagatgcaataggtagagattggcaatgtggaactctacaagttgatttgaatttacctaaaagacttggagcctcttatgtagcaaaagatggtacaaaaaaaattccagttatgcttcacagagctctatttggatctttggagagatttattggaattttaattgaaaattatgctggcaagctacctttt

SEQ ID NO: 303520 - DNA, 1915 bp, Unknown
  Bacterial polypeptide expressing nucleotide sequence isolated from the Sargasso Sea
tatgccgaatatcactttaccagatggaagtgtacgaagctttgataattcaataacaggatttcaactcgccagtgatattggtccgggattagcgaaggctgcattaatcatgcttgttgacggcatcgagttagatcttgatcaccagattataaacgactcaaaagtggccttcattacaagaagtgacgagtcagcgcttcctttgatacggcatgattgtgctcacgtaatggctgcagctgtccaggagttatttcccgaaacgcaagtaacgatagggccttcgattgaaaacggtttttattatgatttttacagacaaacgcctttttcgcaagatgaccttggaaaaattgaaaagcgtatgcatgagcttgttgatagagatgataaaatacaacgcgaagtctgggatcggggacatgcaatcgatcattataaaagcatagatgaaccttttaaagtcgagctggtagaagcaataccggatggggaagttttatctttctatcgacagggggattttttagacttgtgtagggggcctcatgccccctcgacccggcacgtaggacatgcctttaaattaatgagcgtcgcgggtgcgtattggcggggcgactcatcgcggccgatgctgcagcggatttatggaacggcttggccggacgaaaaaaagcttaaatcatatctattgatgttggaggaggctgaaaaaagggatcatagaagattagggcgagaattggaccttttccatatgcaagaagaagctgttggatccattttttggcatgaaaagggatggacattgtatcgagagatagaggctcatgttcgacgacgccttgatgctggtagttacaaggaggtaaaaactccacagctgattgatagggcgttgtgggaagcatctggtcattgggacaagtttagagaaaatatgttcactgcagaaagtgaggacgacagaactttagcgcttaaacccatgaattgccccggtcacgttcaaatatataaacagggtataaaaagctaccgtgatttacctttaaggatgtcagaatttggctcatgtcatagaaatgagccttccggcgctttgcatggcattatgcgagttagggcgtttactcaagatgatgctcacatattttgtaccgaagaccaaataacaaccgagagcattatcttctgtgatctattgaggcagatctataaggattttggttttgaggatattcatgtcaaattttctgatagacctgaagttagagcaggtgacgatagcacttgggatcgcgcagagacagccttgagggatgcttgtagtgccgctggtctggatactacccttaatccgggagaaggtgcattttatggtccaaaattagaatttgttctcagggatgcgattggccgcgattggcaatgtggcactttacaggttgattttgttctgccggagcggttggatgctaattacatagctcaagatggatcgaagcgtagacccgtgatgctacaccgggcaattctaggctcgatggaaaggtggattggtattttaatcgaagaatattctggaaaatttcctatgtggctctcaccggtgcagggcgtggttgctacgataacaagcgatgctgacgaatacgctaataaggtattcgaaggactgaaaaaggcaggcttgcgggtaggtaaggatgttagaaatgagaagatcaattataaggtaagagagcatagccgagctaaaattccagtaattatagtggttggggagcgagaagaaaatcaaggaacggttgcaattcgtcgtcttggtggtaaaactcaagaaatccttgcgcttgacgacgcaattaataaactagtagatgaatcgagacctcctaaatag

SEQ ID NO: 303521 - DNA, 1186 bp, Unknown
  Bacterial polypeptide expressing nucleotide sequence isolated from the Sargasso Sea
aaagctgagttaattgagcaaataccggagaatgaagatgtctcaatttattttcatggagattggcatgatctttgcagaggaccgcatctttcttcaacaggtaaaattggaaaatactttaaattaatgaaagtttcaggagcttattggagaggtgattcaaacaatgaaatgcttcaaagaatttatggtacaagctgggcttctcaaaaagatttagatgagcatttaaaaagaatagaagaggcagaaaaaagagatcatagaaaattaggaaaagaaatggacttgtttcattttagagaggaaagtccgggctcagtattttggcatgagagaggatgggcattatttcaaaaattaattaattatatgagaagcagacaagatgctgctggatataaagaggtaaatacgcctgaaattttagatcgacaattatgggaaaaatctggtcactgggaaaaatatggagagaatatgtacacatcagaaactcctgacgaaaaagtgtttgcgataaaaccaatgaattgtcctggtcatatacaagtatttaatcagggcttaaaaagttatagagatcttccattacgtatcacagaatttggtaaggttcatcgttacgaaccatcaggtgctttacatggtttacttagagtaagagcttttacacaagatgatgcgcatattttttgtactgaagaacaaattactagtgaatgtttaattgtgactaacttaattttagatatttataaagaccttggttttgaaaatgtaattttaaaatatgcagatcgaccagaagttagagttggagatgatgaggtttgggacaaggcagaagcttcacttcttgaagcagttaaagcctctaagttagaatatagtattaataaaggtgaaggagccttctatgggccaaaaattgaatttgttttaagagatgctattggaagagattggcaatgtggaactttacaagttgatttaaatttacctggacgactagatgcatcatatgttgataaagacggaacaaaaaaagttcctgttatgcttcatagagcgctgtttggctctttagaaagatttattggaatattgattgaaaattatgctggaaaatttcctttttggatttcacctttacagacaatggtaatttccaatttcagaa

SEQ ID NO: 303522 - DNA, 1187 bp, Unknown
  Bacterial polypeptide expressing nucleotide sequence isolated from the Sargasso Sea
aatgattttaaaaaaattgaaaaaaagatggttgaaataattaataaaaatgaaaattttgtaagagaagaatggtctaaagaggaggctataaaaaatttttcagaaaagggagagaagtttaaagttgagcttattaatgatttaccaaaagatgaaataattacaatttataaacaaggagagtggttggatttgtgcagaggacctcatatgccttcaacaaaacatattggtaaaagtttcaaacttatgaaagttgctggagcttattggcgaggtgattcaagtaatattatgttaacaagaatttatggtactgcatggagaaatgaccaagaacttaaagattatttgcatcaacttgaagaggctgaaaaaagagatcatcgtaaattaggtcgagaaatggatttgtttcatttccaagaggaagcacctggggctgttttttggcatcccaaaggatggtcactatttcaatcactcataaactatatgagggatagacaagacaaagaagattatgttgaaactaacactccggatatgatggataaatctttatgggaaacatcaggacattgggaaaaatttggtgagaatatgtttacaacagaagccaaagaagaaaaaatatttgctattaaacctatgaattgtccaggagcagtagaaatttataaacaaggcttaaaaagttatcgtgatcttcctcttcgtatgtctgaatttggaaaagttcatcgatacgagccttcaggtgcactgcatggattaatgagagttagagcctttactcaagatgatgcacatattttttgtactgaagatcaaattactagtgaaagtaaaaaagtttgtgacttaattttaagtatatacaaagattttggctttaatgatgttcgaattaaatattctgacaggccagaaaaaagagttggtgatgatgctgtttgggataagtctgaacaagcattaaaagatgctatggaagcaactgatttagaatattctttgaatcccggagaaggtgcattttatggaccaaaattagagtttgttcttcgagatgccataggtagagattggcaatgtggtactttgcaagtagatttaaatttaccaggacgtttaggtgctactttcgttgatgaagatggtcagaaaaaaactcctgtaat

SEQ ID NO: 303523 - DNA, 1103 bp, Unknown
  Bacterial polypeptide expressing nucleotide sequence isolated from the Sargasso Sea
gatggttcaaaaaaggttttcgaaaaaatctgtaactattttagaaattgcccagagtataggtgctggattagctaaagcaacaattgctgggaaagtaaatgatgttcttcttgatgcaacaattcctataaataatgattccaaagttgtaatcatcacatcaaaagataaagaaggaattgaaataataagacattccttcgctcaccttattggacatgcagttaaacaaatttaccctaatattaaaatggcaattgggcctgtaattgaagatggtttttactacgatattttttctgaatacagatttactcctgaagatttaaaaaaaattgaagatagaattaacaaattaataaaaacaaattacaacgttgaagttttacaagtttctaaaaaagaagcaattaaaacttttaaagaaagagatgagacttttaaattacgaataattgaagaaattcctgaagaaggtctaatcaatctatataagcacgaagaatatattgatatgtgcagaggacctcacgtacccaacacaagacatttgagacactttaagttacttaaattatcaggttcatactggagaggtaatagtgataatgaatcattacagagaatatatggaactgcatgggctaaagaaaaagaactcaatgactacttaacaagaattgaagaggccgaaaaaagagatcatagaaaacttgggaaaaaacattcactttttcatatacaagaagaatctcccggtatgattttttggcatccaaatggatggacaatataccaggtactggaaaaatacataagagaaatacttaaaaaaaatgattatttagaaattaaaaccccacaagctgttgacaaatctctttgggaaaagtctggtcattgggaaaaatttagagatgatatgttcactaccgcatcagaaaatagaacttatgcaattaaaccaatgaattgtccatgtcatattcaagtatttaatcaaggcttaaaaagttataaggatttacctattcgtctcgctgaatttggttcttgtcacagaaatgagccctctggtgcactgcacggcttaatgaggg

SEQ ID NO: 303524 - DNA, 1921 bp, Unknown
  Bacterial polypeptide expressing nucleotide sequence isolated from the Sargasso Sea
aatgcctacaattactttgccagatggaaaaaatctcaatttttcgaaagaggttaatggtttagaaatcgccaaaaaaattagcagatctcttcttaagcatgctttggtgatgagtgttgatggagaattgaaagatttatattttacaattaagaatgattgtacagtaaaaatttttacgtcaaaagaccctgaaggacttgaggtgataagacacgatgcggctcatattatggcaatggctgtgcaggaactttacccgggaacccaagtaacaattggaccagtaatagagaatggattttattatgatttttcaagaaaagaaccttttacaagcgatgatcttataaagattgaaaaaagaatgtcagaaattattgataaagatattaaaacaaaaagagaagtttgggataggggaaaagcaataagccattttaataaaataggtgaaaagtataaggctgagataattgaaagtattccagaaaatgaggaactatcggtatattatcacggtgatacttggcatgatttgtgtagagggccacatctagtatcttcaggaaagataggtaaagctttcaagctcacaaaagtttctggagcatattggcgtggagactctaaaaacgaaatgctccaaagaatttatggaactggttgggcctcccaaaaagatcttgaagaatatttaaaaaggattgaagaagctgaaaaaagagatcatagaaaattgggtaaagagatggatttgttccatttcagagaagaaagcccaggttctgtattttggcatgaaaaaggttggtcattatttcaaaaattaataaattatatgagagccaaacaagatgctgcaggatatagagaagtaaatactccagaagtattagacagactgctttgggaaaaatctggccattgggaaaaatataaagaaaacatgtatacttctcaaacacctgatgaaaaagtttttgcaatcaagccaatgaattgccctggtcatattcaagtttttaatcaaggattgaaaagttatagagatttaccattgagaataacagagtttggaaaagtacatcgttatgaaccctcaggcgctctacatgggcttcttcgggttcgagcatttactcaagatgatgcacatattttttgctcagaagatcaaatcacaagtgagtgtttaaatgttacaaatttaattttagatatttataaagatttaggttttgagaatgttatccttaagtatgctgacagacctgaaattagggtaggagacgataaagtatgggatgaagctgaagcatcattgttagaggcggttaaagctacaaaattaaaatacactatcaataaaggtgagggagcattttatggtccgaaagtagagtttgttttaagagatgcaattggtagagattggcagtgtggaacaatacaggttgatttaaatttaccaggaaggttgaatgcatcctatgttgataaagatggtactaaaaaagtaccagtgatgttgcatagagcattatttggctctcttgaaagatttataggtattttgattgaacactacgccggtaaatttccattttggatttctccacttcaaacagttgttatacctatttctgaagattttgaggaatatgcattaaaagtttcaaaagaaattaaaaagacgggcataactacagaagttgatttaaaaaaacataatttaaattataaaattagagatcattcgttagctaaagtacctcttttattaatttgtggtaaaaaagaagttgactctaattctgtaaccattagaagattggattcaacaaaacaagaaaatatggaattaaaaacatttttaaaaaaatactctgctttaaacaaagctttctcaaactaa

SEQ ID NO: 303525 - DNA, 1918 bp, Unknown
  Bacterial polypeptide expressing nucleotide sequence isolated from the Sargasso Sea
aatgcctacaataacattaccagacgggaataatctaaattttacaaaaaaagttactggagttgaagtagccgagaaaataagcaagtcattagcaaaacaagcaatggttataagtgttgatggtgaacttaaagatttagattatttaatagaaaaagactgctcagtaaaaatttttacttcaaaaaatccagaagggctggaaacaattagacatgacacagctcacatattggcaatggctgttcaagaattatttcctggtactcaggttacaattggtccagttattgaaaatggattttattatgactttgcaagaaaagaaccttttactgaagatgatttagtcaaaattgaaaataagatgaaagaaattgtagacagagatgaaattactaagagagaagtttgggatagaaataaagctattgatcattttaaaaaaaaaggtgaaatttataaatctgaattaattaaagctatcccagagaaagaagatgtctcaatttattttcatggtgattggcatgatctttgtagaggtcctcatttatcttcaacaggcaaaattggaaagtattttaaacttactaaagtttctggtgcctattggagaggagactcaaaaaatgaaatgcttcaaagaatatatggtactagttgggcaacccaaaaagatttagatgaacatctaaaaagaatagaagaagcagaaaagagagatcatagaaaattaggaaaagaaatggatttatttcattttagagaagaaagtccaggatctgttttttggcacgaaagaggctgggcgttattccaaaatttaattaactatatgagaaatagacaggatgcagctggttacaaagaaataaatacacctgaagtattggatagacaattatgggaaaaatcaggacattgggggaaatatggtgacaacatgtatacatctgaaacaccagatgagaaggtatttgcgataaaaccaatgaattgcccaggacatgttcaggtatttaatcaagggctaaaaagttatcgagatcttccattgcgttacgcagagtttggaaaagttcatagatatgaaccatcaggagctttacatggcttacttagagtcagagcttttacgcaagacgatgcgcatattttttgttcggaggatcaaattacaagtgagtgtttaattgttactaatttaattttggatatttataaagatcttgggtttgaaaatgtaattctaaaatacgcagatagaccagaggtaagagttggagacgatgaagtttgggataaagcagaagcatcattacttgaagcagttaaagcctcaaaattagaatatagtatcaacaagggagaaggagcattctatggtcccaaaattgagtttgttctaagggatgcaattggaagagattggcaatgtggaactttgcaagttgatttaaatttaccagagagattaggtgcttcttatgttgataaagatggaagtaagaaaattcctgtaatgcttcatagagcactatttggatcgttagagagatttattggaattttaattgaaaactatgctggtaaatttccattctggatatcacctttacaaacaatagtaattcctatttcagatgagtttaataattatgctcttgagatatctaaaaaaattaaaaatgtaggtatcagctcatctgttgatttaaaaaatcaaaatttaaattataaaataagagatcattctttagctaaaatacctcttttgttaatttgtggtaaaaaagaagttgactccaattctgtaacgattagaaggttagattctgataaacaagaaaatatggatattgaaacattcttaaaaactttttctgctataaacaaagcatcttcaaactaa

SEQ ID NO: 303526 - DNA, 1267 bp, Unknown
  Bacterial polypeptide expressing nucleotide sequence isolated from the Sargasso Sea
gatgcctaacattaccctgccggatgatagcattcgcagttttgatgggtccgtagatggttttgaattagcttccgctattgggcctggattagcaaagtcagcaatgatgatgatagtagatgggaatgaaagggacttatcttttaagattgaacaagattgcaatgtggtaattataacgcggaaggatgcagttgctctggaccttattaggcatgattgtgcgcacgttatggcggaagcggtaacagaactgtatcccgaaacccaggtcacaattggcccggcgatagaaaatggtttttactatgacttttacagagaaaagccttttacggagggcgatctcgagaccatagaaacaaaaatgcatgaaatcatagatagaggagatccattcgagagagaggtatgggctcgtgatgaggcgatgtcgcactatgagaagatcaaagaacccttcaaagtcgagttgatagagggtattccagacgatgagccaatttctttctacagacagggcaactttttggatttatgccggggccctcatgcaccatcaacaaaacatgttggccacgcttttaaactaatgagcgtggcgggcgcttattggcgtggggactcgtcaaacccaatgctgcagcgaatttacggtacagcttggccagatgaaaaaaagttaaaggcctacctaaatatgttagaggaagcggaaaagcgcgatcatcgtcggttaggtagagaactcgacctttttcatatgcaagaagaggccgtgggttcgatattttggcatccacggggctggtcattatacagggaaatcgaagcgcacgtgcgccgaagacttgaggatggagattacaaggaggtaaagacaccgcagcttatagatcgatctctatgggaggcgtcgggtcattgggataaatttagagaaaatatgttcacggctgatagtgaagacgatcgaactcttgcgctcaagcctatgaattgccctggtcatgttcaaatttataaacaaggactaaaaagttatagagatctacctatcagaatggccgaattcggctcatgccatcgaaacgaaccatctggtgctctgcatggaataatgagagttagagcattcacacaagatgacgcgcatattttttgttctgaggatcagataacctccgaaagtattatcttttgcgatttattaagaaaaatatataaagatttcggttttgaagatgttcgtgtcaaattttcg

SEQ ID NO: 303527 - DNA, 801 bp, Unknown
  Bacterial polypeptide expressing nucleotide sequence isolated from the Sargasso Sea
aatgcctaatataactttacctgatggaaaaaaattagcttttaaagaaaaagtttcaggacttaaagttgcagaaaaaattagcaaatccctagctaaggaagctttagttataagtgtcgatggaaaattaaaagatttaagttatgaaattgaaaatgattgcgaagtaaaagttctaacatcaaaagataaagatgggcttgatactatcagacatgatacagcgcatattttagcaatggcagtccaagagctttttcctggaactcaagtgacaattggaccaactattgaagatggtttttattatgacttttccagaaaggaacctttcactgaggctgatttaaaaaagattgaaactaaaatgtcagaaattgttgatagagatgagcaaacttatagagaggtttgggatagggaagaggctatttcgcatttcaaaaaaattggtgagaactacaagtcagaaattattcaagatattcctaaaaatgaggagatatcaatatactttcatggaaaatggcatgatctttgtcgagggccgcatctatcatccactggtaaaattggtaagaattttaagttaacaaaagttgcaggcgcatattggaggggtgactcaaaaaatgaaatgctgcaaaggatctatggaacttcctgggcatcaaaaaaagatttagataattacattaaaagattagaggaagccgaaaaaagagatcacaggaaacttggtaaagaaatggacttattccattttagagaagaaagtccaggtgcagtattttggca

SEQ ID NO: 303528 - DNA, 1090 bp, Unknown
  Bacterial polypeptide expressing nucleotide sequence isolated from the Sargasso Sea
aatgccgataataacactacctgacggaaacaatattgattttcctaataaagttactggactggaagtagctgaaaaaattagtaagtcattagccaaacaagccatggttataagtgttgatggtgagcttaaagatcttgattttcaaattgaaaatgactgttctgtaaagatttttacctcaaaaaatcctgagggcttggaaactataagacatgacacagctcatattttagctatggctgtccaagaattgtttcctggcacacaggtaacaattggacctgtgatagagaatggattttattacgactttgctagaaaagaaccatttacagaggatgatctagtcaaaattgaaaataaaatgaaagagattgttgataggaatgaaaaaacaaaaagagaagtttgggatagaaataaagcaattagccattttaaaaaaaaaggagaaatttataaagctgagcttattgaagcgatacctgaaaacgaagatgtatcaatttattttcacggagaatggcatgatttatgtagaggtccacatctttcctctacaggtaaaataggaaaatattttaaacttacaaaagtgtcaggagcatattggagaggagactcgaataatgaaatgttgcaacgaatatatggtacgagttgggcaactcaaaaagatcttgatgagtatttaaaaagaatagaagaagcggaaaaaagagatcatagaaaattaggtagagaaatggatttatttcattttagagaagaaagtcctggctcagtattttggcatgaaagaggatggggtttatttcaaaagctcgttaactatatgagaagtagacaagatgctgctggttataaagaggtaaatactccagaggtactagatagacaactttgggaaaaatctggacattgggaaaaatatggagaaaacatgtatacttctgaaacaccagatgagaaagtttttgcaattaaaccgatgaattgccctggtcatattcaggtatttaatcaaggcttaaaaagttacagagatcttccattacgttttgcagaattgggaaagttcatc

SEQ ID NO: 303529 - DNA, 1330 bp, Unknown
  Bacterial polypeptide expressing nucleotide sequence isolated from the Sargasso Sea
atgggaaatattgtagttaatttaccagacggaagtggaaaagatcttccaaaggatagtaatggaaatgatttagctgctttaattggcccaagattagccaaagatgctgtagcaatgtcaattaatggtgaacaaagagatttatctgatactttagctgatggcgataatgtatcaattattactataaaaagtgatgaagggctcgagatcatgaggcacacacttactgcacaggttctagcacaggctgtaaaaaatatttatccaacatcaaaattggcaattggacccactattgaagatggtttttattatgattttctttttgaaaaaccaatatcatctgaagaactaccaaagatagaagaagaaatgagaaaaataatctcaaataagagcgaaattaataaaaccttacatgataaaaaagatgctatatctaaattcaaaaacttagacgaaggctttaaagcatcaattattgaggaagctgatcaaaagaaagattttcagatatatgagcaaaaagaaactggttttattgatttatgtcgtggcccgcatcttccatcattggaatatattggagaatttaagcttacaaaaatctcgggagcatattggaaaggtaattctgaaaatgagatgctcacaagaatatatggaactgcctggagaacaaaaaaggaacttgattcctacattgaaaaaatgcaaaaagctgaagaggttgaccatagaaagctaggtaaagaaatggatttatttcattttcaagaagaagctccggggatggttttttggcatccaaaaggatggagtatttatacacaattgcagtattacgtaaggaaaatgcaaaaaaacgctggatatagtgaagtgaatactcctgaggtagttgatagaaaattatgggagaaatctggtcactgggatcaatatagagaaaatatgttcataactgaaattgatgaagagcacgccaatgaaaaacgtactaatgctttaaaacctatgaactgccctaatcatgttcagatttataatcaagatattcgctcttatcgtgatcttccttttaggctttgtgaatttggtaaatgtcatagatatgaaccatcaggtactatgcatggtttgatgcgtgtaagaggttttgctcaagatgatgcacatatattctgtacagaggatcaaattgaaagtgaaacagcaaacttcattgctttactatcaaaaatgtacagtgacttaggttttaatgaattcaaaataaagttatctactagacctgagaaaagagttggcagtgatgccagct

SEQ ID NO: 303530 - DNA, 562 bp, Unknown
  Bacterial polypeptide expressing nucleotide sequence isolated from the Sargasso Sea
tttgaatttcccaaacaaagttacgggtttagatgtagctgaaaaaattagtaaatcacttgctaaacaagcaatggttattagtgtcaatggtgaattaaaagacttagatcatataattgaaaatgattgttctattaaaatattcacatcaaaaaatccagaaggattagagactataagacatgatacagctcatatattagcaatggcagttcaagaattatttccaggaactcaggtaactattgggcctgttatagaaaacggtttttattatgattttgcaagaaaagagtcttttacagaagatgatttaattaaaattgaaaataagatgaaagaaattgttgatagagacgaaattactaaaagagaagtttgggaaagaaataaagcaattgctcattttaagaaaaaaggtgaaatttataaagcagaattaatagaggctattcctgaaaatgaagatgtatcaatatattttcatggtgagtggcatgatctttgtagaggaccacatctttcttctactggcaaaattggaaaatatttaagctaa

SEQ ID NO: 303531 - DNA, 1087 bp, Unknown
  Bacterial polypeptide expressing nucleotide sequence isolated from the Sargasso Sea
tatgccttcaataaaacttccagataattccacaagaaattttgacaatcctttaagtgttgaggatattgctaaagatatcggtacaggccttgcaaaagctgcagttgcaggaaaaattgacggtaaattagttgacgggtcagaaatcattgctgacgattgcagcttagaaatcataacaataaaagatgatgaaggccttgaaatagtcagacactcatgtgctcatttgttggctcatgcccttaaacagctttatccaaatgcccaaatggcaataggcccagtaattagagacgggttttattacgatatcaaacttgataaaaatctttcagatgaagacttagaggctatagagaagagaatgaaaaagctggctaagactaaatacgacgttaggagagaagtagtatcacaaaaaaaagctatcaagactttcaaagagagaaatgaaccttataaagtaaaccttgcagaagaaatacctgatgatgaagtaatagcgctatatcaccatgaagaatatatagatatgtgcagaggaccacatgttaccaatatgagacatcttcaagcttttaagctcacgaaagtatcaggcgcttattggaggggagactcaaaaaatgaaatgcttcaaagaatatatggaacagcttggcctaattcaaaagatttggagaattatatcctccaacaggaagaagcggaaaagagagaccataggaaattaggaagacaactagatttatttcattttcaagaagaagcacccggtatggttttttggcatccaaaggggtggtctatttattcagcgttaaaaacctttatacaatccaaacaagccgaatacgattatcaagaaattaatactcctcagatagttgatagaaagttatgggaagcttccggacattgggataaataccgagaaaatatgtttatcacagaaattgatgaagaacatgcgaatgagaaaagaacaaatgctcttaaaccaatgaattgtccttgccatgttcaggtatttaatcagggactgaggtcctataaagatctaccaataagatatgccgag

SEQ ID NO: 303532 - DNA, 1378 bp, Unknown
  Bacterial polypeptide expressing nucleotide sequence isolated from the Sargasso Sea
atggaaattaatttaccggatggatcagtaaaggaacttgaaaagggttcaaatggcctagatcttgctaaatcaataggcgcaggacttgctaaaagtgctgttgcagttgtcgtgaatggtgagcagagagatctcctagacgaacttcctgataaatcttcagtctctatcattactatccaatctgacgagggtttagagataatgagacacacattgacagcccaagttcttgcaaaagctataaagaatttatattcagattctagattggctattgggcctacaattgaaaacggcttttactatgacgtttctactgaaacacctatatcggttgaagatcttccaaaaatagagaatgaaatgaaaaggatattagaaaataagtctaatattgttaaatcacttcactccgaaaaagatgcaaaaaaaatgtttaaagaaaaaggagagactctcaagatagaaattatagatgatgcagaacagactgataattttcagatttatacaaatgctgatgaagattttattgatttatgcagaggacctcatttaccaaatctttcttttattggagcatttaaacttactaaagtctctggagcatactggaagggagattctacaaatgaaatgcttacaagaatttatggaactgcatggagaaatgaaaaagagcttcaagaacatctaaaatctattgaggaagctgaaaaaagagaccatagaaagattggaaaagatatggatcttttccattttcaagatgaagctccaggtatggttttctggcatccaaaaggttggactatttattcaactttaaaatcttatatgtcagatatgcaaaagaaagctgattataaagaaattaatactccatcagtgatagataggaagctttgggaaaaatcaggacattgggataaatatagagaaaacatgtttatcactgagatcgatgaggagcatgcaaacgagaaaagagtaaatgctttgaaacccatgaattgccccggacatgttcaagtttataaccaaggcataagatcatataaagaactaccatttaggttatgtgaatttggttcatgtcatcgatatgaagcatcggggactatgcatggactaatgagagttaggggattcacacaagatgatgggcatatttttcttacagaggatcaaatcgagtcggaaacagctatctttatagatttattatcaaaggtctatgctgaccttggatttaaccaatttgaaattaagttatcaacacgcccagaacaaagagtcggatctgatgagatttgggacaaggctgaattatctttaaaaaatgcaatcgaaaaacttggattggaataca

SEQ ID NO: 303533 - DNA, 685 bp, Unknown
  Bacterial polypeptide expressing nucleotide sequence isolated from the Sargasso Sea
gttgtatgtgccgccgccggtcggcaccacggagaacacaatggtttcgatacgtctgcccgacggttctgttcgacagtacgagcatccggtgaccgtcgccgaagtggccgcctcaatcggccccggcctcgcgaaggccgcgctcggcggcaagatcgacggtgaactcgtcgacacgtccacgctgatcgatcacgacgtggcgcttgccatcgtcaccgaaaaagacgcagacggcctcgatatcattcgccactccacggcgcacttgctcgcgtacgcggtgaaggatctgttcccggaagcccaggtcacgatcggcccggtgatcgacaacggcttttactacgacttttcctaccaccgtcccttcacgcctgaagatctcgagaagatcgaaaagcgcatgcaggaactggcgaagaaagacgagccggtctcgcgccgcgtggtgtcgcgcgacgaagcggtggactacttcaaaagcatcggcgagaagtacaaggccgaaatcatcgaatcgattccggctaccgacgaaatcaagctctactcgcacggcagcttcaccgatctgtgccgtggcccgcacgtgccgtccaccggcaagctgaaggtgttcaagatgatgaagctggccggcgcctactggcgcggcgattcgaagaacgagcagtgcagc

SEQ ID NO: 303534 - DNA, 1892 bp, Unknown
  Bacterial polypeptide expressing nucleotide sequence isolated from the Sargasso Sea
tatgcctgaaattacgcttccagataaatccaaaagaaaatttgaagaatcaatctccatagaagatgtagctaaagatattggaccgtctttagcaaaagcaacagtagctggaaagattaatggcgttcttgttgatgcgtcggagctaattgaagaagactcaactgtagaaataattacttctaaggatgaagaaggaattgaagttgtaagacattcttgtgctcatttattagcgcatgcaatgaaacaactttatcctgaggttaagttagcaataggaccagtaattaatcacggtttttattatgatgttctgttagataagtctttaagtgatgatgatctacaagcaatagaagatcgtatgctcaaactagcaaaaactgattataacgttatcagggaagtggtatctagaaagaaagctattaaaactttcaaagaaagagatgaaccttataaagtagctttagctgaagaaatacctgatgaggagataattgctttatatcatcatgaggaatatacggatatgtgtagagggcctcatgtaacaaacacgaaacacttaagggctttcaagttaacaaaagtctcaggtgcttattggcgtggcgattcccaaaacgaaatgctgcaaagaatttatggaactgcctggccaagtcctaaagagttaaaaaaacatctagttcagcttgaagaggctgaaaaaagggaccatagaagattaggtagacaacttgatctttttcattttcaagaagaagctcctgggatggtattttggcatcccaaaggttggactatatatagagtcttggaagactttatgaggaccaaacaaatagaatcagactacgatgagattaatactcctgaagtcgtagatagaaaactttgggaggagtcaggtcattgggataaatatagagagaatatgtttattactgaaattgatgaggaacatgcaaatgaaaagagaacaaatgctctaaagccaatgaactgtccatgtcacgttcaggtctacaatcaaggattaaagtcctatagagatttacctgtccgttttgcagagtttggatcgtgccatagatacgaagcttctggaaccttgcatgggttgatgagggttagagcttttacacaagatgatggccatattttttgcaccgaagaacaaattaaagaggagactaaaagtttcattgaactcttatctctaatttattctgaattaggttttaaggaatttgaaattaaactttcgactagaccagaagtgcgagttggttcagatgaagtttgggataaagctgaactagccttaaaagaggcaataaataaccttgatttgaaatacgaaatttcagaaggggaaggagccttttatggtccaaagctggattttgttttaaacgatgctttggatagagaatggcaatgtggaacttttcaagctgattttattcttccagagcgtctaggttcaacatatataggagatgatggagaaaaacatcaacccatcatgatccatagagctatcttaggctcttttgaaagatttattggtattttaatagagcatcatggaggagctttacctgtttggctgtctccagtccaagcacaaatccttaatattactgacaaacatagtcaatatagtgaaaaaatacgtgatttattacaaaaaaatggatttagggcacaaagtgacttgaggaaagagaagatcacttataaaattcgcgaccactctatgcaaaagacaccttttcttttagttgtaggagataaggaaatgaaaaatgatactgtttcagttagagctaggggtggtgaggacttgggtgatatgtctatgaaagaatttatgg

SEQ ID NO: 303535 - DNA, 1942 bp, Unknown
  Bacterial polypeptide expressing nucleotide sequence isolated from the Sargasso Sea
tatgattgaaataacttttccagacggagccgtaaaagaatataaaaagggtataacacctattgaaattgctagaagcattagtaattccctagccaaaaaccttttgtcagtatcattcaataaaaaacaaattgaatcaacttcaatattagaaggaagtggtagcattgaatttcacttttgggaagatctgaaaggtaaaagtgctttttggcattcatcagctcatttatttgctcaaatagttaaagaattatatccaaaatcaaagttgacgataggaccaccaatagaaaatggattttattatgatatagatttaggggatcaaacaatctcagaaaatgattttgaaaaaattgaaaagagaataatagaagaagctagaaaagatcataaattttcaattagagaatcgtcaaaggaagatgcaataaacttttacaaaaataataacaatgaatataaaattgaattaattgaaaatttgggtgatgaaaaaattacgttctgtgatcatgcaaatttttcagacctgtgtaaaggaggacatattccatcaactggtcacataaaagcagtaaaacttcttaatgttgctggtgcgtattggagaggtgacgaaaataataaacaacttactagagtttatggaatttcatttccaaaacagaaattacttaatgagcatcttgagcttatagaagaagcaaaaaaaagagatcatagagttcttggaaaaaaactaaaactttttacattttctcaacaagttggacttggtcttccattatggctaccaaagggtgcggaacttagaaaaagattagaggattttttaacaaaagcacaaaaagctgcaggttatgatatggttgttagtcctcacattggaaataagaaactttacgaaacatctggacattttcaaaaatatggtgaaagtagttttatgccaataaaatcacctagctcagatgaagaattcctgcttaaaccaatgaattgccctcaccattgtgaaatttacaaatctgaacaatggagttacaaagatttaccaattcgttatgctgaattcggaacagtttacagatacgaacaaagtggtgaattacacgggttaactagagttagaggatttacacaagatgatgctcatatattctgctcacaagatcaattagttgaagaatttgagaaggtaattgatttggttctttatgtttttaatactctaggttttgataattatgaagttcaaatttcactaaaagataaaaatgatgatgaaaaatatattgggagtgctgaaatgtgggatcttgcagagaatgcaattgtaaaagcaacaacagctaaaaaattaaattatacaattgaatatggggaagctgccttctatggacctaaacttgattttatggttaaagatgctcttaatagaaaatggcaactagggacaatacaggttgactacaatttaccggaaagatttgatttaaaatttaaaaataaaaacaatcaagatgaaagaccagtcatgatccacagagcaccatttggtagtcttgagaggtttgtagcaatattaatcgaacatactggtggtgtttttccaatgtggttaacatcaaatcaaattgttttaattagcgttggtgaaaaacatgaaaaatttgctaaaaaagtttcaagtttattagaaaaagctgaaattcgtgcaactttagacaataggaacgaaactgttggtaaaaagataagggaaagtgaacaaaacaaagtaccatacatgggtataattggtgacaaagaagtatctagtaatagtgtatcaattcgtggacttggtggtgatgaggttggtgagatgaatattgatgaattgattaactttataaaaaacgaggaaaagaaatctttaattaataactaa

SEQ ID NO: 303536 - DNA, 1618 bp, Unknown
  Bacterial polypeptide expressing nucleotide sequence isolated from the Sargasso Sea
atgcctacaataacattaccagatggaaacagtattgatttccctaataaagttactgggatagaagtagcagaaaaaattagtaaatcattagccaaacaagcacttataattagtgtagatggtgaacttaaagatttatattttgaaataaataaagacagcgctgttaaaatttttacttcaaaagaccctgaaggattagaggttattagacatgatacagcacatataatggctatggctgttcaagaattatatccaggcactcaagtaacaattggaccagttatagaaaatggattttattatgattttgccagaaaggaaccattcacaactgatgatcttaaaaagattgaaaaaagaatgtctgaaataattgacaaagatgttaaaacaagaagagaagtttgggaaagagaaaaagcaattagtcattttacgaagattggtgaaaaatataaagctgaaataattgaaagtattccgggaaatgaagaactttctgtttatcatcatggcgaaacttggcacgatttatgcaggggtcctcatttagtgtcatctggaaaaattggtaaagcatttaaattaatgaaagtttcaggtgcatattggagaggagattcaaataatgaaatgcttcaaagaatttacggaactagttgggcaaatcaaaaagaactagaagattatttgaaaagaattgaagaagctgaaaaaagagatcatagaaaacttggaaaagaaatgaatctatttcattttagagaagaaagtcctggatcagtattttggcatgaaaagggatgggccctatttcagaaattaattaactatatgagaagcagacaagatgctgccggttatagagaggtaaatacaccagaaatattagatagacaactatgggaaaaatctgggcattgggaaaaatatggagaaaatatgtatacttcagaaactcctgatgaaaaagtatttgcaattaaaccaatgaattgtcctgggcatattcaagtatttaatcaagggttaaaaagttatagagatcttcctttacgtattgcagaatttggaaaagtacatcggtatgaaccatctggagccttacatggattattaagggtaagagcattcactcaagatgatgctcatatattttgttctgaagatcaaattactagtgaatgtttagaggtaactaatttaattttagatatttataaagatcttggttttgaaaatgtaattcttaaatacgctgatagaccagaggtaagagttggagatgataaaatttgggataaagcagaggcttctttgcttgaagcagtaaaagcatccaagttagaatatagtattaataagggtgagggagcattttatggtccaaaaattgaatttgttttaagagatgcaatcggtagagattggcaatgtggaacattacaggttgatttaaacttacctggaagattggaagcatcatatgttgataaagatggaattaaaaaagttcctgttatgcttcatagagcgttatttggttctttagagagatttgttggaattctaattgaaaactacgcaggcaagtttcctttctggatat

SEQ ID NO: 303537 - DNA, 922 bp, Unknown
  Bacterial polypeptide expressing nucleotide sequence isolated from the Sargasso Sea
atgcctaatataactctgcctgatggaaaaaaattaaactttaaaaaaagtgtaacaggatcagaaattgcagaaaaaattagcaaatctttagcaaagcaagctttaattatgagtgtaaacggtgagttaaaagatttatattcaataatagacaaagatagttctgttaaaatttttacttcaaaagatcctgagggattagaagttattaggcatgatactgcacacataatggctatggctgttcaagaattatatccaggtacacaagtaactattgggccagtaatagaaaatggattttattacgattttgcaagaaaagagccttttactagcgatgatcttaaaaatattgaaaaaagaatgtccgagataattgataaggatgtaaaaacaagaagagaagtttggaaaagagatgaagctattaaccatttcaaaaaaattggtgaaaaatataaagcagaaataattgaaggtattccagaaaatgaattgcttaccatttatcatcacggagatacttggcatgatttatgcagaggtcctcatttagtttcctctggtaaaattggaaaagcttttaaattaacaaaagtatcaggagcttattggcgtggagattctaataatgaaatgttgcaaagaatttatggtactggatgggctaatcaaaaagatctagatgtatatcttcaaagaatagaggaggcagaaaaaagagatcatagaaaaattggaaaagagatggacctatttcattttagagaggaaagtcctggatctgtattttggcatcaaaaaggatggaatttatttcaaaaacttatttcctatatgagaatgaagcaagaaaatgcaggatatcaagaaattaacactccagaaaatattagatcgatcacttgggagaaat

SEQ ID NO: 303538 - DNA, 1348 bp, Unknown
  Bacterial polypeptide expressing nucleotide sequence isolated from the Sargasso Sea
atggcaaatatcacactaccggatggtaagacaataaaatttgataaacctgtaactggttctgaggttgctgaaaacataagtaaatctctggcaaagcaagctttagtaatgagtgtgaatggagaactaagagatttatattatactattaaggaggatagttctgtaaaaatttttacagcaaaggatcctgagggtttagaagtaatcagacatgatactgctcatataatggctatggctgttcaagaactatatccaggaacacaggtaactattggtccagtaattgaaaatggtttttactatgattttgctagaaaggaaccttttacaagtgaagatttgaataaaattgaaaaaagaatgtcagaaatagttgacaaaaatgtgaaaacaaaaagagaagtctgggcaagagaaaaagcaattaatcattttaaaaaaattggcgaaaaatataaagccgaaataattgagagcatacctgaaaatgaagaacttacaatttatcatcatggtgatagctggcatgatttatgtagaggcccacacttagaatcttctggtaaaattggaaaagcttttaaattgacaaaagtttcaggagcatattggcgtggcgactcaaaaaatgaaatgcttcaaaggatatatggtactggttgggccaatcaaaaagacctagatacttatctaaaaagaattgaagaagccgaaaaaagagatcatagaaagcttggaaaagaaatggatcttttccatttccgagaggaaagtcctggttcagttttttggcatgaaaaaggctggagtttatttcaaaagcttgtgaattatatgagggatagacagagaaaagctggatacaaagagataaatacaccagaaattttagatagatctttatgggaaaaatctggccactgggacaaatttggagaacatatgtatacttcaaagactccagacgaaaaagtatttgcaattaaaccaatgaattgccctggatgtgttcaagtttttaatcaaggattaaagagttatagagatttaccattaaaaatgtctgagtttggcaaagttcataggtatgaaccttcaggagctttacatggactaatgagagttagagcatttacacaagatgatgcgcatattttttgtaccgaggaacaaattacagaagagtctttgactgtaactaatttaatattagatatttataaagatttgggatttaaaaatgtaatattaaaatattcagatagacccgaggtaagagttggagatgataaagtgtgggataaatctgaggcagcattgctagaagctgtgaaagcaa

SEQ ID NO: 303539 - DNA, 739 bp, Unknown
  Bacterial polypeptide expressing nucleotide sequence isolated from the Sargasso Sea
atgctcatattttttgtactgaagatcaaatcactaagcgaaagtaaaaaagtgtgtgatttaatattgagtatttacgaagattttggatttaaaaatgtacgaataaaatattcagacagaccagaaaaaagagtgggcgacgattctgtatgggacaaatctgaaaaagcactgaaaaatgctatggaggcaactggattagattactctttaaatcctggggaaggggcattttatggaccaaaactagaatttgttcttcgtgatgctataggacgggattggcaatgtggaacattacaggtagatttgaatttacctggacgattaggtgccacatttattgatgaagatggacagaaaaaaactcctgttatgctccaccgtgcactttttggttccttagagagatttactggcattttgatagaacattatgcaggacatttaccagtatggctctcaccagttcaggtaactgttgcaacgattacatccgatacagatgattatggatacgaagttcttaaaaaattaaaatcaagtggaatacgtgctgaaattgatgttcgtaatgaaaaaattggatataaaattagagaacatagcaatttaaaagttcccgcaattttagcaattggaaaaaaagaggctgaagaagatacggtttctgttcgaagactgggcagtcaaaatacaaaagtatataaattggatgattttataaaatcttaaa

SEQ ID NO: 303540 - DNA, 1372 bp, Unknown
  Bacterial polypeptide expressing nucleotide sequence isolated from the Sargasso Sea
cttcagaagatctaataaaaatgaaaagaaaatgtctgagataatagatcgagacgttaagactagtagagaagtttgggaaagagataaggcagtaaaacatttaaaaaaaattggagaaaaatataaggcagagataatagagagcatacctaaaagtgaggaactttcagtttatcatcatggtgatacttggcacgatttatgtagaggaccacatttagcatcgtcgggaaaaattggtaaagccttcaaattgactaaagtttcaggtgcttattggagaggtgactcaaataatgaaatgctgcaaagaatttatggaacatgttggaaaaataaagatcaactaaaattatatctagatagacttgaagaggctgaaaaaagagaccatagaaaattaggtaaagaaatggacttatttcattttagagaagagagtccaggctcagtattctggcacgaaaagggatggatattatttcaaagacttgttgagtatatgagatttcgacaaagacttgatggctataaagaaataaatacacccgagctattagataagactctatgggaaaaatctggtcattgggaaaaattttctgagcacatgtttacttctgaaactcctgacgaaaaagtttttgctataaaaccaatgaattgcccaggatgtgttcaaatatttaatcaaggtttaaagagttatcgcgatctaccactaaaactttctgaatttggaaaggtacacagatatgaaccttcgggtgcattacatggattactacgagtcagagcttttacccaagatgacgctcatatattttgtacagaagatcaaatcacagaagagtgtttaagtgtcactaatttgataatagatatttataaaaatcttggatttgaaaaagtaatattaaaatattctgatcgaccagaaaaaagagttggtgatgataaaatatgggataagtcagaagctgcattattaacagcaattaaaaagtcaaaacttgagtatacaattaacaaaggagaaggcgccttttatggtccaaaaattgaatttgtcttacaagatgcaattggaagagattggcaatgcggaacacttcaagttgattttaacttacctggtagattaggcgcttcttatgttaataaatctggagagaaacaagttccagttatgttacacagagctttatttggttctttggaaaggtttattggcattttaattgaaaattacgctggcaaacttcctttttggctatcaccatcacaagctgtagtatgtcctatagcagaagacaataatatttatgcaaaaaaattatttgaagatctttttaaagagagtataaaa

SEQ ID NO: 303541 - DNA, 1088 bp, Unknown
  Bacterial polypeptide expressing nucleotide sequence isolated from the Sargasso Sea
tatgaaattaacattgccagataaatctgttaaagaactgccaaaaggtgtgacaggtcttgatgttgctatgtctattggtcctgggctcgctaagagtgcaattgccgtcaatattgacggagaacagaaggatttaagtgatccaataaatgctgattgttcattatcggttatcacgctggattcagacgaagggcttgaaatcatgcgacatacaacagctgctcaagtgctcgcattggcaattaagagcatttatcctgactcaaaattggcaattggaccaactattgaaaatggcttttactatgattttcatacagaggattctatatctacagaagatcttcctcgaatagaagaagaaatgagaaaaattattaaagagaaatcagaaattgggaagtcgtttcatgacaagaaatctgccatcgatcaattcaaaaaattatcagaagactataaggtaaaaattattgaagaatcagatcaagcagaggattttcaaatttacaaaaatgagaagagtgaatttattgatctttgcagaggacctcatcttccaaacttatctcatattggggcttttaaactaacaaaggtttctggcgcatactggaaaggcgattcaagtaatgaaatgcttacaagaatctacggtactgcgtggcggaataaaaaagaactagatcagtacctggttcagcttgaggaagccgaaaaaagagatcatcgaaggatcggaaaggatctcgatttgtttagtatccaagaagatgcagggggcgggcttgttttctggcatccaaatggatctagaattagaagtgaaatagagaattactggaaaaatgaacacgagaaagcaggctatgagctgttatatactcctcacatcgctctcgatacactctggcaaacctctggtcacacagacttttatgaagaatcaatgtacacaccgatagatgacgagaatcaatcctatcgcttgaaaccaatgaactgtccatttcatgttctgatatataaagataaattaaggtcttacagggaatttccaatcagatgggctgagttaggaa

SEQ ID NO: 303542 - DNA, 1948 bp, Unknown
  Bacterial polypeptide expressing nucleotide sequence isolated from the Sargasso Sea
aatgggaaatattgtaattaagcttccagatggttctagcaaagaactgccagctaacagtaatggcttagatttagctaattcaattggccctaaactagctaaggattcagttgctgtggttgtaaatggctcacaaagagacttaagcgatattttgccggataaagctgatgtttccataattacaaaagattctgatgaaggtattgaaataatgcgtcataccttgtctgcacaggtgttagctttagctgtcaaaaatctatatccaagtgcaaagttagcaattggaccaactatagatgatggtttttattatgatttttttatggataaacctatatcttctgatgatttgcccaagatcgaagatgaaatgaataaaataattaaatcaaaatctaaaattactaagtcttaccattcaaaaaaagaagctctaaaagtttttgatgatttagatgaagggtttaaagcagaaataatcaatgactctgatcaaaaagataactttcaactatatacacaagatgaaacaggatttattgatctttgtagagggccacaccttcctaatataggtatgtgtggtgaatttaaacttacaaaagttgcaggagcatattggagaggtgattcaacaaaaccaatgcttacaagaatctatgggactgcctggcaaacaaaaaaagaacttagcttatatctagaaagactagaaaaagcagaggaagttgatcatagaagattaggaaaagagatggatcttttccactttcaagatgaagctccgggaatggttttttggcatccaaaaggatggactatttatactcatcttcaatattacgtaagagaaatgcaaaaaaaagctggatataaagaagttaatactcctgaagtagttgatagaaaactctgggaaacttcaggtcactgggaacaatatagagaaaatatgtttattactgaaatagatgatgaacatgcaaatgaaaagcgtaccaatgcattaaaaccaatgaattgtcctaatcatgtacaaatttataaccagggtattaaatcttacagagatctaccttttagactatctgaatttggtaaatgtcacagatatgaagcatcaggcactatgcatggattaatgagagtaagaggttttgctcaggatgatggtcatattttttgtacggaagatcaaatagaaagcgagacaaaaaactttatagaccttctttcaagcatgtataaagatcttggttttactgattttaagattaaattatcgacaaggcctgataaaagaattggtacagatgaaagttgggataaagcagaaaaggctcttcaagatgggattgaaaaattaaaacttgaatacactattgatgaaggtgatggagcattttatggtccaaaacttgattttgtacttactgatgcaattgcaagaaaatggcaatgtggaacattgcaggttgattttaatttacctggcagatttgattctacatttataggtgaggatggaaccaaacatacacctgtgttattgcatagagctgctcttggttcttttgaacgatttataggaattttattagaaaactatggtggaaaattaccagtatggttagcgcccacacaaacagtaatagctgcaataacagatgaagcaaatgattatgctgtatctctaaataagaaactactagaaaatggaattagatcagaacttgatatcagaaatgagcagattagttataaagtaagagaacatagtcttcaaaaagttccatatattattgcagttggaaagaaagaagttgaaggtaaatcagtttcagtaagaagacttggtagtgaaaaaactgagtctgtactattagatgattttgttaaatcagttatacaagaggctaaaacacctctagaaaaataa

SEQ ID NO: 303543 - DNA, 1472 bp, Unknown
  Bacterial polypeptide expressing nucleotide sequence isolated from the Sargasso Sea
gttgatggagaattaaaagacttaaatcatagtatttacaaagactcttcaattaagatatttacatcaaaagataaagaagggttagagactataagacatgatactgctcacatactcgctatggcagttcaagaattatttccggggacacaagttacaataggaccagttattgaagatggcttttattacgattttgcaagaaaagaaccttttacaacagaagatttagaaaaaattgaaaacaaaatgaaagaaatagtagatcgagatgaaaaaacttacagagaggtttggaaaagaaatgatgccatcgaacattttaaaaaaaagggagaaatgtataaagctgagataatagaaagtattccagaaggtgaagatgtgtccttatattttcatggagattggcacgatttatgcagaggccctcatttaagttcaactggcaaaattggcaaatattttaaattaacaaaagtctcaggtgcttattggagaggcgattctaataatgaaatgttgcaaagagtctacggaacaagttggtctacgcaaaaagagttagatgattatttaaatagaatagaagaagccgaaaaaagagatcacagaaaaattggtaaagaaatggatttgttccatttcagagaagaaagtcccggatctgtattttggcatcaaaaaggttggagtttattccaaaaacttatttcatatatgagaatgaaacaagaaacagcagggtatcaagaaataaatactccagaaatattagatcgctcactgtgggagaaatctggtcattgggaaaaatttggagccaatatgtatacttctactacacctgatgaaaaagtatttgcaataaaaccaatgaattgtccaggttgcgttcaagtttttaatcaaggtttaaaaagttatcgagatttaccacttaaaatgtcagaatttggaaaggttcataggtatgaaccatcaggtgcacttcatggattattgcgagttagagctttcactcaagatgatgcacatattttttgcaccgaggaacaaattactgaagaatgtttaactgtaactaatttaattttggaaatttataaagatttaggatttgaagaagtaattttaaaatattctgatagaccagaattaagagttggtgacgatcaggtttgggataaatcagaagctgctttattagaagcaattaaagcatcaaaattagaatattctattaataagggcgaaggagctttttatggtccaaaaatagaatttgttttaagagatgcgattggaagagattggcaatgtggaactttacaagtagatttaaacttaccagatagattaggagcctcatttgttgatagcgatggaaataaaaaagttcccgttatgcttcaccgagctttatttggatcattagagcggtttattggaatttttattgaaaatat

SEQ ID NO: 303544 - DNA, 1078 bp, Unknown
  Bacterial polypeptide expressing nucleotide sequence isolated from the Sargasso Sea
atggaaacaaaaaatctagaagcatatagacacaacttaaggcattcagccgctcatttattggctgaggctgtactaaagttatacccaaatgccaaaatcacactagggcctccaatcacagatggtttttattacgatttcgatatagatattacattctcacctcaagatcttattgccattgaaagagaaatgaaaagatcagtgaaaagaaactctaagtttgaatgcaatgaactttctagggaagaagctttggacgtatacaaagataatccttacaaaatagaaataataaaatcaatgcctgaagaagaaataatcactgagtacagccattctgatggtaagtttagagatttatgtaggggtgggcatattgaaaaaacaggagaaataaaagcattaaagctattatcgacagcaggagcatactggagaggtgatgaaaacaataaaatgcttcaaagaatatatggtacagcttgggaaagtgaggagcttcaaaaagattatctagataaaagacagaaggctatagaaagcgaccacagaaaattaggtacgtctttagatctgttttttttagaccctattagcccagcaaatccttttttcttaccaaacggagcatttatttataataaattaattgaatttgttcgaaatttatatgacaaatatggttatcaagaagtcataactccacaacttttttcaactgacctttggaaaacttcagggcattacgatttttacttagataatatgtatatgatggaaatcgatgaaaatgaagttggggttaaaccaatgaattgtcccgcacatgccgttatttacaaatccacacttaggtcttacagagacctacctttaagattagctgattttggaagacttcacagatacgaaagatctggagttacccacggtttaactagagttcgatccttttctcaggacgatgcacatatcttttgctctacaaaagatgctggtattgaaataaaaagttttcttgaaatgttaagagaaagttattcagcatttggatttaataaacccaagaatg

SEQ ID NO: 303545 - DNA, 858 bp, Unknown
  Bacterial polypeptide expressing nucleotide sequence isolated from the Sargasso Sea
tgaaaatgtctgaatttggtaaagtgcatagatatgaaccttccggagcccttcatggattgttaagagtaagagcttttactcaagatgatgctcatattttttgtacagaagaccaaattactgaagaatgcttatcagttacaaatttaattttggaaatttataaagaccttggatttgaaaatgtaattttaaaatactctgatagaccagaaattagagttggtgaagacggggtatgggacaaagcagaagcggctcttttagaagctgtaaaagcatcaaaacttgaatatacaataaataaaggcgaaggagctttctatgggccaaaaattgaatttgtattaagagatgcaattggaagagattggcaatgtggaactttgcaggttgatctaaatttaccaggaagacttggtgctacatttgtagataaagatggtagcaaaaaagttcctgttatgcttcatagagcattatttggatctcttgaaagatttataggcatacttatagaacattattctggaaaacttccattttggattgccccattacaggcaatggttattcctgtgtcagatgattttaatcattatgcaatagaagttagaaaaaaaattaaagatgttggcattaattgcgaggcagacttaaaaaatcacaatttgaattataaaattagagaacattcaatgctaaaaacgccgcttttattgatttgtggtaaaaaagaagttgacagtagtacagtaactattagaagattggattctaataaacaagaaagcatggaactaagtaaatttctaaaaaagtttgcctctttaaataaagcacctttaaattaag

SEQ ID NO: 303546 - DNA, 1942 bp, Unknown
  Bacterial polypeptide expressing nucleotide sequence isolated from the Sargasso Sea
atggaaattaaattaccagatggttcttcaaggcaactcccagatggtgctaatgcatttgatcttgcaaaggatattggaaaaaatcttgccaagagtgcagttgctgcatggataaatggttcgcagaaggatttattagacccattgcctgacaaggcagaggtttctattatcacaattgattcagaagatggtcttgaaattatgcgacatacggttgctgcacaggttttagctgctgcagtgaaagaattatacccatctgcaaaactcgctattggccccaccattgaaaatggcttctactacgacgttttatttgaggatccaatttcatcagaggacttgcaagctattcaaaataaaatgttagatattgttgctaaaggatcattagtaaagaaaacactgcattcaaagtcagaagcaaacaaactttttgccaatttagatgaaacttacaagcaacagatcatcaaggatgcagaccaagatgatgactttcaaatctatacgaatgatgattcaaatttcatagacctttgcaaaggaccacatttacctaacttaggtttcgtaggggcttttaagctaactaaagtttctggtgcttattggcgtggagatgcaaaaaatgaaatgttgactcgaatttatggaacagcctggcgaaatcaaaaggagcaggatgtataccttgcaaacttagaggaagcagaaaaacgcgatcatagaaggataggaaaagatatggatctttttcattttcaagatgaagcaccaggaatggttttttggcatccaaaagggtggacaatttattcagcattaaagtcatatatgtctgacatgcaaaagaaatctaattataaagaaataaataccccttcagttattgatagaaagctatgggaaaaatctggtcattgggataagtatagagaaaatatgttcatcactgagatcgatgaagagcacgcaaatgaaaaaagagttaatgcactaaagcctatgaattgtcctggacatgttcaagtctataatcaaggaattagatcttataaagagcttccatatagactttgtgaatttgggacttgtcataggtacgaagcttctggaaccatgcatgggttgatgcgagttagaggtttcacgcaagatgatggccatatattttgtacagagcatcaaattgaatcagaaacagcaatttttattgatttgttatcaaaggtttatgctgatcttggatttaatgaatttgaaattaaactatcaactcgtccagagcaaagagttggatctgatgagatatgggataaggcagaatcatccttaaagaatgcaatagaaaaacttggattagattatagaattgatgagggcgatggagcattttatggaccaaagttagattttgtacttacagacgccataggaagaaaatggcaatgcggaacacttcagctagactttaatcttgctgaacgtttggatgcgcagtatgttgctgaggacggtgataaatattatccagtaatgttccatagggctattcttggatcatttgaaagatttattggaattttaatagaaaactataaagggaatcttcccctttggttggcacccatccaagtagtgatagctactgtgacagatgatgcaaatgagtatgctaaagaaatagcatccaatcttgatcagctagagattcgttatagattggatcaacgcaatgaaaaaattagttacaaagttagagatcacatggcacaaaaaaatcccattgtcatagttttaggaaaaaaagagattgaagatcaatccgttaacatcagacgacttggaaattcggaaacacaagaaatgccattgaaaaattttatgaaatttatttcagaagaagttaaagctccacatcatgatttatgaa

SEQ ID NO: 303547 - DNA, 1921 bp, Unknown
  Bacterial polypeptide expressing nucleotide sequence isolated from the Sargasso Sea
aatgcctgaaattcaattattagacggaaaaaaaattccttttgtaaaatctataagtggatttgaacttacaaaaaaaattagtaaatcacttgagaagtcagcattaataatggaagttgacggtgagttaaaagaccttagtcatgaaataaaaaaagactcaaaagtaagacttataacatctaaagataaagaaggtttagaagtcataagacatgatgctgcccatattatggctatggctgttcaagaactatatccaggtacccaagtaactattggccctgtaatagaaaatggtttttattatgattttgcaagaaaagaaccttttactagtgatgatttaaaaaaaattgaaaaaagaatgtcagaaataattgatagagatgttaaaacaaaaagagaggtttggaaaagagaaaaagctataaaacattttaaaaatattggtgaaaaatataaagcagaaattattgagagcatacctttaaacgaggaactttctatttaccatcatggagatacttggcacgatctgtgtagaggtccacacctagcctcatcaagtaaaattggaaaagctttcaaactaactaaagtatctggagcatattggcgaggtaactctgataacgaaatgttgcaaagaatttatggaacttgctggagttctaaaaaagagttagacgaatatcttcatcttttagaagaagctgagaaaagggaccacagaaaacttggaaaagatatggacctttttcactttagggaagaaagtccagggtcagtcttttggcatgagaaaggttggctattatttcagagactaatcgaatatatgcgaatgaaacaacgtttagcagggtataaagaaattaatacccctgaacttttagataaaactttatgggaaaaatctggacattgggaaaagtttggcgaacatatgtttacatctgaaactccagatgaaaaaacttttgctgtaaaacccatgaactgtccaggttgtgttcaggtttttaatcaaggtttgaaaagttatagagatttacccttgaagctttcagagtttggaaaagttcatcgatacgaaccttcgggtgccttacatggattattaagagttagagcttttacgcaggacgacgctcatattttttgtacagaggatcaaattacagaagagtctttatcagtaacaaatttaattttagaaatatataaagatttaggttttaaagatgtaattttgaaatactctgatagaccagagaaaagagttggagatgatagtgtttgggataaatcagaggctgcccttctaactgcaataaaaaaatcaaaacttgaatacacaataaataaaggagagggcgctttttatggtcctaaaattgaatttgttttaagagatgctatcggaagagactggcaatgtggaacacttcaagtagatttaaatttacctgggaggttaggtgcaacatacgtggctaaggatggaactaaaaaaattccagtaatgttacatcgagctttattcgggtcattagagagatttattggaattttaattgaaaactacgccggtaagttgccattttggttatctcctgcacaagctgtagtatgtcctattgccgaggagaacaataattatgttaaaaagttatttgaagatttgtttaaagaaggtataaaatgtgagatggatttaaggaatgaaaaaataaattataaagttagagaacattctcttgcaaaaattccttatattattgtctgcggaaagaaagaagttgcagacaatactgttactgttagaaaacttggatcagacaatcaagaagttataaaaagggaagatcttatcaaaaatatgctagacctaaataagttgcctttaaattaa

SEQ ID NO: 303548 - DNA, 996 bp, Unknown
  Bacterial polypeptide expressing nucleotide sequence isolated from the Sargasso Sea
ccattagggaaaaatttggtgcaaatatgtatacatcgacaacacctgatgaaaaagtatttgcaattaaaccaatgaattgcccaggttgtgttcaagtttttaatcaaggattaaaaagttatagagatttgccacttaaaatgtctgagtttgggaaagttcatagatatgaaccgtctggtgctttacatggacttttaagagtaagagcttttacacaggatgatgctcatattttttgttctgaagatcaaattacacaagaatgtttaaatgtaacaaatttaattttagaaatttataaagatttaggttttgaaaatgtaattttaaaatattctgatagaccagaggtacgtgttggcgatgataaagtttgggataaatcagagaaagcattattagaagcaattaaagcttctaaacttgaatatagtgtaaacaaaggcgaaggtgcattttacggacccaagatagaatttgtattaagagatgccatcggtagagattggcaatgtggaacactccaagtagatttaaatttacccggaagacttggtgcatcatttgttgataaagatggatcaaaaaaagtacccgttatgttacacagagctttatttggatctttagaaagatttattggtattttaattgaaaattattctggaaaattgcctttttggatatcaccacttcaaacaatggtaataccagtatccgaagattttgataaatatgcaaaagaagttaatcaaaaaataaaaaaagcaggaatcacttcagaagttgatctaaaaaatcataatttaaactataaaataagagaacattctttgtccaaagtgcctattttgttaatatgtggaaaaaaagaagttgacagcaatagtgtaactattagaagattggattctaataaacaagacaatatggatttagacttatttataaaaaaatattctgcattaaatcaagtatcttcaaattaag

SEQ ID NO: 303549 - DNA, 1334 bp, Unknown
  Bacterial polypeptide expressing nucleotide sequence isolated from the Sargasso Sea
tatgataaaagttagttttccagatggtaatataaaagagttcgagaaaggaacaaaggttattgatattgctaaaagtattagtgaaggtctagcaagaaaagtaatatcagcatcttataattcagaagttattgaattaagcacaggattaaatgatgacggagatattaaactttatacatgggatgatgatgaaggtaaaaaggctttttggcattcatctgctcatattttagctcaaacaataaaagatatttatccaacgtcaaaattaactattggcccagcaattgaaagtggtttctattatgatgttgattttggaggaaataatccatcagagaacgattttaaaaaaattgaagaaaaatttctagaatttgctagagaagataatgaatttaaaatgcgccatttaagtaaatcagacgcattagaattctacaaaaaagaaaagaatcagtataagattgagttaattgaagatttagaggatggcacaataacattttgcgatcattctaatttttctgatttatgtaaaggtggtcatataccctctactgggatagtaaaatctgtaaaacttttaaatatagctggagcatattggagaggtgatgaagaaaacaatcagttaactcgtatatatggtatctcttttccaaaacaaaaaatgttgactgaataccttgagttagttgaaaaagctaaagaaagagaccatcgaaaacttggaaaagaacttgaattattcacattttcaagtagagttggaaatggtcttcccctttggttaccaaatggtactgagcttagagataggcttcaaagatttcttgaagatgcccaaagaaaagctgggtacaaaaaagtaatgacttctcatatcggttcaaaagaactatatgaaacatctgggcattatgaaaagtatggtgcagatagttttcaacctatacttactcctaatgataatgagacctttattttaagacctatgaattgccctcatcattgtgaaatatataactctaaacctcaaagctatagggatttaccactcagacttgctgagttcggcactgtttatagatatgaacaaagtggagaattacatggtttaagtagagttagagggttcacagtagatgatgctcatatattttgtactcctgagcaagttgactcagagtttaaaaacactattgaccttgttttatatgtatttaggtctctaggttttgaagaattttctgctcaagtttccttaagagatgatagcaaacctgaaaaatatattggatctaagaaaaattgggaaatttcag

SEQ ID NO: 303550 - DNA, 1438 bp, Unknown
  Bacterial polypeptide expressing nucleotide sequence isolated from the Sargasso Sea
aattaaaagtattccaaaaggggaagaggtctcattatattttcatgggaaatggcacgatttatgtaggggtcctcatttactttcaacaggtaaggtcggaaaattttttaaactaacaaaagttgcaggagcttattggagaggagactcaaaaaatgagatgcttcaaagaatttatggtactagctggtcttcacaaaaagatcttgatgattatctaaaaagaattgaagaagcagaaaaacgagaccatagaaaattaggtaaagaaatggatttatttcattttagagaagaaagtccaggctcagttttttggcatgaaaaaggatggaatttattccaaaaattaatatcatacatgagacaaaaacaagatgaagctggttataaagaaattaatactccagaaattctcgatagaagtttgtgggaaaaatcaggacactgggagaaatttggagcaaacatgtacacatcaactacacctgacgaaaaagtatttgcaattaaaccaatgaattgtcctggttgtgttcaagtttttaatcaagggcttaaaagttatagagatttaccattaaaaatgtctgagtttggcaaagtccatagatatgagccatcaggtgctttgcatggattattaagggtaagagcatttactcaagatgacgctcatattttttgtacagaagatcaaattacagaggaatgtctgagtgtaacaaatttaattttagaaatttataaagatttaggatttgaaaatgtaattttaaaatattctgacagacctgaccttagagtgggagatgatgacgtctgggataaatctgaaaaagctttacttgaagcaattaaagaatctaaacttgaatatagtataaacaaaggagagggtgctttttatggtccaaaaatagaatttgttcttcgagatgctataggaagagattggcaatgcggaactttacaggttgatttgaatttacctggtcgattaggagcatcatttgttgataaagatggatctaaaaaagtaccggttatgttacatagagcattatttggatcattagagagatttattggaattttaattgaaaattatgctgggaagcttccattttggatttcaccattgcaagcaatggttatcccggtttcggatgattttaatacctatgcaattgaggtaaataaaaaattaaaaaaatcaggtataactagtgaagtagatttaaaaaatcacaacttaaactacaaaataagagaacattctcttacaaaaataccacttctattaatttgtggaaaaaaagaagttgactctaatactgtaactattagaagattggattctaaagaacaagaaaatatggaaataaaaaaattgattgaaaaattttcatctcaagcaaaatctccttcttaa

SEQ ID NO: 303551 - DNA, 883 bp, Unknown
  Bacterial polypeptide expressing nucleotide sequence isolated from the Sargasso Sea
aatgaaagaaattgttgatagagatgaaattaccaagagagaagtttgggagagaaataaagctattgatcatttcaaaaaaaaaggtgaaatttataaatctgaattaattaaagctatcccagagaaagaagatgtatcaatttattttcatggtgattggcatgatctttgtagaggtccccacttatcctcaacaggtaaaataggaaaatattttaaactaacaaaagtttcgggtgcttattggaggggcaactcaaaaaatgaaatgcttcaaagaatatatggtactagttgggcaacccaaaaagatttagatgaacatcttaaaagaatagaggaggcagaaaaaagagatcatagaaaattaggaagagaaatggatttatttcattttagagaagaaagtccaggatctgttttttggcacgaaagaggctgggccttatttcaaaatttaattaactatatgagacataggcaggatacagctggttacaaagaaattaatacgccagaggtattagatagacaattatgggaaaaatcaggtcattggggtaaatatggtgacaacatgtatacatcggaaactccggatgaaaaggtgtttgcaataaagcctatgaattgcccaggacatgttcaggtatttaatcaaggactaaaaagttatcgagatcttcctttacgatatgcagaatttggaaaagttcatcgatatgaaccttcaggagcattacatggtctacttagagttagagcttttactcaagatgatgcacatattttttgttctgaggatcaaattacaagtgagtgtttaattgtcactaatttaattttagatatttataaagaccttgggtttgaaaatgta

SEQ ID NO: 303552 - DNA, 1936 bp, Unknown
  Bacterial polypeptide expressing nucleotide sequence isolated from the Sargasso Sea
tatgaaaattacattacctgataatagtaatagagaattgcctgatggttcttgtggatatgatcttgcaaaagacataggacctggactagcaaaatcagcagttgcggtaactattgatggagaacaaagagatttacatgatgttattcatggagattccgctgtgtctattattactatagattcaaatgaaggtctcgaaattatgcggcatacactaacagcgcaagtactagcaagggctatcaagaacctctatccaaaatctaaattagctatcggacctactattgaagatggcttttattatgatgttgaatgttccaaaacaatctcaattgatgacttagaaaaaatagaaaatgagatgaataagattattaaagcaaagtcttctattacaaaaaaacttctatcaaaaaaagatgctttaaatgtttttaaatcattagatgagccttataaacaagaaattattaatgactcgtctcaagagaaaagttttcaactttattatcaagatgatgataattttgttgacttatgtagagggcctcatctaccaaatttagccttcataggttctttcaagcttactaaagtttctggagcatattggaaaggcgactctaataacacaatgcttacaagaatatatggaacagcgtggaattcagaaaaagatttaaataaatatttaaatactatagaagaagctgaaaaaagagatcatagaaaacttggaaaagaaatggatttatttcattttcaagacgaagcacctggaatggtattttggcaccctaatggatggagtatttatagaaatttaagaaattttgttagagatcgattacaagatagtaattatatagaggttaacacacctcaggtcattgatagaaaactatgggaagcctcaggacactgggacaagtatcgtgaaaatatgtttataactgaaattgatgaagaacatgcaaatgaaaaaagggtgaatgccctaaagcctatgaattgccctggccatgttcaaatttataatcaaggaataaaatcatataaagatttacccttaaaatatgctgagtttggtttatgtcatagatatgagccttctggaaccatgcatggattaatgagggttcgagcttttactcaagatgatggacatattttttgtactgaagatcaaatcgaatctgaaactggattatttatagagtttttatcaaagatatatgcagatttaggctttaaagaatttgatatcaaattatctaccagacccgaaatgagagttggatctgatgaaatatgggataaagcagaagaagctcttgaagctgcaattaagaacttaggctatccatatagaattgatgtgggagatggagcattttacggacccaagttagactttgttcttactgatgcaatcggaagagagtggcaatgcggcacatttcaactagattttaacttggctgaaagacttgatgcccactatatcggggaagatggtaagaagcacaatcccgttatgatacatagggctgttttaggttcctttgaaagatttataggaatacttattgaaaactatgcaggaaagcttcctttatggcttgcgcctcaacaggttgtcatagcttcaattatttctgatgtaaatgattattcccttgaaattaagaatcttcttaaaaaagaaggtatcagggctgaggtagatttaagaaatgaaaaaattagttataaagtaagagaacatagttcgaaaaaagttcctataatcctagcgattggtaataatgaaaagaacgataggactgtttccattaggcgaataggaagcaaagaaacagaagtgcttagccttgatgacgccataaatcaaattaacagcgagaacaggacattaaatgaatga

SEQ ID NO: 303553 - DNA, 595 bp, Unknown
  Bacterial polypeptide expressing nucleotide sequence isolated from the Sargasso Sea
ttgttagaggcaatcaaagcgacaaagctagagtactcaattaataaaggtgagggcgcattttatggaccaaaaattgaatttgttttaagagatgcaataggtagagattggcagtgtggaactttgcaagtagatttaaatttaccaggtagattaggagcttcttttgttgataaagatggaactaaaaaagtacctgtaatgttacacagagcattatttggatctttagaaaggttcataggtatccttatagagaattatgcaggcaagctaccattttggatatcacctttacaggcagtagttattccaatctctagtgattttgatgaatatgctaaaagtgtagctaaggaattaaaacgggttggtttgattgtcgaggtggatcttaaaaatcacaatttaaattataaaataagagatcattctttaacaaaagtaccaatgttattgatttgtggaaaaaaagaagttgactccaacagtgtaactattagaagattggattctaataaacaagaaaatatggctttgaaagaatttataaaaaaatactccgatctaaataaagccccttcaatctaag

SEQ ID NO: 303554 - DNA, 820 bp, Unknown
  Bacterial polypeptide expressing nucleotide sequence isolated from the Sargasso Sea
aatgcctaatattaaattaccagatggaaattcaattagttttgaaaaaaaagttactggattgcaaatagcagaaaaaattagtaaatcgctctcaaaacaagccttagttataagtgttgatggaaatttaagagatttgaattatgaaataaataaagattgtactgttaaaattcatacagcaaaagataaagaaggactagaaacaataagacatgatacagcacatgttttagcaatggctgtacaagaaatttttcctggcacacaagttactattggaccagtaattgataatggattttattatgactttgcaagaaaaaaaccatttacagaagaagatttacgaaaaattgaaaaaaagatgttagaaattgtagagagagatgagcctactcatagagaagtttggaagcgcgataaagcagtcgaacattttaaaaaagcaggagagctttataaggccgaaataattaaagatataccaaaagatgaagaggtttcggtttattttcatggaaaatggcatgatttatgtagaggcccacatctaatgtctacaggaaaaattggaaaatactttaaacttatgaaagtttctggggcgtactggagaggtgactctaaaaatgaaatgctccaaagaatttatggaacaagttggtctactcagaaagatttagataattatttgaatatgattgaagaggctgaaaaaagagatcatagaaaattaggtaaagaaatggatttatttcactttagagaagaaagcccagggtcagttttttggcatgaaaaaggttggaattta

SEQ ID NO: 303555 - DNA, 1205 bp, Unknown
  Bacterial polypeptide expressing nucleotide sequence isolated from the Sargasso Sea
aatgccagaaattacattaccagacggaaaaaaaattaattttgaaaaaagtatttcgggatttgaagttgcagaaaaaattagcaaatctctgtcaaaacaagccttgctaataagtgttgatggagaattaaaagatttaaatcatagtatttctaaagattcttcaattaagatatttacttcaaaagataaagaaggtttagaaaccataagacatgatactgctcatatacttgctatggcagttcaagaattatttccagggactcaggttacaatagggccagttatcgaagatggcttttattacgattttgctagaaaagaaccttttacaacagaagatttagaaaaaattgaaaataaaatgaaagaaatagtagatcgagatgaaaaaacttacagagaggtttggaaaagaagtgatgcaattgaacattttaaaaaaaagggagaaatatataaagctgagataatagaaagtattccagagggagaagatgtatctttatattttcatggagattggcatgatttatgtagaggccctcatttaagttcaactggtaaaattggaaaatattttaaattaacaaaagtctcaggtgcttactggagaggcgactctaataatgaaatgttacaaagagtatatggaacaagttggtctactcaaaaagaattagatgattatttaaatagaattgaagaggccgaaaaaagagatcatagaaaaattggaaaagaaatggatttatttcatttcagagaagaaagtccaggatctgtattttggcatcaaaaaggatggagcctattccaaaaacttatttcatatatgagaatgaagcaagaaacagcaggatatcaagaaataaatactccagaaatattagatcgctcactctgggagaaatctggtcactgggaaaaatttggagccaatatgtatacttctactacacctgatgaaaaagtatttgctataaaaccgatgaattgtccaggttgtgtgcaagtttttaatcaaggcttaaaaagttatcgagatttaccacttaaaatgtcagaatttggaaaagttcatagatatgaaccatctggagcacttcatggactattaagagttagagctttcacccaagatgatgctcatattttttgcaccgaggaacaaattacagaggaatgtttaactgtaa

SEQ ID NO: 303556 - DNA, 796 bp, Unknown
  Bacterial polypeptide expressing nucleotide sequence isolated from the Sargasso Sea
tatgagcacagaaaatattgaagaatatagacataaacttcgtcattcagcagcccatttattagctgaagctgttttaaaaagacaccctcaagccaagttaacaataggccctcctattacagatggttttttttatgatttcgatatagatataacattttcacctcaagatttagcaaccttagaaagagatatgaaaaggtctataaaacgaaatactaaatttgaacgtaaagagatatcaaagaatgaagcattagaaatttataaagataatccatataaaattgaaattatcaattcaatgccagaagacgaaattgtcaccgaatatagccattccgatggtaattttattgacttatgtgaaggtggccacatagaaaaaacaggagagataaaagcaataaaactactttcaactgcaggtgcttattggaggggagatgaaaagaataagatgctccaaagaatatatggtacagcgtgggagtcagaagaattacaacaagactatctagataaaagaaaaaaagctatagaaagtgatcacagaaaattggggacatctctagatttattttttttagaccccattagtccagctaatccttttttcttacctgacggagcatttgtatataacaaattaattgaatttgtaagaaacctatatgaaaaatatgattataaagaagtaataactcctcagcttttctctacagatctttggaagcaatcaggacattatgatttttatttagaaaaccatgtatatgatggaaatcgatga

SEQ ID NO: 303557 - DNA, 814 bp, Unknown
  Bacterial polypeptide expressing nucleotide sequence isolated from the Sargasso Sea
catgattaaaatcacatttccagatggttccattagagaatatcaaaaaggaacaagttccatggacattgctaagagtatttcagaaggtttggcaagaaatgttttgcttgctaaagtaaatggcaaacttcaggatttatcactgccaataaatgaagattcggcttttgaacttttaacttggaaagatgaagaagggaaatctacgatgtggcattcttcggctcatctaatggctgaggcattggagcaattatatcctggagttaagttggctattggccctcctacagcaagagggttttattatgatgtggatttttgcgactatcaaataagtgaaaaagacttgcccaaggtggagcaaaaaatgaaagagcttgcaaaacaaaaattaacttttacaagaaaagaagtttctaaatcagatgcattaagttattttgagaaaaaaggagacccctataaattagagttaatctccgaattagaagatggaggcattaccttctatactcaagggtccttcacagacctatgtaaaggtcctcatatcccacatactggacacattaaagcaatcaaattgctttccatagccggagcttattggagaggagatgagaaaaacaagcaattaaccagaatatatggggtttctttccccaaaaaatcagaacttgtagagcatcttcaaatgatagaagaagctaaaaaaagagatcatcgaaaattaggaaaagaactagagttatttactttttctcaaaaagttggacaaggacttcctctttggttaccaaatggaaca

SEQ ID NO: 303558 - DNA, 1282 bp, Unknown
  Bacterial polypeptide expressing nucleotide sequence isolated from the Sargasso Sea
tatggtactgcttttaataatgataaagatcttcaaaaccatcttgataatattgaagaggctctcaaaagagatcatagaaagattggcaaagagatgaacttatttcattttcaagacgaagcaccaggaatggtattctggcatccaaatggatggactgtatatagaaatttaaggaactttgtaagagataaacttcaatctaatggttatattgaggttaatacacctcaagtaattgacagaaaattatgggaagcatcaggacattgggataaatatcgtgaaaatatgtttattacagaaattgatgaagaacatgcaaatgaaaaacgaattaatgcacttaaacccatgaactgtcctgggcatgttcaaatatataatcagggaataaaatcttataaagatctgccattaaaatacgcagaatttggtttatgtcacagatacgaaccttctggcacaatgcatgggcttatgagggttcgtgcattcactcaagatgatggacatatattttgtacagaagatcagatagagtctgagacaaaattatttatagattttttgtccgaaatttatgcagatttaggttttacaaaatttgatattaaattatctactagaccagaaatgcgagttggatcagataagacatgggataaagctgaagaagcccttgagtcagcaataaataatttaggacacccttacagaattgatcacggagacggagcattctatggaccaaagcttgattttgttcttacagatgcaattggacgagagtggcaatgtggtacttttcaattagacttcaatttagcagaaaggcttgatgcccaatacgttggtgaggatggcaaaaagcattttccagtcatgattcacagagcagttttaggttcgtttgagaggtttattggaatcttgattgaaaactatgcaggaaaattacctttatggcttgcaccaattcaaataatgattgctccaataatatctgatgcaaatgattatgcagacaccgttaaaaaagaatttgttaataatggttttagagttgaaatcgataaaagaaatgaaaaaataagctataaagttcgtgaacatagtttatctaaaattccatatattttagctttaggaaaaaaagaaattgctgataatactgtaaatgtaagaaaaataggcagcaaagacacaaataccatgaaaattaaagatttcttaaacgaactaaaaacagaactcaaagaatctaataaatgttaaa

SEQ ID NO: 303559 - DNA, 1918 bp, Unknown
  Bacterial polypeptide expressing nucleotide sequence isolated from the Sargasso Sea
atgcctagtataatacttactgatggaaaaaaacttgattttacaaagagcatcacaggattaaagattgcagaaaaaattagcaagtctttaatgaaacaagctcttatcatgagtgtaaatggtgagttaaaagatttagagcatgaaattacaaaagattctgaagtgaaaatttttacatcaaaagataaagaaggtcttgaaacaataagacacgatacagctcatattttagctatggcagtccaagaactttttccaggaactcaagtaacgattggtccagtaatagaggatgggttctattacgactttgcaagaaaagaaccttttacaaatgaagatttagaaaaaattgaaaaaaaaatgaaagaaattgttgatagggatgaaaaaacttacagagaagtctggaaaagaaatgatgcagtaaagcattttaaaaaaaaaggtgaaatatataaggcagaaataattaacagtattccagaaaatgaagaagtatcaatttattttcatggaaaatggcatgatctttgcagaggccctcatttaatttcaactggaaaaataggaaaatattttaaattaacaaaagtttcaggtgcatattggagaggtgactctagcaatgagatgttgcaaagagtttatggtactagctggtcatctcaaaaggaattagatgagtatttagaaagaattcaagaagcagaaaaaagagatcatagaaagttaggtaaagagatggatttatttcattttagagaagaaagtccaggttcagttttttggcatcaaaaaggttggaatttatttcagaaattaatttcttatatgagaatgaaacaagaccatgcgggttacgaagagattaataccccagaaattttggataggtcattatgggaaaaatctggacattgggaaaaatttggagcaaatatgtatacatcaactacaccagacgaaaaagtttttgctattaaaccaatgaattgtcctggttgtgttcaagtctttaatcaaggtttaaaaagttacagagacttacctcttaaaatgtcagaatttggaaaggtacatagatatgaaccatcgggtgctttacatggattgttaagagtaagagcatttacacaagacgatgcacatattttttgcacagaagatcaaattacagaagaatgtttatctgtaacaaatttaatattagaaatttataaagatttaggttttgaaaatgttattttaaaatattcagatcgaccagatataagagtaggagatgatagtgtatgggacaaatcagaagctgcgttactcgaagctataaaagcatcaagattaaaatattcaataaataagggagaaggagcattttatggaccaaaaatagaatttgttctaagagatgcaattgggagagattggcaatgtggaacattgcaagttgatttaaatttacctggaagattaggagctacatatattgcaaaagatggctctaagaaagttccagttatgcttcatagggcattgtttggttcattagaaagatttataggtattttaattgaaaattatgcaggcaagctacctttttggataactcctcttcaagtagttgtaataccaatttctggtgattttgatgattatgctaaaaatgtttatcaacaaataagaaaagtaggaatctcatgcgagctagatcttaaaaaccacaatttaaattataaaattagagatcattctttaacaaaggtccccttactcttaatttgtggaaaaaaagaagttgacactaatacagtaaatattagaagattagattttaaaaaacaagaaaatatggaactaaaagaatttctaaaaaaatactctgctatgaatagagcaccatcaatttaag

SEQ ID NO: 303560 - DNA, 1636 bp, Unknown
  Bacterial polypeptide expressing nucleotide sequence isolated from the Sargasso Sea
atgccaaatattacattaccagacggaaaaaaaattaattttgaaaaaagtatttcgggatttgaagttgcagaaaaaattagtaaatctctatcaaagcaagctttgctaataagcgttgatggagaattaaaagatttaaatcatagtatttctaaagattcttcaattaagatatttacatcaaaagataaagaaggtttggagactataagacatgatactgctcacatactcgctatggcagttcaagaattatttccagggactcaagttacaatagggccagttattgaagatggcttttattatgattttgcaagaaaagaacctttcacaacagaagatctaaataaaattgagaacaaaatgaaagaaatagtagatcgagatgaaaaaacttacagagaggtttggaaaagaaacgatgcaattgaacattttaaaaaaaagggagaaatatataaagctgagataatagaaagcattccagaaggtgaagatgtgtcattatattttcatggagattggcatgatttatgcagaggacctcatttaagctcaactggtaaaattggtaaatattttaaattaacaaaagtatcaggtgcgtattggagaggcgactctaataatgaaatgttgcaaagagtatacggaacaagttggtctacgcaaaaagagttagatgattatttaaatagaatagaagaagcagaaaaaagagatcatagaaaaattggaaaagaaatggatttatttcatttcagagaagagagccctggttcagtattttggcatcaaaaaggatggaacttattccaaaaacttatttcttatatgagaatgaaacaggagactgcaggatatcaggaaataaatactccagaaatattagatcgctctttgtgggagaagtcaggtcactgggaaaaatttggtgccaatatgtatacctctactacacctgatgaaaaagtttttgctataaagccaatgaattgtccaggttgtgttcaggtttttaatcaaggcttaaaaagttatcgtgatttaccattaaaaatgtcagaatttggaaaggttcataggtatgaaccatctggagcactccatggactattaagagttagagcttttactcaggatgatgcacatattttttgtacggaagagcaaattactgaagagtgtttaactgtgactaatttaattttagaaatttataaagacttaggatttgaagatgtaattttaaaatattctgatcgaccagaattaagagtgggtgatgatcaagtttgggataaatcagaggctgctttactagaagcaattagagcaacaaaattagaatattctattaataagggtgaaggagctttttatggtccaaaaatagaatttgttctaagagatgcgattggaagagattggcaatgtggaacgttacaagtagatttaaacttaccaggcagattaggggcctcatttgttgacagcgatggaaataaaaaagttcctgttatgttgcacagagcattatttggatctttagaaagatttattgggattttaatagaaaattattcaaggaaaattaccttttttggctatgcccagttcaaacaatagt

SEQ ID NO: 303561 - DNA, 1171 bp, Unknown
  Bacterial polypeptide expressing nucleotide sequence isolated from the Sargasso Sea
cgcgtatatggtacctcattcaaaaatgaaaaagatttaaaaaaatatcttaatatgcttgaagagcaaaaaaaacgtgatcatagaaaaatcggaagagaattagatttatatttttttgatgatgaagtaggtcctggtctacctttatggactcctaatggagctgtgatgattgacgaattggaagctttagctaaagaaaaagagacagcgagcggatatttacgagttaaaacccctcatttgacaaaaggagagctttatgaaaagtccggtcatttaaagcactacatctccagtatgtatccagcaatggatgttgatggtatcgactattatatgaaaccaatgaactgtcctcatcatcacaaaatttttgcaaacactcctaaaagttatagagatttgccatatagattgtctgaatatggaacatgttatagatatgaaaaatcgggagaattatttggattaatgcgtgtaagaagtatgcagatgaatgatgcacacatctattgtacggaagaacaatttaaagatgagtttataggggtttgtaatctttatatggattatttcaaaatcttcggtattgaaaaatatgaaatgagattaagtcttcacgatccaaaagggctaggtgaaaaatttattgataatgctgaattatggaaaaaaacagaagacgatgttaggaatgcacttaaaagtgctaatctgaaatttgttgagtcagttggagatgctgctttttatggtccaaagattgatgttcaggtctggagttcaattggaagagagtttaccttagccactaatcaggtagattttgctgttcctgaaagatttgacttaacatataatgataacgatggtacctcaaaaacacctctttgtattcatagagcacctctgggaacacatgaacgttttattgggtttctaatcgaacattttggaggcaatttcccgctttggttagcgccaaaacaagtaattgtattgcctgtttctgataaatataatgattatgcagaaaaagtcaccaaagacctcaaatctaaaggtatcagagcttttttggataaacgatcagaaaaaataggttcaaaaattagggatgcagaattacaaaaaattaacatcatgattattgttggtgaaaaag

SEQ ID NO: 303562 - DNA, 1177 bp, Unknown
  Bacterial polypeptide expressing nucleotide sequence isolated from the Sargasso Sea
aaagcttgctaagacgaaatatgatgtcagaagagaagtcgtatcacaaacaaaagcgatcaagactttcaaggagagaaatgaaccctacaaagtaaacctagcagaagagataccagaagatgaagtaattgcgttatatcatcacgaagaatacatagatatgtgcagaggacctcatgttaccaatatgagacatcttcaggcatttaagcttactaaagtatcaggcgcttattggagaggagattcaaaaaatgaaatgcttcaaagaatatacggaaccgcctggcctaattccaaagacttggataattacattctccagcaggaagaagcggaaaagagagatcataggaaattagggagacaacttgatttatttcattttcaagaagaagcacccggtatggttttttggcatcctaagggatggtctatttattcagctctgaaaactttcatacaatccaaacaagttgaatatgaatatcaagaaatcaatactcctcaaattgttgatagaaagttatgggaagcttccggacactgggacaaatatcgagaaaatatgtttatcacggaaattgatgaagaacatgcgaatgaaaaaagaacaaatgctcttaaaccaatgaattgtccttgccatgttcaggtatttaatcaaggattgcgttcctataaagatcttcccataagatatgctgaatttggctcatgtcatagatacgaagcttcgggaacacttcatggtctgatgagagtccgcggatttactcaagatgatgggcatatattttgtactgaagatcaaattcaagatgaaactaagaaattcataaaattactaactgagatctattctcaactaggatttgatgagtttgatataaaactatcaaccagacctgaggttagagctggttcggagcaagtttgggataaagcagagctcgcattggagaatgctataaaaaatttggatttgccatatgaagtaattgctggtgatggagctttctacggtccaaagttagactttgttcttatcgacgctttaggcagagaatggcaatgtggaacttttcaactagactttatattgcccgagagattagatgcaaaatttgttgattctgatagtgaaaaatataacccagtgttaattcacaga

SEQ ID NO: 303563 - DNA, 903 bp, Unknown
  Bacterial polypeptide expressing nucleotide sequence isolated from the Sargasso Sea
atcaaggtctaaaaagttatagagacttaccaattaagtatgctgagtttggtgttgtgcatagaaatgagccatcaggaacattgcatggattaatgaggattagggcatttactcaagatgatgctcatatattttgtacacccgagcaaatcgaagatgagataaaaaaacttatatctacaatttatcatatttataaaatatttggcttcacagatattaaggttgaattatcaacgagacctgaaaaaagagtaggttctgaagaaatatgggataaatcggagaatgcattaaaatctgccttagatagttgtgatattgattgggtcctaaatgctggtgatggtgcattttatgggccaaagatagatttttcgttaaaagattcgcttgagagagtatggcagctaggaacaatacaattagatttctcgatgcctacaagattagatgcatcttatatcgatagtaacggtaataagctagcccccgtaatgattcatagggcaattttaggttctcttgagagatttgttggaattcttatagaggaatatgctggtgatttaccactatggctgtctccgattcatgcagttgtgcttaatatttctaataatcaagtaaattattgtgatgaaatatgtaaaaaactcaatagtctaggaataaggacagaaaaggatttaagaaatgaaaaaatcagctataaagttagagagcatagtatgaggagaacaccatatttgatagttattggagataatgaggttgaaaataatgaattatcaattagaacaagggcaggtaaagatctaggtatcatgaaagttgataaatttataaaaatggtagacactcttgtatgtgataaaagtattttattaaataattagt

SEQ ID NO: 303564 - DNA, 1021 bp, Unknown
  Bacterial polypeptide expressing nucleotide sequence isolated from the Sargasso Sea
attgtttcaatcattaattaattatatgcgcttaagacaagatagggctgattatgttgaaactagcacgccagaattattagataaatctttatgggaaacatcagggcactgggaaaagtttagtgagaacatgtttacaaccgatccaaaagaagaaaaagtttttgctatcaaacctatgaattgtcctggggcagtagaagtttataaacagggtttaaaaagttatagagacttaccattacgtatggcagagtttggaaaagttcatcgttacgaaccttcaggcgcattacatggattaatgcgagttagagcttttacacaagatgatgcacatattttttgcactgaagatcaaattactgaagaaagcaaaattgtttgtgatcttatacttagtatttacaaagattttggctttaatgatgttagaattaaattttcagatagaccggaaaagcgtgtgggtgatgatagggtttgggataaagcagaagaagcattgaaacaagctatggaagcaacaggtcttgagtatacattcaatccaggagagggtgcgttttatggcccaaaactagagtttgttttgcgcgatgcaattggacgtgattggcagtgtggaacacttcaggttgatttaaatttacccggtagacttggggcaacatatgttgctgaggatggtcaaaagaaagttcccgttatgttgcaccgagctctgtttggctctttagagagatttgcaggaatattaatagagcattatgctggacatttaccattatggttatctccatcacaggtagtagttgctacaataacttctgaatcagataattatgcttttgatgtaaaagatcaattaagtaaaaatggattgcgcactgaggcggacattagaaacgagaaaataggttataaaatacgtgaacatagtaatgctaaaatacctataattcttgcggttggaaaaaaagaagcgaagaaaaaactgtttctgttagacgcttag

SEQ ID NO: 303565 - DNA, 1723 bp, Unknown
  Bacterial polypeptide expressing nucleotide sequence isolated from the Sargasso Sea
tatggaaattaatttaccggatggatcagtaaaggaacttgaaaagggctcaaatggcctagatcttgctaaatcaataggcgctggacttgctaaaagtgctgttgcagttgtcgtgaatggtgagcagagagacctcctagacgaacttcctgataactcttctgtctctatcattactatccaatctgacgagggattagagataatgagacatacattgacagcccaggttctagcaaaagctataaagaatttatattcggattctagattggctatagggcctacaattgaaaacggcttttactatgatgtttctactaaaacacctatatcggttgaagatcttccaaaaatagaaaatgaaatgaaaaggatattagaaaataagtctaatattgttaaatcacttcactccgaaaaagatgcaaaaaaaatgtttaaacagaaaggagagtctctcaaggtagaaattatagatgatgcagatcaaactgataattttcagatttatacaaatgctgatgaagattttattgatttatgcagaggacctcatttaccaaatctctcttttattggggcatttaaacttactaaagtctctggagcatactggaagggagattcctcaaatgaaatgcttacaagaatttatggaacagcatggagaaatgaaaaagagcttcaaaagcatctaaaatctattgaggaagctgaaaaaagagaccatagaaagattggaaaagatatggatcttttccatttccaagatgaagctccaggtatggttttttggcatccaaaaggctggactatttatgcaactttaaaatcttatatgtcagatatgcagaagaaagctgattataaagaaattaatactccatcagttatagataggaagctttgggaaaaatcaggacattgggataagtatagagaaaacatgtttatcactgagatcgatgaggagcatgcaaatgagaaaagagtaaatgctttgaaacccatgaattgccctggacatgttcaagtttataaccaaggtataagatcatataaagaacttccatttaggttatgtgaatttggttcatgtcatcgatatgaagcatcgggtaccatgcatggacttatgagagttaggggattcacgcaagatgatgggcatatttttcttacagaagatcaaatcgagtcggaaacagctatttttatagatttattatcgaaggtctatactgaccttgggttcaatgaatttgaaattaagctatcaacacgcccagaacaaagagttggatctgatgagatttgggacaaagctgaattgtctctaaaaaatgcaatcgaaaaacttggattggaatataggatagatgaaggagatggagcattttatggtccaaaattagattttgtactaacagatgccattggaagaaagtggcaatgtggaactcttcagttagatttcaatctagcagatcgcctagatgctcaatacgttgcagaggatgggaataaatataatccagttatgtttcatagagcgattctggggtcttttgagagatttataggtattttaattgagaactatagtgggaatcttcccttatggcttgcacctactcaagtaactgtttgttcaattacagatgaggctgatgattatgtaaaagaaatatctgaaatgctaagaagtaaaaatatt

SEQ ID NO: 303566 - DNA, 1540 bp, Unknown
  Bacterial polypeptide expressing nucleotide sequence isolated from the Sargasso Sea
cccggtctcgccaaggcgtgcattgccggtcgggtaaacggtgaactggtggatgcctgcgagctgatcgaagccgatgcctccctggccatcatcaccgccaaagacgaagaaggtctggacatcctgcgccactcctgtgctcacctgctgggtcatgccatcaagcaactctggccccagaccaagatggccatcggtcccgtcatcgacaacggtttctactacgatatcgatctcgatcgcaccctgaccgacgaagatctggctgcgctggaagagcgcatgctggcgctggccgccaaggattacgacgtgatcaagaagaaggtctcttggcaggaagcacgcgacgtgttcgaagcccgtggcgagacctacaaggtcgagatcctggatcagaacattgcccgtgatgaccagcccggtctgtatcatcacgaagagtacatcgacatgtgtcgcggcccgcacgtgcccaacatgcgtcactgccaccacttcaagttgcagaagatgtccggcgcctactggcgcggcgactccaataacaagatgctgcagcgcatctacggcaccgcctgggccgacaagaagcagctcaagtcttacctgcagcgcctcgaagaggccgccaagcgcgaccaccgcaagatcggcaagcagctcgacctgtatcacatgcaggaagaagcgcccggcatggtgttctggcacaacgatggctggactatcttccgcgagctggaaaccttcatccgcggcaagctcaaagagtacgactatcaggaggtgaaaggccccttcatgatggatcgcgtgctgtgggagcgttcaggtcactgggagaaatacgcccaggccatgttcaccacccagtccgagaaccgcgagtacgccatcaagccgatgaactgcccgggtcacgtgcagatcttcaaccagggtctgaaatcctaccgcgatctgccgttgcgcatggccgagtttggctcctgccaccgcaacgagccgtccggctccctgcacggtttgatgcgggtacgtggttttacccaggatgatgcacacatcttctgtaccgaagagcagatcatggaagaggtgtcggcctgtattcgcatggtctacgacgtctatggcaccttcggcttcgagaatatcgtggtcaagctctccactcgtccggaacagcgtatcggctccgatgaagcctgggatcgtgccgaggccgcgttggccgaagccctggtgctgaacggcctgaagtacgatctgcagccgggtgagggggctttctacggtcccaagatcgaatttaccctgcacgattgccttgatcgtgcgtggcaatgtggtaccgtgcagctcgattttgccctgccgggccgtctgggcgccacctacgtgggtgaagacaacgaacgtcatgttcccgtgatgatccaccgcgccattctgggctcgctggagcgtttcatcgggatcctgaccgaagagtacgccggactgttcccgacctggctggcaccgacccaag

SEQ ID NO: 303567 - DNA, 529 bp, Unknown
  Bacterial polypeptide expressing nucleotide sequence isolated from the Sargasso Sea
aatgccaaatatacaacttctagatggaaaaaaaataacttttacaaattcaatcaacggctttgatattattaaaaagataagcaagtcacttgaaaaaagtgctttaataatagaagtcgatggccaactgaaagacttaagtcacgaaattaccaaagactcaaaagtaagagtgataacatctaaagataaagaaggtttagaagttttacgacatgatgcagctcacataatggcaatggctgttcaagagttattccctggtactcaagttactattggtccagtaattgaaaatggcttttattatgattttgctagaaaagaaccatttaccagtgatgatttaaacaaaatagaaaaaaaaatgtctgaaataatagatagggatgttaaaactaaaagagaggtctggaaaagagataaagctatttctcattttaagaaaattggagaaaagtataaagctgaaataattgagagtataccagaaagtgaagaactttcaatttaccacccatggtga

SEQ ID NO: 303568 - DNA, 826 bp, Unknown
  Bacterial polypeptide expressing nucleotide sequence isolated from the Sargasso Sea
tatgccaataatcaccttacctgatggttcaaaaagggttttcgaaaaatctgtaactattctagaaattgcccatagtataggcgctggattagctaaggcaacaattgctgggaaagtaaatgatgttcttcttgatgcaacaattccaataaataaagattccaacgttgtaatcatcacatcaaaagataaagaaggaattgaaataataagacattcctttgctcaccttattggtcatgcagttaaacaaatttactctgatattaaaatggcgattgggcctgtaattgaagatggtttttattacgatattttttctgaatacagatttactcctgaagatttaataaaaattgaaaatagaattaataaattaataaaaacaaactatgacgtcgaaattttacaagtttctaaagaagaggctattaaaacttttaaagaaagagatgaaactttcaaattacgaataattgaagaaattcctgaagaaggtctcatcaatttatacaagcacgaagaatacatcgacatgtgtagagggcctcacgttcctaacaccagacatttgagacactttaaattacttaaattatcaggttcatactggagaggcaatagtgagaatgaatcattacaaagaatatatggaactgcatgggcaaaagaaaaagaactcaatgactacttaacaagaattgaagaagcggaaaaaagagatcatagaaaacttggtaaaaaacattcactatttcatatacaagaagaatctccaggaatgatttttggcatccaaatggatggaccatctaccaagtaa

SEQ ID NO: 303569 - DNA, 1777 bp, Unknown
  Bacterial polypeptide expressing nucleotide sequence isolated from the Sargasso Sea
catgaataaagcagaagatactcaactctatcggatccggcattccctggcacatgttctggctcaggctgttctggagatcagacccgaagccaaactgggattcggtcccccggttgaaaacggattctactacgatttcgatcttgaagatcctctctctcctgaagacctgccggagatcgaaaagcggatgaaaaaaatcatcaaatcccgtcagacctttgaatgtgaggagttgaatggtgaggaaatgcgaactcgactcgctgaaaacgggcaggattacaaaatcgagcaggtgaatgaccttgatgccgaaggagaaatcctgacactttaccgcaacggacctttttgggacctttgcgagggtccgcatgtggaatccactgcggaaatcccgaaaaactgcttctccctggacagtctcgccggtgcttactggaaaggttcggaaaaaaacaaaatgctccaaagagtctacggactcgccttcgaatcccaggaggccctcaaggatttcaaggaaaagaggaaaatggcgatggaacgtgaccatcgcaaactgaacatcgatcagcattatttcgtgatcgatgaagaagtcggcaagggtcttccgttgtggatgccgaacggcaccgtgattcgtgaagaactggaaaaactggccaaggagcaggaatttctggacggttatgagcgggtttcaacccctcacatcacccgcgaaaacctttaccatacctcgggacacctgccctattatgccgacagtatgttccctccaatggaggtcgatggggaaaaaatgttcctcaaaccgatgaactgtccccatcaccacctgatctaccgctcccagccaagaagttaccgtgagctacccctgagacttgccgaatatgggacctgctatcgttatgaacagtccggagaactggcgggtttgttgcgggtcaggggactgacaatgaacgacgcccacatctactgcactgccgaacaggtgaaagaagaattcatccgtgtgatgcagcttcatctccggtattacgaattattcgggctggaaaatttctggatgcggctttcccttgcagaatccgatggggccaaatacgtcaacgaacctgaagtctgggcccgtgccgaggcacttgtcatcgaagccatggacgaagtcggcatcccgtatgagtcggttcgtggcgaagcagccttttatggtccgaaaattgattttcaggtgagcaacgtgattggacgtgaagaaacggcatcgacgaaccagctcgatctggtgatggcggagcgttttgggctgacctaccgtgaccaggaatccgtggagcgtgcaccgatgatcatacaccgtgcaccactggggacccatgaacgtttttgtgctttcctcatcgagcattacggcggagtctttccaagctggctggcaccggttcaggtgcgcatcattccggtggcttccgcatttttcgattatgccgaaaaattggaaaaggagttgaaatcaagattcatccgcagtcaagtcgacctatcgacggattcttttggaaaaaagatccgcaacggtgcggtctcaaaggtcccgaacttgctcatcctcggagagcaggaaacttcggagggctctgtgacctggcagcgttacggaaccaaggaacggatcaagctcggtttcgacacctttttgacgcagttcgaggaagaaatccgcaatcgcagcgactggcgcatcacagccaactga

SEQ ID NO: 303570 - DNA, 1322 bp, Unknown
  Bacterial polypeptide expressing nucleotide sequence isolated from the Sargasso Sea
agtttcaggcgcatattggcgaggtgactcaaaaaatgaaatgcttcaaaggatctacggaacaagttgggcctcccagaaagatttagacgattatttaaaaagaattgaagaggcagaaaaaagagatcatcgtaaattgggcaaagaaatggatttgtttcattttagagaagaaagtccaggatcagttttttggcatgagaaaggttggacgttatttcaaaaattaattaattacatgagagctaaacaggacctggccggatacaaagaggtgaacacaccagaggtattagacagattattgtgggaaaaatcaggtcattgggaaaaatatggggaaaacatgtatacctcagaaactcctgatgaaaaagtttttgcaattaaaccaatgaattgccctggacacatacaagtttttaatcaaggtcttaaaagttatcgagatttacctctaagaattactgagtttggaaaagttcacagatatgaaccatctggtgctttacatgggttattaagagtaagagcattcactcaagatgatgctcatattttttgctccgaagatcaaatcacaagtgaatgtttaaatgttacaaatttgatattagaaatttataaagatttaggtttcgaaaatgtaattcttaaatatgctgataggccagaggtaagagttggtgaggatgaaatttgggacaaggctgaagcatctttgttaaaagcagtcaaagcatcaaaacttgagtacagtataaacaaaggtgagggagcattttacggtccaaaaatagagtttgttttaagagatgcaataggaagagattggcagtgtggaactgttcaggttgatttaaatttaccaggtagattagatgcatcatatgtagataaagatggcactaagaaagttcctgtaatgttacatcgtgcattatttggatcactcgagagatttataggtattctaattgaaaactatgctggaaaatttccattttggatatccccgttacaaacagttgttatacctatttccgaaggcttcgaagaatacgcaaaaacagtttccaataagataagagaagctggtattacatcaatggttgatttaaaaaatcataatttaaattataagataagagatcattcattagcaaaaatacctcttttaataatttgtggtaaaaaagaagttgacagtaactcagtaaccattagaaaattggattcaaataaacaagaaaatatggaactaaactcatttttaaaaaaattttctgctctaaacaaagcaccttcaaatatttaag

SEQ ID NO: 303571 - DNA, 994 bp, Unknown
  Bacterial polypeptide expressing nucleotide sequence isolated from the Sargasso Sea
tttcgtgatgacatgtttacaactgattcagaaaatagaaattacgcgattaaaccaatgaattgtccatgtcatgtacaagtctttaatcaaggattaaaaagttataaggaattaccaataaggcttgcggaatttggctcttgtcatcgaaatgaggcttctggtaccctacatggtctaatgcgggctcgtaattttactcaagatgacgcccatattttttgtactgaagatcagattcaagatgaggtctctaattttatttccatgttatttgaggtttatcatgattttggtttcgacgaaattattatccaattttcgactcgcccagataatcgtgtaggcagtgatgagatatgggacaaagctgaaaaagcgctcgaattggcaatcgaaaagaataaattagaatgtgagcttcaaccaggcgaaggcgcattttacgggccaaagattgagttttctctgagagattgtattggcaggatttggcaatgcggaacaattcaggttgatttttcaatgcctgaattacttggtgcgagttatgtagatgaggatagctcaaaaaaagtccctgtgatgttgcatagagctgttgtaggctcaatggagaggtttattggcatattaatagaaaactatgctggttcgtacccaatttggctatcaccagttcaagcggttgttgtatcaattactgagaatcaagctgaatacgcaagaaaagtgtcaaatatactgaaaaaccaccattttagagtagaacatgacttgagaaatgaaacaatcgggcttaaaattcgcgaccacgctatgcagcgcataccatatcaaattattttgggtccgcgtgaacaagacgaaaatacggtggcagtgcgaacgagggatggggaagatcttggttcgatgtcacttaatgattttattcagcgattagataaagatatagaatatcttggtcgcgttgatttgggggattaat

SEQ ID NO: 303572 - DNA, 948 bp, Unknown
  Bacterial polypeptide expressing nucleotide sequence isolated from the Sargasso Sea
ccatgaactgtccgcatcatcataagatattttcttcattacctagaatttatcgcgacatgcctgtcagattatcagaatacggaacatgttatcgttatgaaaaatctggtcaattatttggtctgatgagagtgcgaagtttacaaatgaatgacgcacatatctactgcactccaaatcagtttaaaaaagagtttatggatgtttgtaggatgtatatagagtactttgagctatttaacattgagaaatataccatgagacttagtctacatgacaaagaaggattgggagagaaatatgtcaacgagcctgaactatggctagagacagaacaatgggttagagaagctttagatgaaggcggtttcaattatagtgaggtatcgggcgaggctgccttttatggaccaaagattgatgtacaagtttggagcgcgattggcaaagagtttacactagctacgaatcaggttgattttgtagtgccaaagagatttaatttatcgtataaagatccaaatggtgaacaacagacaccaatttgtatacatcgcgcgcctctcagcactcatgaaagatttattgggttcttagttgaacacttcggtggaaattttccactctggcttgctccggttcaggtggcgattttacctgtatctgataaaacgaatgagtatgctagaaagataaatgaaaaattaatagatgtcgatatcagaacatttttggatgatagatcagataaaataggagctaaaattcgaaatgctgaaattaatagaattaatgtaatgctcatattaggtccaaaagaagagaaaaataatactgtttccgtaagaagaaaaatttctggagatttaggaactatagatcaagatatgttaatttctcagcttgttaaagaaataaaggataggagtttgacttatagctaaa

SEQ ID NO: 303573 - DNA, 853 bp, Unknown
  Bacterial polypeptide expressing nucleotide sequence isolated from the Sargasso Sea
aaggtatgctgaatttggtttatgtcatagatatgaaccctccggaactatgcatggattaatgagggttagggcttttactcaagatgacggacatattttttgtactgaggaccagattgaatcagaaacaggattatttattaagttcctttcaagcatatacgctgatttgggatttaaaaattttgatatcaagttatctactagaccagagatgagggttggttcagatgagacatgggataaagcagaagaggctcttgaaacggcaattaaaaatttgggatatccttatagaattgatgagggtgatggcgcattttatggaccgaaattagattttgttctcaccgatgcaataggtagagagtggcaatgtggtacttttcaattagatttcaacttagcagaaagacttgatgctggttatgttggagaggacggaaaaaaacttattccagttatgatacatagagctgttttaggatcttttgagagattcattggcatcttaattgaaaattattctggaaagtttcctttttggctatctcctcaacaagttgttgtggcttcaattgtttctgatgtaaatgattattcatcagagatagtggaatccctcaaaaaagagggcattttagctgaagctgacctcaggaatgaaaagattagttataaaattagggagcatagcagtaaaaaagttccaattattttagcaattggaaataatgaaaaaaaagatcgaactgtatcaattagaagaattggaagtactgatactgaagtcgtagaccttaaagtagcaataaaacagattgccaaagaaaacacagctcttaactaa

SEQ ID NO: 303574 - DNA, 1111 bp, Unknown
  Bacterial polypeptide expressing nucleotide sequence isolated from the Sargasso Sea
aatgaaaaatataaaaataacactaccagataattcccataagagtgtacctattggaacaactcctcagggagttgctgatattatcggttctgggttggcacgtgcagtagttgttgcgaaagttgatggcgatttaaaagatttaaattttccattgcagcaagattgttcattagagctttttacaggcgatacagaagaaggtcatgatacgctattgcattctacagcccaccttatggcccaagctgtaaaatctttattccccaatgctaaagttactattgggcctacgatagaaaatggattttattatgattttgatgtcgataatccatttacagatgaagttcttgaaaagattgaaataaaaatgaaagaattagcaaaatctggtcaagaaataaatcgaaatgagttatctgctaaagaggctgtttctctttttaaatcgatgaatgaagattacaaggttgagatcatcgagcaaataaatccagatgatataattagcacttacatacaatcagattttactgatttatgtagaggcccgcatgtttcaaatacttcaaaaataaagcactttaaattactttcatcttcaggtgcatattggagaggtgatgagaataataaaatgcttcagaggatatacggaactgtgttttcctcaaaagaagctttaaaaaaacatttagagaatcttgaagaggctaaaagaagagatcataggaaaattggtaaagaaatgcaattatttgcttttgatggagatattggtcccggcttaccattatggcttcccaatggcactgtaatgattgaggaacttgaagtattagctaaagatactgagaaaaaagcaggttatagtcaggtgaggactcctcatcttactaaaggaactatttatgaaaagtctggtcacctagatcattataaagaatcaatgtacccagaaatggagattgatggtgttgattattatgtcaagccaatgaactgtcctcatcatcataagatatattcttcaataccaagaagctatcgtgatatgcctgtcagactctctgagtatgggacatgttatagatatgaaaagtct

SEQ ID NO: 303575 - DNA, 1480 bp, Unknown
  Bacterial polypeptide expressing nucleotide sequence isolated from the Sargasso Sea
atgagtgaaataaaaattacattaccagacaaatctgtaagatcctatgatgaaggtgttacacctttagatgtagctcaatccattggccctaggttagcaaaggatacaattgttgcatcaatagatggtgatttagttgatataagtagaaaaataaatcacgactgtgaattaacactttatactggtgatagtcacgaaggccatcaggtgctacttcatagcgctgcacatcttatggctcaagcagttaaatttttctggcctaacgccaagctaacaattggtccagcaatagataatcgtttttattatgactttgaccttgattatacattttctgaagaagacttaataaaaattgagaaaaaaatgcgagaattagctgaaaatgattatccatgcttaaggaaagaattaactagagatgaagctgcagatttttttagagatttggacgaatcatacaaattagagattttagatgatataccaagcgatgaaatgctaacctcatactctcaaggtgattttgttgacctttgtcgtggacctcacgtgccatcaacaggtagtataaaatatttcaatctcctcagtacatctggcgcttattggcgtggcgatgaaaaaaataaaatgcttcaacgaatttatggaacagttttttctacgaaagaaaaattaaatagctatttagaattgcttgaagaagccaaaaaaagagaccatcgtaagctcggtaaggaactagaaatatatgcatttgatgatgaagttgggccaggattacctctttggctaccaaatggcggtataattatagagcaattagaaaaactagctaaagaaactgagaaagaccatggctaccatcaagtccgttctccacatttaactaagggagaactatataaaaaatcgggacacttagatttatataaagattcgatgtttccagcaatggatgtcgatgggaatgattattatgtaaaaccaatgaattgtccacatcatcataaaatatatgatgcgtctccaaaaagctatagagatttaccttatcgaatagcagagtatggcacatgctatcgttatgaaaaatcaggtcagttatttggattaatgcgtgtaagaagcatgcaaatgaatgatgcacatatctattgctcacaatctgattttaatagcgaatttttagatgtttgtaacatgtatctagagtattttgaaatttttggtataaaaaaatatgaaatgagactcagcctccatgatccaaaagaattaggtaaaaaatatataaatgaacccgaactttgggttgaaactgaaaagtcagtcaaagatgctctaattaaaggagggattaattttgtagaaataccaggagaagcagccttctacggtccaaagattgatgttcaagtttggagtgcaatcggcaaagaattcacattagcaactaatcaagtag

SEQ ID NO: 303576 - DNA, 1283 bp, Unknown
  Bacterial polypeptide expressing nucleotide sequence isolated from the Sargasso Sea
tcaggtgcatattggcgtggagactcgaataatgaaatgttgcaaagaatttatggtacaggctgggctaatcaaaaggacttagatgtttatcttcaaagaattgaagaagcagaaaaaagagatcatagaaaactaggaaaggaaatggatttatttcattttagagaagaaagtcctggatctgttttttggcatgaaaaaggatggagcctttttcaaaaattagttgcttatatgagaatgaaacaagaccatgcaggatataaagaaataaatactccagaaatacttgatagatctttatgggaaaaatcaggtcattgggaaaaatttggagcaaatatgtatacatctacaacaccggatgaaaaagttttcgcaattaaaccaatgaactgtcctggatgtgttcaggtatttaatcaaggtttaaaaagttatagagatttgccattaaaaatgtctgaatttggaaaagtacatcgttacgaaccttctggagcacttcacgggctgttaagagttagagcatttacacaagatgatgcacatattttttgcactgaggatcaaataactgaagaatgtctatcagtaactaatttgatattagaaatatacaaagacttaggatttgaggacgtaatattaaaatattcagaccgtccagatttaagagttggtgaagatgatgtttgggataaatcggaagcagcattattagaagctataaaagcatcaaaacttgagtattcaattaataaaggagaaggagcattttacggtccaaaaattgaatttgttttaagagatgcaattggaagagactggcaatgtggaactttgcaagttgatcttaatttgcctggaagattaggagcttcttttgttgataaagatggaagtaaaaaagtacctgttatgcttcacagagctttatttggatctttagaaagatttattggaatactaattgaaaattacgcaggtaaattacctttctggctttcaccaacacaaacgatagttattcctatatcgaatgattttgatgattatgcaaaagatgtaaatacacaacttaaaaaaagtggtataatgtcagaagttgatcttaaaaatcacaatttgaattacaaaattagagaacattcacttacaaaagtgcctatgttacttatatgtggaaaaaaagaagttgacagcaacacagtaactattagaagattggattctaaaaaacaagagagtatggatttaaaagaatttattaaacaaca

SEQ ID NO: 303577 - DNA, 1303 bp, Unknown
  Bacterial polypeptide expressing nucleotide sequence isolated from the Sargasso Sea
cttcagagaatttatggctgcgcctttttaaataaagagcaactaaaaaatcaccttaaaatgcttgaagaagccgcgaaaagagaccatcgaaaacttggtcgagaaatgaaattatttcatattcaggaggaagcaccaggacaaatattttggcatccaaatggttggaaaatttatacaacattacaagactatatgcgccgcaaacaggaacaagatggttatgttgaggtaaatactccacagctagttgatcgaaaattatgggaagcatctggtcattgggaaaaatatcaagagaacatgtttatagttgaagtcgatgaagaacatgcccgcgaaaaagcagttaatgccctcaagccaatgaattgcccatgtcacgttcaagtttataatcaaggacttaagtcatatcgtgatttacccctcagaatggctgaatttggcagttgtaatcgatatgaaccctcaggtgcactgcatggcgtgatgcgtgtgcgcggttttactcaagatgatgcccatattttttgccgcgaggatcaaattgagtccgaaacaaaaaaatttataaacttcctgtctgacgtttataaggatttaggctttaaaaaattctccatcaaattttctgatagaccagaaaaacgttcgggcagcagcgaggtttgggataaggcagaagacgctttgaaatcagcaacaacagctgctggttatgaatttgaaataaatcctggcgagggtgctttttatggcccaaaacttgaatttgttttaacagacgcaattggtagagattggcaatgtggcactctccaagtagattttgttttaccagatcgattagatgctaattatattggggaggatggtaacaaacatcgccccgttatgctccatagagcttgtttgggctcttttgaacgtttcattggcatattgattgaaagttttgcaggtcggttaccattttggctcgcgcctagacaagtcgtcgtcgcagccattgtttctgacgcaaatgactattgcgaaaatgtcgtaagcgctttgagagccaaaggcatacgggcggaggtcgatttacgaaacgaaaagattaattacaaagttcgcgagcattccgtaagtaaagttccagtgatcttagcctgcggcatgaaagaaattgctgatcaaactgtttcggtaagaaggttgggggaaaaacatacaaaggttgaacaactatctgagatgataaatcaactaacagaagaagccaaatctccagatcaattagccgctaattgaa

SEQ ID NO: 303578 - DNA, 1467 bp, Unknown
  Bacterial polypeptide expressing nucleotide sequence isolated from the Sargasso Sea
gatggtcagtcttagattgccagacggaagcgtaaaaaagtttcccaagcctgtaacaggtgtggaggtggctaaagaaatcggccctggtttagccaaagctgctttagccataagagtaaatggcgcttttgcagatctaaaaacacaaataaatgcggactcagagttttctgttgtaacagctagtgatggcgacgctctagaattaattcgccacgatgctgcacattctttggctcaatcagtccaagagttgtttccagacactcaagttacaataggcccagcaatagaaaatggtttttactatgattttgctagagaaacccctttctcgtctgatgatttttctgatattgaaaagagaatggaagaaatcgtggatcgtgacttgcccatagagagagaaatctgggatagaaataaagcaatagagtattttaagtcaaaaggggagagttataaggcggagctaattcaagacttaccccaaaatgaggaaataataatatacaaacagggcgattggatagatctgtgtcgaggccctcatttgccatcaactggtaagctgcctctcgcattcaaacttacaaagatagctggagcctattggcgcggcgattcgacaaaggaaatgcttcagagaatgtatggaacagcttgggccaacaaaaaacaattagctaactatttgacgatgttggaggaagcagaaaagcgagaccataggcgtttgggtcgcgaaatggatttgtttcattttcaagaacatgcagtgggttcagttttttggcacccaaaaggctggaccctatacagaattataatggattacattagagttaaactggaattagcgggctatcaggaggttaacacaccgcagctagttgatagttctctttggaaggactcgggtcattgggataaatttcgggagcaaatgtttatttcggaggcggaagataaagtccttgcaattaaaccaatgaattgtccttgtcatgttcagatatttcgacaaggaattaagagctataaagaactccctatccgcatggcagaatttggctcttgtcatagaaacgagccatcgggagcgctacatgggttaatgcgggtaagggcttttacgcaggatgatgcacatattttttgtaccgaagaccaaatcgtttctgaaacggaaaaattttgttctctgttgatggaaatatacaaggcctttggttttgaaaatatacagataaagttttctgatcgacctgaaaatagagctggtgaaaataaagtctgggatcaagcagagaaagcgttaatcgaggctgttgaagtagcaggctacagttatgaattaaaccctggtgagggggcattttacggccctaagcttgagtttgtattgcgtgacgctattggcagagattggcaatgtggaacacttcaagttgatttcgtctg

SEQ ID NO: 303579 - DNA, 1741 bp, Unknown
  Bacterial polypeptide expressing nucleotide sequence isolated from the Sargasso Sea
atgagtaacaacgaaccatttattgatattttaaggcatgatacagcccatgttttggctatggctgttcaggagttatttcctgatacacaggttaccatcggtcctgtaattgaaaatggtttttattatgattttgaccgaaaagagccgtttactgaaaaagacctcggaacgatcgaaaagaaaatgaaagaaattgtaaatcgggacgaaaagacttcatttaaagtaatgagcagggaagatgcgattaagctattttccgataaaggtgaaaactataaagtagagatcattagagacttgcctgaaagtgaagaacttaaagtatattatcacggtgaatggtttgatctttgcaagggaccacatttagagtcaacaggtaaaattggaaaagcatttaaattaacaaaagtagcaggagcttactggcgaggtgactcaaataacccaatgcttcaaagaatttatggcacagcttgggaaacacaagaagatcttgaaaattatctgaatttgttaaaggaagctgaaaaaagagatcatagaaaacttggtaaagagctagatttatttcattttcaagaagaggctccaggctcagttttctggcacgcaaaaggttggacattatttagaacacttattgattatatgcgtcaccgacaagaagaggctggttatgaagagattaacactcccgatattatggataagtcattatgggaaagatccggacaccttgaaaaattcggtgacaatatgtttaccacagaagcaagggaagaacgtgtttatgctcttaaaccaatgaattgtcctggatgcgtacaagtatacaagcaaggactgaagagttacagagatttaccgttaagggttgctgagtttggaaaagttcacagatatgagccatcgggtgcccttcatggtttaatgagagtcagggcatttacacaagatgatgcacatatattttgtactgaagaccaaattactgaagaaagcaaaaaggtatgcgatttagttttaagtatttataaagattttggatttgaaaatgtatcaattaaattttccgaccgtcctgaaaaaagagtcggcaatgatgatgtatgggataaatctgaggccgctcttcgtgaggcaatggaagctacaggattagaatataccttaaatccaggtgaaggagcattttatggtccaaaattagaatttattctaaaggatgccattggtagagagtggcaatgcggaacattgcaagttgatcttaacttgcctgagagacttggtggtcattatgttgcagaagatggtcaaaagcataacccagtaatgttacatcgagcattgtttggatctttagagaggtttacaggaattttgatagaacattatgctggcaatttaccactttggttagcgccaatacaagctgtggttgcaccaattacatctgacataaacgaatacgcagagagagtatttttatctcttaaaaacaaaggtattagagttgaaaaggacttaagaaatgagaagataagctacaaaataagagaaaactctctaaaaaaaataccttatcaattaatcctaggtaagaacgaaatggaagacaatactgtaacattgagggagtttggtaatgataaacaagaaaaaattaaatttgaaaaattaaatgatttttttcaaaaaaaatgtatgatgccgtctcatcaataga

SEQ ID NO: 303580 - DNA, 742 bp, Unknown
  Bacterial polypeptide expressing nucleotide sequence isolated from the Sargasso Sea
tatgccaaaaataaaattaccagatggatcagaaaaagaattcgataaaccaattaattttgatgaacttgcatcttcaatagggtctggtctagctaaagctaccgttgctggtttacttaatggtaaacttgtagatgcttcagaacttattgaaacagattctgatgcagtattagtaactaatagtgatgatgatggcatagaaataatcaggcattcatgcgctcatttatttggacatgctttaaaacaattatatcctgaagcaaaaatggctataggcccaacaatagaaaatggattttactatgatatcgatcttgaagagtcattaagcgaaaacgatcttgagaaaattgaattaagaatgaaagaattggcgcaaaccaaatataatgttgttagagaggttgtaactagaaaaaaagctcttgatacatttaaagatagaaatgaaccatataaaattgaaattatcaatgaaatacctgacgatgaaatcatagccctatatcatcataatgaatatatagatatgtgtagaggacctcatgtaacatcagtaagacatttaaaagcatttaagttaacaaaaattgctggagcatattggaggggtagttctgacaataaaatgcttcaaagagtttatggtactgcatgggcatcagaaaaagaattaaataaacatctaattcttctagaagaagcagagaaaagggatcacagaaaacttgga

SEQ ID NO: 303581 - DNA, 1573 bp, Unknown
  Bacterial polypeptide expressing nucleotide sequence isolated from the Sargasso Sea
aatgccaataataacattacctgatggaaacaatattgattttcctaacaaagttactggagtggaggtagctgaaaaaattagtaaatcactagcaaaacaagccatagtcataagcgttaatggtgaacttaaggatcttgattatttaattgaaaacgattgttctgtaaaaatttttacctctaaaaatcctgagggcttagaaacaataagacatgacactgcccatattttagccatggctgttcaagagctatttcctggaacacaagtcacaattggaccagtaattgaaaatggattttattatgattttgcaagaaaagaaccatttacagaagatgatctaattaaaattgaaaataagatgaaggagattgttgatagaaacgaaataacaaaaagagaagtttgggatagaaataaagcaataagtcattttaaaaaaaagggagaaatttataaagcggagctaatcaaagctattcctgaaaatgaagatgtatcaatatattttcatggagaatggcatgatttatgtagaggtcctcatctttcctcaactggaaaaattggaaagaattttaaacttacaaaagtttcagaggcgtattggagaggagactctaataatgaaatgttacaaagaatttatggaacttgttggagtaacaaagagcaattaaagttatatttggataggctggaagaggctgaaaaaagagaccatagaaaattaggtaaagagatggatctatttcattttagagaagaaagtccaggatcagtcttttggcacgaaaaggggtggattttatttcaaagacttgttgagtatatgagatttagacaaagactcgatggttacaaagagattaatacacccgaattgttagacaaaactttatgggaaaaatctggtcactgggaaaagtttgcagaacatatgtatacgtcagaaactccagatgaaaaagtttttgcaatcaaaccaatgaattgcccgggatgtgtccaaatattcaatcaaggtcttaaaagttatcgagatcttccactaaaactctctgagtttggaaaggttcacagatacgaaccttcaggagctttgcacggactattacgagtaagagcatttactcaagatgatgcacacatattttgcacagaggatcagattactcaagaatgtttaagtgttacaaatttaataatagatatttataaaaatcttggttttgaaaaagtaattttaaaatattctgatcgacctgaaaaaagagttggtgatgataaaatttgggataaatcagaagcagcgttattaactgcaattaaaaaatctaaattagagtattcaattaataaaggagagggagcattctatggaccaaaaattgagtttgttttacaggatgcgattggcagggattggcaatgtgggactttgcaagttgactttaatttaccaggaagactaggtgcttcttatgttgacaagtcaggaggaaagcaagtacctgttatgttgcatagagctttatttggttctttggagaggttcataggt

SEQ ID NO: 303582 - DNA, 1927 bp, Unknown
  Bacterial polypeptide expressing nucleotide sequence isolated from the Sargasso Sea
tatgaaaattactttacctgacaaaagtgtaagagagttaccagatggatcgtctggttatgatgtagcaaaagatattggtccagggttagctaaatccgctgtggcaatcattgttaacggcgaaaaaaaagatttacatgatattatcgaaaaggattcaacagcgtcaataattacaatagattcagaagatggtcttgaaataatgagacacactcttgctgcacaggttctagcaaaagctttaaaaaatctttatccaaaatcttatttagcaattggaccaacgattgaagatggcttttattatgatattgaaacaagtcaatcaatatcagtagatgatcttgagaaaattgaaaaagaaatgaataaaattatttcttcaaaatcatctataactaagagaatcgcaagtaagaaagatgcattaaaagtttttaaatcccttgaagagccatataaacaaacaattattaatgaatcagatcaaaaagataattttcagctttattatcaagatcaagatagttttgtagatctatgtaaaggaccccatctaccaaatttgagttttataggatcttttaagttaacgaaggtttctggagcatattggaaaggtgactctaagaatactatgcttacaagaatttatggcactgcttggaatagtgacaaagatctaaataagcacttaaattcaattgaagaagcgcaaaaaagagatcatagaaagcttgggagagaaatggatttgtttcactttcaagatgaggctccaggaatggtcttttggcatccagatggatggaccatttatagacaattacaaaactttgtaagacaaaagattgagagtaatggttatgttgaaattaatacaccattagtaattgataggaaattatgggaagcatcaggacattgggataagtatcgagaaaatatgtttatcactgaaatagatgaagaacatgcaaatgaaaaaagagttaacgcattaaagccgatgaactgtcctggccatgttcaaatctataatcaaggaataaagtcctacaaagatttgccattaagatttgcagaatttggtgcctgtcatagatatgagccatctggaacgatgcatgggctcatgagagttcgaggatttactcaggatgatggacatatcttctgtacagaggatcaaatagaatcagaaacaggactatttataaatttattatccgatatatatgctgatttaggatttaaagattttaatattaaattatctacaagacctgaagttagagtagggtcagataaaacatgggataaggctgagcaagcacttgaatcagcaataaaaaatttgggatacccatataagctagatgaaggagatggtgcattttatggcccaaaattagactttgttttaacagatgcaattggaagggcatggcaatgtggcacctttcaattagattttaatttagcagataggttggatgctgaatttgttggcgaagatggaaaaaaacatatcccagttatgattcatagagcagttctaggatcttttgagagatttattggtattcttatagaaaattattcaggtaagctacctttttggcttgctcctaaacaggttgtagtagcctcaatagtctctgaagttaacgattatgttatggaaattcaagaattatttaaaaataaaggcatcaggactgaagtagatctaagaaatgaaaaaattagttacaaagtaagagaacacagctctaaaaaagtacctattattttagcaattggaaaaaatgaaaaagctaataatactgtctctattagaagaataggcagtaatgattcgaaagtgatggatttaaataaagcagttcaagaaattactaaagaaaatactatatga

SEQ ID NO: 303583 - DNA, 892 bp, Unknown
  Bacterial polypeptide expressing nucleotide sequence isolated from the Sargasso Sea
gttcaatctacaccagggtattaagtcatacaaagatttgcctttaaagtatgctgaatttggcttatgtcaccgatatgaaccatcagggacaatgcacggcttgatgagagtgcgtgcatttacacaagatgatggtcatattttttgcaccgaagatcaaattgaatctgaaaccggcttatttattgaatttctatcaaacctatatgcagatttaggtttcaaagattttgacataaagttatcaaccagacctgaaatgagagttggatctgatgagatatgggataaagccgaagaagctcttgaggcagcaattaaaaatttaggctatccgtatagaattgatgaaggcgatggagctttttacggtccaaagctagactttgttcttacagatgcaattggcagagagtggcaatgtgggaccttccagcttgacttcaacttagctgaaagattggatgctacttatattggtgaagatggtaaaaaacatatacctgttatgattcacagagcagtacttggatcattcgaaagatttattggtatattaatagaaaattatgccggtaaattaccattctggttagctcctcaacaagttgtaattgcatctattgtttcagatgcaaatgattatgctctcgaaattcaacagagtcttaaagataacaaaataagatgtgaagtagatttaagaaatgaaaagattagctataaggtcagagaacatagcacaaaaaaagtacctatcattttggccattggcaagaaggaaatggctgataaaacagtttccttaagaaggattggaagcaatgaatcatcggtactttcactagatgatgctataaaagatataactaaagagagcagggcttaa

SEQ ID NO: 303584 - DNA, 310 bp, Unknown
  Bacterial polypeptide expressing nucleotide sequence isolated from the Sargasso Sea
tggctggcgcccgtgcaagcagtgatcctgaacatcacagatcgacagcaagctttcgccctcgaaacagaaaaattccttaaaaaacaggggctcagagtcgaaactgacttgagaaacgagaaaattggctataaaatccgcgaatctaccctgaaacgcgtcccgtatctccttgtggttggggatagggaagtagaacaggggtgcgtagccgtgcgtacgcgcgacggggaagacctaggcacgtttgctgtcgcagacctgcttgaccaatgtcttcgcccgaacgcaggcgcgcggcgttaat

SEQ ID NO: 303585 - DNA, 838 bp, Unknown
  Bacterial polypeptide expressing nucleotide sequence isolated from the Sargasso Sea
tatgaaattaacattaccggacaaaagcataagagatttagaaaatggatcctctggctttgatcttgcgagtgacattgggcctgggcttgctaaagctgcagttgccgttactgtggatggtgttcaaaaggacttacatgatcctattatgcaagattctagtgtttctattattacaattgactcagaagaaggactcgaaattatgcgtcatactttaactgctcaagttttggcacgggcagttaaaaatttatatccaaaatcaaagctcgcaattggaccaacaattaaagatggtttttattatgacgttgagtgtgatgaaactatttcagtggacgatttaaaaaatattgaaaaggagatggataaaataattaaaaccaaatcatcaattaaaaagaagcttctatcaaaaaaagatgcacttaaagtatttaaagataaggatgaatcttataaagaagaaattattaatgattctgaccaagagaacgaatttcaactttattaccaagacgatgaagattttgttgatttatgcaaaggtccccatctcccaagcttaaatttcattggtgcatataaacttacgactatatcgggggcttattggaaaggggattcaagtaatacaatgctcaccagaatatatggcacagcatggagcaacgaaaaagatctaaaagagcatttaaataacattgaagaagcacaaaaaagagatcatcgaaaacttggaaaagaaatggatttatttcattttcaggatgaggcaccagggtatggttttttggcatccagaatggatggtctatttatagaaatttaa

SEQ ID NO: 303586 - DNA, 955 bp, Unknown
  Bacterial polypeptide expressing nucleotide sequence isolated from the Sargasso Sea
aactccagatgaaaaggtgtttgcaataaaacctatgaattgtccgggacatgttcaggtatttaatcaaggactaaaaagctatcgagatcttcctttacgatatgcagaatttggaaaagttcatcgatatgaaccttcaggagcattacatggtctacttagagttagagcttttactcaagatgatgcacatattttttgttctgaggatcaaattacaagtgagtgtttaattgtcactaatttaattttagatatttataaagaccttgggtttgaaaatgtaattcttaaatatgcagatagacccgaagtgagagttggtgaagatgaagtttgggacaaagcagaagcatccttacttgaagcagtgaaagcatcaaagttagaatatagtattaacaagggagaaggagcattctatggtcctaaaattgagtttgttctaagggatgcaattggtagagattggcagtgtggaactttgcaagttgatttaaatttacctgaaagattaggagcctcttatgttgataaagatggaactaagaaaattcctgtaatgttgcacagagcactatttggatctttagaaagatttattggaatcttaatagaaaattatgctggtaaatttccattctggatatcacctttgcaaacaatggtaattcctatttcagaagaatttaatgactatgctattgagatatctaagaaaattaaaaatgtaggtataagttcttctgttgatttaaaaaatcaaaatttaaattataaaataagagatcattcgttagctaaaatacctcttttgttaatttgtggtaaaaaagaagttgactccaattctgtaacgattagaagattagattctaataaacaagaaaatatggacatagacgcattcttaaaaactttctctgctttaaacaaagcatcctcaaactaa

SEQ ID NO: 303587 - DNA, 1274 bp, Unknown
  Bacterial polypeptide expressing nucleotide sequence isolated from the Sargasso Sea
aaggatttatggaacggcatggaataatgaaaaagatttagttaataccctgacaatgcttgaggaagctgagaaaagagatcacagaaaacttggaaaagcccaacaattattccatattcaggaagaggcaacaggttctatattctggcatccatcaggatggacaatttatcaagaaatagaggcttatattcgaagaagattaaacaaagctcaatatcatgaagttaagacaccacaacttattgatagaaagctttgggaaaattctggtcattgggaaaagtttggtgagcatatgtttacgacagaatctgatgaagatcagactttagccttgaaaccaatgaattgtccaggccatgttcaaatttttaaacaacgactaaaatcttttagggatcttcctttaagactatcggaatttggtgcctgtcataggaatgaacccagtggtgctcttcatggtataatgagagtaagagcatttactcaagatgacgctcatattttttgtacagaagaacaaattaatcaagagtctgtatctttttgcgaacttttaagaagtatatacaatgactttggttttgaagatataacaattaaattttcagatagacctgatataagagctggagatgataaaacttgggatcaagctgagaaagcgttaatggatgcaagcaatgctgcagggcttgaagttataatgaaccctggtgaaggggctttttatggccctaaattggagtttgtattaaaagatgctattggaagggattggcaatgtggcacattacaagtagactttgttcttcctgagagattaaaggctgaatatatttcaaccgatggatcaaaaaaaagaccagttatgcttcatagagcaattttgggttcaatggagaggtggtttggtattttaatcgaacaatatgctggtagatggccactttggctagcccccaatcaaattaaaatttgtactattacccagaatactgatagttatgctgaagatattaaaattcaagctgaaaaattagggcttagagtatcagttgataaaagaaatgaaaaaataggttacaagatcagagagcattcagaaaataaagttccgatattgttaataataggtaataaagaattagaaaataaagaagtttcagtaagacagctcggctctaaaaaccaagtaaacttagatataaacaaggctttgctaaaatttaaatctgaagcattgcctccacgatcttgctaga

SEQ ID NO: 303588 - DNA, 862 bp, Unknown
  Bacterial polypeptide expressing nucleotide sequence isolated from the Sargasso Sea
gtttatagatatgaacaaagtggagaattgcatggtttaagtagagttagagggtttactgttgatgatgctcatatattttgtactcctgagcaagttgattctgagtttaaaaatactattgaccttgttctttatgtttttaggtctttaggttttgaaaacttttttgctcaagtctctctcagagacgataataaacctgaaaaatatattggatctaagaaaaattgggaaatttctgaaaatgcaataatagatgccgcaaaggaaaaaggtcttagctataaaatagaatatggagaagctgcattttatgggccaaaacttgattttatggtaaaagatgctcttggaaggagctggcaactagggacaattcaagttgattataatcttcctgaaagattcgagctttcctataaaggacctaaaaacgaagatttaagaccagttatgattcacagagctccatttgggagtatggaaagatttgttgcaatacttcttgaacatactggcggattatttccattatggctagctactactcaaattgagatattagttgtaagtgaaaactataaaaattatggtcaaaaagttttaaatatcttagaaaatcacgaaattcgcgcccacctagatgatagaaatgagactgtaggtaaaaaaatcagagaatctgaaataaataagattccttacatgattataataggtgagaatgaagagaaaaatgaaacagtttcaattagaaagcataaagaaggagatttaggtgaaatgaaaattgataagtttttagatattttcaaaaaagaaatttctgatagtataccagaatttaatattaactaaa

SEQ ID NO: 303589 - DNA, 632 bp, Unknown
  Bacterial polypeptide expressing nucleotide sequence isolated from the Sargasso Sea
aatgccagcaataacacttccagacggtagtattaaaaattacgaccatccggaatcaatctataaggttgcggcggatattggaccaggtttagcgagcgccacaatcgccggagaagttgatggcaagctttgtgatgcctgtgatctaattgagcatgatggcacactgagaataatcacaaataaagatgaagagggtgtggatgttattaggcattcttgtgctcatctgattggacatgcggtaaaacaattatttcctgaagctaatatggttataggtccgatcattgaaaatggattctattatgatattgctgtggaaaaaccgtttactcctgatgatcttcaggttattgaagatcggatgcgctcgctcataaagcaaaaatatgatgtcgttaaaaaaatgacaccgagagacgaagtgatagcggagtttgaaaataggggcgagcaatacaagttaaaattgatagaagacatgcctgaagaggaagcaatggggctttactatcaccaggaatatatagatatgtgccgagggccgcacgtacctaacactagttttctagaaaattttaaacttacgaaggtatcacgtgcatactggcggggcgattctagga

SEQ ID NO: 303590 - DNA, 1708 bp, Unknown
  Bacterial polypeptide expressing nucleotide sequence isolated from the Sargasso Sea
tatgaaaattacattaccggataaaagtgtaagagaattagaagatggatctactggctatgatttggccaaagatattggtccaggtctcgctaaatctgctgttgctgtaacgatagatggtgaaaagcatgaccttaatgatgttattgaaaaagactcaagtgtttcaatcatcacaatagattcagatgatggcatcgaaataatgaggcatactcttactgctcaagttttagcaaaggctttaaaaaatatttatccaaaatcttatctagctattggaccagtaattgatgatggcttttattatgacattgaaacagatgagtctatctcaattgatgatcttgaaaagattgaaaaagaaatgcataaaatcatttcttcaaaatcatttataacaaaaaaactacttaataagaaagatgcacttaaggttttcaaaactctcaaagaaccatataaacaatctattattaatgattcagatcaaaaagataactttcaactttattatcaagacgatgatagctttgtagatttgtgtagaggcccacatttgcctaatttaagctttataggatcttttaagctcacaaaagtatctggagcatattggaaaggagattctaagaatactatgcttacaagaatttatggtactgcttggaataatgacaaagatctaaataagcacttaaactcaattgaagaagcacaaaaaagagatcatagaaagcttggaaaagaaatggatttgtttcactttcaagatgaggctccaggaatggttttttggcatcctgatggatggactatttatagacaattacaaaattttgtaagaaaaaagattgagagtaatggttatgttgaaatcaatacaccattagtaattgataggaaattatgggaagcatcaggacattgggacaagtatcgagaaaatatgtttatcactgaaatagatgaagaacatgcaaatgaaaaaagagttaacgcattaaagcccatgaactgtccgggtcatgttcaaatttataatcaaggaataaagtcttacaaagatttgccattaagatttgcagaatttggtgcatgtcataggtatgagccatctggaacgatgcatggccttatgagagttcggggatttactcaggatgatggacatatcttctgtacagatgatcaaatagaatcagaaacaggactatttataaaattattatccgatatatatgctaatttaggatttaaaaattttaatattaaattatctacaagacctgaagttagagtaggttcagataaaacatgggataaggctgagcaagcacttgaatcagcaataaaaaatttgggatatccttataagttagatgaaggcgatggtgcattttatggtccaaaattagattttgttttaacagatgcaattggaagagcatggcaatgtggcacttttcaattagattttaatttagcagataggttggatgctgaatttgttggggaagatggaaaaaaacataccccagttatgattcatagggcagttttaggatcttttgagagatttattggtattcttatagaaaattactcaggtaagctacctttttggctcgcccctaaacaagttgtaatagcctcaatagtatctgaagttaatgattatgttatggaaattcagagttattaa

SEQ ID NO: 303591 - DNA, 1195 bp, Unknown
  Bacterial polypeptide expressing nucleotide sequence isolated from the Sargasso Sea
atgaaaataactttgcctgacaacagttcaagagaattaccagagggttcctcaggctatgatcttgcaaaagatattggtcctggtcttgcaaagtcagctgttgctgtcactatcaacggtatccaaaaagatttacatgatgttatagaaggtgatgtatctgcctcgataattacaattgactcagatgaaggcattgagattatgagacatactctcactgcacaagtcttagctagagcattaaaaaatatttaccccagttcaaaattagctataggacctactattgatgatggtttttattatgatattgaaaccgaagatgctatatctatcgatgatcttgaaaagatcgaagatgaaatgataaaaattgttaaaaccaaatcatctattacaaaaaaattggttggcaaagaagatgctttgaaaatattcaaatcacagaaagagacatataaagaaagtattattgaggaatcagagcaaataaatgattttcaactttattatcaagatgatgaaaagtttgtagacttatgcagaggccctcatttaccaaatctaagttttgttggagcatttaaattaacaaaagtctcaggagcctattggaaaggggattcaaaaaataaaatgcttacaagaatttatggaacagcatggaaaaatgaaaaagaactaaataaatatttaactactctagatgaagctcagaaaagagatcataggaagcttggtaaagaaatgaatttatttcattttcaagatgaagcacctgggatggtattttggcatcctgacggttggactatatatagaaatcttaggaattttgtaaggaaaagattacaagataacaattatattgaagtgaatacgcctcaagtaattgatagaaaactatgggaagcctcgggacactgggataaatatagagaaaatatgtttataacagaaattgatgaagagcacgctaacgaaaaaagagttaatgcacttaaaccgatgaattgtccaggccatgttcaaatttacaatcagggaataaaatcttacaaagatttgccattaaaatatgcagaatttggtctttgtcatagatatgagccatcaggtaccatgcatggtcttatgagagttagagcatttacacaagatgatggacatatattttgcacagaagatc

SEQ ID NO: 303592 - DNA, 1927 bp, Unknown
  Bacterial polypeptide expressing nucleotide sequence isolated from the Sargasso Sea
atgagtgataaaattactattacatttcctgatggaaatttcagaagtgttaaaaaaggaataaatggttttgaaattgctgaagaaatttcaaaatctctagcaaaagaatctattgctataaaaataaacagtgaaatttttgatcttaaaagaagaattgaaaaagatgctaagatacaaataattaaaaaaagtgatgaagaggcgcttgatattcttagacatgattgtgctcatgttatggctgaggccgttcaatcattatttcctgaaacacaagttactataggtccttctattgagaatggtttttattatgactttgcgcgagaagaaccttttacactttcagacttacctaaaattgaaaagaaaatgcatgaaattatcagtctaggtgaaaaatttacaagagaagtttggtcgcgagaagaaactataaaattttttaaagataaaggtgaagattataaagtagaattaattgaagaattagatcccaatgaagaaataaccatctataagcaaggggagtggttagatctttgtcgtggtcctcatatgataagcacaaaacaaattggtaaaggttttaaattaatgaaagttgctggtgcttattggagaggtgactcgaataatacaatgttaacacgtatctatggaactgcctggagaaatgaaaaagagttagaaaatcatttacaacaaattgaagaagctgaaaaaagagatcaccgaaaacttgggaaagaaatgggtttgttccattttcaggaagaggcaccaggtggtgttttttggcatccaaaagggtggcaattgtttcaatcattaattaattatatgcgcttaagacaagatagggctgattatgttgaaactagcacaccagaattattagataaatctttatgggaaacatcagggcactgggaaaagtttagtgagaacatgtttacaaccgatccaaaagaagaaaaagtttttgctatcaaaccaatgaattgtcctggagcagtagaggtttataaacagggtttaaaaagttatagagacttgccattacgtatggcagagtttggaaaagttcatcgttacgaaccttcaggcgcattacatggattaatgcgagttagagcttttacacaagatgatgcacatattttttgcactgaagatcaaattactgaagaaagcaaaattgtttgtgatcttatacttagtatttacaaagattttggctttaatgatgttagaattaaattttcagatagaccggaaaagcgtgtgggtgatgatagggtttgggataaagcagaagaagcattgaagcaagctatggaagcaacaggtcttgagtacacattcaatccaggagagggtgcgttttatggcccaaaactagagtttgttttgcgcgatgcaattggacgtgattggcagtgtggaacacttcaagttgatttaaatttgccaggtagacttggcgcaacatatgttgctgaggatggtcaaaagaaagttcccgttatgttgcaccgagctctttttggctctttagagagatttgcaggaatattaatagagcattatgctggccatttaccattatggttatctccatcacaggtagtagttgctacaataacttctgaatcagataattatgcttttgatgtaaaagatcaattaagtaaaaatggtttgcgcactgacgcagacattagaaacgaaaaaataggttataaaatacgggaacatagtaatgctaaaataccgataattcttgctgttggaaaaaaagaagcagaagaaaaaactgtttctgtcagacgcttaggcagtcaagaaacattagttctaaagcttgatgaattaattagtgatttaaaaaaagaatctctttctcctattaattaat

SEQ ID NO: 303593 - DNA, 1237 bp, Unknown
  Bacterial polypeptide expressing nucleotide sequence isolated from the Sargasso Sea
ctgcaacatcaaacccaatggagcgtcatcgtgaacgacatcgaccatcgagtgctcggcaacaaactcgacctcttccatcagcaggaagaaggcgccggcatggttttctggcacccgcgcggctgggagctttaccgcgtgctggaggactacattcgcgcccgcatgcggcgcgcgggctttcgcgagatccgtacgccgcaattgctggcgcgctcgttgtgggaaaaaagcggccattgggagaagttcggcgcggcgatgtattcgctcgccgacgcggaagaagggcgcgcgctgtgtctgaagccgatgagttgcccgtgtcacgtgcaggtgttcaatcagcgcgtgcgctcgtatcgcgagttgccggttcgctatagcgagttcggcgcgtgtcatcgtgacgaaccttcgggctcgctcgaaggcctcaagcgtacgcgtgcattcgtgcaggacgacgcgcatgtgttctgcacggaggcgcatatcgaagccgaagtcggccgcttctgtgcgcttttgcgtgcggtctatgcggaccttggtttccccgctttcaaagtcgcgctggccacgcggcccgcgatgcgggcgggcaacgatcaaacgtggaatcgcgcggaagatgcgctcgccaatgcggcgcgcgcagcgggcctcgaattcgacgtgctcgaaggagagggcgcattctacggcccgaaattggagtttcatctgacggacagccgtgaacgcagctggcaatgcggcacgatccagctcgatttcgtgttgcccgaacggctcgatgcggagttcgtcaatgagcgcaacgaacgtgagcggccggtgatgattcatcatgcggtactcggcagcatggagcgttttatcgcgatgctgctcgaacatcatgaaggatggctgccggtatggctcgcgccggaacaggtcgtggtcgcgacgatcagcgatgcgaatgcggcctacgcgcaagaagtgatgcaagcgcttgaagacgccggcatccgggcgctgctcgatggccggccggagcggctcgaaaagaagatcgtcgacgcacgtgaaaagcaggtgccgatttttgtcgcggtcggctcccgcgacgagcgcgaccggacgatcagcattcgcatgcgtgatgggcaacagtcgacgcttgcgctcgcggaaggcgtcgagcgtttgcggctggctgcgctgccgcccgccacgcgctgat

SEQ ID NO: 303594 - DNA, 1243 bp, Unknown
  Bacterial polypeptide expressing nucleotide sequence isolated from the Sargasso Sea
aaaccaattaattttgatgaacttgcatcttcaatagggtctggtctagctaaagctaccgttgctggtttacttaatggtaaacttgtagatgcctcagaacttattgaaacggattctgatgcagtattagtaactaatagcgatgatgatggtatagaaataatcaggcattcatgcgctcatttatttgggcatgctttaaagcaattatatcctgaagcaaaaatggctataggcccaacaatagaaaatggattttattatgatattgatcttgaagagtcattaagcgaaaacgatcttgagaaaattgaattaagaatgaaagaattggcgcaaactaaatataatgttgttagagaagttgtaactagaaaaaaagctcttgatacattcaaaaatagaaatgagccatataaaattgaaattatcaatgaaatacctgacgatgaaatcatagctctatatcatcataatgaatatatagatatgtgtagagggcctcatgtaacatcagtaagacatttaaaagcatttaagttaacaaaaattgctggagcatattggaggggtagttctgacaataaaatgcttcaaagagtttatggtactgcatgggcatcagaaaaagaattaaataaacatctaattcttctcgaagaagcagagaaaagggatcatagaaaacttggaaaagaattagatctttttcattttcaagacattgcgcctggtatggttttttggcatgcaaatggttggtctatttataaagagttagaagattatattcgaaggaagatttctaaagaagggtataaagaaataaagactcctcaaatcctagataaagatttgtgggttgagtcgggccattgggataaatacaaagataatatgtatagaacaattatcgatgatagagagctcatgatcaaaccaatgaattgcccaggacatgttcaaatatataatcaaggaataaaaagctataaagatttacctcttcgaatggcggaatttggttcgtgtcatcgtaatgaaccatctggagctctccatggtctaatgcgggtaagaaattttgttcaggatgatgcgcatattttttgtactgaggaccaaatagaaagtgaaacagtcaatttttgtaaattacttcaagaagtatataacgaattaggctttaatgaagtttcaataatgtatgctgataggcctgagcagagggtaggttcgg

SEQ ID NO: 303595 - DNA, 1369 bp, Unknown
  Bacterial polypeptide expressing nucleotide sequence isolated from the Sargasso Sea
tatgattaatgttagttttccagataaatcagtaaaaaagtttgaaaaaggaactaaagttattgatatagctaaaagcataagtgaaggtttagccagaaaagttatatcagcatcatataatgatgaaatagttgaaacagaatcaccaattaacgaagatggatcaatcaaactttttacatgggatgatgatgagggtaaacaagctttttggcattcatctgcacatattctggctcaaacaattaaatctttttatcctaaatctaaacttactataggtccttcaatcgaaaatggattctattatgatgttgattttggtgatgatgttttttctgaaaaagattttaataaaattgaatcaaagtttttagagctagcaagagaaaatcatagttttgccatgaaatctgtatcaaaaaaagaagcaatagatttctataagttagagaataatgaatataaagttgaattaattgagggtcttgaagatggatcaattacattttgtgatcattctaatttctcagatttatgtaaaggagggcacattccatcaactggaatagttaaagcagtaaaacttcttaatgttgcaggagcatactggagaggagatgaaaaaaataaccagttaacaagagtttatggaatatcttttccaaaacaaaaattacttacagaatatcttgaattacttgaaaaagctaaggaaagagatcatagaaaaattggtaaagagttagaattatttacattttctaatagagttggtcatggacttccactttggttaccaaatggaactgaattaagggaccgattacaagactttcttgaagatgcccaaagaagggctggttataagaaagttatgtcttctcatataggtgcaaaagaattatatgaaacttctggacattatgaaaagtatggagcagatagtttccagccaatatctacccctaatgaaaccgaaacattcattttaaggccaatgaattgccctcatcactgtgaaatttataatgccaaaccccaaagttacagggatcttccgttaagactcgctgaatttggaactgtatataggtatgaacaaagtggagagttacatggtctaagtagagttagagggtttactgttgatgatgcacatattttttgcacacctgagcaagttgattcagagtttaataatactattgatttagtcctttatgtattcaattctttaggatttcatgacttttctgctcaagtatcattaagagatcctaataatcctgataaatatattggttcagataaaaattgggaaatttctgaacaagctatactaaactctgctaaagaaaaagga

SEQ ID NO: 303596 - DNA, 1775 bp, Unknown
  Bacterial polypeptide expressing nucleotide sequence isolated from the Sargasso Sea
tgatatgattgacgcggacgcacaacttcaaattatttctgcaaaagacgatgaaggtttagaaattcttcgtcacagttgcgcgcacttgttaggtcacgctatcaaacaactttggcctaacaccaaaatggctatcggcccagttatcgacaacggtttctactacgatgttgatatggaagaaagcctaacccaggaagatttagccaaactagaaaagcgtatgcttgaactggctaaaactaattacgacgtggttaagaacaaagttagctggcaagaagcacgcgatgcatttgaagcgcgcggtgaaagctacaaaatggaaattcttgatgagaacatcagcaaggacgaccgcccagcactgtatcaccacgaagaatacacagatatgtgtcgaggccctcacgtgccaaacatgaagttctgccatcacttcaaactgatgaaagtggcaggtgcttactggcgtggcgatagcgacaacaaaatgcttcagcgtatttacggtactgcgtgggcagataagaagcagcttaaatcttacctacagcgcttagaagaagctgaaaagcgcgaccaccgtaaaattggtaaagcacttaaccttttccattggcaagaagaagcgccgggtatggtgttttggcacaacgacggttggtcaatttacaccgagctagaaagctacgtgcgtaagaagcttcgtgaatacggttatgacgaagttaaaggcccattaatgatggaccgctcgctttgggaaaaatcaggtcactgggacaagtacgctgaaaacatgtttacgactgaatctgaaaaacgtgaatatgccgttaagccaatgaactgcccaggccacgtacagatattcaaccaaggtttgaaatcataccgcgacctgcctcttcgtatggctgagtttggctgctgtcaccgtaacgaaccatcgggcgcactacacggtctaatgcgtgttcgtggctttacgcaagacgatgctcacattttctgtactgaagaacagatcctagaagaggtgagtggctgtattaagatggtgtacgagacatacgctgcatttggtttcgagaacattaaagttaagttgtctactcgcccagaaaagcgcgtaggtgctgacgagatttgggacaaatcagaagctgcgcttgcagatgcacttaaagccaatgacatcgagttcgattatcaacctggagaaggtgcgttttacggaccgaaaattgagtttacactgcacgattgcttagaccgtgcatggcagtgcggaaccgtacagctagatttctcaatgccaggtcgcttaggctctacttatgtggcagaagatggcgaacgcaaagtgccggttatgattcaccgcgctattttgggttcactagaacgcttcattggtattttgaccgaagaatttgcaggtttcttccctctttggttagcgcctcagcaggttgtagtaatgaacattactgacaaacaagctgattacgcatcaaattgtgtaaaaaaactgcaagatttagggtttagagcaaagtctgacttgcgaaatgagaagatcggctttaaaatccgcgagcacacattaaagcgtattccatatatgctagttgtgggcgataaagaaatggaagcgggcgaagtagcagtgcgctctcgtcgcggcgacgacctaggcaaaatgagcctggaagactttattgccatggctcaacaagaagtcgtagaaaagacaattaaatagt

SEQ ID NO: 303597 - DNA, 1078 bp, Unknown
  Bacterial polypeptide expressing nucleotide sequence isolated from the Sargasso Sea
caaatagaagcaggttatgaagaaataaatacaccacaagttgttgacagaaagctctgggaagaatctggtcattgggataagtatagagagaacatgtacataacagaaattgatgaggaacatgcaaatgaaaaaaggactaacgcattaaagccgatgaactgcccttgtcatgtccaaatatataatcaaggtttgaagtcttatagagatttacctgtccgttttgcagaatttggttcttgtcatagatatgagccctctggaactctccatggcttgatgcgtgttagagctatgactcaagatgatgggcatattttttgtacagaagatcaaatagaatcagaaactaagaattttataaatgctttgtcttcagtttatgaagaattaggctttacaaaatttgaaattaaactttcgacaaggcctgaagtgcgagttggatcagataaagtttggaataaagcggaattggctttagagaatgcaataaagaatctagatttaccttatgaagtttctgagggagaaggagccttttacggcccaaaacttgatttcgtacttacagatgccttggatagagattggcaatgtggaaccctgcaagcagatttcaatcttcccgaaagactggatactaattatgttggagaagacggaaataagcatagaccggtaatgttgcatagagctatgttaggttcatttgagagatttataggtattcttatagaacatcacggtggtgctttacctgtctggctttcaccaattcaagctcaaatattgaatattactgataaacacagtaaatatagtgaaaaaatacgtaatttattgcaaaaaagtggatttagagcacaaagtgacttgaggaaagagaagatcacttataaaattcgcgaccactctatgcagaagacaccttatcttctagtggtaggagataaggaaatggaaaatgaaactgtttccgttagagcaaggggtggtgaggacctaggtgaaatgtctacaagtgactttatggacattcttgaaataaaaatcaaagccaaggaataat

SEQ ID NO: 303598 - DNA, 1660 bp, Unknown
  Bacterial polypeptide expressing nucleotide sequence isolated from the Sargasso Sea
atgttacaaataaaatttccagacggaaatacaaaaaattttgaaaaaaatatttctattttagaagtagctaaatcaattagcaattctctggctaaagaggcagtagctggaagagtaaatggccaattaaaagacttatgtgttcaaattgagcaagattgtgaattagagattattaaaaaatcagatcctgatgggattgatattgtcagacattcatttgctcatttaactggtcatgcgataaagcaaatgtatccagatgctaaaatggcaattggtccagttattaaaaatgggttttattatgacatcgaactttctgaaaacttaagtgacttaagccttaaaaaaatagaaaaacaaattgataagttaattaaacaaaattatgatgtcgttcgcgaagtcgtctctccagaaaaagccatagaggtttttcaacagagaaatgagaactataaggttgaaattgtcaatgaaatccctaaagacgagatcatagcgctttatcatcatcaagaatatattgatatgtgccgtggtccgcatgttcccaatacgaagtttttaaggcattttaaattaacaaaaatctcaggtgcttactggagaggtgattcaaaaaataaaatgttacagagaatttacggaactgcatgggatacaaaagaggatcttgcaaattatttgactaaaatagaagaggctgaaaaaagagatcacagaaaacttggaaaacagcttaatttatttcacttccaagagactgcaccggggatggttttttggcaccccaaaggctggacaatttaccaacttcttcaaaaatttatgcgagaaataaattcagattctgggtaccaagaaattaatacgcctcagattcttgacagaaccttatgggagaaatctggccactgggataaatttggagaaatgatttttacaacacagtcagaaaaaagagattacgctgtgaagccaatgagttgtcctggtcatttgcaggtttataatcaaggtctaaaaagttacagagatcttcccctgaaactttgtgagtttggactggttcatagaaatgaaccttcgggaaccttgcatggcctaatgagagcaagacagtttgttcaagatgatgcccatattttttgtacagaatcacagctacatgaagaaataacaaagttgattaagctaacttttgaggtatatgaaaaacttggctttgaaaatataaaagttgctttatcaaccagacctgaaaaaaaagttggtagcgatgacatttggaataagtcagaaaaaattttagaggacgctttaaacgagaatgtctctgattttgaaacattacctggtgagggagctttttatggaccaaaaatagaatttaccctgactgattcgcttgagagagattggcagtgtgggaccgtgcaattagacttttcaatgccagggcttttggaagcaagctttgttgatgaggacaatgtaaagaaaacacctgtaatgattcatagagctgttttgggctcgatggagcgttttattggtattttaatagagcactacggcggcaatctaccattttggttggcgccaacccaaattatgattgcatcaattaccgaaaagcatgtagaatcag

SEQ ID NO: 303599 - DNA, 538 bp, Unknown
  Bacterial polypeptide expressing nucleotide sequence isolated from the Sargasso Sea
atgcctgtaattacccttcctgatggaagccaacgcgctttcgataacgctgtttctgtactagatgttgcaaatgatattggccctggtttagccaaagcaaccattgcaggaaaagtaaacggtgagttagttgacgccgttgatatgattgacgcggacgcacaacttcaaattattactgcaaaagacgatgaaggtttagaaattcttcgtcacagttgcgcgcacttgttaggtcacgctatcaaacaactttggcctaacaccaaaatggctatcggcccagttatcgacaacggtttctattacgatgttgatatggaagaaagcctaacccaggaagatttagccaaattagaaaagcgtatgcttgaactggctaaaaccaattacaacgtggttaaaaataaagtgagctggcaagaagcacgcgatgcatttgaagcacgcggcgaaagctacaaaatggaaattcttgatgagaacatcagcaaggacgaccgcccagcactttatcaccacgaagaatacacag

SEQ ID NO: 303600 - DNA, 1939 bp, Unknown
  Bacterial polypeptide expressing nucleotide sequence isolated from the Sargasso Sea
aaagaaataacaatcacacttcctgatggatctcagaaaaaagctcctgttggtgtaagcggtcacgagattgcgagcatgattggggcaggacttgccaaagcagctattgcatttagcgtcaatggcaatcaaagggatttgagtgatactgtcaatcaggacgcagatatttctatatatacacttgattcagatgaaggactagaaattatgcgtcatacagttgcagcgcatgttctggcgcgcgctattaaaaatttatacccaaaagcaaagctggcaataggaccaactattgaaaatgggttttattatgatttcttatctgaggaaagagtatctatagacgatttgccgaaaattgaaaaggaaatggaaaaaattgttgcttcaaaatctaaaattataaaaactattcattcaaaaaaggatgcgattaagagttttgcagacataaatgaagaatataaagttaagataattgaagaatctgatcaagaagatagttttcaaatctatagccaaggtgatacaggctttatagatttatgtcgaggacctcatttacctagtttggataaggttggagcttttaaacttactaaaatttctggtgcttattggaaaggagattcaaaaaatgaaatgctctcaagagtttatggaactgcatggaaaaatgcaaaagatcttaaaaagcacttaactcttattgaggaggctgaaaagcgtgatcatcgtaaacttgcaaaagagatggatttatttcatctgcaggaagaagctcctggaatggttttttggcatgcaaaaggctggtctatatacataacattgcaaaattatgttcgcaaaaagcaaattgctaatggctaccaagagattaatactccaatggttgtcgatcgaaagctatgggaatcttcaggccactgggaaaagtatcgtgaaaatatgttcatcaccgaaattgatgaagaacatgcgaatgagaagagagtgaatgctcttaagccaatgaattgtccttgccatgttcagatttacaaccaaggcttaaaatcttatagagatcttccagttagacttgccgagtttggatcatgtcacaggtatgaggcttcaggaacaatgcatggtttaatgagagtgagaggttttactcaagacgatggacacattttttgtactgaggaccaaatagaaagcgaaactgctgactttatatcgttgctgtctgaaatatacactgagcttggttttgagtcttttgatattaaattatcaaccagacctgaaataagagttggctctgatgatgtttgggataaagcagaagcagctttagaatcagcaataaaaaaactggaaataccctataaagtagaagctggggatggtgctttttacggaccaaaacttgattttgttttgactgacgcaatcggacgtgaatggcaatgtggcacttttcaagcggactttaatctcccagataggctggatgctgaatacattggtgaggatggttcaaaatatagaccggtattaatgcatagagcaattcttggttcctttgaaaggttcattggaatcttaattgaaaactattcaggtaaattgcctctttggttagctcctacacaattagctattttgactgttactgaagaagtaaatgagtatgctgaaactttaaaggaaaagtttaatgagtttaatcttcgagttgatttagatttaagaaatgaaaagataggttataaaattagagagcatagtaatgccaaagtaccttttatggcagttattggaaaagaagagatgtctgctcagacagtttcgattcgtaatttaagagaaaataaaacagatacatactctattgacgaggccgtttcgaaattatcagaagaatctaaaagccctaactagg

SEQ ID NO: 303601 - DNA, 1915 bp, Unknown
  Bacterial polypeptide expressing nucleotide sequence isolated from the Sargasso Sea
atgccaaatataactttaccagatggaaatatactaacttttgataacaaagttacaggcttaaaaattgctgagaaaataagtaaatctttattaaagcaggcactagtaatgagtgtcaacggtgatttaaaagatttagattatgaaatagacagtgattgttctgtgaaaatatatacttcaaaagataaagaaggtattgaaacaataaggcatgatacagcacatattctagctatggcagttcaagaactatttcctggaactcaagtaacaattggaccagtaattgataatggtttctattatgattttgctagaaaagaatctttcacaagtgaagatcttaaaaaaattgaaaaaaaaatgcaagaaattgtcgaaagagacgaaccaacacataaagaagtatgggaaagagataatgcaattgaacattttaaaaaggcaggcgaaatttataaagctgaaataataaaaagtattccaaaaggagaggaagtctcaatttattttcatggaaaatggcacgatttatgcagaggccctcatttactttcgacaggaaaaattggaaaattttttaaactaacaaaagtcgcgggggcttattggagaggagattcaaataatgaaatgcttcaaagaatttatggcacaagctggtcttctcaaaaagatttagatgattatttaaaaaggattgaagaagctgaaaaaagagatcatagaaaattgggaaaagaaatggatttatttcattttagagaagaaagtccaggctcagtattttggcacgaaaaaggatggaatttatttcaaaagttaatttcatacatgagaaacaaacaagatgaggctggttataaagaaattaatactccagaggttcttgatagaagtttgtgggaaaaatcaggtcattgggaaaaatttggagcaaatatgtatacatctaccacacctgatgaaaaagtatttgctatcaaacccatgaattgtccaggttgtgttcaagtgtttaatcaagggttaaaaagttacagagatttgcctttaaaaatgtcggagtttgggaaggttcatagatatgaaccatcaggcgccttacatggattactaagagtaagagcttttacacaagatgatgctcatatattttgtacagaagaccaaattacagaagaatgcctcagtgtaacaaatttaattttagatatttataaagacttaggttttgaaaatgttattttaaaatattctgatagacccgatattagggtgggcgatgatgaggtttggaataaatctgaaaaagctttacttgaggcaattaaagaatctaaacttgagtatagtatcaacaaaggagaaggggcattttatggtccaaaaatagagtttgtactaagagatgctataggaagagattggcaatgtggaactcttcaggtagatttaaatttacctggtcgactgggagcatcatttgtggataaagatggatctaaaaaagtaccagttatgttacatagggcattattcggatctttagaaagatttataggaattttgatagaaaactatgcaggaaaacttccattttggatttcacctttacaaacaatggttattccagtttctaatgacttcgataattatgccgttgaagtaaataaaaaattaaaaaagtcaggtataacaagtgaagtagacttaaaaaatcacaatctaaactataaaattagagaacattctctcacaaaaataccacttctattaatttgtggtaaaaaagaagttgactctaatacagtaactattagaagattggattcaaatgaacaagaaaatataggtctaaaaaaattgattgaaaaattttcatctttagcaaaatctccttcttaaa

SEQ ID NO: 303602 - DNA, 1501 bp, Unknown
  Bacterial polypeptide expressing nucleotide sequence isolated from the Sargasso Sea
tatgagtgaagtagtagcatataaagactcaaataataattattgggataccgaagtcgaaaatagtactcctataaaacataaatctgaggatgctttaaacattatgcgtcacgatatggctcatattttagcagaagctgtcatatctcttttcccgaatgcaaaaccaactattggtccgtttataaaaaatggtttttattatgattttgatatggagagtacattatcagatgatgatttagaaaatattgaaaaaaaaatgagagaaatactcttagaaggaagagattttttaaaaagagctgtttccaaaaaagaagccttagaaatttttaaagataataaatataagttagaacttatcaataatttggataactctgatgaaataactctttatgaacagaataattttacagatctttgcaaaggacctcatcataaaagcacaaaggattataatgctagctttaagataaccagtgtttcaggagcttattggagaggcattagcaccaataaaatgcttcaaagaatttatgcaactgcttggtattcagaaaaagagcttagagtatatttaaaaaatttagaagaagccaaagaaagaaatcatagaagattgggaacagatatgggtttattcctccttactgatttgtccgcaggtaatgtattttggaaagataaaggtttaactttgtatcaaaatatagagaaatacatacgctctgagcagcaaaaattaaactattttgaagtaaaaacacctgagttagtttcaaatgaactctggataaaatctggtcactgggacaattttaaagaaaatatgttcacatccgaaacagataacaagacatttgcattaaagcccatgaattgtccttgtcatattgtgttatttaattctcaactcataacttataaagatttgccactgagatattctgaatttggtaaatgtcacagatatgaaccttcaggggctctgaatggattatttagagtgagaggatttacccaagatgatgcacatatcttttgctctggtgatcaaatttatgatgtgtgcaatgagacaactcaattaattgagagagtttataagaagtttggttttgaaaaaataaaatttaatatttctactcgcccagaaaagagtattggcactcaagaaaattggtataacgcagaaaatcaattaaaaaaagttttaaaagataataacaaggaatttaatatattagagggagaaggtgcattctacggaccaaaaatagagtatacattagaggattctcttggacgtgaatggcaatgtggcacaattcaaattgattttaatctaccagataggttgggagctaaatacaaagacaaggatgacaaaaatcaagttcctataatgatacatcgtgctgtagttggttcattggagaggttcatagcgatcattttagaaaacacaaatggctggcttcccattatttgt

SEQ ID NO: 303603 - DNA, 1921 bp, Unknown
  Bacterial polypeptide expressing nucleotide sequence isolated from the Sargasso Sea
catgattcacattacgcttcccgacggttcgcagcgcgagtttccgggccccgtcacggtggccgaggtcgcagcctccattggctcgggtctggccaaagccgctttggcgggcaagatcggcgacaaggtggtggacaccagctaccagatcacggctgatagcccgctgtccatcgtgacggccaaggatgcggatggcctggatgtgatccgccactccaccgcccacttgttggcctacgcggtcaaggagctgtttcctgatgcccaggtcaccatcggcccggtgatcgaaaacggcttttattacgactttgcctacaagcgccccttcacgccggaagacctggtggccattgaaaagcgcatggccgagctggcagccaaggacgagcccgtggtgcgccgcgtgttgccgcgcgatgaggcggtggcgtatttcaagggcctgggggagcactacaaggctgagatcattgcgagcatccctagcaacgaagacgtcagtttgtaccgcgaaggcaattttgaagacctgtgccgaggcccgcacgtgcccagcaccggcaagctcaagttcttcaagctaatgaaggtggcgggggcctactggcgcggtgaccaccgcaacgaaatgctgcagcgtgtctacggcacggcctgggcctccaaggacgagttgcagcagtatttgacgatgctggaggaggccgagaagcgcgaccaccgcaagctgggccgtgagctggacctgttccatattgacgagcattcgcccggtacggtgttctggcaccccaagggctggacggtgtggcaggaggtcgagcagtacatgcgccgcgtgtaccgcgagaacggctaccaagaggtgaaggggccacaaattttggaccagggtctgtgggagaaaacgggccactgggacaaataccgcgagaacatgtttgtgacggagtcggaaaagcgcgactacgcgctcaaaccgatgaattgccccgggcacatcatcatcttcaagcaaggtatcaagagctaccgcgacctgccgctgcggtttggcgagttcggccagtgccaccgcaatgaacccacaggggggctgcacggcatcatgcgcgtgcgtgctttcacgcaggatgacggccatatcttctgtaccgaagaccagattcagtcagaggtggtggcgttcaccacgctgctgcaaaaggtctacaaggactttggtttcacggacatcatctacaagctgtccacgcgccccgaaaagcgcatcggcagtgaggaaagctgggaccgtgcggaaaacgccttggcagagggcttgcgcgcgtccggttgcgagtttgagtacctgcctggcgaaggcgcgttctacggccccaagatcgagtacacgctcaaggacgcgctggggcgaccatggcaatgcggcacgatccaggtcgatcccaacatgcccgagcgcctggatgcagagtttgtgggcgaggatggtggccgccatcggcccatcatgctgcaccgtgccatcgtgggaagcctggagcgcttcatcggaattctgatcgagcagcatgcaggcgccttgcccacctggctcgctcccgtgcaggtttcggtgctcaacatcacggacgcgcagtccgattactgtcgtgaaatcgcagcaaaactgcaaaaagcgctgcccaatcaaggccttagggtggccctggatctgcgtaacgagaagattacgtataaaatacgggagcattcgatgcaaaagctgccctacatcctcgtcgcaggcgacaaggaaaaggcggcgggagccgttgcagtgcgagcccgaggtaatcgtgatctcggcgtgatgtcggtcgatgcgttcattgaattgatcgccaacgacatcgccaccaaagcctga

SEQ ID NO: 303604 - DNA, 358 bp, Unknown
  Bacterial polypeptide expressing nucleotide sequence isolated from the Sargasso Sea
aatgccaaatataaaattgccagatggaaataccctagcttttgacaagaaagttactggattaaaaattgctgagaaaataagtaaatctttatcaaagcaagcattagtaataagtgttgatggaaatttaagggacttaaattttgaaatagaaaatgattgctctgtaaaaatttatacttctaaagataaagaagggatagaaataataagacatgatacagcacatgttttagcaatggcagtacaagaactttttccaggaactcaagtaactataggaccagtaatagaaaatggtttttattatgattttgcgagaaaagagacttttacagaagaagatcttcaaaaa

SEQ ID NO: 303605 - DNA, 807 bp, Unknown
  Bacterial polypeptide expressing nucleotide sequence isolated from the Sargasso Sea
aatgcgtcatacagttgcagcgcaagtgctagcacgcgcaattaaaaaattatacccaaaagccaagttagctatcggtccaaccattgaaaatggcttttattatgattttttatcagatgaaagagtctctattgacgatttaccaaaaattgagaaagagatgaagaagattattgctgaaaaatctaacatttctaaaacgattcattcgaagaaagaagccattaagaattttgctgacatcaaagaagattacaaagtgaagatcatcgaagagtctgagcaagaagataactttcaactttataatcagggcgatactggttttatagatttgtgtcgaggccctcatttaccaagcttagataaagttggagcttttaaacttaccaaaattgctggtgcctattggaagggagattccaaaaatgaaatgctttcacggatttatggaactgcatggaaaaatgaaaaagatctaaaaaagtatttgactcttatcgaagaggcagaaaagcgcgatcatcgaaaacttgccaaagaaatggatttgtttcatttgcaagaagaggcccctggaatggttttttggcatgccaaaggatggtccatatatgtagctttgcaagattatgttcgcagaaaacaaattgctaatggttatgaggagattaatactcccatggttgttgatcgaaagctttgggaggcttcgggtcactgggataagtatcgagaaaatatgttcatcacagaaattgatgaagagcatgcaaatgagaagagagtgaatgcacttaagcc

SEQ ID NO: 303606 - DNA, 1423 bp, Unknown
  Bacterial polypeptide expressing nucleotide sequence isolated from the Sargasso Sea
tcaagcagaggattttcaaatttacaaaaatgagaagagtgaatttattgatctttgcagaggacctcatcttccaaacttatctcatattggggcttttaaactaacaaaagtttctggcgcatactggaaaggcgattcaagtaatgaaatgcttacaagaatctacggtactgcgtggcggaataaaaaagaactagatcagtacctggttcagcttgaggaagccgaaaaaagagatcatcgaaggatcggaaaggatctcgatttgtttagtatccaagaagatgcagggggcgggcttgttttctggcatccaaatggatctagaattagaagtgaaatagagaattactggaaaaatgaacacgagaaagcaggctatgagctgttatatactcctcacatcgctctcgatacactctggcaaacctctggtcacacagacttttatgaagaatcaatgtacacaccgatagatgacgagaatcaatcctatcgcttgaaaccaatgaactgtccatttcatgttctgatatataaagataaattaaggtcttacagggaatttccaatcagatgggctgagttaggaactgtttatagacatgagatgactggagcgcttcatggactaatgagggttagaggcttcacacaagatgatgcacatgttttctgtgcagaagaccagattgaacaagaaatcagtggaatcttggagttagcgattaatatgcttaacaaattcacatttactgaattcgaaatacatctagctacaagacctgaaaaatatgtcggcagtgaagaaatatgggataaagcgacagatgcactaactgatgctctcaatcagaggggcttaaattatgagattgatgaaggtggtggtgcattctatgggcctaaaatagatataaaaataaaagatgcgataggaagactttggcaatgctcaaccatacaacttgatttcaatcttcctgagcgatttgatatgagatacatcggaagcgatggtcagagacatcatccaattatgatacatcgggcattgcttggttcagtagagagattttttgggatcttggttgaacattttgctggaaaattcccattatggcttgctccagtgcaagtttgcgtcataccaattaatcaaaaacaacatgattatgcagattcggttcataagattctgaaaaaaaatggcttaagagcagaaattgacttgagaaacgaaaaaataggctctaaaattcgcgatcacaccttaaataaggtaccttacatggttgttttaggtgaccgagaggtttgcgatgaggaaatcaccattaggactcaaaaaggtgatgatcttggcaatatgaagctagagagttttttagaaagagtcactgaagaaataaataattaa

SEQ ID NO: 303607 - DNA, 1465 bp, Unknown
  Bacterial polypeptide expressing nucleotide sequence isolated from the Sargasso Sea
tgaaagttataaagctgaaattatagaaagtattccaaaaaatgaagaactttcaatttatcatcatggtgatacttggcatgatttatgtagaggacctcatttagtctcctctggaaaaattggcaaggcctttaaactaacaaaggtatccggagcatattggagaggagattcaaataacgaaatgcttcaaagaatttatggaacatgttggagcagcaaagatcaattaaatcaatatttagaaagattagaagaagcagaaaaaagagatcacagaaaacttggaaaggaaatggatcttttccatttcagagaggaaagtcctggttcagttttttggcatgacaagggctggatattatttcaacgacttgtcgaatacatgagatttcgtcaaagattggctggatacaaagagattaataccccagagttactagataagtctttatgggaaaaatctggtcattgggataaattttctgaacacatgtttacatcagagacgcctgatgaaaaaatttttgccatcaaaccaatgaactgtccaggctgcgttcaaatctttaatcaaggcttaaaaagctatagggatctccctttgaaattatcagaatttggcaaagtgcacagatacgagccatctggcgcacttcatggcttacttcgagttagagcatttacccaagatgatgcgcatatattctgtaccgaggaacaaatcacagcagagtgtttgagtgtcacaaatttgataattgatatttataaaagtcttggtttcgacaaaataatattaaaatactcagatagaccagagaaaagagttggtgatgataaaatttgggataaatcagaggcagctcttctatcagcaattaaagaatctaaacttaactatacaattaataaaggcgagggtgctttttatggaccaaaaattgaatttgttttacaagacgccataggtagagaatggcaatgtggaacattacaagttgatttaaatttacctggcagattaggggcatcatttgttaacaaaagtggagaaaaagaagttcctgttatgttacaccgtgcattatttggctcactagagagatttattggtattttaattgaaaattatgctggcaaactacccttttggctctctcctctacaagcagtagtatgtccaatagctgaagataacaataattatgcaaaaaaattatttgaagatctctttaaagagagtataaaatgcgaagtggatttaagaaatcaaaaaataagttacaaaattagagaacactctctttctaaagttcctatgattttggtttgtggaaaaaaagaagagaaagaaaatacagtaacactaagatcattaggatctgataagcagcaaactttcaaaagagaagatttgataaaaaaaataattactcataacaaaatgccaaccaattaa

SEQ ID NO: 303608 - DNA, 1168 bp, Unknown
  Bacterial polypeptide expressing nucleotide sequence isolated from the Sargasso Sea
aatggatctttttcattttcaagaggaggctcctggcgcggtgttttggcatcctaaaggttggacgttattccaatcgttgataaattatatgcgaaacagacaagataaggcgggatatgtagaaactaatacaccagacatgatggataaatcactttgggaaacctctggacattgggacaagtttagtgacatgatgtttagaactgaagcgaaagatgacaaaatttatgctatcaaaccaatgaactgtcctggtgctgtagaaatttttaaacaaggattgaaaagttacagagatcttccatttctgttatccgaatttggaaaagtacatcgttatgaaccatcaggcgcccttcatggattaatgcgagttcgagcattcacacaagatgatgcacatatattctgtacagaagatcaaataactgaagaaagtaaaatagtctgtgatttaatacttagtatttataaggattttggttttgaaaatgttaaaattaaattttcagacagaccagaaaaacgcgtaggggatgatgctgtttgggataaagctgaggctgcattaaagcaagcaatggaagcaactggtcttgagtacacctttaatccaggagaaggtgcattctacggtccgaaattagagtttgttttaagagatgcaattggaagagattggcagtgtggcactttacaagtagatttaaatttaccaggtagattaggcgcaacttatattggcgaggatggtaataaaaaaacaccagtgatgcttcacagagcactttttggatcacttgaaagattcacaggtatactgattgaacattatgctggacatctaccactttggttgtcaccattacaagttatggtagcaacaattacatcttatactgacgattatgctttattggttaaaaataaattaattaaagaaggtattaaagctgaggtagatttaagaaatgaaaaaattggttataagattcgtgaacatagcaatagtaaaatccctgtaatcatcgcagtgggggaaaaagaatctcaggaaaaaacagtctcgattagaagaattggatcaactgagactaagacctttaaattagatgaaatcactactactttatctagtgaagtaaaatcacctatagagtaa

SEQ ID NO: 303609 - DNA, 1606 bp, Unknown
  Bacterial polypeptide expressing nucleotide sequence isolated from the Sargasso Sea
tatgaaaataacgttgccagatgaatctattaaagagttgccaaaaggtgtgacaggactagatgttgctgaatcaataggacccggtcttgcaaagagtgcaattgctgtaagcattgatggaatacaaaaggatttaagcgatccaataaattcagattgctctctatcagtcatcaccctcgattcagaagaagggctggagatcatgaggcatactatcgctgctcaagttcttgcacttgcaatcaaaaatatttatcccgatgctaaattggcaataggaccaacaattgaaaatggcttctactatgattttctcacagaaaatactatttcaactgaggatctacctaagatcgaaaaagaaatgaaaaaaatcatcgcaggtaaatcagaaattaaaaagtcatttcataataaaaaagatgcgactggcatatttaagaagatatctgagaattacaaagttgagattattaaagaatctgatcaaatcgatgaattccaaatatataaaaatcttgatacagatttcatagatctctgcagaggtcctcatcttccaagtttgagtcaaatcggagtctttaaactcaccaaagtttctggtgcctattggaaaggcgattcaagcaatgaaatgctgacaagaatttatggtactgcttggcgaaacaaaaaagaactcgatgaatacctaacccaacttgaagaagctgaaaaaagagatcatcgaagaattggcaaggacttagatttatttagcatacaagaagatgcaggaggagggcttgttttctggcatccaaaaggttcaaggataagaagtcaaattgaacaatattggaaaactgaacatgaaaaaggtggttatgagatcttatatacgcctcacatagcattggatactctttggcagacctcaggacacacggatttctatgaagaatctatgtacactcccatcgaagatgaaaatcaatcctatcgactaaaaccaatgaactgtccttttcatgttctcatttataaagataaattaagatcctatagagatctaccgatcagatgggctgaacttggtactgtttatagacatgaaatgactggtgcccttcatggtttgatgcgggttaggggtttcacccaagatgatgcacacatcttttgttcagaagaccagattgaaagcgaaatcagcgaaatactagaattggcaatcaatatgctcaataaatttacatttacagaatttgagattcatttagcaacgagaccagaaaaatacgttggtagtgaagctatctgggataaagcaacagcagcattgataaaggctctggaagaaaagaatctaagttatgagttagatgcgggtggtggagcattttatggtcctaaaattgacattaagatcaaagatgcaatcggaaggctttggcaatgttcaaccatacagcttgatttcaatctccctgagcgttttgatatgcgatatgttggaagcgacggcaagaaatatcatccaatcatgattcatcgagcattgcttggttcggtggaaagattcttttggaattttagtggaacattttgcaggtaa

SEQ ID NO: 303610 - DNA, 1194 bp, Unknown
  Bacterial polypeptide expressing nucleotide sequence isolated from the Sargasso Sea
aatgcctaatataaaattacctgatggaaaaagtataaactttaaagataaagttacaggtttccagattgcagaaaaaataagcaaatcactttctaaacaagctctaataattagtgttgatggaaatttaaaagatttgaattatgaaataaataaagattgtttagttaaaatttatacatcaaaagataaagaaggattagaaacaataagacatgatacagcacatatattagcaatggcagtgcaagaactttttcctggcactcaagtaacaattggaccagtaattgatgatgggttttattatgactttgcaagaaaagaaccattcacagaagaagatttaagaaaaatagaaaaaaaaatgttagaaattgtagagagagacgaacctactcatagagaggtatggaaacgtgataaggccgttgagcactttaaaaaagtgggagaaatttataaggctgaaataattaaaaatataccaaaagatgaagatgtttcggtttacttccatggaaaatggcacgatctatgtagaggacctcacttgatgtctactggtaaaattggaaaatattttaaacttatgaaagtttctggtgcttattggagaggagactcaaataatgaaatgcttcaaagaatttatggaactagctggtcttcacagaaagatctagatgattatttacacagaatagaggaagcagaaaagagagatcatagaaaattaggaaaagaaatggatttatttcattttagagaagaaagcccaggatctgttttttggcatgaaaaaggttggaatttatttcaaaaactaatttcttatatgagaaaaaaacaggacgaagctggatataaagaaataaatactccagaagttttagatagaagtttgtgggaaaaatcgggtcattgggaaaaatttggagctaatatgtatacatcaacaactcctgatgaaaaagtatttgcaattaaaccaatgaattgccctgggtgcgttcaggtttttaaccagggattaaaaagctatagagatcttccacttaaaatgtctgagtttggaaaagttcatagatatgaaccttctggtgccttgcatggacttttaagagtaagagcatttacacaagatgatgcacatatattttgttctgaagatcaaattacagaagaatg

SEQ ID NO: 303611 - DNA, 436 bp, Unknown
  Bacterial polypeptide expressing nucleotide sequence isolated from the Sargasso Sea
aatgcccattataacattaccagatggaaaaagtttagacttcccaaaaaaagttactggattagaagttgccgaaaaaataagtaaatcattagctaaagatgcaatggtaattagtatcaacggtgagttaagagatttagattatttaattgaaaaaaattgttctataaaaatatttacatcaaaaaatgaagaaggtcttgagactattagacatgatactgctcatatacttgccatggcagtccaagaattatttccaggtacccaagttacgattggaccagttattgaaaatggtttttattatgattttgcaagaaaggagccatttactgaagatgatttaaaaatgattgaaaagaaaatgagggaaattgttgatcgagatgtaaaaactaaacgagaaatttgggatagagataaagcaatt

SEQ ID NO: 303612 - DNA, 905 bp, Unknown
  Bacterial polypeptide expressing nucleotide sequence isolated from the Sargasso Sea
aatggaagatttagaaaaactaagatataacataaggcattccgctgctcacataatggctgaagcagtaatgaatatttttcctggaactaaaattggtatagggccacccacagctgacggcttttattacgactttgattgcccaaaacaactctcaaaagaagattttaaaaatattgaagcagagatgaaaaaaattatcaaatcaaaaagaaagtttactggcgctgtagtgtcaagaggtgaggctgcacagagattttctgaccaaaagtataaattagaaataattgaaggcattccagaaaatgaaaaagtgactatttggagtcatgaaagttgggaggatatatgtaaagggggacatgttgatagcacaaataatattaaagcatttaaattactagatgtagctggagcatattggagaggtgacgagaaaaataaaatgcttcaaagagtttatggaactgcatgggaatcaaaagaagaacagaaaaaatatttagaaaaattagaattagccgctaagagggatcacagaaaattaggtacaagtttagatcttttctattttgatgaattttcaccttccatgccattttttctgcctaaaggcacctacataatgaataaattaacggattacatgagagagaaatacaataaatatggttaccaagaggtgattacacctcaaatttttagctcaaaattgtgggacttgtcaggacattctagtcatttcaaagagaatatgttttttacagaaaatgatgataataaaatgggaattaagcctatgaattgcccttctcattatcttttatttcgatcaaaactacattcatacaaggatttgccaataaggtatgctgattttggtagacttcacagaaaaa

SEQ ID NO: 303613 - DNA, 598 bp, Unknown
  Bacterial polypeptide expressing nucleotide sequence isolated from the Sargasso Sea
aaactggtcagaagagcctggagaggcagcattttatggtccaaaaatagatttcgtagttaaggatgtaatcggcagagaatggcaattaggcactgtacaagtcgattacaatctccctgaacgcttcgaattagaatacaaaggaagcgatggagaaatgcaccgcccagtaatgattcaccgtgcaccatttggttcaatggagcgattttgtggtgtattgattgaacacttcgcaggtagattccctacttggcttgcaccaacaatggttcatgttctcacaatatcagaaaagcaagtagaatatggtcataaggttgtagacgaattaaaagcggcaggaatcagagttgaaatcgatgatggcgacgacactataggtaagaaaataagaactcatagaaaattccatcctgcttacatgctcattttgggcgatgaagaaatctcgcaaaatagtgtctctattagagcgagaaatggagaccagcgtgctggcgtgaagttaagtgattttatttcagaaattgttgaggaagttgctacaaaagtggcaaccccttcgatagtagctcctagtgaagataattga

SEQ ID NO: 303614 - DNA, 969 bp, Unknown
  Bacterial polypeptide expressing nucleotide sequence isolated from the Sargasso Sea
gatgaaacagataactataagactaccggataaatcaacccgtcaatacgatcaaggggtaaccgcattgcaaattgccaccagtattggtgaaagattagccaatgatactgtagctgctactgtcaatgaaaatttagttgatgcgactattccaatcatggatgatgcagatttaattatacatacgggtgattcaaaaattggtcacgaggttttgctgcatagtgcagctcatttaatggcgcaggctgtaaagaagttttggccaacttcgcaaatgactattggtccagttatagaaaatagattttattatgattttgatatcgaggggacattttccgatgaagatctcctaaaaattgaagaagaaatgcataatattgcaaaagaaaatcatgatgtttctcgtgaagatctatctagagatgaagctattaaattattttcgaaactcaatgaaaactacaaagtagaaattatcaatgaaatcgatgatagtgatcgtattactgcatacaagcaaggcgattttattgatctttgcagaggaccacacactcccagtacaggaaatttaaaatattttaaactactatcaacatcaggtgcgtattggcgcggtaatgaaaataataaaatgctacagcgaatttacggtactgcattctctaaaaaatcggagctaaaaaagtatcttaattttttggaagaagcaaaaaagcgagatcatagaaaaataggtaaagaactagaaatttttacctttgatgaagaggttggtccaggattaccgctatggcttccaaatggcggagttattttaaatgaattagaatcattagctaaagaaacagaagataggcatggctaccatcaagtaagaactccacatttaactaaaggcgacttgtataaaaaatctggtcatttagagttatataaagatgcgatgtacccagctat

SEQ ID NO: 303615 - DNA, 1921 bp, Unknown
  Bacterial polypeptide expressing nucleotide sequence isolated from the Sargasso Sea
aatgcctataattacactaccagatggaaaaaatattgaattcccaaaagaagttacaggtttagatattgcagaaaaaataagtaagtcattatcaaaacaagcattgataatgagtgtgaacggtgagctaaaagatctatatttttcaattaaaaaagattgttcagtaaaaatttttactgcaaaagatcccgaaggtcttgaagttataaggcatgacactgctcatattatggcaatggctgttcaagaattataccctggcacacaggtaactattggaccagtaattgaaaacggtttttactatgattttgcacgtaaagaaccctttacagaagatgatttagaaaaaatagaaaaaagaatgtcagaaataattgacaaagatgtaaaaacaagaagagaggtttggaacagagataaagcaataagtcatttcaaaaaaattggtgaaaaatataaagcagaaataatagagagtataccggagagtgaggaattaactgtttatcatcatggtgatacttggcatgacttgtgtagaggcccacacttagtttcttctggaaaaattggtaaagcgtttaagcttacaaaagttgctggtgcgtattggcgtggagattcaaataatgaaatgttacaaagaatttacggaactggctgggcctctcaaaaagatttagatgattatttaaaaagaattgaggaagcagaaaaaagagatcacagaaaacttggtaaagaaatggatttgtttcatttcagagaggagagtccaggatctgttttctggcatgagaagggttgggcattatttcaaaaactaattaattatatgcgggcgcgccaagatgcagctggctataaagaggtaaataccccagaggtattagatagattgttatgggaaaaatcaggacactgggaaaaatatggagaaaacatgtatacctctgagacccctgacgaaaaagtttttgcaataaaacccatgaattgtcctggtcatatacaagtttttaatcaaggtttaaaaagttatagagacttaccattaagaataacagaatttggtaaagttcatagatatgaaccttcaggagctttacacggacttcttagagtaagagcatttacacaggatgatgcgcatattttttgttcagaggatccaattactagcgagtgtttaaatgtaactaatttaattttagatatttataaagatttaggttttgaaaaagtagttttaaaatatgctgataggccagaagtaagagtgggtgaagataaagtgtgggataaagctgaggcctcattacttgaggcagttaaagcaacaaaattagaatatagtataaataagggagaaggtgccttttatggtccaaaaatagaatttgtattaagagacgcaattggaagagattggcaatgtggaactgtgcaagtagatttaaacttacctggaaggttagacgctacttatgttgataaagatggaacaaaaaaagttcctgtgatgttacatagagcgttgtttggatcacttgagagatttattgggattttaattgagaattatgccggaaagtttccattttggatatctccattgcaaacagtagtaattccaatttcagaagactttgagcaatatgcaattaaagtttcgaaaaaaataaaagaagctgggatgagctcaatagttgatttaaaaaatcataatttaaactacaaaattcgagaacattctcttacaaaagtccctattttattaatttgtggtaaaaaagaagttgacagtaactccgtaactattagaaggttggactctaataaacaagaaaatatggaactaaataaatttttaaagacattttctgctttaaataaagcatcttcaatttaa

SEQ ID NO: 303616 - DNA, 1249 bp, Unknown
  Bacterial polypeptide expressing nucleotide sequence isolated from the Sargasso Sea
ttttttattacttcaagaagaagctaaaaaaagagatcatagaaaaataggtaaagaacttgaattatttacatttagtgaaaaagtaggtcaaggtcttcctttatggttgccaaatggagcaattgtcagagagtgtttaatagattttatgaagaaagaacaaattaaagaaggatatttgcctgttgtttctcctcacataggatctaaagacttatatgttacttctggtcattacgataaatatggtgaatcatcctttcaaccaataaaaactccaaatgaaaatgaagagttttttcttaagcctatgaattgtcctcatcattgtgaaatatataaattcaaaccaagatcttataaaaatttgccattaagattggctgaatttggatctgtttatagatacgaacaaagtggagaacttcatggactaactagagtaagaggttttacacaagacgacgcacatatattttgtacaaacgaacaagttaagtctgagttcattaaggttattgacttaattttaaaggttttcgattctctttcttttgatgattacagtgttcaggtatcattaagggacaaagaagataaatcaaaatatatagggtctgataaaacttgggaaatggcagaaaacgatattttagaagcggtaaaagaaaaaaaaataaagtattctattgaatatggagaagcagctttttatggtcctaaattagatttcatggttaaagactcattaaatagaaaatggcaacttggaacaattcaagttgattatcaacttcctgaaagatttcaattggattatataactgaaaataatactaaacaaacaccggtgcttattcatagagcaccatttggttcgttagaaagatttgttgcacttttaacagaacattgttatggtaattttccattctggcttgctcctatacaaatgacaattttatctatatctgataaattcaattcatatagtgataaaattttcaaatcattatctaaattgaatttaagggttatacaagatataaggtcagagaaaatatctaaaaaaataagagatgctgaattaaagaaaattccctatatgataatcattggagaaaatgaattaaaatctaataagatatcattaagaaaacatactgaaggagatttaggaaaaatgactttagatgatttaatttctatattaaagaaagaaaaaaatgttattataaataactaa

SEQ ID NO: 303617 - DNA, 529 bp, Unknown
  Bacterial polypeptide expressing nucleotide sequence isolated from the Sargasso Sea
atgcccaatataactttacctgacggaaaaaaacttaattttaaaaataagataaatggacttgagatcgcagagaaaatcagcaaatctctaatcaagcaagcacttataatgagtgtcaacggtgaactgaaagacttaagttattcaattcaaaacgactcatcagttaaaattattacccacaaagataaagaaggcttagatgtaataaggcatgacgctgcacatattatggctatggcagtccaagaattatttccaggaactcaagtgactataggtcccgttattgaaaacggtttttactacgattttgcaagaaaagaacccttcacaagcaatgatttagaaaaaatagagaaaaaaatgtctgagataattgataaagacgttaaaacaaaacgtgaggtatgggaaagagacaaagcaattgtacattttaaaaagataggtgaaaaatataaggcagaaattattgagagcataccagaaaatgaggaactatcggtttatcacccacggtgat

SEQ ID NO: 303618 - DNA, 574 bp, Unknown
  Bacterial polypeptide expressing nucleotide sequence isolated from the Sargasso Sea
aatgccgataataacattacctgacggaaacaatattgattttcctaataaagttactggactggaagtagctgaaaagattagtaaatcattagctaaacaagccatggtcataagtgttgatggtgagcttaaagatcttgattttctaattgaaaatgattgttctgtaaaaatttttacctcaaaaaaccctgagggcttggaaaccataaggcatgacacagctcacattttagctatggctgttcaagaattatttcctggcacacaagttacaattggaccagtaattgaaaatggattttattacgactttgctagaaaagaaccatttacagaggatgatttagtaaaaattgaaaataaaatgaaagagattgttgataggaatgaaataacaaaaagagaggtttgggaaagaaacaaagcaattagccattttaaaaaaaaaggagaaatttataaagctgagttgattgaagcaatacctgaaaacgaagatgtatcaatttattttcatggaaaatggcatgatttatgtaggggtccacacctttcctctacaggtaaa

SEQ ID NO: 303619 - DNA, 1023 bp, Unknown
  Bacterial polypeptide expressing nucleotide sequence isolated from the Sargasso Sea
catggaaaaaattattataacgttccctgatggcaataaacgtgaatacgacgctggaattactgctgaaaaagtagcccaaacaatctcaatatctttatccaaaaaggcgataagcgctgacttagatggtgctcattgggaccttcaatggccaatatataaagacgctgagctttcaattaatactttgaaaaataaagaacgagcaattgagctggttcgtcatgaccttgcccacataatggcccgagcggtgcaagaaatctggcctaaggtaaaggtgacaataggtccagttataaatcatggttggtattatgattttgaccacgaagaaccatttacccctgaagatttggggaaaattgaaaggaaaatgcgtgagatcataaacttgcgagacgttgtccgcactgaattatgggacagagaaaaggcaatcgaatattatacagcaaaaaaagagccatataaaatagagctaatcgacgccatacctgagaatgataatattagaatgtactggcacggagattggcaggacctctgtagaggaccgcactttcagaatacagcacaggtaccagctgatgccttcaaattaatgtcggttgcaggcgcctattggcgcggcgatagcaaccgtcaaatgctgcaaaggatttatggagttgcttttctcaataaggaaaatctccgtgaacacttgaacatgcttgaagaggccgcaaagcgggaccatcgaaagctaggtaaagaaatggatcttttccatatgcaagaagaagcacctgggcaaattttttggcatccaaatggctggaaaatttacacactacttcaagattacatgcgacgccaacaagaggtaggtggatacgtagaggttaacacaccgcaagtagttgacagaaaactatgggaagaatctggacattgggataaatatcaagagcatatgtttatcgtagaagtagatgaggaacacgcccgtgaaaaatcaataaatgctttaaaacc

SEQ ID NO: 303620 - DNA, 1948 bp, Unknown
  Bacterial polypeptide expressing nucleotide sequence isolated from the Sargasso Sea
aatgggaaatattgtaattacacttccagatggatctaataaagaattaccagcaaatagtaatggctacgatttagctaactcaattggttctagattagctaaagattctgttgctgttgtcgtaaatggcttacagagagatctaagtgacatattgccggataaagccgatgtttccataattactaaagattcagatgagggtgttgaaataatgcgtcataccttatctgcacaagtattagctttagctgtaaaaaatctatatccagatgcaaagttagcaattggaccaactatagatgatggtttttattatgatttttttatggataaaccgatatcatctgatgatttaccaaagatcgaagatgaaatgattaaaataattaaatcaaattctaaagttactaagtcttaccattcaaaaaatgatgcattaaaagtttttgatgatctggatgaagggtttaaagcagaaataatcaatgactctgatcaaaaagataactttcagttatatacacaagatgaaacaggatttattgatctatgtagagggccacatctgcctaatataggtatgtgtggtgaatttaaacttacaaaagttgctggagcatattggagaggtgattcaacaaaaccaatgcttacaagaatttatggaactgcttggcaaacaaaaaaagaacttagttcttatctagagaaactaaaaaaagcagaggaagttgatcatagaaaattaggaaaagaaatgaatctttttcattttcaagatgaagctccagggatggttttttggcatccaaaagggtggactatttatactcatctccaatattacgttagagaaatgcaaaagagagctggttatagggaagttaatactcctgaagttgtagatagaaagctgtgggaaacttcaggtcattgggagcaatatagagaaaatatgtttattactgaaatagatgatgaacatgccaatgaaaagcgtacaaatgcattaaagcctatgaattgtcctaatcatgtacaaatctacaatcaaggcattaaatcatatagagatcttccatttaggctttctgaatttggtaaatgtcatagatatgaagcatcaggaactatgcatggtttaatgagagtaagaggttttgcacaggatgatggccatatcttttgtactgaagatcagatagagagcgagacaaaaaactttatagaccttctttcaagtatgtataaagatcttggatttactgatttcaagattaaattgtctacaaggcccgataaaagaattggtacagatgaaagttgggataaagcagagaaggcccttcaagatggaattgaaaaattaaaacttgaatatactattgatgagggtgatggagcattttatggtccaaaacttgattttgttcttactgatgcaattgcaagaaaatggcaatgtggaacattgcaggtcgattttaatttacctggcagatttgattctacatatattggtgaggatggaagcaaacatacacctgtgttattgcatagagcagctcttggttcttttgaaagatttataggaatcctattagaaaactatggtggaaaattgccagtatggttagcgcccacacaaacagtaattgctgcaataacagatgaagcaaatgattatgctatgtctctaaataatgaattattaaacaacggaattagatcagaacttgatattagaaatgagcagattagttataaagtaagagaacatagccttcaaaaagtcccatatattattgcagttggaaaaaaagaaattgaaaatcaatcagtttcagttagaaggcttggcagtgaaaaaactcagtctatactattaaatgattttgttaagacagtagtgaaagaggctaaaacaccattagaaagttaa

SEQ ID NO: 303621 - DNA, 1279 bp, Unknown
  Bacterial polypeptide expressing nucleotide sequence isolated from the Sargasso Sea
aatgataaatataacatttcctgataaatcagttagaaaatatgaatctagtatcactggtaatgatctagctaaatcaattagcaatagtcttgcgaaaagtgctgtttgtattgaaattaacggtgaattgagagacctttcatatttaattgaaaatgatgcagtctgtaaaatttttaccaaagaagatcaatattcccttgacaccttaagacactcaactgcacatgttatggcacaagctgtcttaaatctttatcctggcactgagtttgctgttggaccttccgttgatgatggtttttattatgatttcctgtttaaagaaaatattaaagagactgacttaatcaaaattgaaaatgaaatgagaaaaatcagtaaatctcaacaagactttgttagagaagaaattactaaagatcaagcaaataaaatgtttagtaatcaaacttttaaacaagaactaattaattcagcagataaaagtgaaggtgtttctgaagaaaatatatctatttatacaaacgataaatttaatgatttatgtagaggtcctcatgttcaaaacactagtttgattaaacatttcaaattaacaaagcttgctggagcatattggagaggaatagaaacaaatccacaattacaaagaatttatggaacagcttggtttagcaaagatgatttagacagttatttaaaaagacaagaagaagcagagaaacgtgatcatagaaaattaggaaacgaattagatttatttattagtacagaggagacaggtcctggacaatatttatggaaaccaaaaggtgctgtattgagacaaatcattgaagattactcaaaaaaagcacattctgaaaatggttatgactatgcttacaccccacatattggtagatcagtcttatgggaaacatcgggccatttagattactacaaagaaggcatgtttcctccattaaagaatcaagaaaacgatgaagagtactatctcaaaccgatgaactgtcctttccatattcttatatataagagtgacattaggtcctataaagagttacctctcaggtattttgagttaggttctgtatacagatatgaaaaatctggtgtgttgcatggtttattaagagctagaggttttacacaagacgatgctcatatattttgtacaacagaccaaattgaggaagagatacttaacttattaacattttcaattaaacttttgaattcttttggttttgactcaattgaagctgatctt

SEQ ID NO: 303622 - DNA, 346 bp, Unknown
  Bacterial polypeptide expressing nucleotide sequence isolated from the Sargasso Sea
aatgccaaatataactttaccagacggaaaaaaaattagttttgaaaaaagtatttcaggttttgaggttgctgaaaaaattagcaaatctctctcaaaacaggctttattaataagtgttgatggagaattaaaggatttaaaccacaatatttcaaaagactcttcaataaagatatttacatcaaaagataaagaagggctggaaactataagacatgatactgcccatatattagctatggcagttcaagaattatttccaggtacacaagtcacaataggtcccgttattgaagatggtttttattatgattttgcaagaaaaggaatcttttacctctga

SEQ ID NO: 303623 - DNA, 1037 bp, Unknown
  Bacterial polypeptide expressing nucleotide sequence isolated from the Sargasso Sea
ggaaaaatagatggtataagagtagatgcttctgaattaatattagaagatagtaaagtagagatcttaacagcagatagtgaagaaggtcttgaagtagttcgacattcttgtgcgcacctcttagcccacgcactaaaacaaatatatccagatatcaaattagcaatcggtccaactataagtgacgggttttattatgacgttctgttagatcataagattaatgaaaaagatttagaagagatcgaaaaaaggatgaagaaattagcagaagaaaattatgaagttgttagggaggttgttactaaagctaaagcaactaaaactttcaaggataggaaagaggactacaaattagatattattaaagaaattcctaaagacgaaattattgctctttatcaccacaaagaatacacagacatgtgcaggggacctcatgtaacaaatactaagcacttgagggctttcaaattgactaaggtagcaggcgcttattggagaggtgattcaaaaaatgagatgctacagaggatttatggaactgcttggaaggataaaaaagatttagaaactcatctaaataacttagaagaagcggagaaaagagaccataggaaattaggaagacaattggatctttttcactttcaagatgaggcaccaggaatggttttttggcacccaaaagggtggtccatttatagagttttggaagattatattagggctaagcagcaggaagctggctacagtgagataaacaccccggaagtcgtagataggaagctttgggagaaatctggtcattgggataaatacagagaaaatatgtttattacagaaattgatgatgaacatgcaaatgaaaaaagaaccaatgctttaaagcctatgaactgtccttgtcatgtgcaagtttacaatcaaggtttaaagtcatatagagatttacctattcgtttagcagaattcggttcttgccatagatacgaagcttctggaaccttacatggtttaatgcgagtaagagg

SEQ ID NO: 303624 - DNA, 935 bp, Unknown
  Bacterial polypeptide expressing nucleotide sequence isolated from the Sargasso Sea
taatgctctaaagccaatgaactgtccaggtcatgttcaaatatacaatcaaggcataaaatcctataaagacttgccattaaagtatgcagaatttggtttatgtcatagatatgagccttctggaactatgcatggtttgatgagggttagggcttttactcaagatgatgggcatattttttgtactgagaaccaaatagaatcagaaacaggcttgttcattgaatttctttcaagcatatatgctgatttaggatttaaaaattttgacattaaattatctaccagaccagaaatgagagttggctcagatgagacatgggataaagctgaacaggcacttgaagcagcaattaaaaatttaggatatccatacagaattgatgaaggtgatggtgcattttatggaccaaaactagattttgttctcaccgatgcaataggaagagaatggcaatgtggtacttttcaattagatttcaacctagccgaaaggcttgatgccagttatgttggagaagatggaaaaaaacatataccagttatgatacatagggctgttttagggtcatttgagagattcattggtatcttaattgaaaattatgctggaaagcttcctttttggttatctcctcaacaagttgttgtggcatcaattatttctgatgtaaatgattattcattaggaatcgtggaatctcttaaaaaagagggtattctggcagaagctgacctcaggaatgaaaagattagttataaaattagggagcatagtattagaaaagttccaattattttagcaattggaaataatgaaaaaaaagataaaactgtttctattagaagaattggaagtactgatactgaggttgttgatctaaaagatgctataaaagaaattgccaaagaaaatttagctcttaattaat

SEQ ID NO: 303625 - DNA, 1129 bp, Unknown
  Bacterial polypeptide expressing nucleotide sequence isolated from the Sargasso Sea
aaatattttaaacttacaaaagtatcaggagcatattggagaggagactctaataatgaaatgttgcaacgaatatatggaacgagctgggcaactcaaaaagatttagatgaatatttaaaaagaattgaagaagctgaaaaaagagatcatagaaaacttggtaaagaaatggacctatttcattttagagaagaaagtcctggatcagtattttggcacgaaaagggatgggctctatttcagaaattaattaactatatgagaagtagacaagatgctgctggttatagagaggtaaacacaccagaaatattagatagacaactatgggaaaaatctgggcattgggaaaaatatggagaaaatatgtatacctcagaaactcccgatgaaaaagtatttgcaattaaaccaatgaattgtcctgggcatattcaggtatttaatcaaggtttaaaaagttatagagatcttcccttacgtattgcagaatttggaaaagtgcatcggtatgaaccatcaggtgctttacatggattattaagggtaagagcattcacgcaagatgatgcccatatattctgttctgaagatcaaattactagtgaatgtttagaggtaactaatttaatattagatatttataaagatttaggttttgaaaatgtaattcttaaatatgcagatagaccagaggtaagagttggagatgataaaatttgggataaagcagaggcttctttgcttgaagcagtaaaagcttcaaagttagaatatagtattaataagggagagggagcattttatggtccaaaaattgaatttgttttaagagatgcaattggtagagattggcaatgtggaactttacaggttgatttaaatttacccggaagattagatgcatcatatgttgataaagatggaactaaaaaagttcctgttatgttgcatagagcgttatttggttctttagagagatttgttggaattttaattgaaaattacgcaggtaagtttcctttctggatatctcctttgcagacaatggtaatacctatctcagaggaatttaatgattacgcagttgaagtatctaaaaagattaaaaatgtgggtattagtt

SEQ ID NO: 303626 - DNA, 1972 bp, Unknown
  Bacterial polypeptide expressing nucleotide sequence isolated from the Sargasso Sea
tatggcagaaatacagataacattaccggataattcggttaaaaaagttcccaagggttctacagctcaagatatcgcagatcttattgggcccggcctcgcaagagcagtggtggttgccaaggtcaatggtgacctaaaagatcttaacgctcccatcaatgatgattctgagcttcagctgttcactggagaatcaccagaaggacatgatactcttttacactctacagcgcacctcatggcacaagcagtgaaagaactatatccaaatgcaaaagtaaccataggcccaaccatagaaaatgggttttattatgattttgatgtagatgtatctttttctgatgaggtactagttaaaatagaggaaaagatgagagtgttagcaaaatctggtcaagatattcaacggaatgaaatatcagcaaaggatgcggtttctttatttaaggatataggagaagactacaaggtggagattattcagcagatcaatccagatgatgtgataacaatttataaacaatcagatttcactgatctttgtagaggtcctcatgtatcaaatacatccaagatcaaatattttaaactcctgtcaacctctggtgcttattggcgtggagatgagaataataaaatgctccaaagaatatacggcacagttttctcaacgaaagatgcgttaaagacccatttgcataatcttgaagaggcaaagaagcgagaccatcgaaaactcggtaaggaattaaaactttttacctttgatgaagaggtggggcccggtttaccattatggcttccaaatggcgcgattatgatagaagaattagaaagactagctaaggagtctgaaagacatgctggttatgaacaagtaaggaccccccaccttacaaaaggaagtctgtacgaacggtcagggcatctagaacactataaagaatcaatgtatccggctatggatgttgatggcatcgagtactttgtaaagccaatgaattgtccacatcatcataaaatatattcctcatatccaagaagctatcgtgatttgcctttgcgcttagcagagtatggtacatgttatcgctatgaaaaatcaggtcaattatttggattaatgagagtacgaagccttcaaatgaatgatgcgcacatttattgtacaaaagaacagtttaaacaagaatttttggctgtttgtaacatgtatcttcaatattttgatatttttggtatagaaaaatactctatgcgcctgagcctacatgataaggacgagctaggaaaaaagtatgtaaatgagcctgagctatggatcgagacggaagagtgggtgagagaagcattggtagaaggtaaattagattttgaagaggttcctggtgaggctgctttttatgggccaaagatagatgtgcaagtttggagtgcgattggaaaggaatttacccttgccacaaatcaagttgattttgcagtgccttcaaaatttgatcttacctatataaatgaaactggcgaagaacaaacacctctttgtattcacagggcacccttaggaacacatgaaagatttattggattcctgattgaacattttggaggtaatttcccgctttggctagcacctgttcaagtagcagttcttcccctttcagacaagtttatagattatgcaaataaagttgttaatgttttaaaagattcgggaatacgagttaaattaaatgaccgtgctgataaaattggatcaaagatcagacatgcggagttagaaaagattaatgttatgttgattcttggtgaaaaagaagagaaagacggtaccgtttcagttcgaaaacgatttgaaggagacaccggtatcttaaatcttgaagaagtaaaagaacaacttttagatgaaataaatgataggagattaactcataggaaaaaaacagaagcagcgactgaatga

SEQ ID NO: 303627 - DNA, 1141 bp, Unknown
  Bacterial polypeptide expressing nucleotide sequence isolated from the Sargasso Sea
cctggacaaatatttatggcaacctaatggttctatacttagaaatcaaattgaagaatttagtaagtctgcacatataagtaacggttatgaatttgtaaatactccacacattggtagatcaatactttgggaaacatcaggacatttagaccactataaagaaggaatgtacccagctttaacaactgaggatactaatgaagattattatttaaaaccaatgaactgtccttttcacattcttgtatataagaatgatataaggtcctatagagatcttccaattaggtattttgaattaggatcagtttatagaatggagaaaacaggagtactccatggattgttacgtgcacgtggatttactcaagatgatgcacatatatttacaactattgataatttaaatgacgagattcttaatttgttgaccttttcaattaaactcctcaactgtttcgggtttactgatatagaagctgatttgtcaacgaggccaaaggactctattggattggataaggattgggaaaatgcaacaaatagtttagaagaagccttaaaccagcaaaaattatcatataagatagctcaaggagaaggtgctttctatggtcctaaaatagatttgcatataaaggacgctattggaagaagatggcagttaacgactatacagattgattttgcgcaacctaacaatttttcattagagtatgttaactctgaaaataagaaagttagacctgtaatgattcacagagccctattaggttctattgagagatttacaggaatattgatagaacattacgctggtgaattccctggatggttagctccaaatcaaataaatatattaacaattggaaatgtcaaagaatatttagattttatagtttcgaaacttagtaagtatcgtttaaatatcgatgatagaaatataagattaggtgaaaaaatacatgaatctcgtaaaaataaaataccagtaactctaattattggagaaaaggatgctaaaaataaatcagtagctattaactacttagatggaagtgaagagcaagatatcgaattgagtgaaggtatcaaatcgataaataagaaactaaagaagcctgtttttaaaatctga

SEQ ID NO: 303628 - DNA, 1372 bp, Unknown
  Bacterial polypeptide expressing nucleotide sequence isolated from the Sargasso Sea
atgagtgatttaaagactataagaggaatgccagatctatatggagaaaatatagaggctatttctatggtcgaagaaatatgcttaaaaactttcaaaagttttaattacaaagaatttagaacacctttactagagaatagcgcgctattttcaagaagtattggccttacctcagatattgttcaaaaagaaatgtatgagttcaaagataaaaaaggagaaaggctttgcatgagaccagaaggtactgctggcttagtacgagctttaattaccaatgggctcgatgatgaagaaataaaaaaattcttttatattggcccaatgttcagatatgagagaccacaaaaagggagaaaaaggcaattctttcaggcaggtatagagctaataggagatagatctattgattcagacattgaaattattcttgttgccaaaaaaattctcgatgagcttaatattaaatacaatcttcaagttaattatttaggtagtgttgcagagattgaagaatatagtgcgtatcttgaagagtttatgcaaaacaagggagtggcttcaaataaagaaaaattgcttgctgagaatgaaaaagagattcaagcaatactagtagagaagcggaatcaaatggcacatcctaggcctaaagatcctagcgatcttgataaaaggcttgcacgacttatggacaagaagaaccaactggttcaagaaacctctgctatcagagcgcttgattcaaaactagaggaatcaaaaaaactgttcgaagaggctagagccttagatagttttttaagcaaagaaaaaaagcaagaatttgaatcaattaaagcaaaacttgatgaactcgaaattgactattctgtaaattctagacttgttcgaggtctagactattacaatggcctagtttttgaatttttgtctaatgatcttggttctcaaaatgcagtattagcaggtggcaggtatgatggtcttatcaaaaatcttggtggccgtgatttaccagcaacggggtttgctcttggtattgatagaattgcagaaattgtgaaagcaaaatctattgaaaaagacctttttataggttgtgtagataaggagtcacgaacatatgcccaagcattaggctataagattagggaaaacaatagttctcttatagttgagaactatcttggtaatgcaaatgttggcaaacaattgaaaaaagctgattctcagggctttaaatttgctattatagtcggccaggacgagcttaaaagtaaaaaagttaaattaaagaatttaaaggaagataatcctgatcttgaactaaaagaaaaagatttattggagtattttaagtgttaga

SEQ ID NO: 303629 - DNA, 1346 bp, Unknown
  Bacterial polypeptide expressing nucleotide sequence isolated from the Sargasso Sea
aattggtaagaattttaagttaactaaggttgcaggtgcatattggagaggtgactccaaaaatgaaatgctgcaaagaatctatggaacttcctgggcatcaaaaaaggatttagataattacattaaaagattagaagaagccgaaaaaagagatcatagaaaacttggtaaagaaatggacttattccattttagagaagaaagtccaggtgcagtattttggcatcaaagaggatggacattgtttcaaaaacttatcgattacatgagaaaaaaacaaaatgaagcaggttataaagaaattaacactccagaagttttagatagatctttgtgggaaaaatctggtcactgggaaaaatttggtgcgcacatgtatacttctgaaactccagatgaaaaaatatttgctattaaacccatgaattgtccaggatgtgtccaagtattcaatcaaggtttaaaaagttatagagatctaccttataaaatgtctgaatttggaaaagttcatagatatgaaccatcaggtgcactacatggcttgttaagagtaagagcgtttactcaagatgatgctcatatcttttgtactgaagatcagatcacagaagagtctctatcagtaacaaatctaatcttaaatatttataaagatcttggatttgaaaatgttattttaaaatattctgatagaccagaccttagagttggagaggatgaagtttgggataaagcagaaaaagctctattggaagcagttaaagcaacaaaactagaatatagtatcaataaaggggaaggtgcattttatggtccaaaaattgaatttgttttaagagatgcaataggaagagattggcaatgcggaactcttcaagttgacttaaatttaccaggaagacttggtgcatcttttgttgacaaagatggatcgaaaaaagttccagtaatgttgcatcgagctttatttggttctcttgaaagatttattggaatactaattgagaattactctggaaaacttccattctggattagcccatcacaaatcatggtaataccagtttctgaagactttaatgattattctgttgaagttaataaaaagcttattgcatctggtttaaattcggaagttgacttgaagaatcataatttaaattacaaaataagggaacattcgttatcaaaggttccaatactattaatttgtggaaaaaaagaagttgacagtaatagtgtaactattagacaattggattctacaaaacaagaaaatatggaattaaaaaaatttattaatcactatcaagctttaaataaagctccatcattataag

SEQ ID NO: 303630 - DNA, 1918 bp, Unknown
  Bacterial polypeptide expressing nucleotide sequence isolated from the Sargasso Sea
atgcttaatataactttaccagatggaaaaaagttatcttttgatgaaaaggtaacaggaaaacagattgcagaaaaaattagcaagtcattagctaaagaagcacttataatgagtgttgatggaaatttaaaagacttaagtttcgaaatagaaaaagattctatagtaaaaattttaacatcaaaagatgatgatggtttagataccattagacacgatactgctcatattttagcaatggctgtacaagagttatttcctggaacccaggtcacaattggcccaacaatagaaaatggattttattatgatttcgcaagaaaggaaccttttacggagtcagacttaaaaaagatagagactaaaatgtcagagatagttgacaggaatgaaactacttatagagaagtttgggaaagagacaaagcaattactcattttaaaaaaatgggagaaaattataaagctgaaattattcaagacattcccaaaggtgaggagatctcaatttattttcatggcaaatggcatgatctttgtagaggtccacatttaccttcgactggtagaattggtaaacattttaaattaacaaaagttgcaggtgcttattggagaggtgattcaaaaaatgaaatgttacagagaatttatggaacatcttgggcatcaaaaaaggatttagaggattatttaaaaagattagaagaggctgaaaaaagagatcacagaaaattgggcaaagagatgaatctttttcattttagagaggaaagtcctggagcagttttttggcatgaaaaaggatggaacttatttcaaaagctagttaattatatgaggaaaaagcagcaagatgctggttataaagaaattaacacacccgaaatattagatagatctttatgggagaaatctggacattgggaaaaatttggtgctcatatgtatacttcacaaaccccagatgagaaaatttttgcagttaaaccaatgaattgccctggatgtgttcaggtatttaatcaaggattaaaaagctacagagatcttccacttaaaatgtctgagtttggaaaagttcataggtatgaaccatctggtgcattgcatggattattaagagtaagagcttttacgcaagacgatgcacatattttttgcaccgaggatcaaataacagagcaatcgctttctatcacaaacttaattctggaaatttacaaagatcttggttttgaaaatgttattcttaaatactcagatagaccagatcttagagttggtagcgacgcagtttgggacaagtctgaaaaagctttactcaaagcagttaaggaaacaaaattagattatagtataaataaaggtgagggtgctttttacggtccaaaaattgaatttgttctaagagatgcaattggtagagattggcaatgcggaacattgcaagtagatcttaatttaccagaaagattaggagcatcatatgtagagaaagatggctctaaaaaagttccagtgatgttacatcgtgctttgtttggatcacttgaaagatttataggaatactaattgaaaattattctggtaaacttccattttggattagccctttacaaactgttgtaatacctgtttcggatgaatttgatgagtattcaaaacaagtaaataaaaaattaattgatgcaggtttttcatcggaagtagatctcaaaaatcataatttaaattataaaattagagatcattcgttatcaaaagtcccaattttattaatatgtggaaaaaaagaagttgactctaacagtgtaactattagaagattggattctaataaacaggaaaacatagaattgaaaaaatttataactacccaccaagctttaaacaaagctccttctttataag

SEQ ID NO: 303631 - DNA, 874 bp, Unknown
  Bacterial polypeptide expressing nucleotide sequence isolated from the Sargasso Sea
aagttatcgtgatttaccaataagaatggcggaatttggttcatgtcatagaaacgagccatcaggtgcattgcatgggataatgcgagtgcgagctttcacccaggatgatgctcacattttttgttcggaggatcagataacctccgaaagtataattttctgtgatttgctcaggaagatatacaaagattttggttttgaagacgttcgagtgaaattttcggatagaccagatgtcagggcaggagatgatgcaacgtgggatagagcggaagaggcgctaaagaatgcttgtgaggctgccggtttagagactacgcttaatccaggtgagggtgcattctatgggcctaaactggaatttgttttgagagacgctatcggcagagattggcagtgtggtactcttcaggtggactttgtattgcccgagcgtctcgatgctacttatatagcttctgatgggtctaaaaaaagaccagttatgctccaccgagcaatactcgggtctatggagcgctggattggaatattaattgagcagtatgcgggcagattcccaatatggttagcccctgtacagctagtagtaacgacaattaccagtgataacgatgaatacgcgtacagagttctggaacaatgtaaaaaagttggcttgagagcggctgtcgatacaagaaatgaaaaaataaactataaaatccgcgagcatagtaacgcaaaaatcccagttatattggtcgtcggagcaaaagaacaagaaaatgagacagtagcgatgaggcgcctaggcggaaaatctcaagaaatacttgcgctaggcgacgctgttaatacactattgaaagaatcggctccgccgagttaa

SEQ ID NO: 303632 - DNA, 1921 bp, Unknown
  Bacterial polypeptide expressing nucleotide sequence isolated from the Sargasso Sea
atgccaaatattactttaccagacggaaaaaaattgagttttaaaagcaatgtgacaggttatgaggttgctgaaaaaattagtaagtcactttcaaaacaggctcttattgtaagtgttgatggagagttaaaagacttaagctttttgatcaaaaaagacgcctctgtaaaaatcataactagtaaagataaagagggtctagatgtaattagacatgatgcagcacatataatggcaatggctgttcaagaattattcccaggaacacaagtaactataggtcctgttattgagaatggttttttctacgactttgcaagaaaggaaccatttacaaaagatgatttaaaaaaaattgagaagaaaatgtcagagattattgacagggatgtaaaaacaaaacgcgaagtatggaacagaagtaaagcaatagcacattttaaaaaaattggggaaaagtataaagctgagattattgagagcattcctaaaaatgaagaactatcaatttaccatcatggggatacttggcacgatctatgtagaggcccgcatttggtttcgtcagggaaaataggtaaagcttttaaattaactaaagtttcaggtgcgtattggagaggggactcaaataatgaaatgcttcaaagaatttatggaacatgttggagttctaaaaaagaattagatgaatatttacacagactggaagaagctgaaaaaagagatcatagaaagttaggtaaagagatggatctctttcatttcagggaggaaagcccaggatctgttttttggcatgagaaaggttggaatttatttcaacgacttgtagagtatatgagattaaagcaaagaaacgcaggatataaagaaataagtacacccgaactattagataaaagtctttgggaaaaatcaggacattgggagaaatttggtcatcacatgtttacatcagagacaccagatgaaaaagtttttgctgtgaaaccaatgaattgtcctggttgtgttcaagtatttaatcaaggtcttaaaagttatagagacttacctttaaagctttctgaatttggaaaagttcatagatatgaaccatctggtgcactacatggacttttaagagtaagagctttcactcaagacgatgcacacatattttgtactgaagaacagataacagatgaatgtattagtgttaccaaattaatattagatatttataaagatctggggtttgaaaaagtattccttaaatattccgatagacctgaaaaaagagttggagatgataaagtctgggataagtcagaaaaagctttgctcgaagcaattaaaaaaacaaaattggaatacactattaataaaggagagggcgctttttatggtcctaaaatagaatttgttttgagagatgctataggaagagactggcaatgcggaactttacaagtagacctaaatttaccaggaagacttggagcgacttttgtagataaagatggaaccaaaaaaatacctgttatgcttcacagagctctttttggatccttggagaggtttattggtataattatagaaaattatgcaggtaaacttcccttctggctatcaccgtcacaaattgttgtgttacccatagctgaagagcacaatgattatgcaaaaaaaatatttaaagacatgtttaaagagggtataaaatgcgaagtggatttaagaaatcaaaaaattaattataaaattagagatcactctttgtcaaaagttccgtttctattaatatgcggaagtaaagaaataaaagataaaagtgtaacaatacgtaaattaggatctgaaaaacaagagactaaaaaaattaacaaagccattaaagaatttaaacaattaaataaccttccaataaattaag

SEQ ID NO: 303633 - DNA, 1909 bp, Unknown
  Bacterial polypeptide expressing nucleotide sequence isolated from the Sargasso Sea
tacattacctgacggaaaaaaattaaactttgataaaagcgtaacaggttcagaggttgcagaaaaaataagcaaatctctagctaaacaagctttagtaatgagcgtaaatggagaattaaaagatttatattcaacaatagataaagatagttcaataaaaatttttacttcaaaagatcctgaaggattagaagttattaggcatgatacagcgcatattatggcaatggctgttcaagaattatttccaggaacacaggtaacaatcggtccagttatagaaaatggcttttactatgactttgctagaaaggaaccttttactagtgatgaccttaaaaaaattgaaaataaaatgtcagagataattgataaggatgtaaaaactagaagggaaatttgggaaagagataaggcaatagctcattttaaaaaaattggtgaaaaatataaagctgaaataattgagagtattccaaaaaatgagatgcttacgatttatcatcatggtgatgcatggcatgatctatgtagaggtcctcacttagaatcttctagtaaaattggtaaagcatttaaattaacaaaagtatcaggggcttattggcgaggggactctaataatgaaatgttgcaaagaatttatggaactagctgggccaatcaaaaagacctggatttatatcttcaaagaatagaagaagcagaaaaaagagatcatagaaaaataggtaaagagatggatttgtttcattttagagaagaaagtcctggctctgtattttggcatcaaaaaggatggaacttatttcagaaacttatttcttatatgagaatgaagcaagaaactgcaggatatcaggaaataaacactccagaaatattagatcgatcactttgggaaaaatctggccattgggaaaaatttggcgcaaatatgtacacctctactactccagatgaaaaagtttttgctattaaaccaatgaattgtcctggatgtgttcaggttttcaatcaaggtttaaaaagttacagagatttaccactcaaaatgtcggaatttggaaaagttcatagatatgagccctctggagcacttcacggattattgcgcgttagagcattcactcaagatgatgcacatattttttgtacagaggagcaaatcacagaagaatgtttgagcgtaacaaatttgattttagaaatttataaagatttaggatttgaagatgtaattttgaaatattctgatcgaccagacttaagagttggggacgataaagtttgggacaagtcagaagctgcattattggaagctataaaggcaacaaaattagaatattctgtaaacaagggtgaaggtgctttttatggtcctaaaatagaatttgttttaagagatgcaatcggaagagattggcaatgtggaactttacaagttgatttaaacttaccaggtaggttaggtgcatcatttgttgatagcgatggaaacaaaaaagtaccagtcatgctacacagagctttatttggatcattggagagatttataggaattctaattgaaaattattctggaaaattacctttttggctttgcccagtccaaactatagttatacctatttctagtgattttgacgaatatgcaaaacaagtaaacaatgagttaaaaaaagttggtttaagttctgaagttgatttaaaaaatcataatttaaattataaaattagagaacattcattaactaaagtcccaatgctactaatatgtggaaaaaaagaagttgacagtaacacagtaactattagaagattggattctaaaaaacaggaaactatggaattaaaagaattcttaaaaaaatattctgctcttaacaaagcaccttcaatctaa

SEQ ID NO: 303634 - DNA, 796 bp, Unknown
  Bacterial polypeptide expressing nucleotide sequence isolated from the Sargasso Sea
agtcagaggttttactcaagatgatgctcatattttttgttcaattgatcaagttggtgatgaagttttaggtgttatagatttaattttaaaggtatttaaatcattatcatttaaagattataaagtacaaatatcattaagagatgaaaatgattcttcaaaatacataggagaatcttcattgtgggatagagcagaaaacgatttgatagaagcagttaaaagaaaaaaaattcaagctgaaatagtacatggagaagcagcgttttatggaccaaaaattgactttatggttaaagactctcttgatagagagtggcaattaggtactattcaagtggattatcaactaccaaaaagattcaacttagagtatgtagataaagataacactaaaaaaacaccagttatcattcatagagctccatttggttccatggaaaggtttatagctataattacggaacattgtgaaggaaatttccctttgtggttagctccaaatcaagtcataattttacctattaatgaaaatgtaaatgattatgctaccgagataaagaataaattagaaagtttagattttagaaccgaaatagatataagatttgaaaaaatttctaagaaaataagagatgctgaggttaaaaagataccatatatgttggtaattggtgataatgaaatgaaatcatcaacattatctgtaagaaaaaagcatgagggcgatattggtaagatgtcattagatgggttaattaagatcttaaatgaagaattaaactcaaattga

SEQ ID NO: 303635 - DNA, 1063 bp, Unknown
  Bacterial polypeptide expressing nucleotide sequence isolated from the Sargasso Sea
actgaacatgaaaaaggcggttatgagatcttatatacgcctcacatcgcattggatactctttggcagacttccggacataccgacttttatgaagaatcaatgtacactcccatcgaagatgaaaatcaatcttatcgactaaaaccaatgaactgcccttttcatgttctcatatataaagataaattaagatcctacagagatctaccgatcagatgggctgaacttggaactgtttatagacatgaaatgactggtgctcttcatggtttgatgcgggttaggggtttcacccaagatgatgcacacatcttttgttcagaagaccagattgaaagcgaaataagcgaaatactggaattggcaatcaatatgctcaataaatttacatttacagaatttgagattcatttagcaacgagaccagaaaaatacgttggcagtgaagctatctgggataaagcaacagcagcattgataaaggctttggaagaaaagaatctaagttatgagttagatgagggtggtggagcattttatggtcctaaaattgacattaagatcaaagatgcaatcggaaggctttggcaatgttcaaccatacagcttgatttcaatctccctgagcgttttgatatgcgatatgttggaagcgacggcaagaaatatcatccaatcatgattcatcgagcattgcttggttcggtggaaagattctttggaattttagtggaacattttgcaggtaaattcccattatggcttgctcccgttcaggtttgcgtgatgccgattaatcaaaaacaacatgattatgcagattctgtgtataagattttgaaaaaaaatgggttaagagtagaaattgacttgagaaacgaaaaaataggctctaaaattcgcgatcacaccttaaataaggtaccttacatgattgttttaggtgaccgagaagtttgtgatgaggaaatcactattagaactcaaaagggtgaagacttgggtaatatgaaagttgaaagttttctaaaaaaactttctgaagaaataagtaattaag

SEQ ID NO: 303636 - DNA, 1735 bp, Unknown
  Bacterial polypeptide expressing nucleotide sequence isolated from the Sargasso Sea
atgccaaatattacattacctgatggaaaaaaattaaactttgaaaaaagtataacaggcacagaggttgctgaaaaaattagcaagtctttaggtaagcaagctttggtgatgagcataaacggtgaacttaaagatttatatactgttattgatcaagattgttctattgaaatatttacagctaaagatcctgagggtttagaagtcattagacatgacactgcacatataatggctatggccgttcaagaactatacccaggcacacaggtaacaattgggccagttatagaaaatggattttactatgattttgcaagaaaagagccttttactagcgatgatttaaaaaagattgaaaaaaaaatgtcagagataatagataaagatgtaaaaacaagaaaagaagtttgggagagagataaagcaataagtcattttaaaaaaattggagaaaaatacaaagctgagataattgagagcattcctaaaaacgaagaacttacggtttatcatcatggcgaaacatggcatgatttatgtagaggtccacatttagtatcttctggtaaaataggtaaagcttttaaactgacaaaagtatctggagcttattggcgtggtgactctaataatgaaatgcttcaaagaatatatggtactggttgggcaactcaaaaagaattagacctttatcttcagagaattgaggaagcagaaaaaagagatcatagaaaaattggaaaagagatggatttatttcattttagagaagaaagtcctggatctgtgttttggcaccagaaaggatggaatttgttccaaaaattagtttcatatatgagaatgaaacaagatcacgatggttacaaagagataaatacgccagaaatacttgatagatctttgtgggaaaaatctggccactgggaaaaatttggagctaatatgtatacttcaactacaccagatgaaaaagtatttgcaattaaacccatgaattgtcctgggtgtgttcaagtatttaatcaaggacttaaaagttatagagacttacctttaaagatgtcagaatttggaaaagttcatagatatgaaccttcaggtgcattgcatggattattacgtgtaagagcctttactcaagatgatgcacatattttttgtacagaagaacaaattaccgaagaatgtttgagtgttacaaatttaattttagaaatttataaagatcttggttttgaagatgttattttaaaatattcagatagaccagatttaagagttggtgacgataaagtttgggataagtcagaggctgcgttgttagaggcaatcaaagcgacaaagctagagtactcaattaataaaggtgagggcgcattttatggaccaaaaattgaatttgttttaagagatgcaatcggtagagattggcagtgtggaaccttgcaagtagatttaaatttaccaggtagattaggagcttcttttgttgataaagatggaactaaaaaagtacctgtaatgttacacagagcattatttggatctttagaaaggttcataggtatccttatagagaattatgcaggcaagctgccattttggatatcacctttacaggcagtagttattccaatctctagtgattttgatgaatatgctaaaagtgttgctaaggaattaaaacggattggtttgattgtcgaggtggatcttaaaaatcaca

SEQ ID NO: 303637 - DNA, 983 bp, Unknown
  Bacterial polypeptide expressing nucleotide sequence isolated from the Sargasso Sea
tgatctccctgataatgaggaaattagtatttacaaacaaggtgattggttagacttgtgcagaggtcctcatatggtttcaacaaaacaaattggtaaagcatttaaattaatgaaagttgctggtgcttactggcgaggtgattcatctaatacaatgctaacaagaatttatggaacggcctgggcaacagaaaaggatcttgaacaacaccttttacaaattgaagaagcagaaaaaagagatcaccgaaaactaggaagagaaatggatttatttcattttcaggaagaggctcctggagcggtgttttggcatcctaagggttggacattattccaatcgctaataaattatatgcgaaacagacaagacaaggcaggttacgtagaaactaatacgccagacatgatggataagtctctatgggaaacgtctggtcactgggacaaatttagtgacatgatgtttagaactgaagcaaaagacgataaaatttatgctatcaaaccaatgaattgccctggtgctgtagaaatttttaaacaaggattaaaaagttatagagacttaccatttctattatctgaattcggaaaagtacatcgttatgaaccatcaggtgctcttcatggattaatgagggtgagagcattcacacaagatgatgcacatatattttgtacagaagatcaaattacacaagagagtaaaacggtatgtgatttgatacttagtatctataaggactttggtttcgataatgttagaattaaattttctgaccgtcctgaaaaacgcgtaggagatgatgctatttgggataaagctgaggctgcattaatgcaagccatggaagcaacaggtcttgagtatacactcaacccaggagagggtgcattttacggtccaaaattagagtttgttttacgtgatgcaattggcagagactggcaatgcggaacactgcaagtagatttaa

SEQ ID NO: 303638 - DNA, 1015 bp, Unknown
  Bacterial polypeptide expressing nucleotide sequence isolated from the Sargasso Sea
ttgtgggttgagtcgggtcattgggataaatacaaagataatatgtatagaactattatcgatgatagagagctcatgatcaaaccaatgaattgtccaggacatgttcaaatatataatcaaggaataaaaagctataaagatttacctcttcgaatggcggaatttggttcgtgtcatcgtaatgaaccatctggagcgcttcatggtctaatgcgggtaagaaattttgttcaggatgatgcgcatattttttgtactgaggaccaaatagaaagtgaaacagtcaatttttgtaaattacttcaagaagtatatagcgaattaggctttagtgaagtttcaataatgtatgctgatagacctgagcagagggtaggttcggatgagatttgggataaagctgagaatgcacttttgaatgcctctaaagctacaggaattccttttgataaaaatagcggtgatggagctttttatggaccaaagttagacttttatttacatgacgctattggtagaaaatggcaatgcgggacattacaggttgattttaatatgcctggaaggttaggggcaagttatgttggtgaagataatgaaaagcacacaccggtaatgcttcatcgagctattttaggaagtttagagagatttactggtattttaattgagcactatgagggcaaattccccttatggttggctccaattcaattggtagttgccactataacttctaaagccgatcaatacgctaaagagatagaagaaaaatttatagaaaaaggaatacgggtcatattagactcacgaaatgagaaaataaattacaaagttagagagcattcagtaaataaaataccatatatctttgttgttggggttaatgaaatggaaaacggaactgttgctattaggaagcttggttcaaataagcaggaaataattagtattgaagatagtataaatatgatcttaaaagatacttcagctcctgatattgataattaac

SEQ ID NO: 303639 - DNA, 1109 bp, Unknown
  Bacterial polypeptide expressing nucleotide sequence isolated from the Sargasso Sea
gatgagtgaaaagataataattacatttccagatggaaataaaaaggaagttgataaaggcatcaatggtcttgaattggcatcgcaaatttctaaatctcttgccaaagaatcagttgctataaaaattaataatgagataaaagatattagtttacctattaatggtaatgcatctgtagcgattttaaaaagagatagcgaggaagcacttgaattaatacgacatgattgtgctcacgtaatggcagaagctgtccaggaattatttcctggaacacaagttacaattggtccagcaattgaaaatggtttttattatgattttgcaagagatgaaccttttactgttgcagatcttccaaaaattgaaaagaagatgcacgacatcattcaaagaaataaaaatttcataagagaagtgtggtctaaagaggaatcgataaaatattttaaagacaaaggtgaagactataaagttgaactaattaatgatctgcctgataatgaggaaattagtatttacaaacaaggtgattggttagacttgtgccgaggccctcatatggtttcaacaaaacaaattggtaaagcatttaaattaatgaaagttgctggcgcttactggcgaggtgattcatctaatacaatgctaacaagaatttatggaacggcctgggcaacagaaaaagatcttgaacaacaccttttacaaattgaagaagcagaaaaaagagatcaccgaaaactaggaagagaaatggatttatttcattttcaggaagaggctcctggagcagtgttttggcatcctaagggttggacattattccaatcgctaataaattatatgcgaaacagacaagacaaggcaggttacgtagaaactaatacgccagacatgatggataagtctctatgggaaacgtctggtcactgggacaaatttagtgacatgatgtttagaactgaagcaaaagacgataaaatttatgctatcaaaccaatgaattgccctggtgctgtagaaatttttaaacaaggattaaaaagttatagagacttaccatttctattatctgaattcggaaaagtacatcgttatgaac

SEQ ID NO: 303640 - DNA, 1360 bp, Unknown
  Bacterial polypeptide expressing nucleotide sequence isolated from the Sargasso Sea
tactggtctagagatagcgcagaaaataagtaaatctcttttaaaaaatgcacttataatgagtgtagatggggatttaagagatttaaattttcaagtagaaaaagactcagctgtaaaaatttttacttcaaaagataaagaaggtttagaaaccattaggcatgatacagctcatatattagctatggctgtacaagaattatttccaggcacacaagtaaccattggaccagttatagataatggattttattatgacttttctagaaaagaaccttttacagaaaatgatctaaaaaaaattgaacaaaaaatgatggatattgttgatagaaatgaaccaactcatagagaagtttggaatagaaaaaaagcaattgagcactttaaaaaaataggtgaaaagtataaatccgaaattattaatgatattcctgaagaagaggaagtttctgtttattttcatggcaaatggcatgacttgtgtagggggccacatttgtcatcaacaggaaaaattggaaaattctttaaacttacgaaggtatcaggtgcgtactggagaggagattcaaataatgaaatgttacaaagaatttatggaacatcttggccatctaaaaaagaattagatgaatatttaaacagactagaagaagcagaaaaaagagatcatagaaaattaggcaaagaaatggatttatttcattttagagaagaaagtcctggttcagtattctggcacgaaaaaggttggaatctttttcaaaaacttatttattatatgagagaaaagcaaaatcaagctggttataaagaaataaatacaccagaaattttggacaggtcgttatgggaaaagtcaggacactgggaaaaatttggagccaacatgtatacatccacaactccagatgaaaaagtatttgctataaagccaatgaactgcccaggatgtatacaagtatttaatcaaggtctaaaaagttatagagatcttcctttaaaaatgtctgaatttggtaaggttcatagatatgaaccttctggggctttacatgggcttctaagagtacgagcatttactcaagatgatgcacacatattttgtacagaaaatcaaattacaagtgaatgtttgtccgtgacaaatttaattttaaatatttacaaagatcttggatttgaaaatgttatattaaaatattctgatagaccagatgtaagagtaggagaagatcacatttgggacaaagcagaggcagctttgttggaagcgataaaagcatcaaaattagaatattcaataaacaaaggagaaggtgcattttatggaccaaaaatagaatttgtttta

SEQ ID NO: 303641 - DNA, 1318 bp, Unknown
  Bacterial polypeptide expressing nucleotide sequence isolated from the Sargasso Sea
ggaaaaaaaattaattttgaaaaaagtatttcgggatttgaagttgcagaaaaaattagcaaatctttgtcaaaacaagctttgttaataagtgttgatggagaattaaaagatttaaatcataatatttttaaagattcctcaattaagatatttacatcaaaagataaagaaggtttggagactataagacatgatactgctcacatactcgctatggcagttcaagaactatttccagggacgcaagttacaatagggccagttattgcagatggcttttattacgattttgcaagaaaagaaccttttacaacagaagatttaaataaaattgagaataaaatgaaagaaatagtagatcgagatgaaaaaacttacagagaggtttggaaaagaaatgatgcaattgaacattttaaaaaaaagggagaaatatacaaagctgagataatagaaaatattcctgaaggagaagatgtgtctctatattttcatggagattggcacgatttatgtagaggccctcatttaagttcaactggtaagattggaaaatattttaaattaacaaaagtctcaggtgcttactggagaggtgactctaataatgaaatgttgcaaagaatttacggaacaagttggtctactcaaaaagaattagatgattatttaaatagaatagaagaagctgaaaaaagagatcacagaaaaattggaaaagaaatggatctatttcatttcagagaagagagtcctggatctgtattttggcatcaaaaaggatggagcttgtttcaaaagctcatttcatatatgagaatgaagcaagaaattggaggatatcaggaaataaatacaccagaaatattagatcgctccctttgggagaaatcaggtcactgggaaaaatttggtgccaatatgtatacctctactacacctgatgaaaaagtttttgctataaagccaatgaattgtccaggttgcgttcaggtatttaatcaaggcttaaaaagttatcgtgatttaccattaaaaatgtcagaatttggaaaggttcataggtatgaaccgtctggagcgcttcatggattattgagagttagagcttttactcaagatgatgctcatattttttgtactgaagaacaaattactgaagaatgtttaactgtaactaatttaattttagaaatttatagggatttgggttttgaagatgtaattttaaaatattctgatagaccagaattaagagttggtgacgatcaagtatgggataaatcagaggctgctttactagaggcaattaaag

SEQ ID NO: 303642 - DNA, 1343 bp, Unknown
  Bacterial polypeptide expressing nucleotide sequence isolated from the Sargasso Sea
catgccagttattactttacctgacggtagccagcgttcatttgacgcccctttatctgtattagacgttgccaaagacataggcccaggtctggcgaaagccaccatagccggcaaaatcaatggccaattggttgacgcttgtgagctgatcacagccgatgcgtctttaagcattgtcaccgccaaagatcaggaaggcctggaaattatccgtcactcctgcgctcacttattaggtcatgcgattaagcagttatggcccaataccaaaatggcgattggccctgttatcgacaacggcttttattacgatgtggatttagaccgtccaatcagcagcgatgatttagctcaacttgaagagcgcatgctgcaactggccaaaaccgaatatgacgtagtgaagaaaaaagtaagctggcaacaggcttatgacaccttcgctccacgtggcgaaagctacaagatggaaatcctcgatcagaacgtcgccaaagacgatcagccgggtttataccatcacgaagaatacatcgacatgtgccgtggcccacacgtgccaaatatgcgtttctgtcagcactttaaagtgatgaaagtggcgggcgcgtactggcgtggtgacgcgaaaaacaaaatgctgcaacgtatttacggcacagcctgggcagataaaaagcaattagctgcttatttactgcaactggaagaagcggaaaagcgtgaccaccgtaaaattggtaaagctttaggtttattccactggcaggaagaagcaccaggcatggtgttctggcacaacgacggctggactattttccgcgagctggaaacttttgtccgtgaaaagttggcgcaatacgattaccaggaagtgaaaggtccatttatgatggacaaagtactgtgggaaaaatcaggtcactgggaaaagtattcagacaatatgtttgtcaccagttctgaaaaccgtgattacgccatcaagccaatgaactgtcctggccatgtgcagatttttaaccagggcctgaaatcataccgcgatttaccgctgcgtatggctgagtttggttgctgtcaccgtaacgagccgtcaggtggtttacacggcctgatgcgtgtgcgtggttttactcaggatgatgcccatatcttctgtactgaagatcaggtgcaggctgaagtgtccaactgtatcaaaatggtgtttgacgtctacagcacctttggttttaaagacgtgcaggtgaaattatccacgcgcccggaaaaacgcattggtaccgacgaaatgtggcaccgtgcagagcaggggttagcagaagctttggatgcta

SEQ ID NO: 303643 - DNA, 1798 bp, Unknown
  Bacterial polypeptide expressing nucleotide sequence isolated from the Sargasso Sea
aatgggaaaaatattagatttatcaagaacaattgaaaatgactctgaaattcaaattttaacaaaagaggataatgaagctttggacattattcggcatgattgcgctcatgtaatggcagaagctgttcaatctttatatccgggtacacaagtcacaataggtccttcaattgaaaatggtttttattatgactttgctcgtaaagaaccttttgctatttcagacttacctaaaatagaaaaaaaaatgcatgaaattattaataggaatgaaaagtttacaagagaagtttggtcaagagatgaagctataaaattttttaaaagcaaaggtgaagaatataaggttgagctaattgaagacttaaacgaagatgaagaaataacagtatataaacaaggagaatggttagatctttgtcgtggtccacatatgatgagcactaaacaaattggtaaaggatttaaattaatgaaagtagcaggtgcatattggagaggagactccaataatgcaatgcttacacgtatttatggaacagcgtggagaaatgaaaaggaattagaaagtcatttgctacaaattgaagaggcagaaaaaagagatcatcgaaagcttggaaaagaaatgaatttgtttcattttcaagaagaggctcctggagcagttttttggcatcccaaagggtggaaattatttcaatctttaataaattatatgcgaaaaagacaagatgatgcaggttatgtagaaacaaacacaccagacatgatggataaatctttgtgggaaacttctggtcactgggataaatttagtgaaatgatgttcagaactgaagcaaaggatgaaaaaatatatgcaattaaaccaatgaattgtcctggtgctgttgaagttttcaaacaaggtttaaagagttacagagatcttccatttctattatctgaatttggaaaagtccatcgttatgaaccttcaggagcattgcatggtttaatgcgagtaagagcatttacgcaagatgatgcacatatattttgtacagaaaatcaaataactcaagaaagcaaaactgtgtgtgacctaatacttagtatctataaagattttggctttgataatgttaggattaaattttctgatagacctgaaaagcgagttggagatgatgctgtttgggataaagctgaggcggcattaatgcaagctatggaagcaacaggacttgaatacacgcttaacccgggagaaggtgctttttatggccctaagcttgaatttgttctgcgagatgccattggaagagattggcaatgtggaacacttcaggttgatttaaatttacctgaaagacttggtgcaacctatgtagctgaagatggacaaaagaaggttccagtgatgttgcatagagctctttttggttctctagagagattcacaggtattttaattgaacactatgctggacatttaccactttggctatctccgttacaaattgtggttgctacgataacttctgagtctgataattatgcttttaatgttaaagatcaattaactaaaaatggattagtaactgaagtggatatacgaaatgaaaaaattggttataaaattagagaacatagcaatgcaaaggtcccagtaattcttgctgtaggaaaaaaagaagctgatgaaaaaactgtgtctgttcgaagacttggaagtcaagatacaaaaaatataaaacttgatgaactaataaagagtctccaaaaagaatctctttctccaataaattaa

SEQ ID NO: 303644 - DNA, 1921 bp, Unknown
  Bacterial polypeptide expressing nucleotide sequence isolated from the Sargasso Sea
atgccaactattacactaccagatggaaacagcttagattttccaaataaagttacaggaatagaagtagctgaaaaaataagcaaatcgttagcaaaacaagcattaataatgagtgtagatgaagagttaaaagatttatatttttcaataaataatgattgctcagttaaaatttttacagcaaaagatcctgaaggattagaagttataagacatgacactgcacatattatggctatggctgttcaagagttataccctggtactcaagttacaattggaccagtaatagaaaatggttttttttatgattttgctagaaaagaaccttttacagaagatgatcttaagaaaatagaaaaaagaatgtcagagataattgataaagatgtaaaaacaagaagagaagtttgggaaagagataaagcaattaaacattttaaaaaaattggtgaaaaatataaagctgaaataattgaaagtattccaaaaaatgaggaactttctatttatcatcatggcgatacttggcatgatttgtgtagaggtccgcatctaacctcttccagtaaaattggtaaagccttcaaattaacaaaagtttcgggagcttactggcgtggtgactctaataatgagatgcttcaaagaatttatggtactagctgggcatcccaaaaagatttaaatgaatatttaaaaaggatagaagaagcagaaaaaagagatcatagaaaacttggtaaggaaatggatttatttcattttagggaagaaagccccggctctgtcttttggcatgaaaagggctggtctttatttcagaaattaataaattatatgcgagctagacaggatgctgctggatataaggaagtaaacacccccgaggtattagatagattgttgtgggaaaaatctggtcattgggaaaaatacggagagaacatgtatacttcagaaactccagatgaaaaagtttttgcaattaagccaatgaattgtccaggccatatccaagtttttaatcaaggtttaaaaagctacagagatttacctttacggataacagagtttggaaaagttcatcgatatgagccatcaggagcacttcatgggcttttaagagtaagagcctttactcaagatgatgctcatattttttgcaccgaggatcaaatcactagtgaatgtttaattgttacaaatttaatcttagatatttataaagatttaggttttgaaaatgtagttcttaaatatgcagatcgaccagaggttagagttggtgatgataaagtttgggataaagctgaagcttcattattaaaagcagttaaagcatcaaagttagaatatagcataaataaaggtgaaggtgctttttacggtccaaaaattgagtttgttttaagagatgcaattggtagagattggcaatgtggaactttacaagtcgatttcaatttacctggaagattggacgcttcatacgttgataaagatggaacaaaaaaagttcctgtgatgttacatcgagctttatttgggtctcttgaaagatttattggaattttaattgaaaattatgctggaaaatttccattttggatttcaccattacaaacagttgtaataccaatctcagaagactttgaagattatgcagttaaagtatctgaaaaaattaaatcagctggtatgagctcgttagtagatttaaaaaatcataatttaaattataaaattagagaacattctcttgcaaaagtccctgttttattaatttgtggtaaaaaagaagttgacagtaactctgtaaccattagaagattggactctaataaacaagagaatatggaactaaatatatttctaaaaaaatactctgctttaaataaagcatcttcaaattaag

SEQ ID NO: 303645 - DNA, 529 bp, Unknown
  Bacterial polypeptide expressing nucleotide sequence isolated from the Sargasso Sea
aatgccaaatataactttacctgacggaaaaaaacttaatttcaaaaataagacaaatggacttgagattgcagagaagattagtaaatcccttataaagcaagcactaataatgagtgtaaacggcgaacttaaagacttgagctatacaattcaaaatgactcatcagtcaaaattattacccaaaaagataaagaaggtttagatgtaataagacatgatgcagcacacataatggctatggcagttcaagaattattccctggcacacaagtgactataggtcctgttattgaaaatggtttttactacgactttgcaagaaaagaaccattcacaagcgctgatttagaaaaaattgagaaaaaaatgtctgagataatagataaagacgttaaaacaaaacgagaggtatggaaaagggacaaagcaattgcccattttaaaaagatgggagaaaaatataaggcagaaattatagagagtatcccagaaaaagaggagctatcggtttatcatcatggtgat

SEQ ID NO: 303646 - DNA, 1294 bp, Unknown
  Bacterial polypeptide expressing nucleotide sequence isolated from the Sargasso Sea
aatgaaaaatagatttttatctaatatttcagaatttgatggtaaagaagaaacatttgatggctgggtttataatactcgatctataggtaaaatttggtttttaattttacgcgatggtactggaatgactcaatgcgtagtatcatcagatgaaactacggaaactgtatttaaactagaaaacacattaactcaagaatcatctattaccgtaacaggtattgtaaaaaaagaaccacgttcaataggcggctatgaaattttggttaaaaatattgtagttcaccaattagcacttgattatccaatttcattaaaagaacacggcacttcttttctaatggataatagacatttatggatccgttctaagagacagcatgctattttaaaaattcgtcaccaagtaattaaatcatctagagattttttagacaataatggattcactcttgtagatactccaatctttactgcaaatgcttgcgaaggaacatctaacttattcaatgttgattactttgatagatctgcttatttaactcaaagtggtcaattatattcagaagcaagtgcggcaagttttggtaaggtctattgttttggtccaacttttcgtgcagaaaaatcaaagacaagaagacacttaacagagttctggatggttgaacctgaaatggctttttttgatttagatgagaatatgaatttggctgaattatttgttgagagtattgtacaatcttgtcttcaaaattgtaaaaatgaattagatactcttggaagagatacaacgtctttagaacaagtaaaagtgccttttccacgtattacttacgatgaggctgtaaaaatactaagtgataatggttctgatttttcttatggcggtgattttggtggaacagatgaaacaattatatctgaacaatatgatagacctgtaatggtgcatcgatggccagcagatgttaaggcattttacatgaagcgagataatgaaaatgaaaaattagccctaggtgttgatatgttagctcctgaagggtatggtgagattattggtggtggtcaaagggaagataatttgaaaatacttgagaaaagaattgaggaacacggattagataaaaaagattttaaatggtatttggatttaaggaagtatggatcggtaccacattctggatttggtttaggtattgaaagaacagttgcatggataactggtataaaacatatacgtgagacaatcccattcccaagaacaatttctcgattagaaccatga

SEQ ID NO: 303647 - DNA, 1558 bp, Unknown
  Bacterial polypeptide expressing nucleotide sequence isolated from the Sargasso Sea
tttcctggaacacaagttacaattggtccagtgattgaaaatggattttattatgactttgctagaaaagaaccatttacacaagatgatcttgtgaaaattgaaaataaaatgaaggagattgtcgataggaatgaaataacaaaaaaagaagtttgggatagaaacaaagcaattagccattttaaaaataaaggagaaatttataaagctgagctaattgaagcaatacctgataatgaagatgtatcaatttattttcacggaaaatggcatgatttatgtagaggaccacatttatcctctacaggtaaaataggaaaatattttaaacttacaaaagtgtcaggagcatattggagaggagattcaaataatgaaatgttgcaaagaatatatggtacgagttgggcaactcaaaaagatctagatgaatatttaaaaagaatagaagaagcggaaaaaagagatcatagaaaattaggtagagaaatggatttatttcactttagagaagaaagccctggctcagtattttggcatgaaagaggatggggtttatttcagaaactcattaattatatgagaagcagacaagatgctgctggttataaagaggtaaatactccagaggtattagatagacaactatgggaaaaatctgggcattgggaaaaatatggagaaaacatgtacacttctgaaacaccagatgagaaagtttttgcgattaaaccgatgaattgccctggtcatatacaggtatttaatcaaggcctaaaaagttacagagatcttcctttacgttttgctgaatttggaaaagttcatcgttatgagccatcaggcgctttacatgggttattaagagtaagagcctttactcaagatgatgcccatattttttgtactgaagatcaaattactagtgaatgtttaattgttacaaatttaatactagatatttataaggaccttggttttgaaaatgtaattctaaaatatgcagacaggccggaagtaagagttggtgatgatttagtatgggataaagcagaagcctctttgcttgaagctgttaaagcttctaaattagaatatagtattaataaaggagagggagcattttatggtcctaaaattgaatttgttttaagagatgccattggcagagattggcaatgtggaactttgcaagtagatttaaatttacctgaaagattagatgcatcttatgttgacaaagatggaactaaaaaagtacctgttatgttgcatagagcattatttggttctcttgagagatttattggaattttaattgaaaattatgcaggtaagtttccattttggatatctcctttacagacgatggtaatacctatatcagaagaatttaatgactatgcagtccaagtatcaaataaaattaaaaattcaggtattagttctgcagtagatttaaaaaatcataatttaaattataaaattagagatcattctttagcaaaaataccgcttttattaatttgtggtaaaaagaagttgactccaattc

SEQ ID NO: 303648 - DNA, 809 bp, Unknown
  Bacterial polypeptide expressing nucleotide sequence isolated from the Sargasso Sea
aatgttaaatataactctaccagatggaaacaagcttaactttaaaaaaaaagttacaggtttagaggttgctgaaaaaataagtaaatcactatctaaaagtgctctaataataagcatcgatggaaaattaaaagatcttaatacagtaattgaaaaagattgttccataaaaatatttacatcaaaagataaagaaggactcgaaacaattaggcacgatactgctcatgttttggcaatggccgtccaagaattattttctggtacccaagttaccattggcccagtcatagaagatggattttattatgattttgcaagaaaagaaccttttacagacgatgatttaaaaaaaatagaaaataaaatgagagaaattgttgaaagagatgaaaaaacaacaagagaggtttggccaagaaaaaaagctatagagcactttaaaaaaattggtgaaatatataaagcagaaataattaaaagtattccagaaggagaagacgtttcaatatattttcacggaaaatggcatgacctttgtagaggacctcatttatcttcaacaggtaaaattggtaaattttttaaattaactaaagtatcaggagcatactggagaggagactcaaataacgaaatgctccagcgagtatatggaacgagttggtctaccaaaaaagatttagataactatttgatgaaaattgaggaggccgaaaaacgtgatcatagaaaattaggaaaaataatggatctttttccttttaaggaagaaagtccaggcgcagttttttggcatgaaaagg

SEQ ID NO: 303649 - DNA, 364 bp, Unknown
  Bacterial polypeptide expressing nucleotide sequence isolated from the Sargasso Sea
aatgcctaatataattcttcctgatggaaaaaaacttgattttacagatagtattacaggtttaaaaattgcagaaacaatcagtaaatctttattgaagcaagctcttgttatgagtgtagatggtgaattaaaagacctagaacatgaaattacgaaagattctaaagtaaaaatttttacatctaaagataaagaaggtttagaaacaataagacatgatactgctcatgttttagcaatggcagttcaagaactttttccaggaacccaagtaacaattggaccagttatagaagatggtttttattatgactttgcaagaaaagaaccttttacaaatgaagatctagaaaaaattgaa

SEQ ID NO: 303650 - DNA, 1933 bp, Unknown
  Bacterial polypeptide expressing nucleotide sequence isolated from the Sargasso Sea
ttgcccacaatttcttttcctgatggctcaaaaaaaatatttaagagcagtgtttctccattaagcattgctgaagaaatatcaaattctctaaagaaaaacgctgttatagctaaagtcaatggagagttttgggatttaaatagagaaatcttagaagattcagatgtttctattctgagaaaaggggataaggaaacactagaaattttaagacatgactgcgcccatatcttagcagaagcggttttagaaatttatccagagactcaagtaacaattggacctgttattgagaatggtttttactatgacttttacagagaagaaccattttctaaggaagatttaattattattgaaaaaagaatgcacgaaatcgtagatagaaatgagagaatagatcgtgaagtctggtctcgaagtgatgcaattaaattttacgaagataaaaatgagccatttaaagttgaattagtcaataacatacctagaaatgaagaattaacattttacactcaaggagatttcattgatttgtgtagggggccccatcttaggtcaactctcgatacaggtcatgcatttaaacttatgagtgtcgctggtgcttattggagaggtgattctaaaaaccccatgcttcaaaggatttatggaactgcttggactactgataaagagttaaatcagtaccttttgatgatagaagaggcagaaaaaagagatcataggaaaataggaaaagcgcaaaaattatttcatattcaagaagaggcaacaggttctattttttggcatccttctggatggtcaatatatcaagagattgaagcttatgtcagaagaaggttaaaaaaagcaagttatcaagaggttaaaacaccacaattaattgatagaaaattatgggagaattctggccattgggataaatttcgtgaacatatgtttacaaccgaagccgatgaaaaacaaacacttgcattaaagccgatgaattgtcctggtcatgtacaaatatttaaacaaagcctcaaatcattcagagatctgccgctaagacttgcagagtttggtgcttgccacagaaacgaaccaagtggtgctttgcatggaataatgagagtaagagcatttacacaagatgacgcacatattttttgtactgaagatcaaattaatcaagagtcaatttcattttgtgagttgctaatgagtatttacaatgactttggctttgaaaatattactattaaattttcagatagacccgagattagagcgggaagtaatgaaacatgggatcaagcagaaaaagctttaatggatgcaagtaaagcagctggattagaagttatcatgaacccaggtgaaggtgcattttatggtccaaagctggagtttgtattaagagatgcaatcggaagagattggcagtgtggtactttgcaggttgattttgtattacctgaaagactcaaagcagattatattgcaacggatggttccaaaaaaagaccagtgatgttacatagagctattcttggctcaatggaaagatggtttggtattcttattgagcaatacgctggaaaatggccgctatggttggcaccttgtcaaatagtaatatgtacaataactcaagatgctgataattatgcacatgaagtaaaaacacaaacagaagaaagaggcctaagggttttattagataatagaaatgaaaaaattggttataaaattcgagaacattcagaaaataaaataccaatattatttattgtaggtaataaagaaattgagagtaaacaggtttctgtaagaagattagggtctaaggaacaaatcaatttagatcttattgaggctttagataaatacaaattacaagctttaccgccagatcttgcaagagatgttaaataat

SEQ ID NO: 303651 - DNA, 781 bp, Unknown
  Bacterial polypeptide expressing nucleotide sequence isolated from the Sargasso Sea
attcacacaagatgatgcacatatattttgcacagaagatcaaattacacaagagagtaaaacggtatgtgatttgatacttagtatctataaggactttggttttgataatgttagaattaaattttctgaccgtcctgaaaaacgcgtaggggatgatgctatttgggataaagctgaggctgcattaatgcaagccatggaagcaacaggtcttgagtatacactcaacccaggagaaggtgcattttacggtccaaaattagagtttgttttacgtgatgcaattggcagagactggcaatgcggtacactgcaagtagatttaaatttacctggaagattgggagccacttatattggagaagatggtaataaaaaaataccagtcatgttgcatagagctctatttggttccttagagagattcactggcattctaattgaacattatgcaggccatcttccgttttggctttcaccattgcaagctgtagttgctacaattacatctgatacagatgagtatgcttatgaggtacaaaaagcattagtatcaaaaggaattagggccgaaatagatacacgtaatgaaaaaattggttataaaatacgtgaacacagtaatagtaaagtgccagcaattattgctgttggaaaaaaagaagctcaagataaaacagtatctgttagaagaattggatcctctgaaacaaagacctttaaattagaagatattgttactagcttatctaaagaagcaaaatcaccaatagaataa

SEQ ID NO: 303652 - DNA, 1918 bp, Unknown
  Bacterial polypeptide expressing nucleotide sequence isolated from the Sargasso Sea
aatgccgataataacattacccgacggaaacaatattgattttcctaataaagttactggactggaagtagctgaaaaaattagtaaatcattagctaaacaagctatggtaataagtgttgatggtgagcttaaagatcttgattttttaattgagaatgattgttctgtaaaaatttttacttcaaaaaatcctgagggcttggaaactataaggcatgacacagctcatattttagctatggctgttcaagaattgtttcctggcacacaagttacaattggacccgtgatagaaaatggattttattatgactttgctagaaaagaaccatttacagaggatgatctagtaaaaattgaaaataaaatgaaagagattgttgataggaatgaaataacaaaaagagaagtttgggatagaaacaaagcaattagccattttaaaaaaaaaggagaaatttataaagccgagctcattgaagcgataccggaaaacgaagatgtatcaatttattttcatggagaatggcatgatttatgtagaggtccacatctttcctccacaggtaaaataggaaaatattttaaacttacaaaagtgtcaggagcatattggagaggagattctaataatgaaatgttacaacgaatatatggtacgagttgggcaacccaaaacgatctagatcaatatttgaaaagaatagaggaggcggaaaaaagagatcatagaaaattaggcaaagaaatggatttatttcattttagagaagaaagccctggatcagtattttggcatgaaagaggatggggtttatttcaaaagcttattaattacatgagaagcagacaagatgctgctggttataaagaggtaaatactcctgaggtactagatagacaactatgggaaaaatctgggcattgggaaaaatatggaggaaatatgtatacttctgaaactccagatgagaaagtttttgcaataaaaccgatgaactgcccaggtcatatccaggtatttaatcaaggcttaaaaagttacagagatcttcctttacgttttgctgagtttggaaaagttcatcgttatgaaccatcaggcgctttacatgggttattaagagtaagagcctttacccaagacgatgcccatattttttgtactgaagaccaaattacaagtgaatgtttaattgttacaaatttaatactagatatttataaagaccttggttttgaaaatgtaattctaaaatatgcagacagaccagaagtaagagttggtgatgatgcagtatgggataaagcagaagcctctttacttgaagctgttaaagcttctaaattagaatatacaattaataaaggtgagggagcattttatggtcctaaaattgaatttgttttacgcgatgctattggcagagattggcaatgtggaactttacaagttgatttaaatttacctggaagattagatgcttcctatgttgacaaagatggaactaaaaaagttcccgttatgttacatagagcactatttggttctttagagagatttattggaattttaattgaaaattatgcaggcaagtttccattttggatatctcccttgcagactatggtaatacctatttcagaagaatttaataattatgcagtcgagatatcaaataaaattaaaaattcaggtataagttctgcagtagatttaaaaaaccataatttaaattataaaattagagatcattctttagcaaaaataccgcttttattaatttgtggtaaaaaagaagttgactccaattcagtaacgattagaagattagactctaataaacaagaaaatatgggtattgatcaattcttaaaaacattttctgctttaaacaaagcatcatctaactaa

SEQ ID NO: 303653 - DNA, 1243 bp, Unknown
  Bacterial polypeptide expressing nucleotide sequence isolated from the Sargasso Sea
agatcaatacttaattcaacaagaagaagcggaaaaaagagatcataggaagttaggtaacgaattagatttatttacttcaagtgaagaattagggtctggtaattttctatggaaaccgaaaggtgctgttttaagagatgttatagaaacttacagtaaaaaagcacatctacaaaatggttattctttggtaaatactcctcacatagggaaatcaattttatgggaaacatcaggtcatttagatcattacagcgaaaatatgtatcctccaataaatcatgatgaaaataacgaaacttattatttaaaaccaatgaattgtccttttcatatccttgtatataaaagcgacctacattcatataaagaattacctttaagatattttgaatttggctctgtgtatagatatgagaaaactggcgttttgcacggattgcttagacttagaggatttactcaagacgatgctcacatattttgtacaactgatcaaataaatgatgaagtaaaaacacttttatcattttctgtaaatttgttaggaagttatggcttaactgaaattgaagcggatctttctacaaaacctacaaaatacattggaagtgataaagattgggataacgctactaatagtcttaaacaatcgttaacagaattagaggttccatttcaaactgctgaaggagagggtgcattttatggtccaaaaattgacttacatgcaaaagatgccatcggaagaagatggcaattaagcacaattcaaatcgactttgctcaacctgataattttgatatcgagtatgttaattctgataataagaaatccagacctgtaatgattcacagagcactattaggatcagtagaacgatttacagctgtgttattggaacactatgcgggtaatttaccaggatggctttcaccaattcagattgatgttttaactataggcaatgttaatgaatatgctcaaaccattattgaagatttaaaatcatacagagttaatttagatgacagaaatattcgacttggtgaaaaactacataactctgaaaaatcaaaaaccccaatacaaataataattggtgagaaagacgcatcaagcaatactatggctgtaaatatttttgaaaaagaaaacatgaaagatgttgattataaaaaggcgattaacaccattaagaaatccttaaaagaaccggaatttagtttagatggttga

SEQ ID NO: 303654 - DNA, 948 bp, Unknown
  Bacterial polypeptide expressing nucleotide sequence isolated from the Sargasso Sea
atgaaaaagtatttgcaataaaacctatgaattgtccaggttgcgttcaagtttttaatcaaggtttaaaaagttatagagatttaccacttaaaatgtcagaatttggaaaggttcataggtatgagccatctggagctcttcatggactgttaagagttagagcttttactcaagacgatgcacatattttttgtactgaggaacaaattaccaaagagtgtttgactgtaactaatttaattttagaaatttataaagatttgggttttgaagatgtaattttaaaatattctgaccgaccagagttaagagttggtgacgatcaagtttgggataaatcagaggctgctttattagaagcaattaaagcaacaaaactagaatattcaattaataaaggagaaggtgctttctacggtcccaaaatagaatttgttttaagagatgctattggaagagactggcaatgtggaactttacaagtggatttaaatttaccaggtagactaggcgcttcatttgttgatagcgatggaaacaaaaaagttcctgttatgttacatagggcattatttggatctttagaaagatttataggaattttaattgaaaattattcaggaaaattacctttttggctttgcccagttcaaacaatagtaatccctatctcgagtgattttgatgattatgcaaaagaagtaaatagtcagttaaaaaaagtaggactttcttctgaagtagatttaaaaaatcacaatttaaattataaaattagagaacattcattaactaaggtaccaatgctactaatatgtggaaaaaaagaagttgacagcaatacagtaactattagaagattggattctaaaaaacaagaaactatggatttaaaagaattcttacaaaaatactctgctcttaataaagcaccttcaatttagt

SEQ ID NO: 303655 - DNA, 1927 bp, Unknown
  Bacterial polypeptide expressing nucleotide sequence isolated from the Sargasso Sea
atgcctgaaattactcttcctgataaatccaaaagaaaattcgaaaatcctctatctatagaagatattgcatcagatattggtcccggtttagcgaaggccactgtggcaggaaaaatagatggtgtcctcgtagatgcttctgaaattgtaacgaaagatgcagaaattgagatcatcacggcaaaagatgatgaaggtattgaggtggtaaggcattcttgtgctcacttattggcccatgctctcaagcaattatttccagatgttcaattagccattggtcctgtaataggaaatgggttttattatgatattaaactagacaaagctttaaacgacgatgatctccggagtttagaagatagaatgctaaagttagctaaaacagattacgaggttgtaagagaggttgtctctagaaaaaaagcggttaaaacttttaaagatagaaacgaaccttataaagttgctcttgctgaagagattccagataaagaaataatagctttgtatcaccatgaagaatatacagatatgtgtagaggtcctcatgtaactaacacaaaacatctaagagcttttaagttaaccaaggtatcgggtgcgtattggcgaggagattcacagaatgagatgcttcaaagaatatatggaactgcctggcctacagccaaagaacttgaaagtcatttagtccaaatagaggaatctgagaaaagagatcatagaaagctaggaaggcaactggacctgtttcatttccaagaggaagctcccggtatggttttttggcacccaaaaggttggtctattttcagagcactacaagaatttataagaattaagcaagtagaagctggttacgaagaaataaatacaccccaagtagtggatagaaagctttgggaagattccggtcattgggataagtatagagagaatatgtttataactgagattgatgaagagcatgcaaatgataaaaggataaatgccttaaagcccatgaattgtccttgccatgttcaaatatacaatcaaggactaaagtcctatagagatttacccgtgcgttatgcagaattcggctcgtgtcatagatatgaggcctcagggactttgcatggattaatgcgcgttagggcaatgacacaagatgatggtcatattttttgtactgaagatcaaatagaatcagagaccaagagttttatagatgttctatcttcaatttatacagaattaggttttacaaaatttgatataaaactttccactagaccagaaactagagttggttcggatgcagtatgggataaagccgagtcatctttagagaaagcaataaagaatcaagggttgtcctatgagatttctcatggagatggagccttttatggccctaaactagattttgttctcaccgatgctttgggtagagattggcaatgtggcactttacaggctgattttaatcttccagaaagattggatactaactacataggcgaagatggaaataagcatagaccagtaatgttacatagagccatattaggttcatttgaaagatttattggtattctgattgagcatcatggaggtgctttgccagtttggctttcgcctatacaagcacaaattctaaatattaccgataaacacagcaaatatagtgaaaaaacacgcaatttattgcaaaaaagtggatttagagcccaaagtgacttgaggaaagagaagatcacttataaaattcgcgaccactctatgcagaagacaccttttcttctagttgtaggagataaggaaatggaaaatgaaaccgtttcggtaagagtaaggggtggcgaggaccttggtgaaatgtctataattaattttatggatattcttcaaaaaaagattgaagccaaggaatagt

SEQ ID NO: 303656 - DNA, 772 bp, Unknown
  Bacterial polypeptide expressing nucleotide sequence isolated from the Sargasso Sea
atgcctaatataactctccccgatggaaaaaaactagattttgcagaaagtattacaggtttaaagattgcagaaaaaattagtaagtctctaataaaacaagctcttgttatgagtgttgatggcgaattaaaagatttagagcatgaaatcacaaaagactctgtggttaaaatttttacatctaaagataaggaaggtcttgaaacaataagacatgatactgctcatattttagctatggcggttcaagaactttttccaggaactcaagtaacaattggtccggttatagaagatggtttttattatgattttgcaagaaaagaaacttttacaaatgaagatttagaaaagattgaaaaaaaaatgagagagataattgatagagatgaaaaaacttatagagaagtttggaaaagaaaagatgctgtggaacactttaaaaaaaaaggtgaaatatataaagctgaaataataaatagtattccagaaaatgaagaagtttcaatttatttccatggcaaatggcatgacctttgcagaggtcctcatttaatttcaactggaaaaataggaaaatatttcaaattaacaaaagtttcaggggcatattggagaggtgactccaataatgaaatgttacaaagagtttatgggacaagttggtcttctcaaaaagaattagatgaatatttaaaaagaattgaagaggcagaaaaaagagatcataggaaactaggtaaagaaatggatttatttcatttttagg

SEQ ID NO: 303657 - DNA, 1727 bp, Unknown
  Bacterial polypeptide expressing nucleotide sequence isolated from the Sargasso Sea
gagacatacattaacagcccaagttcttgcaaaagctataaagaatttatattcagattctaagttagctataggacctacaattgaaaacggcttctactatgatgtttctactgaaacgcctatatcggttgaggatcttccaaaaatagaaaatgaaatgaaaaggatattagaaaataagtctaatattgttaaatcacttcactcagaaaaagatgcaaaaaaaatgtttaaagagaaaggagagactctcaagatagaaattatagatgatgcagaacaaactgataattttcaaatttatacaaacgctgatgaagattttattgatttatgtagaggacctcatttaccaaatctatcttttattggagcatttaaacttactaaagtctctggagcatactggaagggagattcttcaaatgaaatgcttacaagaatctatggtacagcatggagaaatgaaaaagagcttcaagaacatctaaaatctattgaggaagctgaaaaaagagatcatagaaagattggaaaagatatggatcttttccatttccaagatgaagctccaggtatggttttttggcatccaaagggttggactatttattcaactttaaaatcttatatgtcagatatgcaaaagaaagctgattataaagaaattaatactccatcagttatagataggaagctttgggaaaaatcaggacattgggataaatatagagaaaatatgtttatcactgagattgatgaagagcatgcaaatgagaaaagagttaatgctttgaagcctatgaattgtcctggacatgttcaggtttataaccaaggtgtaagatcatataaagaacttccatttaggttatgtgaatttggaacatgtcatcgatatgaagcatcagggaccatgcatggcctaatgagagtaaggggtttcacacaagatgatggacatattttccttactgaagatcaaattgagtcagaaactgcgacctttatagatttattgtctaaggtctatgctgaccttgggttcaatgaatttgaaattaaactatcaacgcgcccagaacaaagagtcggatctgacgagatttgggacaaagctgaattgtctttaaaaaatgcaatcgaaaaacttggattggaatacaggatagatgaaggagatggagcattttatggtccaaaattagattttgtattaacagatgctattggaagaaagtggcaatgcggaactcttcagctagattttaatcttgctgatcgtctagatgctcagtatgtcgcagaagatggaaataaatataacccagtcatgttccatagagcgattcttggttcttttgaaagattcataggtattttaattgagaactacagtgggaatcttcctttatggcttgcacccactcaagtgacgatttgttcaattacagatgaagctgatgattatgtaaaagaaatatcagaattattgagaaataagaatatacgttgtaattcagatttaagaaatgaaaaaatcagctataaagtaagagagcatagtgtttcaaaagttccaataattattgctgtcggaaaaaaagaggttgcagacagaactgtatctgtaagaaggcttggcagtgatgatacgtctgcattatcccttgatgattttacttcttcagtatttcaagaatcacttgctccaaataaataaa

SEQ ID NO: 303658 - DNA, 880 bp, Unknown
  Bacterial polypeptide expressing nucleotide sequence isolated from the Sargasso Sea
taaaagctacaaagatttgccattaaaaatgtctgagtttggaaaggtacatcgttatgaaccttcaggcgcgcttcatggtctattaagagtaagagcatttacacaagacgatgctcatatattttgcactgaagatcaaataacaaaagaatgtttaatagttactaatcttatcttagaaatttataaagatcttggttttgaagatgttattctgaaatattctgatagaccagagctaagagttggagatgatagtgtatgggataaagcagaggcagctttactagatgcagttaaagctactaaactagaatatactattaacaaaggtgagggtgcattttatggacctaaaattgagtttgttttaagggatgctattggaagagattggcaatgtggaactttacaggttgattttaatttacctggaaggttaggtgcttcatatgtagataaagatgggacaaaaaaagttccagtaatgttacatagagcattgtttggatcacttgaaagatttattggaattttgattgagaattatgctggaaagtttccattttggatatccccattacaaactgtagtaattccaatctcagaagattttgaggaatatgcaagtaaagtttcaaaaaagataaaagaagctggtataagttcaatagttgatttaaaaaatcataatttgaactataaaattagagaacattccctttcaaaagtccctattttattaatttgtggtaaaaaagaagttgacagtaactctgtaactattagaagattgaattctaataaacaagaaaatatggaattaaataaatttttaaaaacattttctgctttaaataaagtatcctcaatttaa

SEQ ID NO: 303659 - DNA, 597 bp, Unknown
  Bacterial polypeptide expressing nucleotide sequence isolated from the Sargasso Sea
cattattagaagcgattaaagcttctaaacttgaatatagtgttaataaaggagaaggagcattttatggacccaaaatagaatttgtattaagagatgctattgggagagattggcaatgtggaacacttcaggtagatttaaatttacctggaagacttggtgcatcatttgttgataaagatggatcaaagaaagtaccagtgatgttacatagagctttgtttgggtcccttgagaggtttatagggatattaattgaaaattattcaggaaaactgcctttttggatatcaccacttcaaacagtggttattccagtgtcagcagaatttgatgattacgcaaaagaagtaaataaaaaaataaaaaaagaaggaattacatctgaagttgatcttaaaaatcataacttaaattacaaaatacgagagcattcggtatcaaaaatacctattttgttaatatgtggaaaaaaagaagttgacagcaatacagtaactattagaagattggattctaataaacaagaaagtatagaattgaatttatttttaaaaaaattttctgctttaagtaaagcaccctcaaattaag

SEQ ID NO: 303660 - DNA, 1180 bp, Unknown
  Bacterial polypeptide expressing nucleotide sequence isolated from the Sargasso Sea
gatttattccatctgcaagaagaagctcctggcatggttttttggcatcctaaaggatggagcatttatactgcggttgaaaaatatatgagagaaaagcaagtcaatgcaaattactctgagataaaaactccacaagtcatagacagaaaattatgggagaaatctggccactgggaaaaatatagagaaaatatgtttatcacggaaattgatgaagagcatgcaaatgaaaaaagaactaacgctctaaagcccatgaattgtcctggccatgttcaaatttataatcaatccataaagtcttatagagatcttccgattagatttgcagagtttggaagttgccatagatacgaaccctcaggaactatgcatggacttatgagggttagaggcttcacacaagacgatggacatatattttgtactgaggatcaaattcaggaagagactgcctcatttatttcccttctatatgatgtttatgaagattttggttttaaaaaaattgatatcaagctctcaacaagaccaaaagtaagagttggttctgataagatttgggataaggctgaaaaggctctcaagaatgctatagaggcactgaacattgattatgagattgcagaaggggacggagctttctatggtccaaaaatagattttgttcttaccgatgcactaaaaagggaatggcaatgcggaacttttcaggctgattttaatttgccagaaaggttagatgcttcttatgtaggagaagatggcaaaaaacataggccagttatgatgcacagagcaattcttggatcgtttgagagatttataggaattttaattgaacaattcgatggatcctttcctttgtggttatctcctatccatgcagtcgtcatgaatgtgtcggaaaaacataccgatagagttgctgaaatcactgagaaattgaaaaaaaatgaaataaaagtcatttcggacttgaggaatgagaaaatcacttataaaatccgcgaccactctatacaaaagataccttatcaaattgtgataggcgataaggaggttgaagagggttctgttagcgtaagagaaagagaatctcaaaagcaatcttcaatgtctgtgagtgacttctcaaaaatggttttgagaaaaataagatctaaggaggtctgat

SEQ ID NO: 303661 - DNA, 1477 bp, Unknown
  Bacterial polypeptide expressing nucleotide sequence isolated from the Sargasso Sea
atgccagatataaaattgcctgatggaaaagtaataaaatttaaagatcaagtaaatggtttccaattggctgaaaaaattagtaaatctcttgccaaagaagcttgcatcatgagtgttaatggagaaatgaaagacttgagctatgaaataaaaaaaaattctactgcaaaaatttttacgactcgtgataaagaaggtttagaggtattaagacatgatgcagcacatgttttagcaatgtctgtacaagagttatttcctgggacccaggttacaattggtcctgtaatagaaaatggtttttattacgatttttctagaaaagatccatttacagaagatgatttaaaaaaaattgaaaaaaaaatgaaagaaatcgtcgaccgagatgaaaagactgttagaaaagtatggaagagagatgaagctataaaacattttaaaaaaaaaggagaacattacaaagctgaaattatttccagtattcccaaaaatgaagaggtaacaatttattttcatggcgaatggcatgatctttgtagaggtccacatttaccttcaacagggaaaattggtaaagcttttaaattaacaaaagtttcaggagcttattggaggggcgattcaaaaaatgagatgcttcaaagaatttacggtacctgttggaataatcaaaaagaattagataaatatttggaaagattagaagaggcagaaaaaagggatcacagaaaaattggaaaggaaatggatcttttccattttagagaagaaagtccgggagcagtattttggcataataaaggatggaatttatttttaaaattgattgaatatatgagaagcaagcaaagaaatgctggttatcaagaaattaatacacctgaacttttagatcgatctatttgggaaacatcgggacattgggagaagtttggagatcttatgtatacttctaccacaccggataaaaaaatttttgcaataaaaccaatgaattgtcctggatgtgttcaaatatttaaccagggattaaaaagctatcgagatctacctttaaaaatgtctgaattcggcaaagttcacagatatgaaccttcaggagctttacatggcttgctaagagtaagagcatttacacaagatgatgcacatatattttgtaccgaagagcagattacacaagaatgtttaagtgtaacaaatttaattttggaaatttataaagatctaggttttgaaaatgtaattttaaaatattcagaccgaccagaaaaaagagtcggggatgataaaatttgggacaaatctgaaaaagcattactaaaggcaataaaggaatcaaaattggaatatagtattaacaaaggcgaaggtgcattttatggacccaaaatagaatttgttttgagagatgctattggtagagattggcaatgtggaactctacaagatatgttaatttacctggtcg

SEQ ID NO: 303662 - DNA, 529 bp, Unknown
  Bacterial polypeptide expressing nucleotide sequence isolated from the Sargasso Sea
gatggcgggccccgaccgcaaaccggtgagcagcgctgcagcaaccaccccagccccttcagctccggtggtcctgcccaaaaccagcgaaagctcgcagctgctcaaaatccgccactcgatgagccatgtgatggccatggcggtgcaacagctcttccccaaggcccgcgtcaccatcgggccctggacggaatccgggttctactacgacttcgacaaccccgatcccttcaccgaagccgatctcaaggcgatcaagaaggggatgatcaagatcattaataaaaaggtcccgctcgagcgtgtcgaggtgacgcgcgctgaggcggaaaccaagatcaaggcccagaacgagccttacaagctggagatcctggaaggcctccaggatccgatcaccctctacacccttggagaggactggtgggatctctgcgctggcccccacgtggagcacaccggccagctcaacgccaaagcttttgagctggagagcgtggcaggggcgtactggcgcggtgatgaa

SEQ ID NO: 303663 - DNA, 1249 bp, Unknown
  Bacterial polypeptide expressing nucleotide sequence isolated from the Sargasso Sea
atgcccacaattacactaccagatggaaaaaatcttgagtttccaaaagaagttacaggattagatgtagcagaaaaaattggtaaatcattattgaaaaaagctttaataatgagtgtcgatggtgaattaaaggatttgtatttttcaattaaaaaagattgttcagtaaaaatttttacagcaaaagatccagaaggcttagaggtaatcaggcatgacacagcacatattatggctatggctgttcaagaattatatcctggtacacaagtgaccattggacctgtaattgaaaatggatttttttacgatttcgctcggaaagaacctttcacagaagatgatcttaaaaaaattgaaaaaaggatgtcagaaataattgataaagatataaaaacaagaagagaggtttgggagagagataaagcaataagccactttaaaaaaatcggtgaaaaatacaaagctgaaatcattgaaagtataccagagaatgaagagctctcggtttatcatcacggtgatacttggtacgatttatgtagaggtccacaccttttatcatctggaaaaattggaaaagcctttaagcttacaaaagttgctggagcttattggcgtggggattctaaaaatgaaatgttgcagaggatctatggaactggctgggcatcacaaaaagatttgaatgattatttaaaaagaattcaagaagctgaaaaaagagatcataggaaacttggtaaagaaatggacttatttcattttagggaagagagtccaggatccgttttctggcatgaaaagggatgggcattatttcaaaaattaattaaatatatgaaaatgaaacaagatgaagctggatataaagaaataaatactccagaggttttagacagaagtttatgggaaaaatcaggtcattgggaaaaatttggagcaaatatgtacacatcgactattcctgatgaaaaggtatttgctattaaacctatgaactgcccaggttgtgtggaagtctttaatcaaggtcttaaaagttataaagatttaccgttaaaaatgtctgagttcggaaaggttcatcgttatgaaccctcaggtgcgcttcatggtctattaagagtaagagcatttacacaagatgatgcacatatattttgtactgaagatcaaataacaaaagaatgtttaacagtgactaaacttatcttagaaatttataaagatcttggttttgaaa

SEQ ID NO: 303664 - DNA, 1802 bp, Unknown
  Bacterial polypeptide expressing nucleotide sequence isolated from the Sargasso Sea
aattgatgagaaaatttgtgatctatctcttccactcaataatgactgtaaagtagttattattaaaagagaaaatgctgaagctcttgatatcataagacatgactgtgcacatgtcatggcagaggctgtgcaatcattgtatccaggtacacaagttacaattggtccttccattgaaaatggtttttattatgactttgcgcgaaaggaacctttgacaattgcagacttaacaaaaatagaaaaaaaaatgcatgatattattaataagggtgaaaaatttacaagggaagtctggacaagagatggggctattaaattttttaataacaaaggtgaaaaatataaagttgagttaattaaagaattagatgccgatgaagaaataactatttacagacaaggtgaatggttagatctttgtagaggtcctcatatgttgagcacaaaacaaattggtaaagggtttaagttaatgaaagttgcaggagcatactggagaggtgactcaagtaacgctatgctcacacgtatttatggaactgcgtggagaaatgaaaaagaattagaaagtcatttattacaaattgaagaagctgagaaaagagatcaccgtaaacttggtaaagaaatggatttgtttcattttcaggaagaggccccaggtgcagttttttggcatcctaaaggatggcgcttatttcaatcattgataaattatatgcgaataagacaagataaggcaggttatgttgaaacgaacacacctgacatgatggataaatctctttgggaaatgtctggccattgggataagtttagtgagatgatgtttagaacagaagctaaagatgaaaaaatatatgcaatcaaaccaatgaattgtccaggtgcagtagaagttttcaaacaaggtttaaaaagttatcgtgatcttccttttctcttatctgagtttgggaaagtgcaccgctatgagccatcaggtgcattgcatggtctaatgcgagtgagagcatttacacaagatgatgcgcatattttttgcacagaagatcaaataacccaagaaagcaaaactgtatgtgacttaatacttagtatctataaggattttggttttgataatgttagaattaaattttctgatcgccctgaaaaacgagtaggagatgatgcggtctgggacaaagctgaggcagcattaatgcaagctatggaagcaacaggacttgagtatacgcttaatcctggtgagggtgccttttatggtccaaaattagaatttgttttgcgtgacgctattgggcgtgactggcagtgtggaactcttcaagtagatttaaatttacctgaaaggctgggcgcaacttatgtggctgaagacggtcaaaaaaaggtacccgtgatgttacatagagctctttttggctctttagagagatttactggcatattaattgagcactatgctggacatttacctctttggttatcaccattacaaattgtagttgcaacaataacatctgattctgataactatgcttttgaagttaaagatcaattaactaaaaatggattggtggcagaggcagatatacgaaatgaaaaaataggttataaaattcgtgaacacagcaatgcaaaagttcctgtgattctagcagttggaaaaaaagaagccgatgaacaaactgtttctgttcgaagacttggcagtcaacaaacatcaactattaaattagataaattaataaaggatcttcagaaagagtctctttctccaataaattaat

SEQ ID NO: 303665 - DNA, 600 bp, Unknown
  Bacterial polypeptide expressing nucleotide sequence isolated from the Sargasso Sea
ttttgaatgcctctaaagctacaggaattccttttgataaaaatagcggtgatggagctttttatggaccaaagttagacttttatttacatgatgctattggtagaaaatggcaatgcgggacattacaggttgattttaatatgcctggaaggttaggggcaagttatgttggtgaagataatgaaaagcacacaccggtaatgcttcatcgagctattttaggaagtttagagagatttactggtattttaattgagcattatgagggcaaatttcctttatggttggccccaattcaattggtagttgccactataacttctaaagccgatcaatatgctaaagagatagaagcaaaatttatagaaaaaggaatacgggtgatattagactcacgaaatgagaaaataaattacaaagttagagagcattcagtaaataaaataccatatatctttgttgttggggttaatgaaatggaagacggaactgttgctattaggaagcttggttcaaataagcaggaaatagttagtattgaagatagtataaatatgatcttaaaagatacttctgctcctgatattgataattaac

SEQ ID NO: 303666 - DNA, 478 bp, Unknown
  Bacterial polypeptide expressing nucleotide sequence isolated from the Sargasso Sea
aatgccaaatattacattaccagacggaaaaaaaataaattttgaaaaaagtatttcaggttttgaggttgctgaaaaaattagtaaatctttatcaaagcaggcattattaatcagtgttgatggagaattaaaagatttaaatcataatatttcaaaagactcctcaattaagatatttacatcaaaagataaagagggattggaaactataaggcatgatactgcacatatattagctatggcagttcaagaattgtttccaggcacacaggttacaataggtcctgttattgaagatggattttattatgattttgctagaaaggaaccttttacctctgaagatctagaaaaaatagagaataaaatgagagaaattgtagatagagacgagaaaacctacagagaagtttggaaaagaaatgatgcaattgaacattttaaaaaaagggagaaatatataaagcagaaataa

SEQ ID NO: 303667 - DNA, 1153 bp, Unknown
  Bacterial polypeptide expressing nucleotide sequence isolated from the Sargasso Sea
atgaaattaacattgccagataaatctgttaaagaactgccaaaaggtgtgacaggtcttgatgttgctatgtctattggtcctgggctcgctaagagtgcaattgccgtcaatattgacggagaacagaaggatttaagtgatccaataaatgctgattgttcattatcgattatcacgctggattcagacgaagggcttgagatcatgcgacatacaacagctgctcaagtgctcgcattggcaattaagagcatttatcccgactcaaaattggcaattggaccaaccattgaaaatggcttttactatgattttcatacagaggattctatatctactgaagatcttcctcgaatagaagaagaaatgagcaaaatcatcaaagagaaatcagaaattgggaagtcgtttcatgacaagaaatctgccattgatcaattcaaaaaattatcagaagactataaggtaaaaattattgaagaatcagaccaagcagaggatattcaaatttacaaaaatgagaataatgaatttattgatctttgcagaggacctcatcttccaaacttatctcatattggggcttttaaactaacaaaggtttctggcgcatactggaaaggcgattcaagtaatgaaatgcttacaagaatctacggtactgcgtggcggaataaaaaagaactagatcagtacctggttcagcttgaggaagccgaaaaaagagatcatcgaaggatcggaaaggatctagatttgtttagtatccaagaagatgcagggggcgggcttgttttctggcatccaaatggatctagaatcaggagtgaaatagagaagtactggaaaaatgaacacgagaaagcaggctatgagctgttatatactcctcacattgctctcgatacactctggcaaacctctggtcacacagacttttatgaagaatcaatgtacacaccgatagatgacgagaatcaatcctatcgcttgaaaccaatgaactgtccattccatgttctgatatataaagataaattaaggtcttacagggaatttccaatcagatgggctgagttaggaactgtttatagacatgagatgactggagcgcttcatggcctaatgagggttagaggcttcacacaag

SEQ ID NO: 303668 - DNA, 1246 bp, Unknown
  Bacterial polypeptide expressing nucleotide sequence isolated from the Sargasso Sea
atgccgataataacactacctgatggaaacaacattgatttccctaataaagtttctggaacggaaatcgctgaaaaaattagcaagtcattagctaaacaagccatcgttatgagtgtcaatggtgaacttaaagatctaaatcatttaattgacaacgattgttctgtaaaaatttttacttcaaaaaatcctgaaggcttggaaactataagacacgatacagctcatattctagctatggctgttcaagaattatttcctggcacacaagttacaatcggaccagtgattgaaaatggattttattacgactttgcaagaaaagaaccatttacagaagaggatctggttaaaattgaaaataaaatgaaagatattgttgatagaaatgaaataacaaaaagagaagtttgggaaagaaataaagcaattagccattttaaaaaaaaaggagaaatttataaagctgagctgatcgaagccatacctgaaaacgaagatgtatcaatttactttcatggagaatggcatgatttatgtaaaggtccgcatctgtcctcgacaggtaaaattggaaaatattttaaacttacaaaagtatcaggagcatattggagaggagactctaataatgaaatgttgcaaagaatatatggaacgagctgggcaactcaaaaagatttagatgaatatttaaaaagaatcgaagaagctgaaaaaagagatcatagaaaacttggtaaagaaatggacctatttcattttagagaagaaagtcccggatcagtattttggcacgaaaagggatgggctctattccagaaattaattaactatatgagaagtagacaagatgctgctggttatagagaggtaaacacaccagaaatattagatagacaactatgggaaaaatctgggcattgggaaaaatatggagaaaatatgtatacttcagaaactcctgatgaaaaagtatttgcaattaaaccaatgaattgtcctgggcatattcaggtatttaatcaaggtttaaaaagttatagagatcttcctttacgtattgcagaatttggaaaagtacatcggtatgaaccatcaggtgctttacatggattattaagggtaagggcattcacccaagatgatgcccatatattttgttctgaagatcaaattaccagtgaatgtttagaggtaactaatttaatattagatatttataaagatttaggttttgaaa

SEQ ID NO: 303669 - DNA, 1670 bp, Unknown
  Bacterial polypeptide expressing nucleotide sequence isolated from the Sargasso Sea
tcaagaattgtttcctggcactcaagttacaattggacccgtgatagaaaatggattttattacgactttgctagaaaagaaccattcacagaagatgatcttgtaaaaattgaaaataaaatgaaagagattgttgataggaatgaaataacaaaaagagaagtttgggatagaaataaagcaattagtcattttaaaaaaaaaggagaaatttataaagctgagttgattgaagcgatacctgaaaacgaggatgtatcaatttattttcatggagaatggcatgatttatgtaaaggtccacatctctcctccacaggtaaaatcggaaaatattttaaacttacaaaagtatcaggagcatattggagaggagactctaataatgaaatgttgcaaagaatatatggtacgagttgggcaactcaaaaagatttagatgaatatttgaaaagaatagaagaagcagaaaaaagagatcatagaaagttaggcagagaaatggatttatttcattttagagaagaaagtcctggctcagtattttggcatgaaagaggatggggtttatttcaaaaactcgttaactacatgagaagtagacaagatgctgctggctataaagaggtaaatactccagaggtactggatagacaattatgggaaaaatctgggcattgggaaaaatatggagaaaacatgtacacatctgaaacaccagatgagaaagtttttgcaattaaaccgatgaattgcccaggtcatattcaggtatttaatcaaggcctaaaaagttacagagatcttcctttacgttttgctgaatttgggaaagttcatcgttatgagccatcaggcgctttacacgggttattaagagtaagagcttttactcaagatgacgcccatattttttgtactgaagatcaaattactagtgaatgtttaattgttacaaatttaatactagatatttataaggatcttggttttgaaaatgtaattctaaaatatgcagataggccggaagtaagagttggtgatgatttagtatgggataaagcagaagcttctttgcttgaagctgttatagcttctaaattagaatatactattaataaaggtgagggagcattttatggtcctaaaattgaatttgttttacgagatgctattggcagagattggcaatgtggaactttgcaagtagatttaaatttgcctggaagattagatgcttcttatgttgacaaagatggaactaaaaaagttcctgttatgttgcacagagcattatttggttctctagagagatttattggaattttaattgaaaactatgcaggtaagtttccattttggatatctcctttacagactatggtaatacctatttcagaagaatttaatgattatgcagttgaggtatcaaataaaattaaaaattcaggcataagttctgcagtagatttaaaaaatcataatttaaattataaaattagagatcattctttggcaaaaataccgcttttattaatttgtggtaaaaaagaagttgactccaattcagtaacgattagaagattaaattctaataaacaagaaaatatgggtatagatcaattcttaaaaacattctctgctttaaacaaagcatcatcaaactaag

SEQ ID NO: 303670 - DNA, 1036 bp, Unknown
  Bacterial polypeptide expressing nucleotide sequence isolated from the Sargasso Sea
gatgaaacagataactataacactaccggataaatcaacccgtcaatacgatgaaggggtaactgcattgcaaattgccaccagcattggtgaaagattagccaatgatactgtagctgctaccgtcaatgacaatttagtggatgcgactattccaatcatggatgatgctgatttaattatacatacaggtgattcaaaaattggtcacgaggttttgctacatagcgcagcccatttaatggcgcaggctgtaaagaagttttggccgacttcgcaaatgactattggtccagtcatagaaaatagattttattatgattttgatatcgaggggacattttccgatgaagatctcctaaaaattgaagaagaaatgcataatattgcaaaagaaaatcatgatgtttctcgtgaagatctatctagagatcaagctattaaattattttcgaaactcaatgaaaactacaaagtagaaatcatcaatgaaatcgatgaaagtgatcgaattactgcatacaagcaaggggattttattgatctttgcagaggaccgcacactcccagtacaggaaatttaaaatattttaaactgctatcaacgtcaggtgcgtattggcgcggtaatgaaaataataaaatgttacagagaatttacggtactgcattctctaaaaaatcggaactaaaaaagtatcttaattttttggaagaagcaaaaaaacgagatcatagaaaaataggtaaagaactagaaatttttacctttgatgaagaggttggaccaggattaccgctatggcttccaaatggcggagttattttaaatgaattagaatcattagctaaagaaacagaagataggcatggctaccatcaagtaagaactccacatttaactaagggcgacttgtataaaaaatctggtcatttagaattatacaaagatgcgatgtacccagctatggatgtagatggaatggattattatgttaaaccgatgaattgtcctcatcatcacaaaatttacgca

SEQ ID NO: 303671 - DNA, 1267 bp, Unknown
  Bacterial polypeptide expressing nucleotide sequence isolated from the Sargasso Sea
atggagaaatgaaaaagagcttcaagaacatctaaaatctattgaggaagctgaaaaaagagaccatagaaagattggaaaagatatggatcttttccatttccaggatgaagctccaggcatggttttctggcatccaaaaggctggactatttactcaactttaaaatcttatatgtcagatatgcaaaagaaagctgattataaagaaattaatactccatcagtgatagataggaagctttgggaaaaatcaggacattgggataaatatagagaaaacatgtttatcactgagatcgatgaagagcatgcaaacgagaaaagagtaaatgctttgaaacccatgaattgccccggacatgttcaagtctataaccaaggcataagatcatataaagaactgccatttaggttatgtgaatttggttcatgtcatcgatatgaagcatcggggaccatgcatggactaatgagagttaggggattcacacaagatgatgggcatatttttcttactgaggatcaaatcgagtcggaaacagctatctttatagatttattatcaaaggtctatgctgaccttgggttcaatgaattcgaaattaagctatcaacacgtccagaacaaagagtcggatctgatgagatttgggacaaggctgaattgtctttaaaaaatgcaatcgaaaaacttggattggaatacaggatagacgaaggagatggagcattttatggtccaaaattagattttgtattaacagatgctattggaagaaagtggcaatgtggaactcttcagttggatttcaatcttgctgatcgtctagatgctcaatatgttgcagaggatggaaataaatataatccagttatgtttcatagagcaattctggggtcatttgaaagatttattggtattttaattgagaactacagtgggaatcttcccttatggcttgctcccacccaagtgacagtttgttcaattacagatgaagctgatgattatgtaaaagagatatcagaaacacttagaagtaaaaatattagatgtaattcagatttaagaaatgaaaaaattagctataaagtcagagaacatagcgtctcaaaagtaccaataattattgctgtcggaaaaaaagaggtttctgaaagaactgtttcagtaagaaggcttggcagtgatgatacatctatattatcccttgatgactttactacttcagtagtgcaagaatctcttgccccaaataaataa

SEQ ID NO: 303672 - DNA, 1282 bp, Unknown
  Bacterial polypeptide expressing nucleotide sequence isolated from the Sargasso Sea
gttgctggtttacttaatggtaaacttgtagatgcttcagaacttattgaaacagattctgatgcagtattggtaactaatagtgatgatgatggcatagaaataatcaggcattcatgcgctcatttatttggtcatgctttaaaacaattatatcctgaagcaaaaatggctataggcccaacaatagaaaatggattttattatgatatcgatcttgaagagtcattaagcgaaaacgatcttgagaaaatcgaattaagaatgaaagaattggcgcaaaccaaatataatgttgttagagaggttgtaactagaaaaaaagctcttgatacatttaaagatagaaatgaaccatataaaattgaaattattaatgaaatacctgacgatgaaatcatagccctatatcatcataatgaatatatagatatgtgtagaggacctcatgtaacatcagtaagacatttaaaagcatttaagttaacaaaaattgctggagcatattggaggggtagttctgataataaaatgcttcaaagagtttatggtactgcatgggcatcagaaaaagaattaaataaacatctaattcttcttgaggaagcagagaaaagagatcacagaaaacttggaaaagaattagatctttttcattttcaagacattgcgcctggcatggttttttggcatgcaaatggttggtcaatttataaagagttagaagattatattcgaaggaaaatttctaaagaaggctataaagaaataaaaactcctcaaatcctagataaggatttgtgggttgagtcgggtcattgggacaaatacaaagataatatgtatagaactattatcgatgatagagagctcatgatcaaaccaatgaattgtccaggacatgttcaaatatataatcaaggaataaaaagctataaagatttacctcttcgaatggcggaatttggttcgtgtcatcgtaatgaaccatctggagcgcttcatggtctaatgcgggtaagaaattttgttcaggatgatgcgcatattttttgtactgaggaccaaatagaaagtgaaacagtcaatttttgtaaattacttcaagaagtatatagcgaactaggatttaatgaggtttcaataatgtatgctgataggcctgagcagagggtaggttcggatgagatttgggataaagctgagaatgcacttttgaatgcctctaaagctacaggaattccttttgataaaaatagcggtgatggagctttttatggac

SEQ ID NO: 303673 - DNA, 1570 bp, Unknown
  Bacterial polypeptide expressing nucleotide sequence isolated from the Sargasso Sea
gatgacaaaaatttcagaggaaaatcttcaaattacccatgaaatcaaatctagagatgattctataagttattttgagaaaattaatgaaaattataaagttgaaataataaatgatttagatccaaatgaaacattaaaagtatattcgcagggtgaatttacagatttatgtagaggtccgcatgttccttatacaggtgtcattaaacatttcaagcttttatcttcatcagcggcttattggagaggcgatgaaaaaaatcaaactcttcaaagagtttatggaacttcattccagaatattaaagatttaaaaaaatatcttttaatgttagaagagcagaaaaaacgtgatcatagaaaaattggtaaggagcttgatttgtttttctttgatgatgaggttggtccaggtttgccactttggacaccatctgggactgtgttaattgatcagttagaggctctagcaaaagaaaaagaaacagcgggtggatacttgagagttagaacacctcacttaacaaaaggtgatttattttcaaagtcaggacatttagaccattacatgtcaagtatgttttctccgatggatgttgatggtatcgattattatatgaaaccaatgaattgtccatatcatcataaaatttatgctaatactcctaaaagctatagagatttaccttatagaatatctgaatatggtacttgctacaggtatgaaaaatctggtgaattatttggtttaatgcgtgttagaagcatgcaaatgaatgatggtcatatttattgtacagaggaacagtttaaagaagaatttataaatgtgtgtaatctatatatggaatattttaaaatttttggaatagaaaaatatgaaatgagattaagccttcatgacccagaaggtcttggtgataaatttatagataacccaacactttggaaaaagactgaggatgatgtaagaaatgctcttaaaggagctaaattaaaatttgtcgaatctgttggtgatgcagcattttatggtcctaaaattgatgttcaggtttggagctcaatcggaagagaatttaccttggcaaccaatcaagtagattttgctattcccgagagatttgatctaacttatacagataaagatggtactgctaagacgcctttatgtattcatagagctccgttaggaactcatgaacgtttcattggatttttaattgaacattttggaggaaattttcctctatggttagcacctaaacaagtaactattcttcctgtatcagataaattcaatgattatgcacaagaaattacaacccacttaataacaaaaggcgtgagagcttctattgataatagatcagaaaaaattggttcaaaaattagagatgcagagatgcaaaaaattaatatcatggtaattgttggagagaaagaacaagaaaataaaactttaacaatcagaagaagatttgtaaaagagcaagaagaattaaatttggatgatttttctaaaaatatcttaagcgaaataaatgaaaggagagtttcgaattaa

SEQ ID NO: 303674 - DNA, 646 bp, Unknown
  Bacterial polypeptide expressing nucleotide sequence isolated from the Sargasso Sea
tcaaccagacctgaaatgagagttggatctgatgagatatgggataaagccgaagaagctcttgagacagcaattaaaaatttaggctatccgtatagaattgatgagggcgatggagctttttacggtccaaagctagactttgttctaactgatgcaattggcagagagtggcaatgtgggaccttccagcttgacttcaacttagctgaaagattggatgctacttacattggtgaagatggtaaaaaacacatacctgttatgattcacagagcagtacttggatcattcgaaagatttataggtatattaatagaaaattatgctggtaaattaccattctggttagctcctcaacaagttgtaattacatctattgtttctgatgcaaatgattatgctctcgaaattcaacaaagcctcaaagataacaaaataagatgtgaagtagatttaagaaatgaaaagattagttataaggttagagaacatagcacaaaaaaagtgccaatcattttggctattggcaagaaggaaatggctgataaaacagtttccttaagaaggattggaagcaaagaatctttagtgctttcattagatgatgctataaaagatataattaaagagaataggggttagt

SEQ ID NO: 303675 - DNA, 1942 bp, Unknown
  Bacterial polypeptide expressing nucleotide sequence isolated from the Sargasso Sea
ctgccgcccactgtcggcatcacggagattgctatggtttcgatacgcttgcctgacggctcagttcgacaatacgagcatccggtgacagttgccgaggttgctgcctcgatcggtcccggccttgcgaaggctgcgcttggtggcaagctcgatggcgagctcgtcgatacgtcgaccgtgatcgaccgcgatgcgtcgctcgcgatcgtgaccgacaaggatgccgatggcctcgacatcatccgtcactcgacggcgcacttgctcgcgtacgcggtgaaggaactgtacccggacgcgcaggtgacgatcggcccggtgatcgacaacggtttctattacgacttctcgtacaaccggccgtttacgcccgaagatctggagaagatcgaaaagcgcatgcaggagctcgtgaagaaggatgagcccgtgacgcgccgtgtcgtgtcgcgtgacgaagcggcgggctacttccgcagcatcggcgagaagtacaaggccgagatcatcgaatcgattccgcaaagcgacgaaatcaagctgtattcgcacggcggctttaccgatctgtgccgcggcccgcacgtgccgtccaccggcaagctgaaggttttcaagctgatgaaggtcgcgggcgcatactggcgcggcgattcgaagaacgagcagctgcagcgcatctacggcacggcctggacgaagaaggaagaccaggaccagtacctgcacatgctcgaggaagcggaaaagcgcgaccaccgcaagctcggcaagcagctcgacctgttccacatgcaggaagagtcgccgggcatggtgttctggcatccgaagggctgggcgctgtggcagcaggtcgagcagtacatgcgccgccgcgtgaacgaagccggctacctcgagatcaagacgccgatgatcatggaccgctcgctgtgggaagcgtcgggtcactggcagaactaccgcgagaacatgttcacgacggagtcggagaagcgcgactacgcgatcaagccgatgaactgcccgggccacgtccaggtgttcaagcacggcctgcgctcgtatcgcgacctgccgctgcgttacgcggaattcggttcgtgccaccgcaacgaggcgtcgggcgcgctgcacggcctgatgcgtgtgcgcggcttcgtgcaggacgatgcgcacatcttctgtacggaagaccagttcatctcggaatcgatcgcgttcaacacgctggcgatgagcgtgtacaaggacttcggtttcgatcacatcgacatcaagctgtcgctgcgccccgaccagcgtgcgggtacggacgagacgtgggatcgcgccgagcagggcctgcgcgacgcgctgacggcctgcggcctcacgtgggaagagctgccgggtgaaggtgcgttctacggtccgaagatcgagtaccacatcaaggatgcgctcggccgttcgtggcagtgcggcacgctgcagctggatatggtcctgccggagcgcctcggcgccgagtacgtcgcggatgacagcagccgtcgccgtccggtgatgctgcaccgggcgatcgtcggttcgatggagcgtttcctcggcattttgatcgagcaccatgctggtgcgatgccggcctggctcgcgccgttccaggcagttgtgctcaatatcgccgaaagtcaggccgaatatgcgcaatcgctggcccaatcgttgcaaaaacaaggggttagggtggtggcagatttgcgcaatgagaagattagctataaaatacgcgagcacacgctggaaaaggtgccttatctcctcgtcgtgggggacaaggagcgtgatgcgcaaacggtagccgtgcgtgcccgtggcggcgtcgatcttggcgtgatgccggtcgaagccttcgttgagcgtctgcaggaagacctgcgctcgttcaagtaac

SEQ ID NO: 303676 - DNA, 841 bp, Unknown
  Bacterial polypeptide expressing nucleotide sequence isolated from the Sargasso Sea
tatgccaataattactttgcctgatggttcaaaaaaggtttttgaaaaatctgtaaccattctagaaattgctcagagtataggagctggtttagctaaagcaacaattgctgggaaagtaaatgatgttcttgttgatgcaactattcctataagtagagattccaaagttgtaatcatcacatcaaaagataaagaaggaattgaaataataagacattcctttgcccaccttattggtcatgcggttaaacaaatttaccctaatattaaaatggcaattggacctgtaattgaagatggtttttattatgatattttttctgaatacagatttactcctgaagatttaataaaaatcgaaaatagaattcataaattaataaaaacaaactatgacgttaaaattttacaagtctctaaagaagaggcaattaaaacttttaaagaaagaggtgagacgtttaaattacgaataattgaagaaattcctgaagaagatctaatcaatttatacaagcacgaagaatatatcgacatgtgtagagggcctcacgtacccaacacaagacatttgagacactttaaattacttaaattgtcaggttcatactggagaggtaatagtgaaaatgaatcattacagagaatatatggaactgcatgggctaaagaaaaagaactcaaagattatttaacaagaattgaagaggcggagaaaagagatcatagaaaacttggtaaaaaacattcactttttcatatacaagaagaatcaccaggtatgattttttggcatccaaatggatggacaatctaccaagtctggaaaaatacataa

SEQ ID NO: 303677 - DNA, 1212 bp, Unknown
  Bacterial polypeptide expressing nucleotide sequence isolated from the Sargasso Sea
gatgagtgaaaaaattacaattacatttcctgatggaaataaaaaagaagtagataagggaattagtggattagacctagcttcacagatttctaaatcacttgctaaagagtcagttgctgtaaaaataaacgatgaaataaaggacattagcttacctattaatactgacgtatcagttgcaattttaaaaaaagatagtgaagaagctcttgaactaattcgacatgattgtgcgcatgtgatggctgaagcagttcaagaattgtttcctggtacacaagttacgattggcccagctatagaaaatggtttttattatgattttgcaagaaaggaaccatttactctatctgatcttccaaaaattgaaaaaaaaatgcatgaaattattcagcgtaatgaaagttttgtcagggaagtatggtctaaagatgaagcgataaaatattttaaagataagggtgaaaactacaaggttgaattaataaatgatttatctgataatgaggaaattagtatttacaaacaaggtggttggttggacttatgccgaggccctcatatggtttcaacaaagcagattggtaaggcatttaaattaatgaaagttgctggcgcgtattggagaggagattcgtctaatgcaatgcttacaagaatttatggtacggcatgggcgactgaaaaagatcttgaacaacatctattacaaattgaagaagcagaaaaaagagatcaccgcaaacttggaaaagaaatggatctatttcattttcaagaggaggcaccaggagctgttttttggcaccctaaaggttggacgttgttccaatctttaataaattatatgcgaaacagacaagataaagcaggttatgtagaaactaatacaccagatatgatggataaatctctatgggaaacctctggccactgggacaagtttagtgatatgatgtttaggactgaagcaaaggatgacaaaatttatgcaatcaaaccaatgaattgccctggtgctgtagaaatttttaaacaaggattaaaaagttatagagaccttccatttttattatctgaatttggaaaagtacatcgttatgaaccttcaggagcccttcacggattaatgcgagtaagagcattcacacaagatgatgcgcatatattttgtacagaagatcaaattacacaagaaagtaaaatagt

SEQ ID NO: 303678 - DNA, 1424 bp, Unknown
  Bacterial polypeptide expressing nucleotide sequence isolated from the Sargasso Sea
ggatgaagatgtttcaatttattttcatggagattggcatgatctttgtagaggaccacatctttcttctacaggtaaaattggaaaaaacttcaaattaatgaaagtttcaggagcgtattggagaggtgattcaaaaaatgaaatgctacaaagaatttatggtacaagctgggcttctcaaaaagatttagatgaatatttaaaaagaatagaagaggcagaaaaaagagatcatagaaaattaggaaaagaaatggacttgtttcattttagagaagaaagtccgggctcagttttctggcatgagagaggatgggcattatttcaaaaattaattaattatatgagaagcagacaagacgctgctggatacaaagaggtaaatacacctgaaattttagaccgacaattatgggaaaaatctggtcactgggaaaaatacggagagaatatgtacacatcagaaactcctgatgaaaaagtgtttgcgataaaaccaatgaattgtcctggtcatatacaagtatttaatcagggcttaaaaagttatagagatcttccatttcgtatcacagaatttggcaaggttcatcgttacgaaccatcaggtgctttacatggcttacttagagtaagagcttttacacaagatgatgcgcatatattttgtgcggaagatcaaattacgagtgagtgtttaaatgtaacaaatttaattttagacatttataaagaccttggttttgaaaatgtaattttaaaatatgcagatcgaccagaggtcagagtaggagatgatgaggtttgggacaaggcagaagcttcacttcttgaagcagttaaagcctctaagttagaatatagtattaataaaggagaaggtgctttctacggaccaaaaattgaatttgtcttaagggatgctattggaagagattggcaatgtggaactttacaagtcgatttaaatttacctggacgactagatgcatcatatgttgataaagacggaataaaaaaagttcctgttatgcttcatagagcgctgtttggctctttagagagatttattggaatattgattgaaaattatgctggaaaatttcctttttggatttcacctttacagacaatggtaattccaatttcagaagaatttaatgattacgcaatagaagtgtctaaaaaaattaaagatgcaggcataagttctgcagttgatattaaaaataataacataaactataaaattagagatcattctttagcaaaaatacctcttttattaatttgtggtaaaaaagaagttgactccaattcagtaacgattagaaggttagactctaataaacaagaaaatatggaaatagacttatttttaaaaactttctctgctttaaacaaagcatcatcaaactaag

SEQ ID NO: 303679 - DNA, 1912 bp, Unknown
  Bacterial polypeptide expressing nucleotide sequence isolated from the Sargasso Sea
tatgccaaaaataaaattaccagatggatcagtaaaagaattcgataagccaattaattttgatgaacttgcatcttcaattggatcggggttagctaaagcaactgttgctggtatgcttaatggaaaacttgtagatgcatctgagcttattgaatcagactctgaagcagttttaatcacaaatagtgatgaagatggagtagagataattaggcattcatgtgcccatttatttggccatgctttgaaacaattataccctatggcaaaaatggctataggaccaacaatagaaaatggtttctattacgatattgatcttgaggagtcattaagtgagaatgatttagaaaaaattgaattaagaatgaaagaactagctcaaacaaattatgatgttgttagggaagttgtaacaagaaaaaaggcgcttgatatatttgagaatagaaatgaaccttataaaattgaaataattaatgaaattcccaatgatgagattatagccctatatcatcataatgaatatattgatatgtgtagaggtcctcatgttacatcagtgaggcacttaaaagcctttaaattaacaaaaattgctggagcatactggaggggcagttctgataataaaatgcttcaaagagtatatggaactgcatggtcgtctgaaaaagagctaaaaaaacatcttgttcttcttgaggaagcagagaaaagagatcataggaagcttggaaaagaattggacctttttcactttcaagacattgctcctggtatggttttttggcattcaaacggttggtcgatttataaagagttagaagattatattcgaagaaaaatttcaaaagaaggatataaagaaattaaaactccacaaattttagataaagatttatgggttgagtcaggtcattgggacaaatataaagataatatgtataaaacaattattgatgatagagaattgatgattaaacctatgaactgccctggacatgttcaaatatataatcaaggtataaagagctataaagatcttccagtgagaatggctgaatttggatcgtgtcatcgtaatgaaccctctggagctcttcatggtttaatgagagttaggaattttgttcaagatgatgctcatattttttgtactgaagatcaaatagagagtgaaactataaatttttgtaaattgcttcaagatgtatacagtgaattgggttttgataaggttacaataatgtatgctgatagaccagatcaaagggttggcaatgatgaaatatgggataaagctgaaaatgcacttttgaatgcatctaaagcaaccggcataccttttgatacaaatagaggagatggtgctttttatggaccgaaattagatttttatcttcatgatgctattggtagaaaatggcaatgcggaacattgcaagttgatttcaatatgccaggaagattgggagcaagttatgttggagaagataatgaaaaacataccccagttatgttacatcgagctattttaggaagtttagaacgatttacaggaattttaattgaacattatgaaggcaaatttcctctttggttagctccaatacaattggtgattgctactataacctctaagtcagataaatatgctcaggagatagaagagaaatttattaataaagggataagagttattttggattctagaaatgaaaaaatcaattataaggtacgcgaacattcggttaataaagtgccatatatttttgttgttggagttaatgaaatggatgataaaaccgtcgcaattagaaagcttggctcaaataaacaagaaatacttagtataaaagatagtgtagatttgatacttaaagaaactgctgcaccagatagttga

SEQ ID NO: 303680 - DNA, 1933 bp, Unknown
  Bacterial polypeptide expressing nucleotide sequence isolated from the Sargasso Sea
gatgaaaataactttgccagataatagtttgagagaattgcctgagggatcgtcaggctatgatcttgcaaaagacattgggcctggtcttgccaaatctgctatagctgtaaccattaatggtgtgcaaagagacctgcatgatcccatagatgcagatgcatcagtttcaataattacaattgatagcgatgagggtattgaaatcatgcgtcacactcttaccgctcaggttttagcgagggccattaaaaatctttatccaaaatcaaaattagctattggccctacagttcaagatggtttttattatgatgttgaatccgatgagtctatatcttctgatgatctaagtaagattgaagaagaaatgaaaaaaatcattaaaactaaatcagcaattactaaaaaactagtttcaaaaaaagaagctttaaaaatatttaaatcaaacaaagaaccatataaagaaattattattaatgagtcagatcaagatgacaattttcaactttattaccaggatgacgaagaatttgttgatttatgtagaggcccgcatctcccaaatttaggatttatcggctcatttaaattaacaaaagtatcaggtgcatattggaagggcgattcaaaaaactcaatgctgacaagaatttatggaacagcatttagtaacgataaagatttacaaaatcatttagacaacattgaagaggcgctcaaaagagatcatagaaaacttggaaaagagatggatttgtttcattttcaggacgaagctccagggatggttttttggcatccaaatggctggactgtttatagaaagttaagaaattttgtaagagatagactaaaggaaaataattatattgaagtaaatacccctcaagtaatagatagaaaattatgggaagcttcaggtcattgggacaaatatagagaaaatatgttcattacagagattgacgaagaacatgctaacgaaaaaagagttaatgctcttaagccaatgaactgtcctggtcatgttcaaatttataatcaaggcattaaatcctataaagatttgccattaaagtatgctgaatttggtttatgtcatagatatgaaccctccggaactatgcatggtttaatgagggtaagggcttttactcaagatgacggacacattttctgcactgaggatcagatagaatcagaaacaggactatttatagagtttctatcaagcatatatgctgatttaggatttaaaaattttgatatcaagttatctactagacctgagatgagggttggttcagatgaaacatggaataaagcagaagcggcccttgaagcagcaattaaaaatttggaatacccatatagaattgatgagggtgatggcgcattttatggaccaaaattagattttgtgctcaccgatgcaataggaagagaatggcaatgtggaacctttcaattagatttcaacttagccgaaaggctcgatgctagctatgttggagaagatggaaaaaaacataccccagtaatgatacatagagcagttttaggatcttttgagagattcataggcatcttaattgaaaattatgctggaaagcttcctttctggttatctcctcaacaggttgttgttgcttcaatagtttcagatgtaaatgactactcattagagatagtggaattgctcaaaaaacagggcattttagctgaagccgacctcagaaatgagaaaattagttataaaatcagagagcatagtaatagaaaggttccaattattttagcaattggaaataatgaaaaaaaagatggaactgtatctcttagaagaattggaagcactgaaaccaaagtagtaaaacttaaagaagctatgaaacaaatcactaaagaaaatttaattattaactaa

SEQ ID NO: 303681 - DNA, 919 bp, Unknown
  Bacterial polypeptide expressing nucleotide sequence isolated from the Sargasso Sea
atgcctacaattacactaccagatggaaatagtttaaattttaaaaacaaagtgacaggtttgcagatagctgaaaaaataagcaaatcgctttctaaacaagctctagtaattagtgttgatggaaatttaaaagatttaaattatgaaatagataaagattgttctgttaaaatttacacatcaaaagacaaagaaggattagaaactataagacatgataccgcgcatatattagcaatggctgtacaagaactttttcctggtacacaagtaactattggaccagtaatcgataatggattttattatgactttgcaagaaaggaaccattcactgagcaagatttaagaaaaattgaaaaaaaaatgttagaaattgtagagagagacgaaccaactcataaagaagtatggaaccgtgataaagctgttgaacattttaaaaaagctggagaaatttataaggctgaaataattaaagatattccaaaagaagaggaggtttcagtttattttcacggaaaatggcacgatctatgtagaggacctcatttgatgtctactggaaagattggaaaatactttaaactcatgaaagtttctggtgcgtattggagaggtgactcaaataatgaaatgcttcaaagaatttacggaactagttggccatcacaaaaagaattagatcaatatttaaatagattagaggaagcagaaaaaagagatcacagaaaattaggaaaagaaatggatttatttcattttagagaagaaagtccaggctcagttttttggcatgaaaaaggctggaatttatttctaaaattaatttcttatatgagagcaaaacaggatgaagatggatataaagaaataaatactccagaaattttagatagatctttatgggagaagt

SEQ ID NO: 303682 - DNA, 1041 bp, Unknown
  Bacterial polypeptide expressing nucleotide sequence isolated from the Sargasso Sea
ggaagtcaaagggtccatttatgatggacaaggtgctgtgggaacgttcaggtcactgggaaaagtactcagacaatatgtttgtcaccagttctgagaaccgtgattacgccatcaagccaatgaactgtcctggccatgtgcaaatctttaaccagggcttaaagtcgtaccgcgatttaccgctgcgtatggctgagtttggttgctgtcaccgtaacgagccatcaggtggtttacacggcctgatgcgggtgcgtggttttactcaggatgacgcccatatcttctgtactgaagatcaagtgcaggctgaagtatcggcttgtatcaaaatggtatttgacgtctatagcacttttggttttaaagacgtacaggtgaaattatccactcgtccggaaaaacgcattggtaccgacgaaatgtggcaccgtgctgagcagggtttagcagaagctttggatgccaatggcatagcctatgacctgcaacctggtgaaggtgcgttttatggccctaaaattgaatttactttacacgattgcttaggccgcgcctggcaatgtggtacagtgcagctcgatttcgctttaccgggtcgtttaggtgcaagttttgttgctgaaggcaacgacagacaagtaccagtgatgatccaccgtgcgattttgggctcgctggagcgttttatcggaattctgattgaagaatatgcaggctttttcccagcctggttagccccaactcaggttgtggtgatgaatattaccgataatcaggccgaatatgtgcaggatttagtaaaaactttcaaatctcatggtattagagctatttctgacttgagaaatgagaagataggctttaaaatccgcgagcacacgctacagcgtgttccttatttagtggtagtcggtgacaaagaagttgaagctggcgatatcgcgttaagaacacggaagggcgaagacctcggaaaaatgagtgtaagcgactttgtaaccaagttgaccactgaaattaaaaaccgggtctaat

SEQ ID NO: 303683 - DNA, 1972 bp, Unknown
  Bacterial polypeptide expressing nucleotide sequence isolated from the Sargasso Sea
atgtggccctacgtgtgggtcaccactggacaaggatatttcatgcctgtaattacacttcctgatggtagcaagcgcgagtttgcacatcccgtatcgactctcgatgttgccgcagatatcggccctggtcttgctaaagcctgtatcgctggtcgcgtgaatggcgagctcaaagacgcttgcgatcttatcgaaaccgatgctgaactttctattattaccgctaaagacgaagaaggtattgaaatccttcgccattcttgcgcgcatttattaggccatgcaatcaaacaattatggccacaaaccaagatggcgatcggtcctgtgatcgataacggcttctactacgacatcgatcttgagcacaagctgactcaagaagatatcgaagccctcgaaaaacgtatgctggaactggcgaaaaccaattacgacgtagttaaacgcgttgtgagctggcaagaagcccgtgataccttcgccgcccgtggtgaagaatacaagatcgcgattctggatgagaacatcagcaaagatgcgactccagcgctgtatcatcacgaagaatacaccgacatgtgtcgtggtccacacgtgccaaacatgcgtttctgtcatcatttcaaattgatgagcatagctggcgcttactggcgcggtaactctgaaaacaagatgctgcaacgtatttacggtactgcatgggcggataaaaaagccttgagcacccatttagcccgcctcgaagaagcagctaaacgtgaccaccgtaaaattggtaagcaactcgacctctaccatatgcaagaagaagcacctggcatggtgttctggcataacgatggttggagcatcttcctcgaattagaacgtttcattcgccgtaagttaaatcaatacacttaccaagaagtgaaaggtccgttgatgatggaccgcgtactgtgggaacgttctggtcactgggataaatactcagaagccatgttcacaaccagcagtgaaaaccgtgaatacgcggttaagccaatgaactgccctggccacgtacagatcttcaaccaaggcttgaaatcttaccgtgatctgccactacgtatggcggaatttggttgctgtcaccgcaatgagccatcaggttcgctgcacggactcatgcgcgtccgtggttttactcaagacgatgcccatatcttctgtactgaagatcaggttcaagcagaagtcagctcttgtatccaaatggtatacgacacttactcaacatttggctttgagaacatcgttgtaaaactgtcgactcgcccagaaaagcgtatcggtgacgatgcaatgtgggacagagccgaagaagcactcaagcaagctttacgtgcaaacaatatcgaattcaccattttaccgggtgaaggcgccttctatggtcctaagattgagttcacgctgcacgactgtttagaccgtgcatggcaatgcggtactgtgcaattagactacgcattaccgagccgtttaggtgcaacttatgtagccgaagataacagccgtcaaacgcctgtgatgatccatcgtgcgattttaggctcgttggagcgtttcttaggtattttgatcgaagaatacgcaggtcgtttcccaacttggttggctccaatgcaagttgtcgtgatgaatatcaccgacaaacaggctgattatgttgaagaagtggtcaaattcttcaaagaacaaggtattcgcgcctcatttgacttgaggaatgagaaaataggctttaaaatacgcgagcacaccttaaggcgtgttccttatttattggtcgttggcgatcaggaaatggaaaataaggaagttgcggtgcgtacacgtgatggcgttgacttaggtaagatgcgaatcgaagatttcgccgctaagatccatcaacaaatttcgctccgtagtctcaaattgttggaggaatagg

SEQ ID NO: 303684 - DNA, 1506 bp, Unknown
  Bacterial polypeptide expressing nucleotide sequence isolated from the Sargasso Sea
aagttaccaaaaaagaagcaattaaaacttttcaagaaagagatgaaacttttaagttaagaataatcgaagaaattcctgatgaaggtctcatcaatttatataaacacgaagaatatattgatatgtgcagggggcctcatgttccaaatacaagccaccttagacattttaaattattaaagttgtctggttcatattggagaggtaatagtgaaaatgaatcattacagagaatctatggaactgcttgggctaaagagaaagaactcaatgattacttaacaagaatcgaagaggcggaaaaaagagatcatagaaaacttggaaaaaaacattcactctttcacatacaagaagaatctccaggtatgattttttggcatccaaatggatggacaatctaccaagttcttgaaaaatatgtaagagaaatacttaataaaaatgattatctagaaattaaaacccctcaagctgttgataaatctctttgggaaaaatcaggtcattgggataaattcagagaagatatgttcactacggcatcagaaaatagaacttatgcaataaaaccaatgaattgtccttgccatattcaagtatttaatcaaggtttaaaaagttataaagatttacctattcgccttgctgaatttggttcttgtcatagaaatgaaccctctggtgcattgcacggtttaatgagagttagaaattttactcaagacgacgcacacattttctgcacagaagaacaaatacaagctgaagtttctactttcattgatcttgttttcgaggtttataaaacttttggttttgatgaaattattatcaaattatcaacccgtcctgagaaaagggtgggtagtgaaaatatttgggataaatcagaagaggcacttatgaaggctcttgataataaaagtattaaatgggaattacagcctggagaaggggctttttatggtccaaaaatagaattttctttaaaagattgtctagatagaatttggcaatgtggaacaattcaagttgatttctcaatgcctataagattagatgcaacttatgtagatttaaataacgaaaaaagaaatccagtaatgctacacagggcaattttgggatcttttgaaagatttataggaatcttaatagaacaatatgaagccaaattcccaatctggcttgcaccttatcaaataattttgttgagcattaccgataggaatattgagaaatgtttgaaatttaatcaattaataaatattaagggatatcgttcgaaagttgatattagaaatgaaaaaataggatataaaataagagaggcaactattggaagaattccgttaattgcagttattggcgataaagaagaagaagttgattcagttgctttaagagccttagatggaaaaaatttaggaatttttaagttagatgatctttacaaattaatgaatattttaatagaaaaaaaaggaagaactgaataat

SEQ ID NO: 303685 - DNA, 1146 bp, Unknown
  Bacterial polypeptide expressing nucleotide sequence isolated from the Sargasso Sea
tcaagaaaacaacttactcgtatttatggaatatcttttcctaaacaaaatgaactaactaaatacttagaattagttgaagaagcaaaaaaaagagatcatagaaaaatcggtaaagaactagagttgttcactttttctaaaaaggttggtgttggcttaccactttggcttcctaaaggagcagctctgagggaaaggttagaaaattttctaaaaaaagctcaaatgaaagctggatacaagcaagttataactcctcatattgctaataaagaactttatgtaacatccggacattttcaaaaatatggttcagatagttttcagccaattgaaacgccagcagaaggggaaagctttttattaaagccaatgaattgtccacatcattgcgaaatatataaatcaagaccttggagctacaaggagcttccactaagatatgctgagtttgggacagtttaccgatatgaacaaagcggagaattgcatggtttaacaagagttagaagttttactcaagatgatgcccatattttttgtactccagatcaattaaataaagaatttaaaaacgtaattgaattagttttatatgtattcagttcattaggatttaacgaatttgaagctcaagtttcattaagagataaaaataattctgaaaaatatatcggaagtaatcaaaattgggagctcgcagaaaatgcaatcattagtgcaactgaagaaaaaaacttaaaatatgttattgaatatggtgaagcggcattttacggaccaaaattagattttatggttaaggatgccttaggaagaaaatggcaacttggaacaattcaagttgattataatctacctgaaagatttgaattaacttacaaaggagatgacaacaaacatcaccgccctgtaatgattcatcgggcaccattcggaagtctagagagatttgttgcaattttactcgaacactctgaaggtaaattacccatatggttagcaccagaacaagtaataatattatgtgtaagtgaaaaacacgaaaaatacgctaaaaaagttttaaattacctagaaaataacgaaattcgcgcgtctttagaatctagaaatgagacaattggaaaaaaaatcagacaa

SEQ ID NO: 303686 - DNA, 1544 bp, Unknown
  Bacterial polypeptide expressing nucleotide sequence isolated from the Sargasso Sea
aaccctggtacacaagtgactataggaccagtaatgaaaaatggtttttactatgattttgctcgtaaagagccttttacagaggatgatctagaaaaaatagaaaaaaaaatgtcagaaataattgataaagatgtaaaaacaaaaagagaagtttggaaaagagataaagcaataagtcatttcaaaaaaattggtgaaaaatataaagcagaaataatagagagtattccagagaacgaggagctaacagtctatcaccacggtgatacctggtatgatttgtgtagaggtccacacctagtttcgtctggaaaaatcggtaaagcatttaagcttacaaaagttgctggagcatattggcgtggagactcaaaaaatgagatgttacaaagaatttatggaactggttgggcgtctcaaaaagatttaaatgattatttaaaaagaattgaggaagcggaaaaaagagatcataggaaacttggcaaagaaatggatttatttcattttagagaagaaagtccaggatctgttttctggcatgagaaggggtgggcattatttcaaaaattaattaattatatgcgagcacgccaagatgcagcaggatataaagaagtgaatactccagaggtactagatagattattatgggaaaaatcggggcattgggaaaaatatggtgaaaacatgtatacttctgagactcctgacgaaaaagtttttgcaataaaaccaatgaattgcccaggtcatatacaagtttttaatcaaggtttaaaaagttatagagatttaccattaagaataacagaatttggtaaagtacacagatatgaaccatcgggagctttacatggacttctaagagtaagagcttttacacaagatgatgcacatattttttgttcagaagatcaaattacaagcgagtgtttaaatgtaacaaatttaattttagatatttataaagatttaggttttgaaaaagtggtgttaaaatatgctgacagaccagaagtaagagtgggcgaagataaagtttgggataaagccgaggcatctttattagaggcagtcaaagcaacgaaattagaatatagcataaataagggtgaaggtgccttttatggtccaaaaatagaatttgtattaagagatgcaattggtagagattggcaatgtggaacagtacaagtagatttgaacttacctggaagattagatgctacttacgttgataaagatggtacaaaaaaagttccagtgatgttacatagagcattgttcggatctcttgagagatttattggaattttaatagaaaattatgctgggaagtttccattttggatatctccactgcaaacagtggtaattccgatttcagaagactttgaggaatatgcaagtaaagtttccaaaaaaataaaagaagctgggatgagctcaatagttgatttaaaaaatcataatttgaactataaaataagagaacattctcttgcaaaagtccctattttattaatttgtggtaaaaa

SEQ ID NO: 303687 - DNA, 1351 bp, Unknown
  Bacterial polypeptide expressing nucleotide sequence isolated from the Sargasso Sea
catgtgggcaaggcatttaagctgcagaaactggccggcgcgtattggcgcggcgattccgacaacgaaatgctccagcggatctatggcaccgcctggcgcgacgagaaggagctaaagactcacctgctgatgttggaagaggccgaaaaacgcgatcaccgccgcctcggtcgcgaaatggacctatttcattttcaggaggaggccattgggagcgttttctggcacccaaagggctggacactattccagagcctgatcgactatatgcgccatcgccaaaacgaggccggctacttagagatcaatacgccggacattatggatcgcgggctgtgggagaaatctggccactgggaaaaattcagcgagaacatgtttacaaccgaggccaaggaagatcgcatcttcgccctgaagccgatgaactgtcccggcggagtccaagtctacaatcaaggaatcaagagctaccgagatttgcctttgcgcatggcggagttcggaaaggtgcaccggttcgaaccgtcgggcgcgctgcacgggttaatgcgcgtgcgggcattcactcaagacgatgcgcacatcttctgtgccgaagagcagatcaccgacgaatgcagggtcgtgtgccggctgattctggacatatacaaagagttcggtttcgacgatgtccgtattaagttctcggaccggcctgagaaacggattggctccgacgacatctgggacaaatccgaagccgcacttaaattagcagttgaagcgaccgggctggaatattcagttaatcccggcgagggagctttctacggacccaaactcgaattcgtactacgcgatgcaatcggccgcgactggcaatgtggcacgctgcaggtagaccttaatctaccggaacgcctaggtgccttctacattggcactgatggtgagaaatatcacccagtgatgctacatcgcgcgctgttcggatcgctcgaacgattcactggcatcttgatcgagcactacgccggcaagttaccaatgtggatggcaccggtgcaggcggtggtcgcgacgattacgtccgaagcggacgactatgctctcgaagtccgggacgcgctaaaagccgcgggtatccgcactgagatcgacatacgaaatgaaaaaattaattataaggtgcgtgagcatagccacacaaaggtaccggcaatgctagtggtgggccagcgcgagattgcggatcgcaaggtggcgctgcgtcggctcggcggcaaggatcaggatttccttgcgctcgacgaagcggtcgctagacttgccgacgaaagccggagcccggcggccacgtgac

SEQ ID NO: 303688 - DNA, 1810 bp, Unknown
  Bacterial polypeptide expressing nucleotide sequence isolated from the Sargasso Sea
tgctgtaaaaataaacgatgaaataaaagacattagcttacctattaatactgacgtatcagttgcaattttaaaaaaagatagtgaagaagctcttgaattaattcgacatgattgtgcgcatgtgatggctgaagcagttcaagaattgtttcctggtacacaagttacgattggcccagctatagaaaatggtttttattatgattttgcaagaaaagaaccatttactctatctgatcttccaaaaattgaaaaaaaaatgcatgaaattattcagcgtaatgaaagttttgtcagggaagtatggtctaaagatgaagccataaaatattttaaagataagggtgaaaactacaaggttgaattaataaatgatttatctgataatgaggaaattagtatttacaaacaaggtggttggttggacttatgccgaggtccacatatgatttcaacaaagcagattggtaaggcatttaaattaatgaaagttgctggtgcgtattggaggggagactcgtctaatgcaatgcttacaagaatttatggtacggcatgggcgactgagaaagatcttgaaaaacatctattacaaattgaagaagcagaaaaaagagatcaccgtaaacttggaaaagaaatggatctatttcattttcaagaggaggctccaggagctgttttttggcaccctaaaggttggacgttgttccaatctttaataaattatatgcgaaacagacaagataaggcaggttatgtagaaactaatacaccagacatgatggataagtctttatgggaaacctctggtcactgggataagtttagtgacatgatgtttaggactgaagcaaaggatgacaaaatttatgcaatcaaaccaatgaactgccctggtgctgtagaaatttttaaacaaggtttaaaaagttatagagaccttccatttttattatctgaatttggaaaagtacatcgttatgaaccttcaggagcccttcacggattaatgcgagtaagagcattcacacaagatgatgcgcatatattttgtacagaagatcaaataactcaagagagtaaaactgtatgtgacttgatacttagtatttataaagattttggttttgataatgtcagaattaagttttctgacagaccagaaaaacgagtaggggatgatgctgtttgggataaggctgaggctgcattaatgcaggccatggaagcaacaggtctcgagtacacacttaacccaggggaaggagcgttttacggtccaaaattagagtttgttttaagggatgcaattggaagagattggcaatgtggaacattacaagtagatttaaacttaccagggagactaggcgcaacttatgttggagaggatggaaataaaaaaacaccagttatgcttcatagagcgctctttggttctctagaaagattcacagggatacttattgaacattacgctggtcatctgcctctttggctttcaccattacaagtaatggtggcaacaattacttctgatactgatgattatgccattaacgttaaaaatgaattgatcaaaaatggtattagggctgatgtagatttaagaaatgaaaaaataggctataaaattcgagaacatagcaatagcaaggtccctataataatcgctgttggaaaaaaagagtctcaagaaaaaacaacttcagttagaagaattggatcagcagaaacaaaaacctttaaattagatgaaattgttactaccttatctaaagaaacaaaatcacctatagaataa

SEQ ID NO: 303689 - DNA, 1411 bp, Unknown
  Bacterial polypeptide expressing nucleotide sequence isolated from the Sargasso Sea
cctcggagaggactggtgggacctctgcgccggcccccacgtggagcacaccggccagctcaacgccaaggcttttgagctggagagcgtggcgggggcctactggcgcggtgatgaaaccaaagcccagttgcagcggatctacggcacggcctgggaaaccgccgagcaactggccgagcacaaacgccgcaaggaagaggccctgcgcagggatcatcgccgcatcggcaaagacctggatctgttctcaatcgaggatgaagctggtgctggattggtgttctggcacccccgtggcgcccgcatgcgtctgctgatcgaggagttctggcgccaggcccacttcgaagggggctacgagctgctctacacgccccacgtggccgatatcagcctctggaagacctccggccacctcgatttctacgccgagagcatgttcggcccgatggaggtggacgagcgggagtaccagctcaagccgatgaactgcccgttccacgtgctcacctacgccagcaagctgcgcagctaccgggaactgccgatccgttgggccgaactgggaaccgtgtaccgctacgagcggccgggtgtgatgcacggcttgatgcgtgtgcgcggcttcacccaagacgacgcccacgtgttctgcctgcccgagcagatcagcgacgagatcctgaaaattctcgatctcaccgagaggatcctctccaccttcgatttcaacacctacgagatcaacctctccacccgcccggagaagtccatcggcgatgacgccgtctgggacctggccaccaaaggcctgatcgaagcgctggaacgcaagggctgggcctacaagatcgatgaaggtggcggtgctttctacggccccaagatcgacctcaagattgaagacgccatcggccggatgtggcagtgctccaccatccagctcgatttcaacctgccggagcggttcaagctcgactacatcgcggctgatggcagcaagcagcgcccgatcatgatccaccgggccatcttcggctcgctggaacggttcttcgggatcatgaccgagaactacgccggcgattaccccctctggctggccccggagcaggtgcggctgctgccggtcaccgatgaggtacagccctacgccgaaagcctgctctaccagctcacccagacgggcgtgcgggccaccatcgatcgcagcggcgaccggctcggcaagttgatccgcaccggggagcagatgaagatccccgtgttggcggtgatcggtgccaaggaagccgagcagaacgccgtgagtctgcgcagccgcagggatggtgatctcggtgtggtcgctgtggccgatctgctccgggccgctcaaaacgccaacagccaacgtgccgcaggactg

SEQ ID NO: 303690 - DNA, 954 bp, Unknown
  Bacterial polypeptide expressing nucleotide sequence isolated from the Sargasso Sea
ctccagatgaaaaggtttttgcaattaaacctatgaattgtcctggatgtatagaagtttttaatcaaggtcttaaaagttataaagacttacctttaaagatgtctgaatttgggaaagtacatcgttatgagccttcaggggcactacatggtttgttaagagttagggcatttactcaagatgatgctcatattttttgcactgaagatcaaattactaaagaatgtttgatagtaacaaatcttattttagaaatttataaagatctaggtttcgaaaatgttattctaaaatattctgatagacctaatttaagagttggagacgatagtgtttgggataaagctgaaacagctttattagaagcagttaaagcaactaaactagaatatagtataaataagggtgaaggtgcattctatggaccaaaaattgaatttgttttaagagatgcaataggaagagattggcaatgtggaactttacaagtagattttaatttaccaggaagattaggtgcttcatatgttgataaagatggttcaaaaaaaattcctgttatgatacatagagctttatttggttcacttgaaagattcattggaattttaattgaaaattatgctggtaaatttcctttttggatttcaccgcttcaaacagttgtaattccaatatctgaagagtttggtgattatgcaactcatatttcaaaaaaaataaaagaagctggaatgagttcttttgttgatttaaaaaaacagaatttaaactataaaataagagatcattctcaagcaaaaatacctcttttagtaatttgtggtaaaaaagaagttgacagtaactctgtaacgattagaaggttggattctaataaacaagaaaatatggatttaaattcgttcttaaaaactttctctgctttaaataaagcatcatcaaattaag

SEQ ID NO: 303691 - DNA, 1360 bp, Unknown
  Bacterial polypeptide expressing nucleotide sequence isolated from the Sargasso Sea
agagtcctcaagtaaaattggtaaggcatttaaattaacaaaagtgtcaggagcttattggcgaggggactctaataacgaaatgttgcaaagaatatatgggacaagctgggctaatcaaaaggaactggatttgtatcttcaaagaatagaggaagcagaaaaaagagatcatagaaaaatagggaaagagatggatttatttcatttcagagaagaaagtcctggatctgtattctggcatcaaaaaggatggagtttatttcaaaaactcatttcatatatgagaatgaagcaagaaattgcaggatataaggaaataaatactccagaaatattagatcgctccctgtgggagaaatcaggtcactgggaaaaatttggtgccaatatgtatacttctactacacctgatgaaaaagtttttgctataaagccaatgaattgtccaggttgcgttcaggtttttaatcaaggcttaaaaagttatcgtgatttaccactaaaaatgtcagaatttggaaaggttcataggtatgaaccttctggagcgcttcatgggttattgagagttagagcttttactcaagatgacgcacatattttttgtacggaagagcaaattactgaggaatgcttaactgtaactaatttaatcttagaaatttataaagatttaggatttgaagacgtaattttaaaatattctgatcgaccagaattaagagttggtgatgatcaagtttgggataaatcagaggctgctttactagaagcgattaaagcaacaaaattagaatattctataaataagggtgaaggagcattttatggtccaaaaattgaatttgttttaagagatgcgataggaagagattggcaatgtggaacgttgcaagtagatttaaatttgccagggagactaggtgcttcatttgtagacagcgatggaaataaaaaagttcctgttatgttacacagagcattatttggatctttagagagatttattggaattttaattgaaaattattctggaaaattacccttttggctttgtccaactcaaacgatagtaattcccatctcaagtgattttgatcactacgctaaacaagttaacaatcagttaaaaaaagtagggcttgcttctgaagtagatttaaaaaaccacaatttaaattataaaattagagaacattcgttaaccaaagtccctatgctacttatatgtggaaaaaaagaagttgacagcaacactgtaactattagaagattggactctaaaaaacaagaaaatatggatttaaaagaattcttaaaaaaatattctgctcttaataaagcaccctcaatctaa

SEQ ID NO: 303692 - DNA, 670 bp, Unknown
  Bacterial polypeptide expressing nucleotide sequence isolated from the Sargasso Sea
gtaatattaaaatactcagaccgaccagatctgagagttggagatgatgctgtatgggataaatcagaggctgctcttttagaggcaattaaagaaacaaaactagaatacactataaataaaggtgagggtgctttttatggtccaaaaattgagtttgttttaagagacgcaataggaagagattggcagtgtggaaccttacaagtagatttaaatttacctggaagattaggagccacttatgttgaaaaagatggatcaaagaaaatacctgttatgttgcatagagcattgtttggttccttagagagatttattggaatcttaattgaaaattattcaggtaaattacctttttggctaacaccattacaagtagttgtaataccaatttcaagtgactttgatgactattcaaaaaaaattaatcatgaattaaaaaaagttggtatctcaagtgaagttgatttaaaaaatcataatttaaattataaaattagagaacattcattgttaaaagtacctttattacttatttgtgggaaaaaagaagttgactctaatacagtaactattagaagattggattctaaaaaacaagaaaacatggattttaacgagtttataaaaaaatactctgctttaaacaaagcgccttcaatttaag

SEQ ID NO: 303693 - DNA, 784 bp, Unknown
  Bacterial polypeptide expressing nucleotide sequence isolated from the Sargasso Sea
agcttttacgcaagatgatgcacatattttttgcacggaacaacaaattaccgaagagtgtttaactgtaactaatttaattttagaaatttataaagatttgggatttgaagatgtaattttaaaatattctgatcgaccggaattaagggttggtgatgaccaagtttgggataaatcagaagcggctttattagaagcaattaaagcaacaaaattagaatattctattaataagggtgaaggagcattttatggtccgaaaatagaatttgttttaagagatgcgattggtagagattggcaatgtggaacgttgcaagtagatttaaacttaccgggcagactaggggcatcatttgttgacagcgatggaaataagaaagttcctgttatgttacacagagcattatttggatctttagagagatttattggaattttaattgaaaattattcaggaaaattacctttttggctatgcccagttcaaacaattgtaatccctatctctagtgattttgatgattatgcaaaagaagtaaacagtcagctaaaaaaagttgggatttcttcagaagtagatttaaaaaatcacaatttaaattataaaattagagaacactcattaaccaaagtccctatgctacttatatgtggaaaaaaagaagttgacagcaacacagtaactattagaagattggattctaaaaaacaagaaattatggattttaaagaatttttaaaaaaatactctgctcttaataaagcaccttcaatttag

SEQ ID NO: 303694 - DNA, 981 bp, Unknown
  Bacterial polypeptide expressing nucleotide sequence isolated from the Sargasso Sea
tgtttattacggaaatcgatgaagaacattctaatgagaagaggacaaatgcccttaaaccaatgaattgtccttgccatgttcaggtatttaatcagggactgaggtcctataaagatctaccaataagatatgccgagtttggctcatgtcatagatatgaagcttcaggaacacttcacggtctcatgagagtcagaggatttactcaagatgatgggcatatattttgtactgaacatcagattcaagatgagaccaagaaatttatagaattactaacggacatatatgctcaactaggatttgatgagtttgatataaaactttcaactaggcctgagattagggctggttcagagcaagtttgggatagagcggaactagcgttggagaatgctataaaaaatctgaatttaccgtatgaattagttgatggtgacggtgctttctatggtccaaagttagactttgttcttattgacgcattaggcagggaatggcaatgtggaacttttcaactagattttatcttgcctgagagattagatgcaaaatttgttgactctgatagtgaaaaatacaacccagtattaattcacagagccgttctaggttctttcgagagattcctaggtgttttgattgaacattatggcggagctttacctacttggttgtcaccaatccaggcagaaattctcaatattactgacaaacaagccgaatattgctcaaaaataggcaatttattgaaaaaaagtggatttagggctcattcggacttgaggaatgagaagatcacttataaaattcgcgaccactctatgcagaagacaccttttcttttgatagcgggcaacagggagatggaaaataatacgatttctgtacgagctagaggaggggaagatcttggagaaatgtcgattgatgacttcatccaaaaacttcagaatgtagtggataaaaaaatatagt

SEQ ID NO: 303695 - DNA, 1384 bp, Unknown
  Bacterial polypeptide expressing nucleotide sequence isolated from the Sargasso Sea
ctttaagcttttatctacctctggtgcttactggcgaggaaatgaaaataataaaatgctccaacgtatctatggtacagtcttttctactaaagatgcattaaagactcatctacaaaatatcgaagaagcaaaaaaaagagaccatagaaaacttggaaaagagttaaagctctttgcatttgatgatgaggtaggaccaggtcttcctttatggttaccaaatggtgctgtgatgattgaggaattagaaaagctagccaaagaatcagaaatgttagctggttatgagcaggttagaactcctcacctcacaaaaggaaaattgtatgagcggtccggacatctagaacactataaggactctatgtatccagctatggatgttgatggtatagaatattttgtgaaaccgatgaactgccctcaccatcacaagatatatgcgtcataccctcgcagctatagagatttacctctacgattagcagagtatggcacctgctatagatatgaaaaatcaggtcaattatttggtttaatgagggttcgaagtcttcagatgaatgatgctcacatatactgcactaaagaacagttcaaagaagaatttttagccgtctgcaatatgtatcttcaatattttgatatatttggcattgaaaaatactctatgcgcttgagtctccatgataaggatgagttagggaaaaaatatgtaaatgaacctgaattatggattgagaccgaagggtgggttagagaagctcttatagagggtggtctagattttgaagaggttccaggtgaagctgccttttatggtccaaaaattgatgttcaagtttggagtgctattggtaaagaattcactctggcaactaatcaagtagattttgctatacctgccaaatttgatcttaactataccgatgagaagggttctgataacacaccgctatgcattcatagggcacccttaggcacacatgaaagatttattggattccttatagagcattttgggggtaatttcccgctctggcttgcacctgtacaagtagcagtccttcccttatcagacaaatttttagattatggaaatagagttgttaaagtattaaaagaatcaggaatacgagttaaattaaacgaccgcgctgataaaataggatcaaagatcaggcaggctgaacttgaaaagatcaatgttatgcttatagtcggcgaaaaagaggcggagaacaactccgtttcagtcagaaagcgttttgaaggagatacgggtattatacccttagaagatctcagaaaccagctattgaatgaaataaaatataggagactaactcataggaaaaaaacagaagcaacggctgaatga

SEQ ID NO: 303696 - DNA, 1458 bp, Unknown
  Bacterial polypeptide expressing nucleotide sequence isolated from the Sargasso Sea
aaagtgatcgaattactgcatacaagcaaggggattttattgatctttgcagaggaccacacactcccagtacaggaaatttaaaatattttaaactgctatcaacgtcaggtgcgtattggcgcggtaatgaaaataataaaatgttacagcgaatttacggtacagcattctctaaaaaatcggaactaaaaaagtatcttaattttttggaagaagcaaaaaaacgagatcatagaaaaataggtaaagaactagaaatttttacctttgatgaagaggttggaccaggattaccgctatggcttccaaatggcggagttattttaaatgaattagaatcattagctagagaaacagaagataggcatggctaccatcaagtaagaactccacatttaactaagggcgacttgtataaaaaatctggtcatttagagttatataaagatgcgatgtacccagctatggatgtagatggaatggattattatgttaaacctatgaattgtcctcatcatcacaaaatttacgcagcgtccccaaaaagctacagagatcttccttatcgcatatctgaatatggaacttgctatcgctatgaaaaatcaggtcaactatttggcttgatgcgggttaggagcatgcagatgaatgatgctcatatttattgctctaaagatgattttagtcaagaatttttagatgtttgcaaaatgtatttagaatattttgatatatttggtattgaaaaatacgaaatgagactaagtgttcatgataaagaaggattgggtaagaaatatattgatgagcctgatttatggattgaaacagaaaatattgtaagaagaacactcacagagggtgagattaattttacagaaatttctggagaagcagctttttatggaccaaaggttgatgttcaggtatggagcgctattggaaaagaattcacgcttgcaaccaaccaagttgattttgcaattccaaagagatttggattatcctataccgatcaagacggtaaagaaaaaactcccctatgtatacatagggcccctctaagcacgcacgagagatttgttggttttttaattgaacattatggtggtgattttcctgtttggttgtcacctatacaaattgcgatattaccagtgtcagaaaagacgaatcattatgcttatgaggtagataaacaattaacgcaagctggttttcgtacaacgatcgatgataagcccgataaaattggatcaaaaattagaaatgcagaattgaataaaattcctattatggcagttattggtgaaaaggaagcccaaaataataccctatcaataagaagaagatttgttggggatcaaggtgaattgtcaattgacaaaatcattaatgatttaactaaagaaattaaacaaaggagtcaaccttatcggaaaagcgaataaa

SEQ ID NO: 303697 - DNA, 1287 bp, Unknown
  Bacterial polypeptide expressing nucleotide sequence isolated from the Sargasso Sea
atgcggtgacgttcccgaccgaaaagctcatgaaggagtacaacatgcgcatcgaagaggcgaagaagcgcgatcaccgtaccatcggcgtcaaccaagagttgttcttcttccatcaactctctccgggttcgtgcttcttccaaaagaatggcgcgcgcatctacaacaagttggtggaattcatccgcgaaaagtactgggagtatgaatacgacgaggtgattacgccgaacatttacaactttgatctttggaagacttccggacacgcggcgcactacaaggagaacatgttcagcttcaacgtcgaaaaggaagaattcggtctcaagccgatgaactgcccgggacactgcgtcatgttcgcgcaccgccgccgcgcgtaccgtgaacttcccatgcgcgtggccgatttcggtgtactccaccgtaacgaattctccggcgcgctccacggcttgactcgcgtgcgtcgattccaacaagacgacgcgcacatcttctgccgagaagatcaaatggaagatgagcttagtggcttcctcaagttcttggacgaggtgtacgaggtcttcggactcacgtacgagatgaagttgtctactcgtccggaaggatacttgggtgaattggaagtgtgggacaaggcggaggcggctctgaaggcgtcgttagatcgaagcggcagagagtggaagttgaacgaaggcgacggcgctttctatggaccgaagattgacatcacggtatttgatgctctcaagcgtagattccagtgcgctacggtccagctcgatttccagctccccatcagattcgacttgtcgtacgtcgacgagaacaacgatccggtcaagcccatcatcatccacagagcgatcctcggctctgtcgagcgcatgttcgccatcttgaccgagcacttcgccggtaagtggccgttctggttgtccccgaagcaagtcatgttggtgcccatctccgaagcgaacaaggattattgctttgagctcaagaagtcgctccgcaagtcgggcttctacgtggaggtggacgcgtccgaccgtaagatgcagaagaaggttcgtgaagcgcaactcgaacagtacaactacattttggtgtgcggtgatagcgagcaagcgaacggtacggtgaacgtgcgtacgcgtgacaacaaggttcacggagaacacaagctcgaggctttgatcgaggtgctcactcgcgagcgcgacacgcgaagcctcacgtgttgcttcgaagataagacgaacgagtagg

SEQ ID NO: 303698 - DNA, 1171 bp, Unknown
  Bacterial polypeptide expressing nucleotide sequence isolated from the Sargasso Sea
acattcactatttcatatacaagaagaatctccagggatgattttttggcatccaaatggatggacaatctaccaagtattggaaaagtacataagagaaatactcaaaaaaaatgattatttagaaatcaaaacaccgcaagctgttgataaatctctttgggaaaaatccggtcattgggaaaaatttagagacgatatgttcactactgcttcagaaaatcgaacatatgcaattaaaccaatgaattgtccatgccatattcaagtatttaatcaaggtttaaaaagttataaggatttacctattcgtcttgctgaatttggttcttgtcacagaaatgagccctctggtgcactacatggcttaatgagagtaagaaactttactcaagatgatgcgcacatattctgcacagaagagcaaattcaagaagaggtatcaacttttatagatcttgttttcgaggtttataaaacttttggttttgatgaaatcattatcaaattatcaacccgtcctgaaaaaagggtaggtagtgaagagatttgggataaatcagaggatgctcttaccaaagctctcgataataagaacctaaaatgggaactccagccaggagagggggctttttatggtccaaaaatagaattttccttaaaagattgtctaaatagagtttggcaatgcggtactattcaggttgatttctcaatgcctattagattggatgccacttatgtagatattgataatgaaaaaagaaatccagttatgcttcatagagcaattttaggatcctttgaaagatttatcggaatcttaattgaacaatatgaggcgaaatttccaatttggcttgcgccttatcaaataattttattgagcattactgatagaaatattgaaaagtgtttaaagtttaatgaattaataaataataatggttaccgatcaaaagttgatgttaggaatgaaaaaataggatataaaataagagaggcaactcttgggagagttcctttaattgcagttattggagataaagaagaggaaattgattcagtcgctttaagagctttggatggaacaaatttagggattttcgacctacctaatttatacaaattaatggatgaattaatagaaaaaaaagggagaacagaataa

SEQ ID NO: 303699 - DNA, 991 bp, Unknown
  Bacterial polypeptide expressing nucleotide sequence isolated from the Sargasso Sea
tgggaaaaatttggagcaaacatgtatacttctgaaacaccagatcaaaaaatatttgctatcaaaccaatgaattgtcctggttgtgttcaagtatttaatcaaggcttgaagagctacagagatttgccttttaaaatgtctgaatttggtaaagttcacagatacgaaccatcaggcgctttgcatggacttttaagagtaagagcatttacacaagacgacgctcacattttctgtacggaagatcaaattactgaggagtgtttgtcggttacgaatttaatattagaaatttataaagatttaggatttgaaaatgtaatactaaaatattcagatagaccagatttaagagttggagatgatgcagtatgggataaatctgaggcagcattaattaaagcagtagaagcctcaaagttagaatatagcatcaataaaggcgaaggcgctttttatggtccaaagatagaattcgtattgagagatgcaattggacgagactggcagtgtggtactttacaagttgatttaaatttaccaggaagattaggagcaagttatgttgataaagatgggtcaaaaaaaattccagttatgctacacagagctttatttggttcacttgaaagatttattggaattctaatagaaaactatgctggtaaattgcctttctggatttcaccacttcagactgttgtaattcctatatcagaggactttaatgaatatgctttatctgttcataaaaaaattaaaaatgcaggaatttcttctgatgtagatttaaaaaatcataatttaaattataaaatccgtgaacattctaactcaaaggtaacaatgttattaatatgtggaaaaaaagaagttgactccaacgctgtaactattagaagattggattctaataaacaagaaaatatgttaatagacgaatttattaaaaaatacactgccttaaacaaggctccttcaatttagt

SEQ ID NO: 303700 - DNA, 1894 bp, Unknown
  Bacterial polypeptide expressing nucleotide sequence isolated from the Sargasso Sea
tactccctttgaaatagcagaaagtatcggtgctcgtctagccaatgatgcattagcagcgcaggtcaatagtaaattagttgatttaaacgtacctattgatactgatgcagatgttgccatattgactggagatagccctgaaggacatgctgttctattgcatagctgcgcccatttaatggcacaggctgtaaaagagttttggccgaatgcaaaacttactattggaccagccatcgaaaatcgattttattatgattttgatgttgattttacgtttacggaaaatgatttatcaaaaattgaacaaaaaatgcacgaacttgcaaaagaagattatccctgtatacgaaccaatttatcacgtgatgaggctatcaatatttttaaagatatgggggaagattataaattagagataattcaaagcattgaatctgatgagcaattatcttcctatgcacaaggtgattttgttgatttatgtcgcggtcctcatataccatccattgggaaattaaaatattttaaattattaaatatatctggagcctattggcgtggggatgagaataataaaatgttacagcgtatatatggcactgtatttacatctaagaaaaagctaaaccaatacttgaactttcttgaagaagctaaaaagagagatcaccgaaaattagggaaagagctttctttatatgcgtttgatgaagaagtgggtcctggtctgcctttatggttgccaaatggtgctgttattatggatgaattagagacacttgcaaaggaaactgaacgtacggctggttttcatcgagttcgtactcctcatttgacgaaaggttcactgtatgaaaaatctggtcatttagatcattatcgagatgcaatgtatccaagtatggatgttgatggaacagagtactatgtaaaacctatgaactgtcctcatcatcataaaatttatgattcaagccctaagagttatcgtgatttaccagttagattatcagagtatggtacgtgttatcgatatgaaaaatctggtcagttatttggcttgatgcgtgtgagaagtatgcaaatgaatgatgcgcatatttattgcactgcaaagcagtttaaagatgaattccttgctgtatgtaatatgtaccttcattattttgatatttttggaatagacaaatatcagatgcgcttgagtttgcatgatccagctggtctaggaaaaaaatatattgatgagcctactttatggcagcaaacagaatcagaagtacgtcaggcacttattgaaggggagattgaccatgtggaaatttctggtgaagctgcattctatggtcccaagatagatgtacaggtttggagtgctattggaaaagaatttactttggctactaatcaagtagattttgcaatcccaaaacgatttggattgacatacacagatgaagaaggtaaagaacaaacaccattatgtatccatcgtgcacctttaagtacccatgaaaggtttattgggtttcttattgagcattacggtggcgattttccattgtggcttgctccagtgcaagtagccgtgttacctatttctgataaggttcttgattatgcaaaaatggttgaaaaaactttatatgaatcaggaattcgtgttcaattaaatgcccaagcagaaaaaatgggtgcaaaaattcgtcaagcagaattacagcgaattaacgtaatgttagttgtaggtgaaaaagaagcagatagcaatcaagtatctgttagaagacgatttcaaggggatttaggtatgcaaccacttgatggggttgtgaaagaattaaataatgaaataaaaactaggaggaacacttatcgcactaattga

SEQ ID NO: 303701 - DNA, 1426 bp, Unknown
  Bacterial polypeptide expressing nucleotide sequence isolated from the Sargasso Sea
aaaaatcataaaaacaaaatcagcaattactaaaaaattagtttcaaaaaaagaagctttaaagatatttaaatcaaacaaagaaccatataaagaaattattattaatgagtcagatcaagatgatggttttcaactttattatcaggatgacgaggagtttgttgatttatgtagaggcccacatttaccaaatttaggatttattggttcatttaaattaacaaaagtatctggcgcatattggaagggtgattcaaagaactcaatgctaacaagaatttatggaacagcatttagtaatgacaaagatttacaaaatcatttagagaacatagaagaggcgcttaagagagatcatagaaaacttgggaaagagatggacttgtttcattttcaggatgaagctccagggatggttttttggcatcctaatggctggactgtttatagaaagctacgaaattttgttagagatagactaaaagaaaataattatattgaagtaaatacacctcaagttattgatagaaaattatgggaagcctctggtcattgggacaaatatagagaaaatatgtttattacagaaatcgacgaagaacatgctaacgaaaaaagaattaatgctctaaagccaatgaactgtccaggtcatgttcaaatttataatcagggtattaagtcatataaagatttgcctttgcgatatgcagaatttggtttatgtcatagatatgaaccctccggaactatgcatggtttaatgagggtaagggcctttactcaagatgacggacacattttttgcactgaggaccaaatagaatcagaaacaggcttattcattaaattcctttcaagcatatacgccgatttaggatttaaaaattttgatatcaaattatctaccagaccagagatgagagttggctcagatgaaacatgggataaagctgaagaggctcttgaagcagcaattaataatttgggatatccatatagaattgatgaaggtgatggtgcattttacggaccaaagctcgattttgttctcactgatgcaattggaagagaatggcagtgtggtacttttcaattagatttcaacctagccgaaaggcttgatgccagttatgttggagaagacggaaaaaaacatataccagttatgatacatagggctgttttagggtcatttgagagattcattggtatcttaattgaaaattatgctggaaagcttcctttttggttatctcctcaacaagttgttgtggcatcaattatttctgatgtaaatgattattcattaggaatcgtggaatctcttaaaaaagagggcattctggcagaagctgacctcaggaatgaaaagattagttataaaattagggagcatagtaatagaaaagttccaattatt

SEQ ID NO: 303702 - DNA, 540 bp, Unknown
  Bacterial polypeptide expressing nucleotide sequence isolated from the Sargasso Sea
gggcattttacggtccaaagcttgaattcattcttaaagatgcaataggtcgagaatggcaatgtggtactttgcaagttgatttgaatatgcctgaaagattaggtgggcattttattgctgaggatggacaaaaatataatccagtaatgctgcacagagcactctttggatcattagagcgtttcacaggaatattaatagaacattatgctggtgctctcccactatggctttcacctgtacaagcggtagttacaccaataactactgaaataaatgaatacggtgaagaagtttatgaaagtttaaaaaacgcgggaataagggttgaaaaagatctacgtaacgaaaaaattagttataaaattagagagaattcacttaaaaaaattccatttcaattaattcttggaaagaaggaaattgaagaacgttctataacaatgagagcatttggaagcgataagcaagaaaaaataaagtttgaaaatttaaatgatttttttataaaaaaatgtatgatgccatcacaataat

SEQ ID NO: 303703 - DNA, 1162 bp, Unknown
  Bacterial polypeptide expressing nucleotide sequence isolated from the Sargasso Sea
tatggaaaatgaagaaaaatttatagacacattacgtcacgatacggcccatgttcttgccatggctgttcaagagttattccctgaaacacaagtcactattggacctgttattgagaatgggttctactatgactttgatcgcaaagacccttttactgataaagaccttagtgtcatcgaaaagaagatgaaagaaattgtgaatagagatgtgaagacgtcctttaaagtaatgaaaagagaagatgcaattaaattatttttagataagggtgaaaaatataaagttgaaattattaaagatttgcctgaaagtgaagagttaaaagtatactaccatggtgattggtttgatttatgcaaaggtccacacttagaatcaactggaaagattggtaaggcttttaaattaacaaaagtcgcaggagcatattggaggggtgactctaataatcctatgctgcaaagaatatatggaacggcatgggaaactgaagaagaattaaaaaactacttaatgcttttagaggaagctgaaaaaagagatcatagaaaacttggtaagcaacttgatttgtttcattttcaagaagaagctccaggatctgttttctggcatgcaaaaggatggaccttattcagaacattaatcgattacatgaggcatcgccaagaggaagctggttatgaagagattaatactcctgatattatggacaaatctctatgggaactttcaggacatttagaaaaatttggtgacaacatgttcaccactgaagcaagggaagatagagtttatgcattaaagccaatgaattgtccaggatgtgttcaagtatataagcagggattgaaaagttatcgagatttgccattaagagttgcagaatttggtaaagtgcacagatatgaaccatctggagccctgcatggtttgatgcgagttagagcatttacccaggatgatgctcatatattttgtactgaggatcaaattactgaagaaagcaaaaaagtttgcgaccttgttctcagtatttataaagattttggatttgataaagtttcaattaaattttctgatagacctgagaaaagagttggcagtgatgcaatatgggataagtccgaagaagctcttcgacaagccatggaa

SEQ ID NO: 303704 - DNA, 1264 bp, Unknown
  Bacterial polypeptide expressing nucleotide sequence isolated from the Sargasso Sea
actgcatggaataccgaaaaagaattaaataaacatttacatgaattagaagaggctgagaaaagagatcacagaaaaattggaaaagagatggatttatttcattttcaagatgaagctcctggaatggtattctggcattctgatggatggaccatatacagaaatttaagaaattttgttagatcaagattacaagaaagtgactacatagaagtaaatactcctcaagttatagacagaaagttgtgggaagcttcaggtcattgggataaatatcgtgagaatatgtttatcactgaaattgatgaggagcatgcaaatgagaaaagagtaaatgctttaaagccaatgaattgtcctggccatgttcaaatttacaatcaaggaataaaatcatacaaagacttaccattgaagtatgctgaatttggtctttgtcacagatatgaacgctctggaactatgcatggtttaatgagagttcgagcatttacacaagatgacggccatattttttgtaccgagaatcaaattgagtctgaaacgggactattcattgaatttttatctagtctttattcagatttaggttttaaagaatttgatattaaattatctactagaccagaaatgagggttggttcagatgaaatatgggacaaggcagaagcagctctagagtcagccataaaaaacttaggctatccatatagaattgatgaaggtgatggagcattttatggtccgaaacttgattttgtccttactgatgcaattggaagggagtggcaatgtggtacttttcaattggattttaatttggctgagagactggatgctcaatacgttggagaggatggcagtaagcattatccagtgatgattcatagagcagttttaggttcttttgagaggtttataggtattctcatcgaaaattatgctggaaaacttccattttggcttgctcccaaacaggttgttgttgcttccatagtatcagaagtcaatgactatgctgacgaaatagcaaatatgttaaaaaaacaaggtattcgtgctgaagttgatctaagaaatgaaaaaatcggctataaagttagagaacatagtaccaaaaaagtacctttcatatttgccattggaaacaacgaaaaagctgaaagaagtgtatccatcagacaaattggaagcacagatactagttccatgtcattagatgagggaattgagtttatttgctgtcagaacaaagtttaaa

SEQ ID NO: 303705 - DNA, 619 bp, Unknown
  Bacterial polypeptide expressing nucleotide sequence isolated from the Sargasso Sea
tggtttatgctgtctgacagccctcctgaaagagatttacagtggactgatacaggaattgcatcttcttttaaatttattaataaattatacgattttattggtaaatttaaggaatatagatcaaatgaaacaaatgactctaatatattagaaagtctaaaaattattattaatgaagttaccaataacattgagggttttcagtttaacaaatcagttgccaaaatatatgagtacgtaaacattttaaatgaagccctgtcttttaaaaaaatttctacaaaagactttgagtggtcattgaaaaaactttcacttattttacaaccctttgttccacatataagtgaagaaatgtggtcagctttaaataataatacactgtgtattaaccaacactggcccatagaagaggtaagaaaaaaagacaattttaaaattgctgttcagattaatgggaaaacgaaagagataattgagataaacggaatattgtcggaggcacagattttggatttagttaaaagcaatgataaaataaagaaaagtttagtagggaaaaaaattacccgagaaatttatgttccgggaaaaattgttaacttagttttatgat

SEQ ID NO: 303706 - DNA, 634 bp, Unknown
  Bacterial polypeptide expressing nucleotide sequence isolated from the Sargasso Sea
gcggccgtggaaggcagctaccgcttcctgcgccgggtgtggaacttcggcctcaagctcgccgccatcgaccgcgatgccgccatggccagcgtggccggtgccaaactgcaggacgtgcagtttggcaaggaggccaaggccctgcgcctggagatccacaacgtgctcaagcaggtggactacgactaccagcgcatgcagtacaacaccgtggtctccggcgcgatgaagatgatcaacgcgctcgaagatttcaaggccatggactcggccggtgcccaggtggcgctgatcgaaggctttggcatcctgctgcgctgcctctaccccgccacgccccacatcgcccacagcctgtggacgggcctgggctacgccggtgcgttgggcgacctgctcgatgcgccctggccgcaggtggatgccggcgccctggtgcaggacgagatcgaactcatgctgcaggtcaacggcaagctgcgcggatccatccatgtgcccgcccaggccgacaaggccgagatcgagcgcattgcgttggccagcgaggcctttgtggcccaggccgcaggcgctcatccgaaacgcgtgatcgtggtgccaggtcgtctggtgaacgtggtggtctgac

SEQ ID NO: 303707 - DNA, 598 bp, Unknown
  Bacterial polypeptide expressing nucleotide sequence isolated from the Sargasso Sea
ttggattgggaaatcatttggtgctgagattgaatataaaattgatgctagcaaagattcactaataaccttttcgacaagaccagatactatcttcggagtatcttttcttgcaatatctcccaatcatccccttgcaataaagattgctaaagataatgaaaaaatatcgaactttctcgaaaaatgcaaagaaactaaggctgcagaagctgatatggcaaaggcagaaaaacttggtattgatacaaatctaagagtaactcatcctttaactaaagaaaaattaccagtatggattggaaattttgtattgcttgactatggaacaggggttgtaatgggagttccagcacacgattcaagagattatgaatttgcaaaaaaatataatcttaatatcaaagaagtcattcaaaataatgaagaggagttaccaaaaactgaaaatggaattttaataaattcagataaatttaacggtctttcatcagaagaaggatcaaaaaaaattatcgaagaattagttaaattaaaatctggtaaacagcttattcaattcaggctaagagattggggggtaagtaggcaaagatat

SEQ ID NO: 303708 - DNA, 523 bp, Unknown
  Bacterial polypeptide expressing nucleotide sequence isolated from the Sargasso Sea
cgttctgaagatgcttttaaggattcaaagacttctattgaggaggaaattaaagagttgtccattaaaattaatgacgactacgaaaaaagattgaatcttaatactgtagtttcatcgtgtatggaaatatttaataaattaaataaaagaatggaaaaaaataaaatcacagctgatgaaaatgaatttttaaaagtatatgaatttttacttatttctttatctcctattgcaccacatatttgtgagtatctttacgaagatgtgttagaaaaaaattttaatagcgcttgttggccgaaagaagatttttttcaacaaaaaaggagtgaagtaaattatctagttcaagtaaacggtaaagtgagggcaaatatagttctgcatgtcaatcttaatcaaagtgaagttgaaaaagctgtatcaaaacatccaaatatttctaaatatctgcaagggaatgaaataaaaaaaataatatttataaaagataaattaataaattttgtaaatggttaga

SEQ ID NO: 303709 - DNA, 94 bp, Unknown
  Bacterial polypeptide expressing nucleotide sequence isolated from the Sargasso Sea
atgacatttataaaaccccaagataaagtagattcaaaacaaaattggtatgcattatcaatgtttccgtatccttctggagatttacatatag

SEQ ID NO: 303710 - DNA, 799 bp, Unknown
  Bacterial polypeptide expressing nucleotide sequence isolated from the Sargasso Sea
ccttagtgatacagttatagcgtctaacctggtggagggcagcatatcgtggttgtactatgccgatcgtttgcttgagctgcccgttggaatggtggctatcgcattaagtaccgttatgttgccccatctatctcgactatccgccggtggttcagaagacggtttcagtagtttaatgaattggggtgttttgatgggtttggggttgggattgcctgccgggatagggctttatattctatctgttcccttgttgtctgtgctgtttatgagtttcgagggaggggccatgacagactatgacgtcagaatggctggcctcgcgctcgagatgtttgcaattgcgctacctggttttgtactagtaagggtattgtccagcggtttttttgcaaagaaaaatactaaacaaccttttcgttatgcctcagcggcggtagcagttaacctgttcgttagtttggctacttttaaaactttggggcacgtaggtttggcgttggcgactgctttatctgcatggacaaatgtctttttgttatattttggtttgataaagcataaaatcgcagttataaaagttgtgacacctcaactggtgaaggtgtatctgttgtgtctcttaatggcgctaggtttgggcatttggagcccggaagatttgatatggctttctcaagatcctctctatcgattggctaaattgttgattgccatattggttgtattgggcttgtatttcgttgctttgtttggtctaggttttagaggtcgagatttaaggcctggtatctaa

SEQ ID NO: 303711 - DNA, 829 bp, Unknown
  Bacterial polypeptide expressing nucleotide sequence isolated from the Sargasso Sea
taatcaagcgtttattccggtcatggttgagttcaaggctaaaggacgagaggagctgaagatatttttatcatcagtttctggactgtttggtgctttactaatcatttttgtttttctcgggcttattggatctgacctcctggtaaagctatttgcgcctggatttatgtcagaccccgaaaagctctctcaaacaagcgacttggttcgtattatgttcccatacatcgggttcatttctttaacagcatacgcgggcggtgtcttgaatgcacatgatcgctttgctgtgcccgctattacaccagttttgctcaatttgtgtttgattattgcatcgctactttggatttgggaggtttttgatggtctagcagtggtggtattagcttgggcagtcttgtttgccggagtagctcagctggcttatcagattccatcactgggcgccttgggccttcttgttaagccaaacctaaattacaggcactcgggtgttaaagaaatgggtgttttaattttgcctgctatatttgcttcttccgtaggacagataaacgcattagtgaatacagttatagcgtctaacctggtggagggcagcatatcatggttgtactatgccgatcgtttgcttgagctgcccgttggaatggtggctatcgcattaagtaccgttatgttgcctcatctatctcgactatccgccggtggttcagaagacggttttagtagcttaatgaattggggcgttttgatgggtttggggctgggattgcctgccgggatagggctgtatattctatctgttcccttggtgtctgtg

SEQ ID NO: 303712 - DNA, 469 bp, Unknown
  Bacterial polypeptide expressing nucleotide sequence isolated from the Sargasso Sea
atgtgcgtcacacggcttgcaagtcaggctgcactcggtatcagggttacctcatatcgctcccctctcccgcttgcgggagaggggctgggggagagggcaaaaaaggttcaaggaggaaccatgacactactcgacaacgccaagcgccttcgtcatgagatgaccgatgccgagcaacggctctggtattacctgcgtgctcaccgcttcctaggcctgaagttcaaacggcagaaacccattggcccctatatcgtcgatttcatctgcactgaacgttggctcgtcatcgagctggacggtgggcagcatcagctgcagacggaatacgatcaacaacgtgagcgttatctggagactcgaggctatcgtgtgctgcgtttctggaatcatcaggtactggctaaaacggaggctgtacttgaacagattcgtcttgaaatcggcgagcaagatggcctatgag

SEQ ID NO: 303713 - DNA, 788 bp, Unknown
  Bacterial polypeptide expressing nucleotide sequence isolated from the Sargasso Sea
actcaaggcatggtttgtcataatacttttcaaaatgagtcgagagcatgggtttacccagatgatgtcgaaaaaaaagatgctcattattttcaaatatccactggcgaaaaggtcacaatgggagaaattgagtcaatgtctaaatcaaaaaaaaatgtgattgacccagaatcaattattgatacttacggagctgactctgcaagatggtttatgttatcagacagtccgcctgaaaaagatatcaattggacggattcaggaatccatggggcgtggaaaatatgccaaaagatttggactctggttaaaaaaaaccagaaatttctagagagaaatgttgaaactgctgcaccaaattatgaaggaggaaatttaatttttattaaaactattcaccaaaatcttcatgccataactcaaagtattgagaagtttcagatgaatgtttctatagcaagagtttttgaaatagttaatgcaatgtctaaatttgaaataaatgatgaaaaagacaaaatggctttcacagaagcgctctgtatattaatcagggtaatagagccgatggtaccacatttagctgaagaatgttggtcgctcacaggcaatactaattccattaccaatgaaccttggccaaaggtaaatgaaaaatatttagaaaataaagaagtgactgttgttattcagatcaatggtaaaaggagaggagaagttgttgtcttaaaagactcctcagaaaatgaagtaaaaaaagaaatgcaaaatattaaaaatataaa

SEQ ID NO: 303714 - DNA, 885 bp, Unknown
  Bacterial polypeptide expressing nucleotide sequence isolated from the Sargasso Sea
aatagtgcttttgctcatagaataaaaaacactaatgatttcatttcatttgatatgatcaagaatgaaaagacacaaaaaattcatgttgatatatcatttgtagatgataaaaatagattaaatattgagagattaaagcaaaaccatccagaatttaatggtgtaaattttataaaagacgaatcattttatgtttcaagagatattgaaaaaatgtctaaatctagatataatgtaattagtcctgatgatatttgtaaaaggtatggggctgatactttaagaatgtatgagatgtttcttgggccaatagatcagtctaagccatggaatacagctggaatttcaggcgtattttcttttttgaacaagttttggaatttgtttcatataaatgaaaaattttatgttagtgatgatcaacccagcgatgaagctttaaaaatttatcacaaaactgtaaaaaaggttgttaatgatattgataaattttcatttaacacatctgtaagcgcatttatgatttgtattaatgagctatcttcaataggttgtaattccaaaaatatactatctaatttatgtattttgctttcaccatttgcccctcacatttgtgaggaaatttggtcacttcttgggaatgataaatccatttcatatgaaaaatatccagaatttgatgaaaagttttttgaggagtcagttattgaatatcctgtttcgttcaatggaaagctgcgttttagaattagcttacaaagcaatatagaattaaaagaagttgaaagtgtgattaataaccatgaactaacgaataaatatttagacggtaaatcaataaaaaaaataatttttgtaccaaaaaaaattataaacgtt

SEQ ID NO: 303715 - DNA, 376 bp, Unknown
  Bacterial polypeptide expressing nucleotide sequence isolated from the Sargasso Sea
atggaacaatcaaatgaaaatgtaaaagtagtaataccatcaaagcaatcattttcaaaagaatgggcatctgatcaaaaagcttttaaaggtgttccttggggaaaagccatgatgtggatttttcttgttagtgatacatttgttttcagtatttttttaatttcttacatgacagttagattttctactaaagcagaatggcctaatccaagtgaagtttttggactacatgtaggtcattacaatgtccctttacttttaattgctattatgacttttattttaattactagtagtggaactatggcactagcagttaagtatggttatgaaaaaaatcgtaaaatgtgcgcctatcttatgctggcaacag

SEQ ID NO: 303716 - DNA, 163 bp, Unknown
  Bacterial polypeptide expressing nucleotide sequence isolated from the Sargasso Sea
aatgcaaaaaaattggattggaaaatctattggttgcgaattaaattttaagatcatagaaaaaaacaagaatttatctatctttactaccaggccaaatactatatttggagctagttttattgcggtctctgtagatcatgaaatttgtaaagattcaaat

SEQ ID NO: 303717 - DNA, 785 bp, Unknown
  Bacterial polypeptide expressing nucleotide sequence isolated from the Sargasso Sea
tggtaagaactgggaaaattatattaataaagtagggtcttttcaaattactaaagcagtggaaagctttgaaaggtttggcatcaaaaataaatcaagaaaaagctttttagatattggaagtggaagtgggctattttctttagcggctttcaaactcggatttaaaaatataacttcatttgattatgacttaaattctgttaatgccacaataaaattgcaccaaattgttaagtccaatagtaactgtaaaatacttcaaggttcagttttagataaaaattttttaaatgaattaggaaaatttgacgttgtttatagttggggagtattacaccatacaggtaatatgtggcaagctatagagaattcatctcaatgtgttaatgaagagggttatttgattatagcaatatataataagcagttttttatatcatcttgttggtattatattaaattattttataatatagctcctaagcctgtaagatatattttagagtacttttattatatctatttttttattttaggttttctagctgacatctttcgcttaaaattacctattaaaagatattttaacgaaagaagaggtatgagtttttttaatgatgtcaaagactggattggtggttttccttatgagtgtgcaactcctgaagaaatagaattatttttaatcaagcttggatttaaacttgaaaaaaaatatacagttggttttaaattgggttgcaatgaatttttatttaaaaaagaaaagtatggaaattagc

SEQ ID NO: 303718 - DNA, 253 bp, Unknown
  Bacterial polypeptide expressing nucleotide sequence isolated from the Sargasso Sea
aatggattatgggtttggagctgtttttggttgcccggcgcacgaccaaagagattttgactttgcaaaaaaatataatttaaaaatcaaaacagttgtaaaacctaaagatgaaaaagacgattttactgtaaaaaatgaggcatattctggagatggaataattataaactctgaaaatttaaatggattaaaagtgccagcagagtcggtaataaaaacaattgatattttagagaaaaaattagaatag

SEQ ID NO: 303719 - DNA, 589 bp, Unknown
  Bacterial polypeptide expressing nucleotide sequence isolated from the Sargasso Sea
gaaggtgcatcaagggtttttaaaaagaatttggaagctagccagcgaaaggaagtatgaaaggtttgatgatgtcttcaaattttctaaagaagagcttgagttaagaagaaaatctcattcaactttaaaaaaagttagcaatgattatgaaaatagatttgcttttaatactgcaatagcttcaataatggaacttttaaattttattccagaagaatttaaaaaagatagctccacaaattcacagaaattttgtttaaacgaaacaataatttttatactcaaaatgcttgcgcctataactcctcatatctgtgaagatttatggaataaattttatggcgaagaagatattgaattatcttggccagactttgatgaagatataattttaattgaggaatttgaattaattattcaaataaatggcaaagttagagggaagctaaatataaaaaaagatacaaatcaaaaggatatagagcttaaagctattgaggttgaaaatgtgaaaagttttataaataattcaaagattaaaaaaacaatttatgttaaagataaactcataaattttgtaatataa

SEQ ID NO: 303720 - DNA, 699 bp, Unknown
  Bacterial polypeptide expressing nucleotide sequence isolated from the Sargasso Sea
ttttgttctaaatcatgttgcaatatttcctaaagaacactggccaaaagaaattgttgtgaatggttctgtcttgatggatggaaaaaagatgtcaaaatcaatgggcaacattatcccattacgtgatgcagttagaaaatatggtgcagacccaattagattatcaatactaatctctgccgaacttttgcaagatgctgattttaatctggaaacaatctcaagtatcaaaaatagattggaatcaatgcatgaagaatgcataaaactcagaaattctggaaagataggaaccgagcctgaagatgtctggatacaaagtagactatcaaaattaattactaaagtaactgattccatggaaaaaatgcgtcttcgtgaatcattacatcatattttgtatggatttgattctgatcttcaatggtatatgaaaagggcaagtgcaaaaaatagagatgacgtttcaggagttctgaacaaagttcttgcaacacgtatttctatgctctcaccatttgcacctcatatagccgaagaaatgtgggaaaaattaggaaattctgaaatggtttcaaaatcagcatggccaaaagaagaagaacaaacagatgataaggcagtgcaaaatgagagtttacttagttcggtaattaatgatatttcaaatattaccaaagtgacaaaaattacacc

SEQ ID NO: 303721 - DNA, 454 bp, Unknown
  Bacterial polypeptide expressing nucleotide sequence isolated from the Sargasso Sea
acaattaaagatgtcacaaaatcaattgatgattttcactttaacattgccgttgttcaaattagaagtttgttcaactttgttgcttcatatgaaatcgaaaatgatgatgatttaaaagttgtactttttatgacaaggaaacttcttattttgattaatcctatggtaccccatttagctgaggaactttggcaagatttaggtaatgaaagctcaatttcaaatgaatattggccgaaagttgatttaggttatattaaaaaagataatataaaattacctatacaagttaatggcaaagtacgagctgttatagaagtaccaatagacttggatgaaaaaattatagaagaagttgctttgaaagaaaaaaatgttttaaaatttttgaacaagagcccaaaaaaagttataattatacccaatcgtgttgttaattttgtgatttaaa

SEQ ID NO: 303722 - DNA, 892 bp, Unknown
  Bacterial polypeptide expressing nucleotide sequence isolated from the Sargasso Sea
cttgggctataaaaataaagatttttcatttacggaaccattcaaaggtttatttactcagggtatggtatgtcatgagacttataaagatcaaagaaataattggataagtcctgacgagatagagttaattgagggagaattttttaaaaaaggagagtcaaataataaaattattgtcggaccatctgagtcaatgtcaaaatcaaaaaaaaacgttatagatccagaaaatataataaataattatggtgctgatgctgtgagattattcatattgtcagatagtccacctgaaaaagatgtccaatggtcagaacaaggaatgactgcttcatacaaatttttacttaaactatggacacttcaccaaaaaataaaaaacaaaattaaaatagaaaataaaaatcaaaatagaaagttagataaatttacaaatcaaatgattagtaaaatcacaaataatcttgaaaattttaactacaacgtgatcatagctaatatttatgaaatatataattttttcaacaaagaaatagaaaatgatattgataataatcttttaagagaaaactacattaaaattttaactctgatggcacctgcaatacctcattttagtcatgagtgtttggaagatctaggctatttcgagtcattgagttggccatcaatagataagagccaactaaatgaaaataaaatagattatgtaattcaaattaatggaaaaaaaagagcgattttaaacgaaaatagagatatcaatgaagaaagccttttatctaaagtaaaaacaaataagctatcaaataaatatttaaaaaacaaaactattaaaaaaataatatttgtgaaaaacagattaataaatttattaataaatgaataa

SEQ ID NO: 303723 - DNA, 379 bp, Unknown
  Bacterial polypeptide expressing nucleotide sequence isolated from the Sargasso Sea
taacttagtttcttcttataaaattgaaaatgataatgacaaaaaaactgttttttttgtaacaagtaaacttcttattttaattaatccaatggtgccccacttagctgaagaactatggtctactttaggtaatgaaaattcaatttccaatgaatgttggccaaaagtagatgaaagttacataaaaaaaaataatataaaaatgcctattcaagttaatggcaaagttcgagccgtcattgaagtgccaatagacttagataagaatgagttagaggaaattgctttgaaggaaaaaaatgtattaaaatttttgaacaaaggcccaaaaaaagttattattgttcctaatcgtgttgttaattttgtgatttaa

SEQ ID NO: 303724 - DNA, 658 bp, Unknown
  Bacterial polypeptide expressing nucleotide sequence isolated from the Sargasso Sea
tatgaataattatggtgcagatgcagtgagattgtttattttatctgatagtccaccagaaaaagatgttcaatggtcaaatcagggaattgaagctgcatataaatttatacaaaaactctgggttttgcataataaattcaaggaaaaactaatcaaaaacgaaaaggaagatgattctaataatttagagaaaattacaaatcaattcattaaaaaagtaacaaataatctagaaagctttagttacaatgtaattatagcaaattttcatgagatatattcattattaactaaagaaattgaaaaaaaatatagcagtgcaaaactaaaagaaaattttgaaaaaattttaaaatgtatgcttccagtaattccacactttgccaatcaatgcttaattgagcttaattacaataaaaaatttaaaatggaatggccctcttttgatgaaaatattttattagaagaaaagataaattttgtagtacaagtgaatggtaaaaaaagagggatattaaaattgaaaagagattgtgatgaagataaaattttgaatgaaattatgacgaatgaaattttattaaaatacgttgaaaataaaacaattaagaaaaaaatatttattcctaataagttaattaatattataatctaa

SEQ ID NO: 303725 - DNA, 640 bp, Unknown
  Bacterial polypeptide expressing nucleotide sequence isolated from the Sargasso Sea
ttgaaaaaaaagctaactaaaaaaaataaaactttcactcagacgatatcttttaatgataatgctcttttgcctttgatttatggagagcatgataaattcttagagcttattgaagaaaatatgagcgtttctataatcactagaggaaattttcttcaatcaagtggtcaggaagaaaatgtaaaaaaatcaattaacttattagaaaatttatataaagacgcacaaaaaaataatttttcggatgaaggcgaagttttgggtatgataaatctagtcaaagattcagataacgaaaagtccaaaaaaatagaaaatatagattcattaagttttagtgctggaaaaaaattaataaaacctagatcaagaaaacaaatagattattttaatttggtaaaaaaaaagaatctcgttttttgttgtggtcctgctggaactggaaaaacttacttagctgttgcgctggcagtatctatgctaaaaacaggccaaattgataaaattattttgtccagaccagctgtagaagcaggagagagactaggttttcttcctggtgacttgaaagaaaaaattgatccttatctaagaccattaaatgatgctcttaacgatatgctttcattttctgaag

SEQ ID NO: 303726 - DNA, 562 bp, Unknown
  Bacterial polypeptide expressing nucleotide sequence isolated from the Sargasso Sea
catggtttgccatgaaacgtataaagatgaaaataacaattggctatatcctgaagaagtagaaaaaattaatgaaaaagaagccgtgaaaaaaaaggacaaaactaaagtagttattggaccttcagagtcaatgtcaaaatcaaaaaaaaatacgattgatccagaaacaatgattaaactttacggtgctgatgcagtaagatggtttatgctttctgatagccccccagaaaaagatgtgctatggtctgacactggtgtggcggcatcaagtaagtttctccaaaaaatatggaatttagttaattctataattacaagacaagaaagcaagatagataaaacagaagaaataaaatttaatgatcgcatcgaaagtcttgcaactaagattgataacacaattaatacttttaaatttaatgttacaatagcccatttttatgaagcttttaaaattgttcaaaattctaagaattctaatataggtaacaagtgtttgttaaactccgttactcaattagtgaaactaatgttacctataacacctcatttggct

SEQ ID NO: 303727 - DNA, 793 bp, Unknown
  Bacterial polypeptide expressing nucleotide sequence isolated from the Sargasso Sea
gacacgtctccgcacgatctaaagtcactcacaaaaaactatctcgacatcgagatggtcccgttcaagtccgtctttgggtctcagctaagaaagagaactctctccgacatgttgctagacccggaaaacagagatgtggtcgcaaattacgcggcacttgatgcctacgccacatacaggcttttcttcgagcttcgtgacagcctcaagaaactctacatcaaagacgagcacacgctatgggactactatctcgaatcggaactaaagttcacaaaggtattgtgggaagttgagcgcaatggggtttcgattgacacggaagctctggcggaaaaggcaccggcaatcgaaagagaacttctgtccatacagaagtggtttggcagagccatgggaaagctctacgtcaatctgaatagcaacgatcaaatgtccgagttgtttttcggcaagctcaagagaaagccaatctcatacactgacaaagggaagcctcagctaaacaagtcatccctggacagatgggttgggagaggatgtgaatacgctgaacgtcttctcagatacagagcgctggacaagcaactaggcacatacatcacaaacttgctggacaaggttcatgtcgatgggaagattcatgcgacctttaaccagaccggggcgcggactgggcggctaagctcgtcggaaccgaatctgcaaaaccaaccaccctatatcagatctgcttacatcccgtgcgatgggtacaagctaatggcgtcggactacgcgcaattggaga

SEQ ID NO: 303728 - DNA, 878 bp, Unknown
  Bacterial polypeptide expressing nucleotide sequence isolated from the Sargasso Sea
tatgaaagctttaaaagctaataataattctattaagttcagtgaaccttttaaaggattgtttacacaaggaatggtttgtcatgaaacatataaagataataaagggatttggttatctcctgatgaaattgaaaaaggaccagacgatcatgccgttaaaaaaactgataaatcaaaaattactgttgggccctctgaggcgatgtcaaaatctaaaaagaatataatagaccctgagagtatgattaaaatttatggtgctgatgcagtaagatggtttattttatctgatagcccgccagaaaaagacatccaatggtcaaaccaaggagtaaatgcttcttataaatttttacaaaaaatttggagtttgaatagcaaatttattgagcgtaaaaatccagaaatatctaaggaaattgaagaaaaaattgaaagccaatttcataagcatttacataaaattacaagctcaattgaaaatttccaaattaatgttgcggtagcaaatgttcatgaagtttataacttaattaatgaacatttatcaaaagcaatttccaatgaattgctaagaaaaattttgatagactttatgaaagttttaatacctttcataccccatgtcgctagcgagtctttggaaaaattaggagagatgaatatagataaatggccaattattaaagatgatttaatgcaaaatctcttaataaaagtagcaatacaaattaatggaaaaacaagggaaattatagaggctaagcagaatttatctgaaaaagatcttgtaaaaataagtaaggatagtgctaaagttagcaaacatttacaaaataaaaatataaaaaaagtggatttttgtaaaaaataaa

SEQ ID NO: 303729 - DNA, 268 bp, Unknown
  Bacterial polypeptide expressing nucleotide sequence isolated from the Sargasso Sea
ggcaaagctgaagcccggaagcgggagtattcacacgcagtcatggcctgcatttgatgaagagctggcggcagaggatttaattacacttgtagtgcaggttaacgggaaagtgcgagaccgtcttgaaatctcttccggaactagcaaagaggaaactgaaaaaaacgcaatttccgctcccaaggtccaatccttcatcgaaggtaaagaaattcgcaaaataatagtcgttcctgaacgtctggtgaatattgtctgcgaataa

SEQ ID NO: 303730 - DNA, 718 bp, Unknown
  Bacterial polypeptide expressing nucleotide sequence isolated from the Sargasso Sea
ttgagtaagaatgagataataatcacaaaaccgagaaagcttttttctatcggtgaaatattacagctacagacaaaaaaaactagatttgttattactgaaatagagcagaactggcactctccagatgacgtcaaagaactgagactaccagatgaaaagactaagaaaattcttgtgagctcggaaattcctgtagaagtaggccggtctgttaaaatgtctaagtcaaagaagaatgtcgtagatccgatagatattattgatcaatacggggccgacacggccagatggtttgtaatgtctgacagtcctcccgaaagagatgtcgagtggaccagtgcaggcgtcgagggggcttggaggcacctacaaaaagtctggaacctgtctattgatataatcaatgaggaacccacagaggaaaagcaagaagataaagaatcagccgaagctctaaattacgctatgaacttagcaattaagggagtaacttctggaatcgaaaattttgcctttaacaaagccattgccaaactttatgagttaactaatacattaagcaagtccaaggcacccagggagaataaaatagaagccttgaaaattctggcaaaattaatgcagcccatgacgccacatatttctgaggaaatttggtcagcactaggaaatgaaaatttaattcttaaaactggttggcctgaagagaatgcaa

SEQ ID NO: 303731 - DNA, 897 bp, Unknown
  Bacterial polypeptide expressing nucleotide sequence isolated from the Sargasso Sea
gctgcgcgtggatgcgcaggcttcacaggcgcttgaagccggcacgatggtgcaggcccatgaaggccatgcatcgctgcagctcgacctgctgctgtccgacaccccctgggccgtgcgtcccagcatggcgcgcctgctgagccagcccggtttgacgcgagccgccgctgtggccaccgtgctcgatgccggcgaagtgcgcgagcgcaaggttgtggccagcctgcggcatgccggtgtcgacgatctgaatgccgcccaagtctttgcccgtgaaagccattggcatgagcaggccctgggtctgggtcatgacccactgcagtggcgcctgcagcacttgcccgaaggcccggtgcgcgatctcgcgcagcaggtggccgagcgtgcgcaggtatcaccgcaagacgacattccgcaagacaccggtggccgcctgctgggtcgaggctttgccactgcccagctgcagactctggatgctcagggcgccgacctgcatgcctggagcgcctgggtggccgaggtggccgtgcatccgctcaccggcgagattgaggtgacccgggtggtggccggccatgacagtcgcagcctgcaagcggcccaggcggccagaacgcggcccgaaatcgtgcagcaggacccccagttgctggccgatgcgcgccggttgctgggcacggctcccgccttcgacgactggactggttccgccgcttccgctagcggtttcgatgtgatcgccaagcctggttccgatctggtgcagcaggcgcgcggcgatgtcggacccatccgccagggcggtctggcgctggacggggtggccacgctgcccgccgccgccgccattgccaacgccattcaccatgcaacgggcgtgcgcctgcg

SEQ ID NO: 303732 - DNA, 730 bp, Unknown
  Bacterial polypeptide expressing nucleotide sequence isolated from the Sargasso Sea
taggatacccaattttttcaggagactattcgcggaaggcgcttttaatcaggcgttttttccggtcatggttgagttcaaagctaaaggacgcgaggagctcaggatatttttgtcatccgtttcaggattgtttggtgctttgttaattatttttgtatttctcggatttattggatctgacttcctggtaatgttgtttgcgcccgggtttttgtcagatcccgacaaactcgctctaacaagcgatttagttcgtattatgtttccctacatcggattcatttctttgacagcatacgcgggtggtgttctcaatgcgcatgatcgttttgctgtgcctgctattacacctgtgttgctcaatttgtgtttgataattgcatcgctcctttggatttgggagatttttgacggtctggcagtggttgtgttggcgtgggccgtcttgcttgccggacttgcgcagctagcttttcagattccgtcactaggtttcttgggtcttcttgttaagccaaagctcgactataggcactcaggtgttaaagaaatgggtattttaatcgtacccgctatatttgcttcttcggtaggacagataaatgcgctagttaatactgtaatagcgtctaacttggtggaaggcagcatatcttggctgtactacgccgatcgtttgcttgagttgccagtcggcatggtggcgattgcattgagtaccgttatg

SEQ ID NO: 303733 - DNA, 767 bp, Unknown
  Bacterial polypeptide expressing nucleotide sequence isolated from the Sargasso Sea
aatgaaaaatttaatttaaccgaaccttttgatggtctttttactcaaggtatggtttgtcatgagacatataaagattctgatgataattgggttagcccagaagaaatcgagacaataggaggacaaaaatatctaattaaagataaatcaaaaaaaattaaaattggtccttctgaatcaatgtcaaaatcaaaaaaaaatactatagatcctgaaaatattatttctaactacggtgcagatgctgctagattatttattttatctgatagtcctcctgaaaaagatgttcaatggtcagaagagggcattatatcttcatttaaatttatacaaaaattatggaacctaaattcaataattttggaagaaattaaaaaaaatcataaagaagattcggacgaagaattaaaaaaaaatactaatatatttttaaaaaaaataaccgataaccttaaaaactttagttacaataaaattgtcgcaaatttacatgaaatttacagttttatgtataaggaaataaaaaaaacttataaaaaaaatactattatagataattatcaaaagattttaattacaatgacacctataattcctcattattcttatgaatgtcttaaattaataaatgccaaagatgttagttggccaaattacgatgagtcgatgttaaaaaaagagatagttaacatagttgttcaaataaatggaaaaaaaagaggattattgcaaacaaaaccgaatatctctgaagaaaattt

SEQ ID NO: 303734 - DNA, 876 bp, Unknown
  Bacterial polypeptide expressing nucleotide sequence isolated from the Sargasso Sea
aaaaagtaaaaaactcagaaccgttcgagggtttatttactcaaggcatggtttgtcatgaaacctacaaggatgttaatgataaatgggtttcccctgatgaaatcgaaaaagataattcaggaaatatcattcataaaaataaaaaaacgaaaataacagttggtccatctgaagctatgtcaaaatctaaaagaaatattatagatccagaaagtatgattaaaatttatggagcggatgccgtaagatggtttattttatcagatagtccacccgataaggatgttcaatggtctaatcaaggtgtaaatgcttcttataaattcttacaaaaaatatggaatttaaatttgagtattttgaatcgctcagacgtaaaatcaacaaaagccttagaggaagaatttgatgataaatttaataattatattttaaaaattactaatcttattgaaaatttccaactgaacgttgcagttgctaatgtttatgaaatttatcatttatttaataaatatgttacgagcaaagtaagtaatgcatgtttgaaaagcaatttaacaaattttatgagaattttaacaccttttacccctcatcttgcgagtgaatgtttggaaaaattagacaaaactaaaatagagtcgtggccaaaaatcaagaaaggattttcacaaaagcaaaaaactaagattgctattcaaattaatggaaaaacaagagaagttttggagatagaaaaaaatttaatagaggaaaaagttgtattaattactaaaaaaagtgaaaaaataaggaaaagcttacttaataaaaaaatagtaagaattatttttgtaaaagataaaattataaattatcttataaaataaa

SEQ ID NO: 303735 - DNA, 840 bp, Unknown
  Bacterial polypeptide expressing nucleotide sequence isolated from the Sargasso Sea
atatcaaagaaccttttaagggattatttacccaaggtatggtttgtcatgagacatataaagatcaaaataataactgggttagtcctgatgagatagaagtaaaaaatggaaagaagtttttaaaaaataagccagagcaacaagtaaaagttggagcatcggaatcaatgtctaaatcaaagaaaaatatagtagatccagagaaaataattgatatttatggtgctgactccgcaagactttttattttatctgacagtccccctgagaaagatgttcagtggtctgatgaaggaatatcttcgtcatataaatttattcaaaaattatggatattgaataaaaaaattttagaagaaattgacaaaaatcatcctaaagatagtaacgataatttttcaagatttactaacaagtttattaaaaaaatgacagtctgtctggaaaatttcagctataatattctaatagcaaatttacatgaaatgcaaaattttttaattaaagaaattaataacaaatatacaaacaaaacattaatagacaacttcagtaaaattttagttacaatgattccaattgttccccacttcgcaagtgaatgtctaacattattacaaataccaaaagtaagctggccaaaatttgacgaaaatttactgttagaggaaattataccgtacgtaattcaagttaacggcaagaaaagaggtttaatagaattaaaaagagatatttctcaagaagagttacttaaaacagttgaaaaagaaaaaaatatatcaaaatatttcgatataaataaagttaagaagtatatttttataaaaaaataaa

SEQ ID NO: 303736 - DNA, 347 bp, Unknown
  Bacterial polypeptide expressing nucleotide sequence isolated from the Sargasso Sea
tgggacggaagcaaaactctctgcagcgaaaactcttgcccaattaatgtctcccatgacaccacacttgtctgaagagctttgggaaaaaatgggagaaaaaaatttgttggctcaacagccctggccagctgttgacgaggaccagctgagcgataatatcataactatgccaattcaagtgaatggaaagcttcgaggacagatagaagtgcaaaaagacctaagcccatctgatattgagaagttagccctggccgatatttctgttcaaagagcattgaacggaagcaaaccaaagaagataatcgttgtgccgagtagaatagttaatgtcgtcatttaga

SEQ ID NO: 303737 - DNA, 708 bp, Unknown
  Bacterial polypeptide expressing nucleotide sequence isolated from the Sargasso Sea
tgtcaaaatctaaaaaaaatatagttgatcctgaaagtatgattaagatatttggcgctgatgcagttagatggtttattctttcggatagcccgccagaaagggacgttcaatggtctactgctggagtatctgcctcacacaaatttattctaagaatatggaacattaatcagaaaattttagatagaaaacaaactgaaataagctctgatgatgtaaaaaagtttgaattaaagtttaatgaatacatttttaaaattacagatttaattgaaaattttcaattaaatgtagctatagctaaaatttatgaggtagcatcacttatggaaagtaatattgacaaaaaaattggcaataaaaatctactggtttcacagataaaatttatgaaaatgctactaccttttgctccacatttgtcatgtgaatgcttatctaaacttgagggaaaaaacttcttcgaagaaattcaatggccaaaaattgataaaacattgttagaaaaacaagaagttacattagttgtacaaattaatggtaaaaaaaggggcttatttgttgcaaaaaaagatctttcagaaaaggatgcgttaagcgaggcgaaaaaaatagaaaatattaaaaaaaatctaaaagataaaaaaatcctaaaaaatatttttgttaaaaataaaatcataaattttattgtcactggatgaa

SEQ ID NO: 303738 - DNA, 691 bp, Unknown
  Bacterial polypeptide expressing nucleotide sequence isolated from the Sargasso Sea
aatgagtaagtccaaaaaaaatgtagtaaatccctcctctataattgaaaattatggcgctgacacagcacggtggtttatgttgtctgactctcctccagaaagagacttagagtggacagatgttggtgtagcctcttcatacaagtttattaataaaatttgggaaacctgtataagggccaagaattacaaagcatcagatgatttgctaaaaacaaataaatttaacgcccttatacaaagtgtttcagaaaatattgaaaaatttcattttaataaatctgttgcaaacatttatgaatatgtaaatgagattaacaagtttatggataaaaaaacaatttcaggagatggtttaaaaggtgtggttaaaaatttgtgtattattatacatccattcacacctcatttaagtgaagaaatttgggagcttctaggccacaaaggtttttgcgctaatgcaaattggccagagtttaaaaaaaatgatgttgttaataaaattaatcttccgatacaggttaatgggaagttgaaaggccttatttcttcaaagaaaaacgagaaagaagaggttgttttagaaaaagcaaaaaaattacctagcttaaacagggtgttaaaagataaaataattgtaaaaattatatacatacctggaaaaatattaaatatagttattaaatga

SEQ ID NO: 303739 - DNA, 855 bp, Unknown
  Bacterial polypeptide expressing nucleotide sequence isolated from the Sargasso Sea
tttgggatcagcggtggtggtggtgactgatcagcaggtggctggacactatctggcccccatgctggaggcattggcgggtggcaccgtccgtgtgttatctcacgtattgccggtgggcgagtcgggtaaaacccgtgctgaaaaagcccgtcttgaggatgcgttatgcgcatggcattgtggttcagacaccgtattgcttgcattgggcggtggtgtggtgtccgatctggtgggctttgtggcatctacgtactgtcgcggcattccatgggtttgttgccccagcagtttgttggccatggtggatgcatccgtgggaggcaagaacggggtgaacctcgatggtgtgaaaaatcgtattggtaccatttatcctgcgcatttaacgtgggtggatgtctccttattggcgacattatcaccatgcatgtggcgtcaaggtggggcagagatgctcaagcatgcctggttgtcgggccgtcaagcttgggaggcatggtgtgctcagtggccccatttgcgtgatgcaccgtcctcggattgggccaaagttgtgcattggcatgtggcattcaagcatcaggtggtgctgagggatcagaaacaggttgggtatcgggatgtgttgaatgtggggcataccgtggcccatgcgatcgagatgagatctcagggagcctgtgcgcatggcgatgccgtggcgatggggctttggatcgaagcttgggtggctgtacgcatgggggtgttgcctgagtcggttgcccaggagctcggggatgtggtggcccgttacttcccggtgcagcgcttgcgtccctggtgccatgatttggcccaagcctgtcg

SEQ ID NO: 303740 - DNA, 834 bp, Unknown
  Bacterial polypeptide expressing nucleotide sequence isolated from the Sargasso Sea
aatgtttaaaaagtatatagtcaacaaagactatcataattctagatttgacaagtggtttaagcagaatatttttaatatacctcaatccttaatagaaaaattaattagaaaaaaaaaagttaaagtaaataataaaaaaataaaaacctcacatagaataaggcttaacgatgtaatagaaatatatggaacagaaagtttaaaacctacagataagtcaaaaaaaattaaatacaaaccctctgaaaaagaaaaaaataaatatagcgagtttataattgaaaataatagtaattttattgtaataaataaaccaagtggtatcccagtacagtctggcacaaagtcatttagaaacattattgatattcttaaggatacaaaatattttatagaatcaaaaccttttgtagttcatagacttgataaggaaacttcaggcgtaatgatagtcgcaaagaatagagaatatgcacaattatttacgtcactctttagaataagaaaaatccacaaaacatacctagcagtcgctaccggaaaaattagtgaaaatataaatttgttggaggataatttggttacttatgaaaataatagaaaattaattcagaaagccgtttcaaatttaagagttttaaaaagtaataatgattattcattagttgaacttaaacctataactggtcgaaaacatcagttacgtaaacaactatttaacattggtcacccaatcgttggagacaataaatattcaaataatttaacaaagaataaatataaatataataaacttatgttacattcgcacaaaataaaatttatgataaa

SEQ ID NO: 303741 - DNA, 435 bp, Unknown
  Bacterial polypeptide expressing nucleotide sequence isolated from the Sargasso Sea
gttcaatgaatgttggcgcccgccattatggcgatataagacacgatgcaagtagctggatgggccgggttgaactctcgatagaccgaattgatgatcgtccggcaaccttttccggtggcatgcagcagcgtttgcagatcgcccgtaatctcgtaacgaatccgcgccttgtgttcatggatgagccaacaggtggattagacgtttctgttcaggcacggcttctggatttactgcgctccctcgtccgggatctcgggttgtcggtgattattgttacgcacgatctcgccgttgtccgcatgctggcgcatcgggtcatggtcatgcagcgcggtcatatggtcgagacaggccttgccgatcaggtccttgacgacccccaacatccctacactcagctccttgtcagctcagttttgcaggcgtaag

SEQ ID NO: 303742 - DNA, 849 bp, Unknown
  Bacterial polypeptide expressing nucleotide sequence isolated from the Sargasso Sea
gaaggcttgttactcaaggaatggtttgtcatcaaacatataaagacgagaacaataattgggtttatcccgaagatgtttttagtgatgatggaaaaaattattataagaataaagatccatcaaaaaaagttacagttggcccctcggagtctatgtcaaagtcaaaaaaaaatactgttgatccagaaacaattataaaactatatggagcagactcagtcagattatttatattatctgacagcccaccagaaaaagatgttcaatggtcagatagtggaatttcagcatcatttaaatttttacaaaaattatggtctctaaatgaaaaaataatttctaacaaaaaacaattcttaaaatttgatgaacatttagaaaaatttactaaccaaattataaaaaaattagaggatgatttgaacaaatttggatttaatgtagtaatagcatctatttataagatttacactttttacaataagcatacaaataaaacggaatggggaagtaatttttacgaaaattacataaaaattcttaaagttatcaatcctataattccacacttttcaaatgagtgtcttgaaaaattagaccaatcaatcaaagatatacgatggccatcagttgaggaaaaatatttagaggaagaaataatcaatattgttattcaaataaatggtaaaaaaagaaaggtattttcaattgataaatcatttagaaaagaaactttaattgaaaatattaaaaatgatgatcaaataaagaaatatattgataataaaaaaattattaaaacaatatatgtagaaaataaactaataaactttattattgagtaat

SEQ ID NO: 303743 - DNA, 255 bp, Unknown
  Bacterial polypeptide expressing nucleotide sequence isolated from the Sargasso Sea
aatggtaaaaaaaattagaatctataaagatttcaaagtaaaaaaaattcataaaaattcaataattcttattggaaattttgatggacttcatgttggacatcaaaaattatttaaattggcacaaaattataaaaaaaaatttaagcataaaatcggagttgtaacatttaatccaataccaaagatgttttttaataaaaaaataaaaaattataaactttctaatttaaatcaaaaactcaattactttaa

SEQ ID NO: 303744 - DNA, 809 bp, Unknown
  Bacterial polypeptide expressing nucleotide sequence isolated from the Sargasso Sea
gataaacgcattagtgaatacagttatagcgtctaacctggtggagggcagcatatcatggttgtactatgccgatcgtttgcttgagctgcccgttggaatggtggctattgcattaagtaccgttatgttgccccatctatctcgactatccgccggtggttcagaagacggttttagtagcttaatgaattggggcgttttgatgggtttggggctgggattgcctgccgggatagggctttatattctatctgttcccttggtgtctgtgctgtttatgagttttgagggaggggccatgacagactatgacgtcagaatggctggcctcgcgcttgagatgtttgcaattgcgctacccggttttgtattagtaagagtattgtccagtggtttttttgcaaagaaaaatactaaacaaccttttcgttatgcctcggcagcggtagcggtcaacctgatcgttagtttggctacttttaaagctttggggcacgtaggtttggcgttggcgactgctttatctgcgtggacaaatgtctttttgttatattttggtttgataaagcataaaatcacagttataaaagttgtgacacctcaactggtgaaggtgtatctgttatgtctcttaatggcgttaggattgggcatttggagcccggaagatttgatttggctttctcaagatcctctctatcgattggctaaattgttgattgccatattggttgtattgggcttatatctcgttgctttgtttggtctaggttttagaggtcgagatttaaggcccagtgtctaat

SEQ ID NO: 303745 - DNA, 882 bp, Unknown
  Bacterial polypeptide expressing nucleotide sequence isolated from the Sargasso Sea
atgataattttgatatcgaagaaccttttaaaggtttatttactcaaggaatggtttgccatgaaacttataaagatcaatataataattggattagtcctgatgaagttgaaaagaaagataataaatattttaaaaaaaacgatcctatttctaaaataattgttggaccttcagagtctatgtctaaatcaaaaaaaaatgtcatagatcctgaaaatataattagcaattatggagctgatgcggttagactttttatactttcagatagccctccagaaaaagatgtgcagtggtcagagcaaggaatgttagcgtcatacaaatttattcaaaaactttgggtgcttcacaataaaataaaagaaaaagtaaattccaattttagtgatactgaagaccttgagttagataaatttacaaatcgattgataattaaaatgaccaataatctagaaaattttaactataatgtgattgttgcgaacatgtatgaaacttataattttttaataaaaaaaactgaaaataatatagactcaataaaattattaaaaaactacaaaattatactaactatgtttaatccaatcattccacatttctcatccgaatgtttaagtgatttcgagcaaaatagtctaaattggccaaatgtagatgaggatttaattgatggtgaaaaaattaattatgtaatacaaattaatggtaaaaaaaggaatttggttaattttaataaagatacaaaccaagaagatctattaaaccaaattaaaacaaataagttaatagataaatatttactgaataagagtataaaaaaaattatttttgtaaaaaatagattgataaatataattttaaatgaaaaataaa

SEQ ID NO: 303746 - DNA, 103 bp, Unknown
  Bacterial polypeptide expressing nucleotide sequence isolated from the Sargasso Sea
tgttatagatccaagcaaaactatagatatgtatggggcagatacagcaagatggtttatgctatctgatagcccccctgaaagagacctagaatggacagag

SEQ ID NO: 303747 - DNA, 893 bp, Unknown
  Bacterial polypeptide expressing nucleotide sequence isolated from the Sargasso Sea
agccttaaaaaagtgtggttataaaattgaatttgatgagcctttcaaaaacttatttacacaaggtatgattacacatgaaacctataaagatgaaaatggtaaatggcttagtcctgatgaaattgaaaaagtaggagataaattagctaagaaaaaaaaagataaaaccaatgtcacagttggcgcaccagaatcaatgtcaaaatcaaaaaaaaatataattgacccagaggagacagttaaaatttatggagcagactcaattagatggtttgttttatcggacagcccgcctgataaagatattttatggtctgatcgtggtataaatgctgcttacaaatttttgcaaaaagtgtggaatttaaactcacaaatcaatcttttatctgaaagaaaaggtaatctcgatattgaaaaaaaatatgagaaggaattttccaaatatattttaaaaattgatgatcacatagaaaagtttaatcttaacgttatgatcgctaatatttatgaatattttaatgctcttagcgagtgctttaaactttcagccagcaagatttttttggaaaaacaccttatcaatttgatgaaagttatgtttcctatcactccacatctttcaagcgaatgtttagaaactcttaaatgtaagagtgatgagtggccttctgttgataaaaagttggtaaaagacgatgaaataaaactggttgtacaaattaatggtaaaacgagattagttacaacgatgaaagtagatatggaagagaataaagttacagaaactttgttaaaaaatgataaacttaaaaaatatttaatagaaaataaaattaaaaataaaatatttattaaaaacaagcttgttaattatataataaaatgaa

SEQ ID NO: 303748 - DNA, 786 bp, Unknown
  Bacterial polypeptide expressing nucleotide sequence isolated from the Sargasso Sea
ctccggttatggcatacattcatacttggctagtgagaatcacatattttctaatgatttgagttataattctgatatttccctatacttagaatctacaggaaattcatcgatacacaataatactttcattggaaatgatgattatccggcaactgtcactgagtcgtattataatgtaatcagagacaacaagtttgtagctaatgatgattatttccagttctttgaagccggcggctacaattcattagtaaacaatacatttgatgaaagtggaattattttagaagattctaataatcaaataatatctgacaatacaatttccgaatcttccgaaaatggaattaaaatctataaatcaagctcagataattatctttcaggtaacacaatttctgattcagatgatgaagatatttatattggtggaagtgattatcagagaaataatcgaggttacgataacatatttagtaccattgaagtgcaaaacaatggtcagtttattctaatggattacgtaaatgttagaacagaaaattcagagggtaacatgtctggaaacgatgtccaggcagtatacaattcagaaattttctatgcttctgaatatttcagcggcagtgatcctctaactgacagctttggtctagtacctgatttccttgctccagtagaggagtacaatggtagttctactcctgatgaaattcttacaacaatcacggtaagatatgttgattggataaatttatttgaaatggatggttcggatgatac

SEQ ID NO: 303749 - DNA, 672 bp, Unknown
  Bacterial polypeptide expressing nucleotide sequence isolated from the Sargasso Sea
ccaagtacctctggggcaacgcggcctggctgatggccgtacgcatcaccacggccttcgccaagtacggctggtgcgcggcgatcaggggagccgaagggggtggcgcggtggaggacctgccggctcacacgttccgcaccctgtccggcgacctgtcgctgaaatgcccgaccgaagtggcgatcaccgaccgccgcgagaaggaactcaacgacctcgggttcatcaccctgtgccacaagaagaacaccgacatggccgtgttcttcggcggccagaccaccaacaaggccaaggtctacaacaccaacgaagccaatgccaacgcgcgcatctcggccatgctgccgtacgtgctggcggcctcgcgcttcgcccattacctcaaggtgatcatgcgcgacaaggtgggcagcttcatgacccgcgacaacgtgcagacctacctcaacaactggatcgcggactacgtgctgatcaacgacaacgcgcctcaggaaatcaaggcccagtacccgctgcgcgaagcacgcgtggacgtctcggaagtcgccggcaagccgggcgtctaccgcgccacggtattcctgcgcccgcacttccagttggaggagctgaccgcctcgattcgcctggtagccagcctgccgccaccagccgcagcttgat

SEQ ID NO: 303750 - DNA, 106 bp, Unknown
  Bacterial polypeptide expressing nucleotide sequence isolated from the Sargasso Sea
ccatttgaaaagaatgaaataaataagtggctgccagtagatcaatatagttggaggagtagagcacgcaatattacatttgttatatgccagatttttcactaag

SEQ ID NO: 303751 - DNA, 499 bp, Unknown
  Bacterial polypeptide expressing nucleotide sequence isolated from the Sargasso Sea
gatgcgcgcactctacacagcagccaccggcatggccgcccagcaaagaaatatcgacaccaccgctaacaacctggctaacgtcaacaccacaggttacaagaaaagcaaggtccattttcaggatctgctctatcacaatgaaagaacggcgggtgttccatcatcagtttcgacccaggtcccggttggtttgcatgtgggtcacggtgtcaaattcatcggcacggaaaaaatccacacccaggggaatttggaaaacaccggcaatgacctggatctcagcattgacggacatggttttttccaaatccttcagccgaatggaattgtgggctattcccgagacggccatttcaacatcgacggaatgggacgattggtcaccaatgacggtatgcttctcgatcctgaaatcaacattccgcaggacacacgaaaaatcgaagtcggatttgacggaactgttacggtatttctgagagacgaaaccatgccc

SEQ ID NO: 303752 - DNA, 213 bp, Unknown
  Bacterial polypeptide expressing nucleotide sequence isolated from the Sargasso Sea
agactctcaaaatgaagaacctccattcgatgaaaagaaaataaactcatggttgccaattgatcaatatatcggtggagtcgagcatgcaattttgcatcttttatattcaagaatttttgttaaagcattgagagaaataaatttacttgatgtagatgaaccatttcataatttatttagtcaaggaatgattaattttggagggtctaa

SEQ ID NO: 303753 - DNA, 898 bp, Unknown
  Bacterial polypeptide expressing nucleotide sequence isolated from the Sargasso Sea
cttagttcttttatccccagaagcaattactgccttgtttgctcctggctttttggacaaaccctcggtatttaatgaaactgctcttttagtccgtataactttcccgtatttggctttgatctccatgaccgcctactcagcatcattactcaatgctcatggaagattcgccgttccggctatcactccaatcgttctaaatatttgtttgatcgttgcagcattattatcaacctatctatttctggactactcctcggctttcgtattgtcatgcggtgttctggttgccgggttcttgcagttgtcccttcaattgcctttgctcgttaagctgcgactcataccgaagccgatccttaatacgaagcaccctggagtaaggagggttggagctctatttgtgccagcactcttcgccgcatcggtcaatcaaattaacacactcgtgaacacgatacttgcgtctacattgattacaggcagtatctcttggctttattacgctgatcggttactcgaattacctatcggtttggttgctgtcgccctaggaacggtgctcttaccttacctttcatcggttgcgatcgagggcgataaagcaaaatacagtgcggcaatagattggggcgttcatctcgggctggttttagccttgcccgcggcctccgctctttttgctctcgccattcccctgatcctggtcgtttttatgagctttgggggcgcaatgtcgagtgatgacgcgttgatggcgggaagcgccctgaaaatgttttctttcgcccttcccgcctttgttttgattaaagtgttctctccagctttttttgcaaaggaagatacaaagactccctttctctgtgccctttgtgcggttgtcgttaacctt

SEQ ID NO: 303754 - DNA, 704 bp, Unknown
  Bacterial polypeptide expressing nucleotide sequence isolated from the Sargasso Sea
gatggggaatactctagaaaatactcctttaaagatcgcaatagtagcaggtgagaggtctggtgacgaattaggcgcacctttgatgaaatccttgaaatcaattaatccttcaattgaatttgtaggagttgggggttcgaagatgacaactgaagggcttgaatcttactttgatatgagtgagatatccgtcatgggtataattgaacctttattaaatttaagaaaattattaaaacttagaaagggtttaaaaaaatatttgctccaacaaaatcccgacatttttattggcattgactcacctgacttcaatcttcccatcgcaaaatttttgaaaaataatcttggaatcaagacaatacaatacgtaagtccatcagtttgggcgtggcgaaaaggccgcataaaatcaatggaaagttcaatagattctgttttaaccctttttcattttgaggagactgcttattccaactctaagattaagacaagttatgttgggcatcctctgtcttataaaattgatattactaatatggaaatagaatccaaagtccaaaatagcattgcgttattaccaggaagcaggacttcagaaattttactaatgggtgatttaatgattaaagcggcaaagaaacttaaaattaacgaatccaaagtacaaattttttatgccattatcaaatccttcccat

SEQ ID NO: 303755 - DNA, 496 bp, Unknown
  Bacterial polypeptide expressing nucleotide sequence isolated from the Sargasso Sea
atgtctgttagaagaaaatcccatgcgacattaaaaaaagttgaaaatgattatgaggttagatttgcatttaatacagcaattgcagcaataatggagcttataaattttatacctgatgaatataaaaatgaggatgctagcgatgctcaaaaatattgtttggatgaactaataatgttcacattgaagatgctctcgcccatttctcctcatatttgtgaacatctatggaataatttttatctagatgaatcatccattgatacatggtggcctaagttcgatgaaaatttattagaagtagaggaattcgaattaattgttcaagtaaatggtaaagttagaggaaaaataaatatagataaaaacatagaacaacaagaaattgaatctgcagcactaaatgtcgagaatgttaaaagtcatattggctcttcaaaaattaagaaagctatttatataaaagaaaagcttattaattttgtaatttaaa

SEQ ID NO: 303756 - DNA, 681 bp, Unknown
  Bacterial polypeptide expressing nucleotide sequence isolated from the Sargasso Sea
tattatattcaagattttttatgagagcaattaattacaaaaataataaatttaaaattactgaaccatttgaaggtttatttactcaaggaatggtttgccacgaaacatacaaagatgaaaataataattggcttagtcctgacgaggttgaaagtaaagatggaaaaaaattttttattaaaaaatatccagataaaaaagtttttgtaggttcatctgagtcaatgtctaaatcgaaaaaaaatactattgatcctgaagatattatcaataattttggtgcagatgctgtaagattatttatactgtcagatagccccccagaaaaagatgtgcagtggtcagaacagggcatggttgcctcatacaaatttatgcagaaattatggactttacatcaaaagtttaaagataagattaaagaagactctaaaggagaaaataatgaaattgaaatatttacaaatcagatgattaaaaaaataaattataatttagaaaagtttcactataatgtgattgttgcaaatctctatgaggcttataatttttttactcaaaaactaaatttaaatagaagcaataaaaatctatctgacagttatacaaagtttttaactgttatttcacccattaattccaccattttgcttcggaaatgtttggaagaattttaat

SEQ ID NO: 303757 - DNA, 746 bp, Unknown
  Bacterial polypeptide expressing nucleotide sequence isolated from the Sargasso Sea
aggatacaaaaatgatagatttaaaattaaagaaccattctcaggattatttacacaaggtatggtttgtcatgaaacttacaaagatagtaaaaaaaattggctttttcctgatgaagtattttctgaagatggaaaaacatactataaaaaaaataagccagatgaaaaagtttttgttggtagttcagaatcaatgtcaaaatcaaaaaaaaatattatcgatcctgaaaatatagtatcaagttacggcgctgactcagtaagaatatttatattatctgatagcccacctgaaaaagaaattaaatggacagaacaaggtattactggctcttataaatttattcaaaaattctggatattgcatgaaaaaattaaagaaaaaattgatgattcatctaatgatgataaaaaaaatgatgagagtttaaataagtttacaaatatattaatagagaaagtaacaaaaaatttggaaaaatttaatttgaatgtagtaatagcaaatttttacgaaacatataattttcttaataaaatagttgataaaaatataaataataaaatattagaagaaaactattacaatattttaaaacttatttttccagtcattcctcatctttcatcagaatgtattgttgatattaaaaaagatttagtatttgattggccaaaaccattagataaatatttgtttaaagacaatgttgatgttgttgttcagattaatggaaaaaaaa

SEQ ID NO: 303758 - DNA, 541 bp, Unknown
  Bacterial polypeptide expressing nucleotide sequence isolated from the Sargasso Sea
tatgacagtaagattttccacaaaagttgaatggccaaatgctagtgaagtttttggattacatgtaggccattacaatgtcccacttcttttgattgcaattatgacttttatcttaattacaagtagtggaacaatggctcttgcagttaagtatggttatgagaaaaataaaaaaatgtgtggatggcttatgttagcaacagcgctactaggcgcttcttttgttggaatgcaagcttttgaatggacaaaattaattcatgaaggtgttcgtccttgggaaaatccatttggagcgcctcaatttggtgctatattttttatggttactggatttcatggtacacacgttacaataggggttatttttctttttattatgacatggaaaacatttcgtggacactttgatactggtaaaagaggtttttttacatcccaaaaatctgattatgaagcaatagagattatgggcttatattggcactttgttgatttagtttgggtttttatatttgcttttttttatttatggtga

SEQ ID NO: 303759 - DNA, 798 bp, Unknown
  Bacterial polypeptide expressing nucleotide sequence isolated from the Sargasso Sea
atttattatattcaagatttttcatgcaagctcttacacataagaatgataagtttaatattatagaaccatttaaaggactgtttactcaaggaatggtttgtcatgaaacatacaaagatcaagaaaataattgggttagtccaaatgagataatttcaaaagatggaaaaaaatatcttaaaaataatccatttcaagaggtgaaagttggaccatcagagtcaatgtcaaaatcaaaaaaaaatactatagatccagaaaatataattagtaattatggagcagattctgtcagattatttattttatctgatagtccaccagaaaaagatgttcagtggtcagaggaaggtattgctgcatcgcataaatttattcaaaaattatggaccttacacacaaagattattgaggaaattagtaaagatcattcaaaaaatgcaggtgatgaattgatgaaattcacaaataaatttatcaagaaaattagcaataatttagagaattttagctacaatataattgtagcaaaccttcatgaaatgtattcttttttaataagagaaatcaataagggttataaaaaagaaacgattctagataattataaaaaaattctaattacaatgaacccaataatacctcatctttctaatgaatgtttaaaaaatattgaaaataatgataaaatttcatggcctagttatgacgaaaaacaaattaaagaagattatagtctaattgttatacaaataaatgggaaaaaagagaggattaataacaacagactttaac

SEQ ID NO: 303760 - DNA, 127 bp, Unknown
  Bacterial polypeptide expressing nucleotide sequence isolated from the Sargasso Sea
aatgtcaatattaatcaataaaaatacaaaagttatttgtcaaggatttactgagagctcatggtacttttcattcagagcaggctttaaagtacggtacacaattagtaggaggtgtgactcctaa

SEQ ID NO: 303761 - DNA, 757 bp, Unknown
  Bacterial polypeptide expressing nucleotide sequence isolated from the Sargasso Sea
aatcacatcaaccaatcttggaatatcttcaatttatattccaactcaagcactttatcttccaaatcataatttagcaacaggagataaagtaacatattctccaggcactggtggtcagggaattcattattctgaatcgggacataatgtaagtttagcatcaacttcaggagttaagaaagcaactgatgggcaagaattctttgttgcaagatttagtgatactttagttggtttagcaactgttcgagttggattaggtacgactggaatttacattggtcttgaaactggatcatttggtggtagaaaccaaactccagtattcttcagaactattggtgctggtaacagtcatagtattaaaacaaactatactcctataacaggtgagattgttagaaatcttgtaactgttgatactggaatatctactcatggattgcatgttgggcatcatgtagatgtttctgtaaatgctggagcatctacatcgtttgttttcaattatgatgactatcatagaaaacttatcgtaaatccaagagaatttactggtggtgatgtaactacaacaacagattcaatcacagttaaggatcataatcttgagactggtcaaaaaattattcatacttcaggtggacctgctgcaggattgagcactaataagatttattatgcagttaaggttgataaagatactattaagttagcagatacttattataattctattcaaggaattccagaa

SEQ ID NO: 303762 - DNA, 847 bp, Unknown
  Bacterial polypeptide expressing nucleotide sequence isolated from the Sargasso Sea
tttgagcaaaaaattatttaaatcaggtcttattgtgagtgttatgacgctgatttcgcgagtgttaggtttggttcgtgacgtggtgattgccaacttaatgggtgcaggtagcagtgccgatgtatttttctttgctaacaaaattccgaattttttaagacgattatttgctgaaggtgcttttgctcaagcttttgtacctgtacttacggagtatcaagaaaaaaagaccccagaggaaacccgcgagttaatcggtaaggttgcaggaacattaggtgtacttgtttctgttgttaccttatttggtgtgatttgttcacctgtattagcagcattgtttggtggcggttggtttttagattggttaaatgacggcccaaacgcagaaaagtttgagttagcctcgttaatgctaaaaattacctttccttatctttggtttattacttttactgcgcttgccggttctattttaaatacccgggggcggtttgctgtgtcggcgtttacccctgtatttttgaatgtggctattattgcagtggcaatgtggtatgcacacacccttgaaaacccagaaatcggtttagcatggggagtctttgttggtggtttggttcagtttttgtttcaaataccatttttaatgcgtgaaaaagcgctggttaagccctcttggggttggcatcacccaggggtggtcaaaatcaggacgctgatgatcccggcgatgtttggtgtatcggtttctcaaattaatttgttgttcgataccttcattgccagctttttaatgacaggctcaattagttggttgtattacgctgatagattgctcgag

SEQ ID NO: 303763 - DNA, 1073 bp, Unknown
  Bacterial polypeptide expressing nucleotide sequence isolated from the Sargasso Sea
aggttgtaaaggattttcagtatataatcatatgtatattcctagaagctttggtgaccctgttcagaattattggaatttagtaaatgatgcaattttatgtgatgtatctgttgaaaggcaagttcaaatcaaaggtccagatgcatcaaaatttatccaatatttaaccccccgagatttatctaaaatgaaagtaggtcaatgtaagtacgtccttattataagcaatgaaggaggtattattaatgaccctgttttattgaaaatatccgaaaatgaatactggttgtctataggagatagtgatgtccttctatgggctaagggcgtaaaagtaaactctaattttgatgttcaaattaatgagcctgatgtttcgcctttacaacttcaaggtccaaaatcacatcaaattatgagaactatttttggaaattggattgacgatattaaatattaccatcacaaggattttatttttgagaatatcccattagtgatttctagaactggttggagtagtgaatttggctatgaaatttttttaaaaaatcataatttaggagataggctttgggaaattattatgagtattggaaggcctatgggactgcatgttggtcatacttctacaattagaagaattgaaggagctatgctttcttacgttgctgacatggatattagaaacaacccttacgaactagggcttgaaagactagtagacttaaatcagaattttattggtaaagaagcactcaaaaaaattaataatgatggtgtatctatcaagttctgtggatttgaaatagatggacctccactagcaaacccaactgatgagcatattgatataacttataaatctgagaagattggctatattacctcatcagttttctctccaagacttaaaaaaaatattggccttggttatttccctataagacattcatacataggatttgaagctgataccaaattcggagatcataaaagaaaagttaaaatagttgaaaaaccatttattgatcctaataaaaatattgcaaaaggtataaaaaactgag

SEQ ID NO: 303764 - DNA, 907 bp, Unknown
  Bacterial polypeptide expressing nucleotide sequence isolated from the Sargasso Sea
tatgcacgctataaatcataaaaatgaaaagtttaaatataaagaaccttttaaaggactttttacacaaggaatggtatgccatgaaacttataaagatcaaaataataattgggttagtccagacgaggtatttacaaaggatgggaaaaactatttaaaaaaaaataatgaaaatgaaaaaattaaagttggtccaagtgaatctatgtctaaatcaaaaaaaaatacaatagatcccgaaaatataataaatgaatatggtgctgatgctgtaagattatttattctttctgatagtcctcctgagaaagatgttcaatggtctgagcaagggatggttgcatcctataaatttttacaaaaattttggttgctgcatcaaaatataaaaaaaaatttatcatcaaaaaatgaagatgaaaaaagttcaatagaacttaatcaatttacaaatttaacaatacaaaaaattacacaaaatttagaaaaatttcattataatgtaattgtagcaaacctttatgaaacttataattttttaattaaatttgtaactaaaataaatgatggggcgagtcttttaaaaaattacaccgaaatattaaaaataatgactcccattgttcctcactttgctagtgaatgtctagaagatctaggagaaaaaggtgaaataaaatggccaaaagttaatgagcaatatcttattaaggaaaatgttaatatagttttacaaataaatggtagaaaaagaggtattattgttaataaaagaaatgttgatgaagaaatgctaattaatgaaatcaaaaataattttatttatgataaatatttaaaaaataaaaaaattataaaaagtatttatattaaaaataaattaatcaaccttattttaaaatga

SEQ ID NO: 303765 - DNA, 1252 bp, Unknown
  Bacterial polypeptide expressing nucleotide sequence isolated from the Sargasso Sea
atgagcagtattatcgcgctttgcgacggtaataaattttacagttcatgcgaacagatttttaatccgctgtatcgtggtaagcctttgattgtggtctcgaacaatgacggcatgaccgtgacgttaagccctgaagcagccgcgttgggactaaagaaattcacgccttactttcaagtggccgagttctgcagggcaaatggcgtggtagtatgctcgagcaattatgcgttgtattccgaaatcagcacccagtttatgagagtcgcctcgagagagtgctattcgtattttccctattcgatagacgagatttttgctgaatttgggaatgatgacacaccacagaacctctcagtattaggccgcaagctcaggcacgatgtctggcgcgaggtcagattgcctattggtgtcgggctaggggatactttaacgctggcgaaagccgcaaatcatgcagcgaagcgcttaggctatcgcggtgtttgcgtgattaaagcgcacaatcgcgaagccatcttaggggcgatgttgactaccgatgtgtggggagtgggtaaacgaattggtcagcggctaagttcgatggggattcatactgcgctgcagttggcccaaatgaagactaagaccgcgaggaaaatgtttggcgttaacatcgaaagaacaattttcgaattgaatgggacaaaggcgtttaactgggacgatatgcccgttaataagcgacagatattctccacacgctcagttggtcagcgaataacgacgatagcggggttaaaagaggcgttgtcattccatgcgtgtgaagcggctcgaaagctaaggggtcaaaaatcggtagcacgttgcttggtattttttgctcaaacatccgcgtatgacaagcatggtgttagtggtttcagtcggacaattcatttaccagctcccaccagtgacagcatgatcatcagtcagcaaattacctctgcggttgagtcatgttatgccgcagtgccgtactatcgcgttggggtagggctattagatatagaaccaggcttgcagctcgatatgttcaacgacaacctgggaaaaccagcgttgatgtcagtcatggacagattaaacgagcaaatgggcaaaggtgccgtgttcgtcgccgccaatggcattgagaaaaaatggcagatgcggcgagcgttcttgagtccatcttatctaacaaattggaatgaaattccaaccattcgctgttagc

SEQ ID NO: 303766 - DNA, 787 bp, Unknown
  Bacterial polypeptide expressing nucleotide sequence isolated from the Sargasso Sea
gatgcgcgcactctacacggcagccaccggcatggccgcccagcaaagaaatatcgacaccaccgctaacaacctggctaacgtcaacaccacaggttacaagaaaagcaaggtccattttcaggatctcctctatcacaatgaaagaacggcgggtgttccatcatcagtttcgacccaggtcccggttggtttacatgtgggtcacggtgtcaaatttatcggcacggaaaaaatccacacccaggggaatttggaaaacacaggtaatgatcttgatctcagcattgacggacatggttttttccaaatccttcagccgaatggaattgtgggctattcccgagacggccatttcaacatcgacggaatgggacgattggtcaccaatgatggtatgcttctcgatcccgaaatcaacattccacaggacacccgaaaaatcgaagtcggatttgacggaactgttacggtatttctgagggacgaaaccatgccggaagcgattggcagcattcagcttgcacgcttccagaaccccgctgggctgactccgctcggcaagaacctgtatgtttctacgccagcatccgggaacgccatcgtagatgcaccaggtgccagcagcatgggaaccctaactcaaggatttctagaacgctcgaatgtctccctggttgaagaaatggtaaacatgattacttcacaacgtgcttatgaagtcaactcgaaggccatccaatcagcagacgaaatgctcaaaaacaccaacaacctagtccgttaa

SEQ ID NO: 303767 - DNA, 2107 bp, Unknown
  Bacterial polypeptide expressing nucleotide sequence isolated from the Sargasso Sea
aatgaaaaactaccttgtcaaatttagactagatgaatttgtattcccaattacaacattaagacctgaaacaatttttggtataacaaatctctgggtcaatccaaatacaacatacaaaaaaattaaggcagatggtgagaaatggattgtttcagaagaatgtgcagaaaaattagaattctttggaaaagaaattacaattgagggagacattaagggaacagaaattattggtaaatttgcaaaagcaccacatacagaacaagaaattccaatttttgaagcagaatttgttgaatcaggaatgggaacaggcttggtaatgtcagtaccagcacatgcgcctaaagactatcaagcattgatggatttaaaatcaaaaaatcacgaattagcatctaaaattgaacccataccaatcatatcaacagaaggatatggaaacattcctgcaaaagatgtatgtgaaagattaggagttactgatcaagtagatgcaaagttggaagaagcaacagaagaattgtatctcaaggaatttgttaatggaaaattaaatgaaagatgtggagattttgttaacgaaaaagtagaatttggacgaaataaagtcagagactggttaaaagataaaaatgaattagaatcattccctactcttcaaaattctccaattagatgtagatgtggttctgagtgtgttgttaaaattttgaacaatcagtggtttctcaattatggagatgaagaatggaaaacgttggcaagaaactgtcttgatagtatgaatattcttccaaataagattaaaacagaatttcacgatgtgattaattggttacatgagcgagcatgtgcaagacaacaaggacttggaacaaaactcccatgggataatgattggattgttgaatcattatcagatagtgtaatttacatggcatattacacactatctcgatttgtaaatgatggaactgtgcaagcagataatctcaccaaagagttctttgattatgttttcttagataaaggaagtatagacgcagttgctagttcttctaatctcagtgaagatattatcaatacgatgaaaaaagagtttcaatatttctatcctgtagatgcaagacattcaggtcgggatttagtgcaaaatcacttgtcattttttgtattgaatcatgctgccatatttgaagaaaaattatggccaaaagagattgttgttaatggcagtgtcatgatggacggtgctaagatgtctaagagtatgggaaatatcattccacttcgtactgcaattcaggatcatggtgcagaccctatacgattagcaataatttcatcagctgagctactccaagatgctgattttaacatggaatcagtctcaggtattaaaaataagttagaatcactgttagatgagtgctccacactgaaaaaaggggagattggagatttacaaacagaagacaaatggataatttctaaaacacaaagcaaaattgcagaggttacagaagctgtagaaaaaatgagattgcgagaagctctacatgatattttatttacatttgagagtgatttgagctggtaccaaaaaagaattcaagcaaaagagagagacgatgtttcaggaattcttcatcagataaattcagctagagttgcaatgctttctccatttgctccacacgtagcagaagagatgtgggaaaaattaggaaattcggaacttgtatcaaaatcaacctggccagaatattcttcagataaagttgatgtaagtataattcaagccgaggaattattgaaatcaactatagaagatattgcaaatattctcaaagtaacaaaaatttctccaaagaaaattgtgatttatgtaaattcaaacagtgtgaaatcaaaaatttatcgtaaaattttgaatgtaatggtaggtggtcaaaacaacatgggagttgtaatgaaagagttaattgcagatcctgaaactactgatgctaaaaaaatgccagactttgttcagaaagtaatcaaagacttgcattcagaatcagaatcaatcaaaaaaatgaagcttgaatcagaatca

SEQ ID NO: 303768 - DNA, 523 bp, Unknown
  Bacterial polypeptide expressing nucleotide sequence isolated from the Sargasso Sea
ctgatgaaaaaacaattcaaagatagtaaaaatcaacttacagatgaatgtaaaaaattatttaagaaaataaatgatgattatgaaaaaagacttaatctaaataccattgtttcatcttgcatggaaattctaaataatattaacggacgttttgatgataaaaacgtcaattgttcaaaagaagatctcctaaatgtatatgacttcctattacttgctttgcacccgatagctccccatatctgtgaaacactatatgcagaagttcttaagaaagacattgcgcaagcagaatggcctgaagatagcttctttgttgccgatctctcagaatcaaattatttagttcaagttaatggcaaattaagagcaaatattatgatgccaatagacttaaaagaagatgaagtaaaagaaattgccctaacaaatgaaaatgtagccagacatttagaaaataagaatataattaaaataatttttataaaaaataaattaattaattttgttcattcgtagt

SEQ ID NO: 303769 - DNA, 703 bp, Unknown
  Bacterial polypeptide expressing nucleotide sequence isolated from the Sargasso Sea
atgaagttagttacaacagaagaagcatggggaacatgtagaaaaaatggttaccactttcaatttgcaggaaattggaataaccttcatcctgaaagagttatagtaggaagagctgttacatgtagatgggttcctcaaagacctgacttaaatgatgccatagaatcccaagggaaatctgataaaagaattggaggccaaaattcttgggtaattgacgagttagaaaaaaatgatttaattgtagtagatttattcggtaaaatatttgatggtacttttgctggagataatcttacaacagcaataagatcaaaaacaggaacaggaatgatagttgacggaggtataagagatactcaaagaatttacgaaatggatgattttaatgcattcataagaggagtagatccaagtgcaataaataatgtttcaatgcctgaaataaacggagttactcgcataggtgaagctacttgtatacccggtgatgttgtacttggaacaagatcgggagttatttttatacctcctcatctcgcagaagaggtggttatatcttcagaagatgtaagacttaaggatgaatttgggcaacaaagaattatggaaggtatatatacccctggtgaagtagatagagaatattctgatgatatgctaaaagattttgaaaattggaaaaaagaaagagaataaa

SEQ ID NO: 303770 - DNA, 475 bp, Unknown
  Bacterial polypeptide expressing nucleotide sequence isolated from the Sargasso Sea
catttaactatcaaaaaagttactgaggactatgaaaatagatatgcttttaatacagtaattgcagcttgtatggagcttttaaattcaatgccagatcagattaaaggtgaaatatcatctgaaaatgatcaattctgccttaatgaattcaccgcatcaaccctgcaaatgctttatccgatagcgccgcatatatgtgaaactctgtggaataacttttttgagaatagctcagaaattgaggacagctggccgacttttgatgaagatctaatggtcactgatacatttgagttagttgtccagattaatggaaaagtcagaggaaaaatagaaatatcatcaaacttagaacaagacgaaatcgaaagtgttgctaagtctattaaaaatgtggatgatttacttggtgataaggaaatcaagaaatgtatctatgtaaaagaaaagcttataaatttcgtaatctagt

SEQ ID NO: 303771 - DNA, 679 bp, Unknown
  Bacterial polypeptide expressing nucleotide sequence isolated from the Sargasso Sea
agaaaaatacattgaattgtatggagcagattcaataaggacctttatgatctttgcaagtccaccagagcaatcactagagtggtcagataatggtttggaaggatgtcatagatttttaaaaaggttatatgcactttctgaaaagattaaaaatcgttctgaagatacttttaagcattcaaacacttctatcgaggaagaaattaaagagttgtccattaaaattaatgatgactaccaaaaaagattgaatcttaatactgtagtttcatcgtgtatggaaatatttaataaattaaatagaagaatagataaaaataaaatcacagctgacgaaaatgaatttttaaaagtatatgaatttttacttatttctttatctcctattgcaccacatatttgtgagtatctttacgaagatgtgctagaaaagaattttaataacgcttgttggccaaaagaagatttttttcaacaaaaaaggagtgaagtaaattatctagttcaagtaaacggtaaagtaagggcaaatatagttctgcgcgtcaatctgaatcaaagtgacgttgaaaaagctgtatcaaaacatccaaatatttctaaatatctggaagggaatgaaataaaaaaagtaatatttataaaagataaattaataaattttgtaaatggttag

SEQ ID NO: 303772 - DNA, 874 bp, Unknown
  Bacterial polypeptide expressing nucleotide sequence isolated from the Sargasso Sea
aaaagtaaaagaaccatttaaaggactttttacccaaggaatggtttgtcacgaaacatataaggatgaaaaggggaagtggttaagccctgatcaaattcaaaaaacaaatgggagatttacatccaaaattgatggatcaaaagtcaaaattggtccatccgaagctatgtcaaaatcaaaaaagaatattgtagatccagaaagtatgattaaaatttatggagctgacgcagttagatggtttatcctttccgacagccctcctgaacgtgatgttcagtggtcaacagaaggagtttctgctgctaataaatttatgcaaagaatatggaatttaaatagtaaaattatagaaaaaaaagaggaaaaaactgatcaaagcagcgagaaaaaatttttatcgaaatttaatgaatatctttttaaaatctccgatttaatcgaaaaatttcaattaaatgtagctatagcaaaaatacatgaattaaccaaccttttagaggataatttaaacagaaaattaagcaggaaaagtctattggagtcacaaatcaaatttgcaaaacttataatgccttttgtcccacatctatcgtgtgaatgtttgtctaggctagagggaaagaatttttatttggaaattcaatggcccaagggaaataaatctatgttaaaaaatcaagaagttacattagttgtccaaataaatggtaagaaaaggggcttatttgttgcaaaaaaagatttagaagaaaaggatgccttgatggaagcaaagaaaattgaaaatattaagaaaaatcttaaggataaaaaaatagtgaaaaatatttttgtaaagaacaaaataattaattttattactacttaa

SEQ ID NO: 303773 - DNA, 547 bp, Unknown
  Bacterial polypeptide expressing nucleotide sequence isolated from the Sargasso Sea
tgataaaaagtttaaaaaagtaaagatacaaggtgagttagataacagtcagaaagactttagaagaaaaattcacttaactataaaaaaagttactgatgactacgaaaatagatatgcttttaacacagtaattgcagcatgtatggagcttttgaattcaacgccagatcagattaaaggtgaaatatcatctgaaaatgatcaattctgcctcaatgaatttatcgcatcaatcctgcaaatgctttatccgatagcgccgcatatatgtgaaactctatggaataacttttttgagaatagctcagaaattgaggatacctggccaacttttgatgaagatttaatggtcactgatacatttgagttagttgtccagattaatggaaaagtcagaggaaaaatagaaatatcatcaaacttggaacaagacgaaatcgaaagtgttgctaagtctattaaaaatgtggatgatttacttggcgataaggaaatcaagaaatgtatctatgtaaaagaaaagctaataaatttcgtaatctag

SEQ ID NO: 303774 - DNA, 466 bp, Unknown
  Bacterial polypeptide expressing nucleotide sequence isolated from the Sargasso Sea
cttgtctaaggtaaaagatgattatgaaagaaggcatgcatttaatactgctgtagcagcaataatggagcttacaaattatattcctaagaattatttaagcgatgaagcatcaatatctgaaagatcagctgccgatgaagcgatcaaaagtattttgattatgctttctccaatagcgcctcatattactcaagaactttggtcaatggtgggggaaaatgatttgataattgatgcatcctggcctgaagtagataaaaatcttcttgttgaagatcaagtcgagctagttattcaagtaaatggaaaattaagaggaaaaatagaagtagcaattgatctagataaacaaaaagtagaagagctagcactacaaaatgaaaatgttctaaaacatattgatgataaagatataaaaaagattatttatgtcccgaataaattaattaatgttgtggtttag

SEQ ID NO: 303775 - DNA, 1801 bp, Unknown
  Bacterial polypeptide expressing nucleotide sequence isolated from the Sargasso Sea
tatgaaaaatggactaaaagcactttccttttttaggaatgttgtttttctaaagtgggcatcacaaatcatttttctagtaggtcttttatacataatctggagctatattcagaatgcagttgtaaatcttgaacaaacaaatatagctttttcatggggatggttaggagaaacaccaggtgtttcgatagcagaaggcatgtatactcttcctaattctggtcgtcagatgattcaagttggaatgttaaatatgttaagagtcacagtcacaggtatttttgctgctacatttttaggtacgtttcttggaattgctagactttcaaaaaactatatagtcgaaaaaacctccacaggccttctagaggttgttcgtaatgttcccttactagtccaaattttcttcttccaagcttttgttttaacttttcctagacttgaggtttttgatgtagggacatataaccttcatgtgagcgcaaaaggcattgctttcccgtggctaaatagacagcccacagcatatttattttgggtttatctattggctattcttattttggctaacagaatttataaatggcgggtacaaattcttgaaagagaaggtagagaaactaggccttttgtttggtcagttggaatctttctcggactactagtcgctggctggtatggaggatatcgaatcatgggtatcattggatttttagctggctatatttcaaccggagttgaccttctacctgcaatcttttatcagatacttttctcttcaattgcagtatttattggtttcaagtctacaaagaagtttatagatagtaaaaaatcagaagaagcacagggaatttatagcgacgatgattattttaaaataatattaaatgtcatagttgtattactagttgttgttttaatgttttcttctgtaggattgggtctttctaactttttagttggtgacgaaattgtttttaaagctgactggggagttccacagttctttgacggagttaataataaattatattggaacccagaagcaaaaattgtattagatcctcaactggacggaatgaaaagagcagaaatcatagattggattgccgtccccggaacagaagtgacagagggtgatgtggtagcaagagccacagcaaaagacttaaagggagatttaaatcaagaaatttctatttatgcgaaatacacaggtgtaatagaagaagtttttgtgtctgagggagacactgtaaaaataaatgaaaaaacatatgacattcgagtaacagacagcaagccattagaactttcaagaccacgggttgaacaaatcggaacaactaaatttaaaagatatgctgatgggtatggcaaaagcctttccgtaggatattttgctatttggcttggcgtagtgctctatactgcaatatttatctcagaagtagttagagctggaataatggcagtttcaaaaggacagtctgaagcaggtctttctcttggactaggaaggggtgccctattaaggttagttgtcttaccgcaggcaataagggtaatgcttccaccaatgggtaatcaatatctaaaccttgccaagaacacgtctttagggatagccgtagcatatccagaaattgttgcagtaggacaaactttatacaatcaagaagggcagacattgccagtatttttaatctggatggcattttatagtacagtaagtttgactatttcaacaataatcaattattacaatagaaaaatgaagatagtggagaggtaa

SEQ ID NO: 303776 - DNA, 1840 bp, Unknown
  Bacterial polypeptide expressing nucleotide sequence isolated from the Sargasso Sea
ctgaaatacagcttctccggccttcccccgtacgacgcgtccgtcgtcgacacgcaggcgggcctgtcgcgcctgctcgatgccgcgcggctcgacgcggtgctggtcacgtcgcaggacgaatacgtgaccgagtacctgccgctcccaaacaatccgcgctacgcggtgtcgggtttcgacggctcggccggctgcgggatcttcctgagcgcggcgaccgcgcaggcgctcgatctgcccccgttcgtgctgttcgtcgacggccgctatcacctgcaggccgagcagcagtgcgatccggcgcgcgtgcgcatcgagaagctcgggatgaacgtgacgatctggcaggcgatggccgactggctggtcgcgcacggcagccggctcgcgcgggtcggctacgacgcgcggcggatcagcgtcgcgcagcgcgatcgcctgttcgagcagacgcaggccgcgtcgctcgactggacgagcctcgccgaccgggagatcgatcgtgcgatcgcgctgccgggctgggtcgtcgagcggccgatcttcgaagtgccggaagcggcgaccggcctgagcgtcgcgcagaacctcgacacgctgaaccgccagctcgccgcgcataccggcgcgccggacggcaagaccgcgttcttcacctgcgcgtcggacgatctcgcgtatctgctgaacagccgcggctatcacattccgaatgcgtcgtcgcacctcggcttcctgttcgcggtcggcggccaggtggcgttgttcctgccggaaggctgcgaccgctgcgaggtcacgctcgcgtcgtatccggcgctgcacgtgatccggcgcgatgtcgcggcgctcgagcgctttctcgcgcagttcgacgtcgagcacgtgtgctacggcttcgaatcggtgaactgcgcgctcgtcgacgcggtgaagcgcgcgtggccgcatgcgcggcaggccgacttcaacccggtcgaggcgatgcgggccagcaagacgccggcggtgctcgaccggttccgcgacgcgttcgcgcgcagctccgcggcgatcgccgagacgatgcgctgggcgaaggccggcgagccgggcgtgcgccacaccgaatacgacctggcgcgcacgatcaacgacgcgtacggcgcacgctcggcggtggcgctgacgtttccgtcgatcgcggcgaacggcgcgaacagcgcgttcgcgcattacaccgcggcgagcgccgacgtcgagctgacggaaggcgaactcgtgctgctcgacagcggcgcgtactacgaagcgggcttcgcgacggactgcacgcgtgtggtactgcgccggacccggccggagacggtcgcgcagccgtggcagcgcgagatctacacggtcgcgctgaaggcctgcatcaaggggctcgtcacacgcttcccgagcaccgcgaagggcggcgacgtcgatgcgctcgtgcggcaggtgtgccgcgaccacggccacgatttcggtcacggcaccgggcacggcgtcgggattcacgtgcacgagggcggcgtgcggttcgcgccgggcgcgaagtacgggctcgtgcccaatgcggtggtttcggtcgagccgggcatctacgtgccgggcaagggcggcgtgcggatcgagaacatcgtgatcatccaccgggacgacgcgcagccggataccgtcacgttcgagaacatcgtgacggtcggctacgactgggacctgatcgatctcgacctgctggacgacgacgagcgcgcgtacctgcgcgactacgagcggctgtgcgtggagcgcggcacgcaggtcaccgcgtgtccgctgctgtagg

SEQ ID NO: 303777 - DNA, 142 bp, Unknown
  Bacterial polypeptide expressing nucleotide sequence isolated from the Sargasso Sea
agcaatttatggctgtcctgctcatgaccaaagagacttagattttgcaaataaatacgacctcgaagtcattgaggtaataaaaggcgatgatcatgttattttgacaacaaaaacgcctacacaggtgatggcaaattaa

SEQ ID NO: 303778 - DNA, 979 bp, Unknown
  Bacterial polypeptide expressing nucleotide sequence isolated from the Sargasso Sea
atgacttttttttcaagagtttccggtttaatccgagacatagcgctgtcatatgttttcggcgcttctgcgatggcagatatatttttcgtggcgtttaggatacctaatttttttaggaggctatttgcggaaggcgcctttaatcaagcgtttattccggtcatggttgagttcaaggctagaggactagaggagctgaagatatttttatcatcggtttctggactgtttggcgctttactaatcatttttgtttttctcgggcttattggatctgacctcctggtaaagctgtttgcgcctggatttatgtcagactccgacaagctctctcaaacacgcgacttggttcgtattatgttcccatacatcgggttcatttctttaacagcatacgcaggcgctgtcttgaatgcacatgatcgctttgctgtgcccgctattacaccagttttgctcaatttgtgtttgattattgcatcgcttctttggatttgggaggttttagatggtctagcagtggtggtattggcttgggcagtcttgcttgccgggctagcccagctggcttttcagattccatcactgggtgccttgggccttcttgttaagcctaacctaaattacaggcactcgggtattaaagaaatgggtgttttaattttgcctgctatatttgcttcttccgtaggacagataaacgcattagttaatacagttatagcgtcaaacctggtggagggcagtatatcatggttgtactatgccgatcgtttgcttgagctgcccgttggaatggtggctatcgcattaagtaccgttatgttgccccatctatctcgactatccgccggtggttcagaagacggtttcagtagcttaatgaattggggcgttttgatgggtttggggctgggattgcctgccgggatagggctttatattctatctgttcccttggtgtctgtgctgttta

SEQ ID NO: 303779 - DNA, 766 bp, Unknown
  Bacterial polypeptide expressing nucleotide sequence isolated from the Sargasso Sea
ttgttaattggtaattttgatggccttcatgtgggtcatcaaaaactatttaatctagctaaaaaatttaaaaaaaaatttaaatctaaaattggtgtaataacttttgaaccaatgcctaagatgtattttaataaaaatttaaaaaattttaggatttcaaatctcaatcagaaaaaagaaattttgaaaagttttggaactgatttcttaattattaaaaaatttaatagaaaattttcgaaaataaaatctttagattttataaaaaaaattctttatcaaaagctgaatactaaatttatatttgttagtagcaactttaggtttggtaataaaagagagggcgatataaaacaactaacttcttatgaaagaatatttagatacaaattaataaaaccaaagcctttaaaattaagaaaaaaaattgtttcttctacactaattagaaaacttatatctaaaggaaaaataaatttagctaataaattacttaatagaaaatggagcattttttcaaaggtacaagaaggtaaaaaattaggaaaaaaaattggctttccaacatgcaatttagatattaatgattatgtaattgcgaaaccaggggtttacgctgttaaaatttatcaaaaaaataaaaaaaagtgtctgaatggaatagcgaatttgggatatcgaccgacttttaatcaaaaaaagttactactagaagtgcatatatataagtttaacagaaatatatataataaatacttaacta

SEQ ID NO: 303780 - DNA, 538 bp, Unknown
  Bacterial polypeptide expressing nucleotide sequence isolated from the Sargasso Sea
ttgcaagactctttattattaaaagagaaaaaaaataagtctgttcttctagataatgtaaaatatgatgcatccgattcgatcataatcgatcagaagaataacaagataactctttacaacaatgctaggattgagtatggtgatattgaacttacatctggccttattgtcctagattataaagagaatattgtaaatgcaggaagaattgctgattctaagggtgagctcagtcagtatccaacttttactcaaggtggaaatgtagttaatccagattcaattaaatataattttgacaatcaaaaagcacttatatggaattctaagtctgaagaaaatggaatgaatattctatcaactttgacaaaaaaacaaaatgattcagtttattatttaaaagacggtaaggttactacaggtggtaatttattgggagatgagacagaggaggctgattatttctttaaaatccgtaaaggaaaattagttccaggaggaaatatcattacaggttttacaaacttatttgtca

SEQ ID NO: 303781 - DNA, 691 bp, Unknown
  Bacterial polypeptide expressing nucleotide sequence isolated from the Sargasso Sea
aatggatcgactgacgagccttggcgtattcgtcgcggctgtcgaggaaggcagctttgctgctgcggcgcgccgcttcgggctatcgccagcgatggccggcaagcatgtcagcgcaatcgaagccgatctgaatgcgcgactcctgcagcgcactacgcggcggttgagtctgaccgatgccggccacacttactatgagcgctgtaagcggatccttgaagcgttcgacgaggcgaatcgggaagcaggcgattcgcaaggcacggcgcatggcgtactgcgcgtcgcagcgccggtcaccttcggcgccatgcacctgggcgacgttgttgcccgctatctggaggaccatccgcacgtcaacgtggaagtgctgctcggagaccgctatgtcgatctcatggatgcgggcgttgacgtggcaatccggataggacggttgacggacccacgactggtgacgcgcaggcttgcgccctgccgaatggtcgtatgtgcgtctcccgcgtatctcgagcgccacggagcgccgcgcaaacccgaagacttacgactcgcgcagcggcttgccttcagcgaagccgtgtcgtctggcgactggacattgctcgatgcgagaaaccgcgcgcatgtgatcgacggaccatgccggatgacagccaacaatacgcagatgcttcttgccgcc

SEQ ID NO: 303782 - DNA, 306 bp, Unknown
  Bacterial polypeptide expressing nucleotide sequence isolated from the Sargasso Sea
tgccactttttgccccaatggcaccacatttggcagaagaatgttggaaaataattggttgtaatggtataatttctcaaagagaatggccacaattgattgaaaaatatattcaggaagataccgttcttattgtagtgcaggtaaatggtaaaaaaagaggtgaaattgaagtagctaaaggcttatcaaaaaatgaggttgaagctgcggctatgaaaatcgataatgtcagtaaatcaatcaattctaagattagaaaaatcatatatgtcccaaataggattctaaatgttgttatctaaa

SEQ ID NO: 303783 - DNA, 676 bp, Unknown
  Bacterial polypeptide expressing nucleotide sequence isolated from the Sargasso Sea
aatggactcaaattccaattccattcaatttttcacctcttttcaatcgtctgatttcttttacatattagacgcagcattcaacactttactgatttcgtgtgtttccatcattctaggaacgattttaggtatattatttggttgggtccttcatgtttctaagtggaaaggggctgctacacttggactctttttagatattttccgaagtattcccttaatcatacaaatcatacttttttacaattttttcccattaataggaatctatctggatgcattcgaggcaggcacagtcgttttaaccatctactgcagttctcttatggcgtttgtattcagaggaggtcttgattcagtagagaccgttactagaagagccgcacgttctctcggaatgacttattttcaggacctcagatacattgttttcccaataggtcttcgtgctatacttccttcttggacaggcgtagccctaggggtattaaaagattcggcattggtttctgtgattggctatgtagaactgttaagagcatctcaaatattaattactagaactcaacagccttttttaatccttacagttgtgggattgttttatttttcactgtcttatccaatagcaagattcagcgaccacattgagaaaaaatggcaaaatgattga

SEQ ID NO: 303784 - DNA, 2098 bp, Unknown
  Bacterial polypeptide expressing nucleotide sequence isolated from the Sargasso Sea
cctgcgaacggcgcatcgtacgccgtgcggaacgcttccccactcatcattccagacggagacagccgatgctcgtcctgattctcggtttagcgatcttcctcggtatgcactcgatccggatcgtcgcggacggctggcgctcagcgacgatcgagcggatcggcgagaagcgctggaagggcccctatgcgatcgcgtcgatcatcggcttcgtgctgatcatctgggggtacggcatcgcgcgccagggcgcgacgctgctgtgggtgtcgcccgtcggcgtgcgccacctcaccggcatgctgaccgcgatcgccttcgtgctgatcgccgcctcctacgtgccgggcaaccgcatcaagacgctcgtcggccatccgatggtggccggcgtggcggtgtgggcgatcgcgcacctgctcgcgaacggcacgctgcacgcagtcgtgctgttcggtgccttcttcgtgtgggcgctggtcgatttcgtcgtgtggcgtgcgcgcgaccgccgcgatggcgtgcgctatccggcgggcaggctgtcaggcgacgtcgtggcgatcgtggccgggctcgtcgtgtgggccgtcttcgcgctgttcctgcacggctggctgatcggcgtgcgtccgttcggctgagcggccggcacgtcgagagactgagaagtcgaacagctgagcggcggccgaccggcgcgccgctcgcctgcccggggcaacggtcagcgcgccttcgcgccggccgtatcgccgagtggcaccggcttgcgacgcaggaaatacgccgcgacgatcgcaagcgccgtcaataccgtgaaccagaactggaagcgcgaatccgggttgaacgcctgcgagccgagcacggccaccagcgccagcagtgcgatccagttcgacaccggataaaaccacgcgcggaacgcctgcggatcgcgaggcgcgtgcttctcctgccgccgcatcgagaagtgcgcgacgatgatgaagatccacacgatcatcacgaacgcgccgctgctcttcgcgagcatcaggaacaggtcgccgccgctcacgaagtgaacgccgaggatcgacacgcagatcgcgaggcacagcacgagcgcgttcatcggcacgcccttcgcgttggtccggccgaacatcgccggcgcgtggccgcgctggctgagcgagaacagcatgcgcgagttcgagaacaggaacgagttcatcaccgacatgaacgacacgaacagcacgatcttcatcgcgacggccgcgctcgtgaagcctgccatgccgaacagcgacacgtacggcgatttcaggttggccttgtcggtccacggcatgcacaggatcaggatcgacaccgagccgacgtagaacaccatcacgcgcacgatcacgctcttgattgcacggatcacgttcttgcccgggttctcggattcgcccgccgcaacggccgcgatttcgctgccgccgagcgagaagatcacgaccatcacgcccgcgagcacgggcgagatgccgttcggcatgaagccgccgtgacccgtgaggttcacgagccccggcgcgggaatgcgcggctggaagccgagcaggatcgaggcgccgagcgccatgaagacgatgatcgtcgtcaccttcgcgaacgacagccagtattcggcttcgccgaacgagcgcaccgagtacgcgttgctcgcgatcagcgtgacgagcatgaacagcgctccgccccacacgggcagccacggcaggaaatcgtggaggatcgcaccgagcaggatcgcctcgacggtgatcgtcatcatcgacttgaaccagtacagccagccgaccgcgaagccggcccattcgccgagatagctgcttgcgtaggtggagaacgatccgctgtcggggttgcgggacgccatttcgccgagcatgaacatgaccagcgtgacgatcacgccgccgatcaggtacgacaggatcgccgcggggccggcggtcgcgatgatggcgccggagccgacgaacaggcccgcgccgatcacgccgccaagcgcgatcatcgtgatgtgccgttgcttgaggctttgcctcaatga

SEQ ID NO: 303785 - DNA, 875 bp, Unknown
  Bacterial polypeptide expressing nucleotide sequence isolated from the Sargasso Sea
aaatagtaattttaatatcttagaacctttcagtggtctatttacacaaggaatggtgtgtcatgaaacttataaagatccagacaataattggataagtcctgaagaaattgaaaacatagatggaaagaagtatcttaaacaagatagatcaaagttgatttcgattgggccttcagagtctatgtcaaaatcaaaaaaaaatactatagatccagaaaatataattgccaattatggtgctgactcagcaagactttttatattatcagatagtcctccagaaaaagacgttcaatggtccgaagaaggtatcgtgtcatcttttaaatttattcaaaaactttggaaattaaatgaaaaaatcatcaatgaaattaataaaaatcataacaaagataaagatgaggagattacaaaatataccaataagtatttaaagaaagtttacgataatcttgagagtttcagttataataaaataatagctaacttgtatgaaatgtattctttcataaacaaacaaatagaaaaaacttatacaaaacatacaataattgaaaattatcaaaaaattttaattacaatgacaccaattcttcctcactttgctaacgagtgcttaagtatgataaaagctaaaaatttgaagtggccagaatacgatacttcaatgttaaaagaggaaactattaacgttgttatacaaattaatggaaaaaaaagaggtcttattcaaacaaaacccaatattgcagaggaaaaactctttgaaataattaagaatgatgagaaagtaatgaaatattttgatcaaaaaaaaattaaaaagaagatttatattaaggataaacttttgaacataattatttaaa

SEQ ID NO: 303786 - DNA, 209 bp, Unknown
  Bacterial polypeptide expressing nucleotide sequence isolated from the Sargasso Sea
aatgattgattcaaaatataacccaagagaaatagaagaatcagcccagaattattgggaggataagagagtttttgaatcgattgaggatcaagagaaggaaaaatattactgtctttgcatgtttccttacccgagtggacgattgcatatgggacatgttaggaattacacaattggtgatgtcgtatctaggtatcagagaatgc

SEQ ID NO: 303787 - DNA, 211 bp, Unknown
  Bacterial polypeptide expressing nucleotide sequence isolated from the Sargasso Sea
atgggaaacgcagacattccttatgaccctgctaagatagaagaaaaaattcaagcattctggaaagaaaatgagactttttcggtaacagaagatccaaacaaagaaaagtatttctgcttaagcatgtttccataccctagtggatctattcacatgggtcatgtcagaaactataccatcggagatgtaatcagcagattcaaagaat

SEQ ID NO: 303788 - DNA, 751 bp, Unknown
  Bacterial polypeptide expressing nucleotide sequence isolated from the Sargasso Sea
gaaatttcagaatattttttaaaagatgaaaaatttcaaaaatttaaaaaggaatgttgtaaaacaggtacaacagaggaggcaattgcaataggtgaaaaaataggctttaaaacaaacttaatggcaaaaaatccattggatcctagtcaaaaagttccagttttctttgctaattttgttttaatggattatggatttggtgctgtttttgggtgcccagcccatgatcaaagagatttcgattttgctaaaaaatataatcttaatatcaaaaccgttgtaaaaccaaatgaagaacatgatgaatttgaggttcaagatgaggcctactcagggccaggtatcataattaattctcaatttttaaatggtttaaaagtaccagatgaagctgttctaaagacaattgaaattcttgaaaagaaaggaattggtaaaaaaaaaataaattttagattaaaagattggggggtttcaagacaacgttattggggatgtccaattccaatagcttatgatgaaaatggaaatgtaataacaatacctaaaaaagatttaccagttaaactacctgaaaatgtaaatctaaattcaaaaggaaatccattggactctgaagataattggaaaaatatagttattaatggaaaaaaatacaaaagagaaacagacacacttgatacatttgtttgttcgtcctggtattatgtcaggttttgctcatctagtgaaaaaaactatggttata

SEQ ID NO: 303789 - DNA, 382 bp, Unknown
  Bacterial polypeptide expressing nucleotide sequence isolated from the Sargasso Sea
ccgaccggggagagtccattaaaatatcaccatggatttctaaaaacagtttgtccaaaatgcggaggtgatgctgaaagagaaactgatacgatggataccttcatatgttcctcctggtactattatgcctatgtagtcccttactggaaaaaaggtgaaagactgatgcgtgatgatttcccatgggatgtggaaaaaataaattctttatgcccagttgatcagtatactggaggaatagaacacgccaccatgcatcttctttattttcgatttttcaccaaggcacttgcagatttaggttttctggattttcgtgagcctacaaaacgactttttaaccagggaatgatactaggtgaggaccacgaaaaaatgt

SEQ ID NO: 303790 - DNA, 238 bp, Unknown
  Bacterial polypeptide expressing nucleotide sequence isolated from the Sargasso Sea
aagatttattgatcctttacataaaaatcctataaataattctttatttgacgattggtctcctgttcatcaatatgtgggaggtattgagcatgccgtattacatttattgtattctagattttttgtaaaagctcttcattccatgggtgagataaattttaaagaacctttttcaggtcttttttgtcaaggcatggtttgtcacaaaacctatcaagactcagataaaaaatga

SEQ ID NO: 303791 - DNA, 511 bp, Unknown
  Bacterial polypeptide expressing nucleotide sequence isolated from the Sargasso Sea
ttgtgtaaagattacgtaacacgctcagatttcatagattttaaaaaaaagtgttctcaagtaggaaccactgaggaggcgattgctaatgctgaaaagattggttttaaaacacatttagaggctgagcacccatttattaaaggaaaaaaaattccaatttatgtttcgaattttatacttatggactatggaactggcgcaatatttggatgtcctgctcatgaccaaagagatcttgattttgcaaataagtacaaaattgaggtaatacaagtagtcaagcctaaagatataaataatgagaaaataaataatgtagcttacacaggtgaaggatcaataattaattcagattttttaaataatttaacaatttctgaagctaaagaaaaaattgtaaaagaaattgaaaaaaagaaaatcggaaaaaaaaagatcacatatagacttaaagattggggtgtatcaaggcaaagatattggggttgtccgatcccaatgatatatt

SEQ ID NO: 303792 - DNA, 931 bp, Unknown
  Bacterial polypeptide expressing nucleotide sequence isolated from the Sargasso Sea
actcatcaagatattatagccagatttaagcgtatgaataattataatgtcgtttatccaatgggttgggatgacaatggattgcctacagaaagaagagtccaaaatatatttggtgtaagaattgataatgacatcccatatatagaaaaccttgttgttgaaaaagagaaaaaaatcaaaggtttgtcaaaggacgaacctttgattataaacagaaaaaactttatagaaatgtgtcagatagttactgaaaaagacgaggtagtatttaaagatttgtttagaaaaatgggatattcaatagattggcaggatgaatattcaacaattgataatagttctagaacgatatctcagttatcttttttagatttatttgaaaagaatatgatatatcaatctgaatcaccaactatgtgggatatagattttcaaacagcagtggctcaagctgagattgaagatagagaaatagatggtgcttatcatgatattagctttggtgttaaggattcagatgaagagattataatctctacaactagaccagaattactcgcatcttgtgtaggtattactgctcatcctaatgataaaagatataaacatttatttggtaaaaaagctttatctccagttttttttgccccggtccctatttttccaagtgaattggtggatatggaaaaggggactggaatattaatggtttgtacatttggagatcagactgatgtgatatggtggagagaaaattctcttccactaaggcaacttttttcccaagatggaattgtagatcaaataaactttgatagtagtgataaaaattctgtttggcaatctgaaaatccaaatcttgcaaataaaaatattcacagtattcaaggaaaaaatcttgcccaaacaaaaaatataataattgatt

SEQ ID NO: 303793 - DNA, 772 bp, Unknown
  Bacterial polypeptide expressing nucleotide sequence isolated from the Sargasso Sea
tttgaagaaaacaatatttcttttagacaaacataaaaatgaggtgcttgctggtaaagttgaaaaaatgagcaagtcaaaaaaaaatgtgattgacccaagctctataattgaaacatatggggcagatacagcaagatggtatgttttgtcagatagccctccagaaagagatttagaatggacagcaagtggtattgggggtgcatttaagtttgttaaaaaagtttgggatctaactacatcaataataagtataagcgataagcaagaaaatgttaatacaaatccaaatcttgaaaatgaaactaataaagcaatagagaatgtcacaaacaatattgatgcctttcactacaacaaggctgttgcaaatatttatgcttttgtaaattctcttcagcaatttcaaaaaaattcagaaatttcaaaagacagttttcttgtgagtcttaaaaagttggctttaattattcaccccttcacacctcacttgagtgaagaaatgtggaaagccctgagttgtaaaggtcttgcaattgaacaagaatggccaaaacctactaagtctcaacaaattttaagaccaaaaatagcagttcaaataaatggcaaaacaaaagctattgttgaagctgattttaatgctgacaaagattcggtagaaaaaatagtcctttctaatcaaaaaattataaaaataattgacaacaaaaaaataaaaaaatctatattcgtccctaacaaaatttataatattgtgttaaattaa

SEQ ID NO: 303794 - DNA, 177 bp, Unknown
  Bacterial polypeptide expressing nucleotide sequence isolated from the Sargasso Sea
gaaagatataattttaaattagtcgagagtaagtggcaaaaattttgggaaaagaataaaacatttaaatctataataaaaaaagaaaagaaaaaattttattgtctagagatgtttccttatccatctggaaaaattcatatgggacatgtaagaaattataccattggagatgtt

SEQ ID NO: 303795 - DNA, 112 bp, Unknown
  Bacterial polypeptide expressing nucleotide sequence isolated from the Sargasso Sea
gaaaacgatcctaaatattatttgtttatcaatgtttccatatccctcaggaaaattacatatggggcacgtaagaaattatacaatctggagatgtaatctcaaggtttaa

SEQ ID NO: 303796 - DNA, 400 bp, Unknown
  Bacterial polypeptide expressing nucleotide sequence isolated from the Sargasso Sea
ctgaaaaattggcctgaaaaagttaaattaatgcaaaaaaattggattggtaaatcatatgggtgcgaaatcaattttgcacttgataataagaaaaaatctcaaaaaataaaaatttttacaacaagaccagatacaatatttggagcttcatttattgctctttcagtagatcacccaattacaaaaaattttgaaaaaaataaaaaatttatttcatttaaatcagaatgttcaaaaatgggaacaactgaggaggcattggctaatgcagaaaaaattggttttaatacaggtttatttgccctgcatccttttgataaaaaaaataaacttcctatttttgttgctaactttgttttaatggaatatggcactggagcaatatttggttgtccag

SEQ ID NO: 303797 - DNA, 745 bp, Unknown
  Bacterial polypeptide expressing nucleotide sequence isolated from the Sargasso Sea
gggttgttattttgatagtggtaatgaaagggttgaggttggtaaaattgaaaaaatgagtaagtccaaaaaaaatgtagtgaatccctcctctattattgataactatggtgcagacacagcgagatggtttatgttgtcagactcaccgccagaaagagacttggagtggacagacgttggtgtggcatcttcacataaatttattaataaaatttgggacacctgtttaaaaacaaaaaattataacaacaaaaaaggccatataaaaacagataaatttaatcctctaataaatagtatttcagaaaatattgaaaaatttcattttaataagtctgttgcaaatatttatgaatatgtaaacgaggttaataaatctatcgataaaaaaataattacaactgactgtttaaaaagagtgattaaaaatttatgcattgttatacacccgtttacaccccacttaagtgaagaaatttgggagctgcttggccatgaaggtttttgtgccaatgcaaaatggccagagtttgaaaaaaatacagttgttgaaaaagttgaccttccaatacaagttaatggaaagttgaaagggcttatttctgcaaaaaatgatgataaacaagaggttgttttagaaaaggcaaaaagtttaccagtcctaaataaggcgttaaaagacaagataattataaaaactatatacatacctggaaaaatattaaatatagttattaaatga

SEQ ID NO: 303798 - DNA, 800 bp, Unknown
  Bacterial polypeptide expressing nucleotide sequence isolated from the Sargasso Sea
tataggtggtgtagaacatgcaattttacatcttttgtattcacgattttttatgagagctattagttttaaaaatgccaaatttaatataaatgagccgtttcaaagtttatttacacagggcatggtttgtcacgaaacttacaaggataaaaacaataattggttaagccctgaagaagtagatagtaaagatggaaaaaatttttatttaaaatctgatattaaaaatgaagttattgtcggcccatcagaatcaatgtcaaagtcaaaaaagaatactatagatccagagctaataatcttaaattatggggctgatgctgttagactgtttattctatctgatagcccgcctgagaaagatgtacaatggtctgaacaaggaatggtggcatcatataaatttattcaaaaactttggactttacataataaagtaaaaataaaattagatgaaaataatgactcaacaaaaaatgaaattccaaatcaaataaatgaatttgtaaataaaataaataataacttagaaagattcaactataacgttattattgctaatatttacgagatttataactttttatctaaagagttagataaaccaatagaaaggaaaattttacttaaaagttatataaatttcttgagtgttatttctcctataattcctcactttgcttcagaatgtcttgaggagttaaattttgatagtttacaaaaatggcctgaggttgataaatctctattacataagcaaatgatagactatgttatacaggtaaatggtaaaaaaa

SEQ ID NO: 303799 - DNA, 886 bp, Unknown
  Bacterial polypeptide expressing nucleotide sequence isolated from the Sargasso Sea
catttgttatattcacgtttctttatgcacgctctgtcacacaagagtgataaatttaaacttaaagaaccttttgaaggtttatttactcaaggaatggtttgtcatgaaacttataaagataaaaataataattgggtaagtcctgaagatgtgtattctgatgatgaaaaaaatttttttttaaaaagtaataaagaagaaaaaattactgtaggatcctcggagtccatgtcaaaatcaaaaaaaaatacaattgatccagaattaataataaaaaattatggcgcagattctgtaagattatttattttatctgacagccctcctgaaaaagatgtacaatggtctgaacaaggtatgcaggcttcatataaatttattcaaaaactttggctaatgcatcaaaaaataattaaaaaagttcaaagcgaaactaaaattgataaaccagatatagatttaaacgaatttacaaatcaattaataaataaaattaacactaatatagaacgtttccattataatgtaattattgctaatttttatgagatgtacaattatataattaagattatagataaaaaaatagatccagataatttaaaaaaaaattatattaaaatattaagtcttttaattccagttattccacattttgcaaatgagtgtttaaaagatattcaaaaagaaaaagaatatatctggccattggtagataaaaaatatttagtttcaaaatttactaatattgttattcaaattaatggtaaaaaaaaggatttgatcaaaacaaatatagatataactgaagatcaactattagaacaaattgtaaaaagtgataagattaataaatatttaagaaataataaaataataaaga

SEQ ID NO: 303800 - DNA, 208 bp, Unknown
  Bacterial polypeptide expressing nucleotide sequence isolated from the Sargasso Sea
atgtcagaattatcaagatataattttaaaagtattgaacataagtggcaatctcattgggaaaaaaataatctttttaaggcagacataaattctaaaaataaaaaattttattgtcttgaaatgtttccgtatccatcgggaaaaatacatatgggccatgtcagaaattataccattggcgatgtattggctcgatataaattat

SEQ ID NO: 303801 - DNA, 619 bp, Unknown
  Bacterial polypeptide expressing nucleotide sequence isolated from the Sargasso Sea
tccccaccagaacaaagccttgaatggagtgaatcatcggtagagggtgcttcaagatttttaaaaagaatttggaatcttgttagcaaaagaaaaaatataaaacttgaagaaaaattaaattttacaaaagatcagcttgaattgaggagaaagtcgcattcaacacttaaaaaggttgaaaatgattatgaatccagattttcatttaacactgcaatagccgcaattatggaattaatcaactttataccagagaagtataaggaaaataatgcatctaatgaacaaaaattttgtttaaatgaggcaatttctttttcattaaaaatgctttttcctatagctcctcatatttgtgaatatctttgggaaaagtttaatgatagtgagaattcttcaattgagtcatcatggcctttatttgatatgagcataatagaagttaaagaatttgaattaataattcaagttaatggaaaagtaaggggaaaggtatttattgaaaaaaatatgaaagaggacgagattaaagaaatatcaataggagttgaaaacgttcaaaaaagtattggagctaatactattaaaaaagttattttcgtaaaagacaaattaa

SEQ ID NO: 303802 - DNA, 661 bp, Unknown
  Bacterial polypeptide expressing nucleotide sequence isolated from the Sargasso Sea
ttggttaaagaatttggcgctgatgcagtgagattgtatttaatgtttctggggccatgggaccatggtggcgattggagcgatgaagcatttaatggaataaccagatggctaaatagagtatgggacatatcatcaagaaatttaaatgaattaattaataacaaagaaaatgataatgagttagacatacttgtaaactctacaataaaaaaagtgagtcaagatttagaaaaatttaaatttaatacagctatttcttcgttaatggaatttacaaatagtttaaataaaatatggaagtcaggttgcagcgaaaccaagtggaaagattcgataaatactcttgttaaattattatctcctatggcccctcacattactgaagaactttgggaatctaatggtaataaatttagtgttcataatgaaaattttccagaatgggatgacaaattgattgtctctgactccaagacaatagttgttcaagtaaatggtaaagtaagggcccaatttgatattaaagaatcaaaatctgaagaagagataattgaacttgcattaaatttagataaggtaagtgaaaatctaaaagacaaggaaattataaaaaaaatatacataaaagataagttagtaaactttgcggtcaagtaaa

SEQ ID NO: 303803 - DNA, 915 bp, Unknown
  Bacterial polypeptide expressing nucleotide sequence isolated from the Sargasso Sea
tggcggaattgagcacgcaattcttcaccttctgtactctcgtttttttactaaagctctaaaaaattgtaataaagaatttaaaatttctgaaccttttcaaaatctttttactcaaggaatggtttgtcatgaaacctataaagatcaaaatggtaattggctttatcctgaagaaattgagaaagaaggattaaataaagctaaaaaaaaatctgacaaaagtagagttgttgtgggaccaccggagtccatgtcaaaatcaaaaaaaaatactatcgatccagagattatggtcaaacagtacggagctgatgctgtgagatggtttattctttcagacagccctcctgaaaaagatgtacagtggtcagatgttggtgtttcatctgctaacaaatttttacagaaaatttggaatttaaattatttagttgctaataggaaagtgaaaaaacctaataatcaggaagaaaaagaaattcttcaagaagttaatagctttgttaataaaattgatctttctatcaataattttaggtttaatgtttgtattgctaatttttatgaaatgtataatttttttagaaaatatttagatacgaatataagtgaaaagattttgaaagataacttgtcaaaaattatgaaattaatgataccatttacacctcacttagcgtacgaatgtttagaattattagatatcaaatcaactaataaatggcctgaaatagataaaaaaaatttgaaagaagaaattaaaatggcagttcaaataaatggtaaaacgagagatattctaacaattaaaaaagatttagtggagaaagaaataaacactataattcataattcctctaaagcaaaaaaatttttacaaaataaaaaagtgattaaaactatctttataaa

SEQ ID NO: 303804 - DNA, 856 bp, Unknown
  Bacterial polypeptide expressing nucleotide sequence isolated from the Sargasso Sea
ctaccttgggatgattcttgggtaattgaatcattaagtgattcaacaatttacatggcatattatacggtagctcattatcttcaggaattgaaagaagatcaactcacagagtctctttttgatgcaatttttggagcaggaaatacaaaattcgcttcagaggaaacaggaatcgatcaagcaaccataattggctggcgtaatgaattcaattactggtatccgtatgatcttagaattagcggtaaagatttaattcaaaatcatctttcattcagtttgtttaatcatacagcaatgtttaatccagataagtggccgaaaggatttgcagttaatggctgggttcttgttgaaggtgaaaagatgtctaagtctaaaggtaattttttcaccatgaaagaattaaatgaaaaatatggggcagatgttgttagatttactttgtgtaacgcaggcgaaggtttagacgatccaaattgggaagtctcatttgctgaaactgcaggaaagaaattagctaattggttatcttttgtaaaagataataaagggaaaggacgaactacagatcatcccgtagatgattggttcagagaggttatggctgatgtttcttacaaagcccatcaggcttccgaaaggttgaaatttagaacttcaacacgtttgttattctttgaattggctcaatatttcaaatggtatgttcagagaactggtgagccacatgccgaacttttacatgattatatgtcagttgtaactagaggtattgcacctattgtacctcatacggctgaagaagcttggtcactattaggagagaaagattttgttctcaatcagccat

SEQ ID NO: 303805 - DNA, 232 bp, Unknown
  Bacterial polypeptide expressing nucleotide sequence isolated from the Sargasso Sea
cttgacacatttgttgactcatcttggtattatataagatttttaaataataaattagataaaccatttgatatagatcaagtaaatgagcttcttccagtagacaagtacattggaggaatagaacatgcaatacttcatcttttatactcgaggttttttatgaaagctctcagagatatttataaattgaaagtagacgagcctttcaaacaattatttacccaaggaa

SEQ ID NO: 303806 - DNA, 118 bp, Unknown
  Bacterial polypeptide expressing nucleotide sequence isolated from the Sargasso Sea
tggtattatttaaggttctgttcaccacaaaataaatcatctccatttgacttaaaaaaagttaattactggatacctgttgatcaatatattggtggtatagaacatgcaattttac

SEQ ID NO: 303807 - DNA, 165 bp, Unknown
  Bacterial polypeptide expressing nucleotide sequence isolated from the Sargasso Sea
tcgaaaagaaaattatgttaattgggatcctgtggatcaaacagttttagcaaatgaacaagtaatcgatggtaaaggatggaggtctggagcaacagttgaaagaaggaaactaaatcaatggttttttaacataactaaattctcaagtgaattacttgatgg

SEQ ID NO: 303808 - DNA, 505 bp, Unknown
  Bacterial polypeptide expressing nucleotide sequence isolated from the Sargasso Sea
aaatctaattcctatccagataaagaaaaaagtttaataaagtcaatgaatatcgctataaaagaaatttcaaatgacatattaaataaccaatttaatactgcgatttcagaactaatgaagttttataattcattatcaaattccattaatgacgtaaacaataacttaaaaattgatgctttaaaaacattttgtattttgttggctccatttgcacctcatattgcagaagaaatatggcatcttatagggtttaaaaaatctgtacatttagaacactggccttcatttaatgccgaagcactcaaggaagattcatatgaactagtaatacaagtgaatggaaaagttagagacaaagtaaatattaataatgatatgagtgaagatcaaattaaggaattgacttttaaaagacctaacattttaaaatggactcaagataaggaaataagaaaaataattattgttaaaggaaaaattatgaatattgttgtttaag

SEQ ID NO: 303809 - DNA, 86 bp, Unknown
  Bacterial polypeptide expressing nucleotide sequence isolated from the Sargasso Sea
aaaaaagttctactgtttagaaatgtttccatatccatctgggaaaaattcatatgggacatgtaagaaactatactattggtgat

SEQ ID NO: 303810 - DNA, 624 bp, Unknown
  Bacterial polypeptide expressing nucleotide sequence isolated from the Sargasso Sea
aatgaaagagcaactaaagagcatggggctatcatactattggtctcgagaagtatctacctgcgatcctcaatattataagtttgagcaaaaaatgtttattgatttttttcaaaaaggtttggcctataaaaaagaaagctgggtaaattgggatcctgttgagaaaactgttttagctaatgaacaggttattgatggaaggggctggagatctaatgcaattgtagaaaaaaaattattaaatcaatggtttctcaagatgacacattatgctgatgaccttttggaaacaattggaaatttaaaaaattggcctgatagagttaagcttatgcaaaacaactggttagggaaatctttaggggcaaacatcaactttaaaattattgaaaaaaatgaaataattgaagtttttacaacaagacctgatactttatttggtgcatcatttattgctctcgctccttcgcatcctatctccttagatttatcaaagaacaattcaacaatcaaaaatttcattgatgaatgtaataagaactcaacatcagaagctgtaattgaaaagaatgagaaaaaaggtatttacacaaatttaaatgtagtacacccttttgataa

SEQ ID NO: 303811 - DNA, 199 bp, Unknown
  Bacterial polypeptide expressing nucleotide sequence isolated from the Sargasso Sea
aatgaaccaagaatacgctccgcaaacgcttgaactggcgctacaagctgagtgggctgcgtcaggccgtttcgccgtgcaggccgacgatacgcggggaaaattttactgcctcgccatgtttcccctacccagcggaaagctgcatatggggcatgtgcgcaattacaccattgcggatgtcatcgcgcgataccac

SEQ ID NO: 303812 - DNA, 960 bp, Unknown
  Bacterial polypeptide expressing nucleotide sequence isolated from the Sargasso Sea
acctagattatgtcagtactaatgacccatttaaaaagcttgttaatcaaggaatgattttaggaaatagtgcttttgctcatagaatcaaaaacactaatgatttcatttcatttgacatgattaaggacgaaaagacacaaaaaattcatgttgacatatcctttgtcgatgaaaaaaatagattaaatattgagagattaaaacaaaataatcctgaatttaaagatgtaaattttataaaaggcgaatcattttatgtttcaagagatattgaaaaaatgtcaaaatctagatacaatgtaatcagtccagacgatatttgtaaaaggtatggagctgatactttaagaatgtatgaaatgtttcttgggcctatagaccaaccgaagccatggaatacagctggaatttcaggagttttttcttttttgaataagttttggaatttatttcatagaaatgaaaaattttatgttagtgatgatcaacccagcgatgaggttttaaaaatttatcacaaaaccgtaaaaaaggttgtttatgatatagataaattttcatttaacacctctgtaagcgcatttatgatttgtattaatgagctatcttcaatgggttgtagttctagaaatatattatctaatttatgtattttactttcaccatttgcccctcatatttgtgaggaactttggtcgctacttggtaatgataaatccatttcatacgaaaaatatccagaatttgatgaaaagtttttggaggagtcagttgttgaatatccagtttctttcaatggaaagcttcgttttaaaattagcttacaaagtaatatagaattaaaagaagttgagagtgtagttaataatcatgaattaactaataaatatttatatggtaaatcaataaaaaaaataatttttgttcctaaaaaaattataaatgttgttttttaaa

SEQ ID NO: 303813 - DNA, 582 bp, Unknown
  Bacterial polypeptide expressing nucleotide sequence isolated from the Sargasso Sea
gatttttaaataaagtttggaagctcattgagggtaaaaaatatattgagttaaagattgatgatcttaaatttagtaaagatgatctagcattaagaagaaagtctcatgctactcttaaaaaagtgcaaaatgactatgaaaaaagatttggatttaatacagcaattgctgcaattatggagcttttaaattttatacctgaaaaatttaaagttgatgagctcaatgattcaagtaaattttgtcttaatgaggcaatagtatttattctgaaaatgctttcacccattgcgccacatatttgtgatcgactctggtgtgaatatgaatatgatacgaaaaatattgagtcttggtggcctgagtttgatgaatctcttcttgcaatagaagaatttgaactaatcattcaagttaatggaaaagtaagaggaaagataaatatcgaagtaaataaatcaaaaactgaaattgaggagcttgctaaaaacgttgataacgtaaaatcacatataggttctgtaaatgtgaaaaaaacaatatatgtagaaaataaattaataaattttgtagtatgaa

SEQ ID NO: 303814 - DNA, 250 bp, Unknown
  Bacterial polypeptide expressing nucleotide sequence isolated from the Sargasso Sea
atggaaagatacaactttctacaaattgaaaagaaatggcgtgataaagatatatcaatatctgtaaaaaattctaattctcaaaaaaaatattattgtttagaaatgttcccatatccgtcgggaaaaattcacatgggtcatgtcagaaattacgcaattggagatgtaatagcccgctataaatttttaaatggttataatgttttgcaccccaatgggttgggacgcttttggtcttcctgctgaa

SEQ ID NO: 303815 - DNA, 715 bp, Unknown
  Bacterial polypeptide expressing nucleotide sequence isolated from the Sargasso Sea
ccggatactttatttggattttcatttttggctctatctgttgatcacgaaatttctaaattttttttaaaggataaaaaatttcaagagtttaagtctgattgttcaaaaacaggaactactgaagaagcaatagcaattggagaaaaaattggtttcaaaacaaaccttaaagcaataaatcccttaaatccaagccaaaaagtacctgttttttttgctaattttgtcttaatggattacggatttggtgcagtttttgggtgtcctgctcatgatcaaagagacttcgattttgcaaaaaaatatggtctagatattaaaaccgtagttagaccagaagaagaaaatgaaaattttgaagttaaagatgaagcttattcaggtcctggagttttaataaattcagaatttcttaataatcttaaagttccagaggagtcagttcctaaaacaattgacattttagaagagaaaaaaatagggcaaaaacaaattaattttagattaaaggattggggagtatccagacaaagatattgggggtgtcctatacctatggcttatgatgaacatggaaatgtaagaacaattccaaaagaaaatttacccgtaagacttccagaaaatgtaaatttaaattcaaaaggtaatccattagactcaaaattagattggaagaatattattattgatggaaagaagtatacaagag

SEQ ID NO: 303816 - DNA, 817 bp, Unknown
  Bacterial polypeptide expressing nucleotide sequence isolated from the Sargasso Sea
tttcataaacttatgagagacatgaatatagtcgataatcctgaaccttttacatcattattatcacagggtatggtgctgaagggcggtattaagatgtcaaaatcaaaaggcaacacaatagatcccgatgatataattaataaatatggcgctgatacgattagattgtttattatgttttctgctccacctgaacaaagtttagagtggtcagatactgcaatagaaggttcacataaattcttaaagagactatgggtattaagttataatattatttctaaatctactttagagaatgaatcatatgatcaacataaaaaaaatatgatttctgatagtgagattaatatgaaaatccataaaaccacgcaaaaggtaacaaacgatatattccaaagaaatagtttcaacacagcaattgcatctattatggagttattaaataatctcacgaaatattttcaacaagatcagcctaataatacaattttaataaatggtattaaaactattctcaaacttctttcgccattcacgcctcatataacacaaaaaatctggtcagaacttggagaaaaaacacttattatgaaagaatcttggccagaagttgatgctacagccttagaagaatcgaaaaaagagataataatccagatcaatggtaaactcagagggaagattacagttaatattaatgaggacgaactaaaaattaggaagatgattttagaagataataatttaaagaaatatttgcttgataagaatattaaaaaagttatatatattaaaggccaagttggttaac

SEQ ID NO: 303817 - DNA, 187 bp, Unknown
  Bacterial polypeptide expressing nucleotide sequence isolated from the Sargasso Sea
aatgagcgctaaagaatataatccgactgaagtagaaaatctaattcaggaatcatggaagcaagataattcatacaaagcttcgccctcagaaacaaaagaaaaattttattgtctttcaatgtttccttacccttctggaaattacacatgggtcatgttcgcaattatacgattggagatgtga

SEQ ID NO: 303818 - DNA, 139 bp, Unknown
  Bacterial polypeptide expressing nucleotide sequence isolated from the Sargasso Sea
aatgaataaggttgatgtaaaagatatagataaaaaatggcaagacttttggtcaagtaataaaaactcatttaaaaataccgacaaaaaaaagaaattttactgcttggagatgtttccatatccttcaggaaaaatt

SEQ ID NO: 303819 - DNA, 245 bp, Unknown
  Bacterial polypeptide expressing nucleotide sequence isolated from the Sargasso Sea
tgaaaatattaatcttgaagtaaagggtaatcctcttgatagtcaagataattggaaagaagtattaatagatggaaaaaaacttaaaagagaaacagatacactagaaacattcgtttgttcatcatggtattatttacgattttgttcaccaaaagaggaaagttatggtttcaataaagatgaaattgattattggatgccagtcgatcaatatattggaggtgtggaacacgcaattttac

SEQ ID NO: 303820 - DNA, 376 bp, Unknown
  Bacterial polypeptide expressing nucleotide sequence isolated from the Sargasso Sea
gagtttacaaattcagatgcggatactgagaaaaggaaagcggccgatcaaacaatcaaagcaatcattctaatgcttgcacctataaccccgcatttatctcaacatttatggtgggaattagaccaagatagtctagttgtagataccaaatggccggaggcaaaagaagaaatgcttgaagaagatttcactaagatagtaattcaagttaatgggaaattaaggtcagaaatagatgtaaattcagattccgaagaagaggatataaaaagcatggctctaaatgacgaaaagattaaaaaatatgtctctgattcagaaattaagaaaattatttacgttccgggaaagctaataaacattgttttatgaa

SEQ ID NO: 303821 - DNA, 608 bp, Unknown
  Bacterial polypeptide expressing nucleotide sequence isolated from the Sargasso Sea
ggctgtgaggtaaattttaaaatagaaaattcaaatgatataaaagagattaagtgttttacaactagaccagatactttatttggtatgtcattcttagctttatctgtagatcatccattatcacaattatacgtgaataataaagattttttagaatttaaaaaaaaatgttcaacaacaggaactacagaagaagctattgctagtgcagaaaagtttggttttaaaacagatcttacagctgtaaatccattagatgaaaatattaaagtgccagtttattttgcaaattttgtactgatggattatggttttggtgcagtttttggttgtccgggacacgaccaaagagatttggactttgcattaaaatataacttaaaagttaatactgtagtgaaaccacataacgaaaatgataattttgtggtcaccaaggaagcctatacaggtcccggttttatcattaattcctcttttttaaatggtttaaagagcccagagagctcaataataaaatctattgagtatctggaaaaacataagttaggtaaaaagaaaattaattttagattaaaagattggggtgtatcacgtcaaagata

SEQ ID NO: 303822 - DNA, 178 bp, Unknown
  Bacterial polypeptide expressing nucleotide sequence isolated from the Sargasso Sea
aatggactatttaaaaccatcagaaatagaaaaaaaatggcaaaatatttggggttcaaaaaacttattctctgcaaataaagacaaaagacaaaaattttatgtgttagaaatgtttccctacccctctggaaatattcacatgggtcatctgagaaattatacaataggtgatgta

SEQ ID NO: 303823 - DNA, 686 bp, Unknown
  Bacterial polypeptide expressing nucleotide sequence isolated from the Sargasso Sea
tataattgatcaatacggcgcagacaccgcacgatggtttatgttgtcagatagcccacctgaacgagacttagagtggacagattcaggagtgcaaggttcttggaagttcataaatagactatggaaagtagtaaacttgaacgtggattctatttcagaatcaggtttaagcgaaccaacagatctggacactaatacagctaacttgattagatttttgcacagaactattcaggacataactaaagcttatgataactttagatttaatgtagctgttgctaaattatatgagttagtaaacaaattacagtcttatccatctggtgaagagcatgaaaattgggcaagaaagaaaacaatcgaaactattatacagctgtcagccccaatgataccccatattgccgaagaactttggactaaaattggtcacaaacagcttgttagcgaagttaaatggccaaaaccaaataaatcttatttagatgatgataatatcaatgtcatcattcaaattaatggcaggctaagaggtaagattgaagttccagcaaacaccgacaatggttcacttgagtcattagcaaaacttaactcaaatgttcagaaaattttgggaaataatactgtgaaaaaaacgattatagtcccaaacaaggtaattaattttgttatataac

SEQ ID NO: 303824 - DNA, 739 bp, Unknown
  Bacterial polypeptide expressing nucleotide sequence isolated from the Sargasso Sea
agttgagcctatacgcgttgatacttctctagtaaacgaaaagaatgaattggacatattgactttaaaaaaaaataatcccatttttaatagttcaaaatttattcttgaaggaggcaagtatattgtaggaagagaagtagaaaaaatgtctaagtcaaaacataatgtagtaaaccccgatgaaatatgtgaaaaatatggagctgataccctcaggatgtacgaaatgtttttgggacctattgatcaagataaaccatggaatacagaagggattaccggggttcataattttttaaataaattatggaaattgttttataatggaacagaatttatagttaaagatgaatcaccttcaactaaatccctcagagtacttcataaatcaattaaaaaaataaatgaggatattgaaagattttcttttaatacttgtataagtacttttatgatatgtgtcaacgatttgacttcattgaaatgtcaatctaaaaacattttagaacctttaattattttattatctccttttgcacctcatatttcagaggaaatatggtcgattcttggtaataaagaaagtattgaacacataccctatcctaagtttaatcctaaatttattcaggagtttaaaaaaaactatcctatatcttttaatggtaaaacgagatatatgctagaattagctttagatttaagtaaagataaaattgaagaaattgttttaaat

SEQ ID NO: 303825 - DNA, 822 bp, Unknown
  Bacterial polypeptide expressing nucleotide sequence isolated from the Sargasso Sea
ctttgttgtattcaggttttttgcccgtgccatgcagattactggacacctacctaagacggccaaagagccattcgatgccctattcacccagggaatggtgacacatgcaatctataagagtactggaactgatggtcgagatctgtttcactatccatatgaagtggagatgcgcgagggtaaagcttttcttattaaaaataataaggaagtaagcattataccttctgcaaaaatgtcaaaatcgaaaaacaatgttgtagatccagtaaatatagtggatgcattcggggctgatacagcccgctggtttgttctatcagatagtccaccagaaagagatattgagtggacggcctcaggtgctgaagcttccaataagcatttatcaagagtttatcgtataattaatgaaattatttccaatgacataccttctaatgaaaacgatgaaagcctgcttaaagaaatgcacaaaacaattcatgacgtcactcaagcaattgaaagttttggtttcaatgccgctatagccaggctttacagttttacaaacagcttagcaaagtcaaacgctggtacaaaaactaaactttcagcagccaaaactcttgcacagttgatgtcacctatgacgcctcatctatccgaagaaatatgggaaagattaggggaaaagaaattagtggcccgtgaaccctggccaacagttgacgaaaccatacttagcgatgataccgtcgttatgccaattcaggtaaatggaaaacgtagaggacaaatcgaagtacaaaaagatttagagccttctgaaattga

SEQ ID NO: 303826 - DNA, 817 bp, Unknown
  Bacterial polypeptide expressing nucleotide sequence isolated from the Sargasso Sea
catgagtggcaacgaaaataacggctataaaccgattgcgatcgaaggtaaatggcaagcacgatgggaagaagaagggaccaatagcctgagcgccgaactcctcgaaagaggggagaatccatactacaatctcatgatgtttccttacccttcagcagaaggactccacgttgggaacatctacgcattcactggagcagatgtccacggacgctttcaacaactggcaggtcacactgtcttcgaacccataggatttgacgctttcggtatccactccgaaaatttcgccctcaagcagggtgtgcatccaatggatctgattcctagcaatgtagctaattttactagacaacttaagcggatgggcggaatgtttgactgggatcatacggtcgacactactgaccctacctattaccgctggactcagtggatattcatccaactattcaaagctgggctagccgtaagaaaagaagctcccgtaaattggtgcccctcatgtatgacggtactttcaaatgaacaagttataggtggaaggtgtgaacgatgtgatacccctgttgaacagaggaatattgcacaatggttcttccgtattacccaatactctcaaagacttttagatgggctcaagaacatagactggtcagaaactacaaaaaaagcacaggaaaattggattggtcgtagcgaaggagcaatcctacattttcccattctgccggaagaacagagagaacattcctttgatgggatgagtaaggacgaattattcagtgcaaccaaagatctgaaaaaaatagaa

SEQ ID NO: 303827 - DNA, 181 bp, Unknown
  Bacterial polypeptide expressing nucleotide sequence isolated from the Sargasso Sea
aatggagagatataacgcaaaactaacagaaaaaaattggagagagaagtgggaaaaagagggcacctacttaacgagtgacgataaaaaaaagaagaaatattatgttttagagatgttcccctacccttctggcaaaatcatatggggcatgtccgaaatatactatggggagatgtga

SEQ ID NO: 303828 - DNA, 515 bp, Unknown
  Bacterial polypeptide expressing nucleotide sequence isolated from the Sargasso Sea
agtaaatcaacaaaagcttcctatctacattgccgactacgttttgatgggctacggcactggagctattatggccgttccaggtcatgacgaaagagatcacgcctttgccaaaaaatactcgcttcctatccttagagtcctaacgggaggagcagaaaacattgagtctgaagcgcactctggtgaaggagagcttgtcaactcaagatttttaaatgggctgagtaagaaaaaagcttttgataagatcataagctggcttgaagaaaaacagcttggagaaaaaactgttaactacagacttctcgactggatcttctcacgccagcgttactggggcgagcctttcccagtactacacacaaaagacggggttgttaagactctctctgaaaatgaactgccacttacgcttccaagccttaaagactaccgtcccactgaagacggtgatccgcctcttggacgtgccagtgattggcttacagttgaaaaagatggtgaaagcctta

SEQ ID NO: 303829 - DNA, 256 bp, Unknown
  Bacterial polypeptide expressing nucleotide sequence isolated from the Sargasso Sea
cggctggcccgagcgcgtgaagatcatgcagcagaactggatcggcaagagcttcggcgtgaacttcggcttcccgtatgaactcgacggcgagaagaagctgctgcgcgtgttcacgacgcgtgccgacacgatcatgggcgtcacgttctgcgcgatcgcggccgagcatccgctcgccacgcgccttgcccaggacaagcccgagctgctcgcgttcatcgacgaatgcaagcgcggcggcgtcgatgaacgc

SEQ ID NO: 303830 - DNA, 148 bp, Unknown
  Bacterial polypeptide expressing nucleotide sequence isolated from the Sargasso Sea
atgcaggagtacgttccaaaggaaattgaagcaaagtggcaaaaatactgggaagagcataatttactggattttgattttgattcagaaaatccaaaatattacatgttgaccatgttgccctacccttcgggagatctgcatatag

SEQ ID NO: 303831 - DNA, 136 bp, Unknown
  Bacterial polypeptide expressing nucleotide sequence isolated from the Sargasso Sea
aatggacaaggtaaactttaataatatagaaaaaaaatggcaaaagatttgggaaaaaacaaatctttatagagagaataaagaaaaaaagttttactgcttagaaatgtttccgtacccatcaagaaaaattcac

SEQ ID NO: 303832 - DNA, 676 bp, Unknown
  Bacterial polypeptide expressing nucleotide sequence isolated from the Sargasso Sea
atagtagaaacctttggtgccgatactgctagatggtttattttgtctgataccccgccagaaagagatattcagtggactgataaaggggccgaagcctcatctcgttttatccaaaggatctggaaaattgttaatgatggggcatccctaatttctggaaatgagattgttatgccaaaggaatttactgaaaatgcacttatcattaggaaaataacccataaggctataaaagacattactgatgcccttgaaaacttgcggtttaatagggcgattgcacatatttatgagctttctaatgagatacagaacttaataaataaagataaaatattcaatgatatcagtgagttatactcatttagagagcttcttgagacgtattgccaactttttgccccgatggcaccacatttagcagaagagtgttggaaaataattggttgtaatgatataatttctcaaagagagtggcctcaattaattgaaaaatacattcaggaagacaaggttcttattgtagtgcaagtaaatggtaaaaaaagaggagaaattgaagtagctaaaggattatcacaagatgatgttgaagctgctgctatgaaaattgataatgttagtaaatcaattaattctgagattagaaaaattatatatgtccctaaatagg

SEQ ID NO: 303833 - DNA, 307 bp, Unknown
  Bacterial polypeptide expressing nucleotide sequence isolated from the Sargasso Sea
gatgcctgttgatcaatatattggaggtgttgaacacgctatattacacttgttatattcaagattttttatgagagcaataaactataaaaataataaatttaaaattactgaaccatttaaagggttatttacacaaggaatggtttgtcatgaaacttacaaagatgaaaataataattggcttagcccagaagaagtagaaagcaaggatgggaaaaaattttatattaaagataacccggacaaaaaagtatttgttggatcatcagagtctatgtcaaaatctaaaaaaaatactattgat

SEQ ID NO: 303834 - DNA, 666 bp, Unknown
  Bacterial polypeptide expressing nucleotide sequence isolated from the Sargasso Sea
atccaaacgatataattaatctttatggcgctgatacggcaaggtggtttatgttatcagatagtcctccagaaagagaccttcaatggacagaaactggtatagcttcctcatataagtttataaacagactttgggattttttagataagtgcaaaaattatgaaaatataaacaaaacaaatggggttttattagataattttaaaaaattaattaataatattgcagaggacatagaaagttttcattttaataagtcggttgcaaaaatatatgagtatgtaaaccttctaaacgaagctgttgtaaaaaaaaatataagtaaagatgattttgcttggtcactaaaaaaactttctctaattttacaaccatttttaccacatataagcgaagaaatttggtcgggtttggaaacagatggcttatgtataaatcaaaaatggcctgtggagaaagttgatagaaactcaacaaaaataaatattgctgtccaaataaatggtaaaaccagaaatattattgagttaaaaaatgatttaaacaaagaagaggttatgaaaataattaaaaaagataaaaaggttttaaaatatattgaaaacaaaaaaattaacaaagaaatatatgtgcccggaaagatagttaattttgtattgtaat

SEQ ID NO: 303835 - DNA, 803 bp, Unknown
  Bacterial polypeptide expressing nucleotide sequence isolated from the Sargasso Sea
attacacctgttatattccaggttttggcatcatgtcctatatgatcttgggttagtttcaacaaaagaaccatttaaaaaactatttaaccaaggaatgatcagaggtgaagacggtcaaaaaatgagtaaatcacgtggtaatgtgatcaatccagatgacgtagtaaaagattatggcgcagatagtttgagattgtatgaaatgtttatgggtccattggataaatccaaaccttggagcacaaaaggccttcaaggttgttatagattccttcaaaaagtatggcgcttaattactgataatatagataatattgaatccgatgttgctagtgaagaaaccttaagattattgcatcaaagcattaaaaaggtaactgaagatcttgatggactaaggtttaacacttctgtatcgcaactaatgattttggtaaatcatttattgacattagaaaagttagataaaaaagtgattgaaacactcttaacgcttcttaatccttttgcgccacatatatcagaagaattgtataatatgcttgggaatgaacataccatagttatcttggattggccaatttgggatagttccttagtaagttcggaggtagtgacactagtcattcaattcaatggaaagagaagaggagagattgaaattgaaaaagacctcagtaaagaaacgataattaaaataattagagataagaatagatttaataaatattttattgataaaacaataattaaggaaatttatgttgataacaggctgataaattttgttgtcaaatgaa

SEQ ID NO: 303836 - DNA, 106 bp, Unknown
  Bacterial polypeptide expressing nucleotide sequence isolated from the Sargasso Sea
agagaaaaatattacatacttgaaatgtttccctacccgtcaggtcgcattcatatgggccacgtaagaaattataccatagggagatgtaatagcacgatataaa

SEQ ID NO: 303837 - DNA, 181 bp, Unknown
  Bacterial polypeptide expressing nucleotide sequence isolated from the Sargasso Sea
gatgaataaggttgatgtaaaaaaaatcgataaaaaatggcaggatttttggaaaaacaataaaaaagttttaaaagatactgataagaaaaaaaaatactactgccttgaaatgtttccttacccatcgggaaaaatccatatgggtcatgtgagaaattatgctatcggtgatgtttta

SEQ ID NO: 303838 - DNA, 895 bp, Unknown
  Bacterial polypeptide expressing nucleotide sequence isolated from the Sargasso Sea
ccttcatctactttactcaagattttttatgaaagctttaggatatagaaatagcacttttaatgtagatgagccatttactggtttatttacgcaagggatggtctgtcatgaaacgtacaaagatcaagataataattggctaagtccagatgaaatagaaataagaggaaatattttctacaaaaaaggtgacgaaaaatccaaagttattagaggtccctcagaatcaatgtctaaatcaaaaaaaaatgtaattgacccagaaaatattatgaaaaattatggcgcggactcagtacgattatttatactttcagatagccctccagaaaaagatgtccaatggtctgaacaagggatggttgcgtcttataagtttttacaaaaattatggacgcttcatagtaagataaagaataaaattaaggataaaaaaatctttgataatccaaataaaaacttagataagtttacaaatcaacttatatttaaaataactaacaatcttgaaaattttagctataatgtgattattgcaaatatttacgaggcttacaattttttagttaaagaaatcgagaaagatttagattacaaaaatcttgaagaaaattataaaaaaatattaattgtattttctccagctatcccacattttacatcggaatgtcttgaggatttgaaaacagaaggtcaaatttcatggccaaatatagataaaaaatatttaaatgaagataaaattgattacgtaatacaaattaatggcaaaaaaagagctattttaaatgaaaatagagacattagcgagagtacttttttaaatgcaattaaaaataaaaaagaattaaatagacttatagaaaataaaaaaattaaaaaaattttcttt

SEQ ID NO: 303839 - DNA, 931 bp, Unknown
  Bacterial polypeptide expressing nucleotide sequence isolated from the Sargasso Sea
acatgcaatatgcatttactttactcaagatttttcaccaaagcacttaatattaaatctgtaaaagaaccgtttgaaagcctcttcactcaaggaatggtatgtcatcacacatatagaaattctacaggagcctgggtttatcctgatgatatcaaaaaagaaggtgataaacttactcaaatatccacaaatgagagtgttattgaaggaccaatcgagtcaatgtctaagtcaaaaagaaatgtaattgacccacagtcgattattgagatgtatggtgctgattccgctcggtggtttatgttatctgacagtcctcctgagaaggacattaactggtcggactctggtattaaaggtgcctggaagatatgtcaaaaaatatggacaattgttcattcgaataaagatatccttcataaaaatctagatgaaaatcaagagttatctgatgaaggtaaaaaactaatgggtctaacctatgaatgtttagagggaataaccaatagcattgaaaaatttcagatgaatgtggcaattgcaaaggtttatgagttagtcaatgcaatttctaaattcaaaatagaagaagaggcggatcaaatatgcctaaaagaaacgattaaaataatggtaaaaattattgaaccaatggttccacatcttgcagaggagtgttgggaaagttttaattctgaaaaacgcctggatgaaattccatggccttcagtgaaaaaggatttcttaaaaaaagataatgtcgttgttgtaatacagattaacggaaagcgccgaggtgagttattggtcaaatctaatacaatagaagaagatatagtaaaactcgtttatgaaattgatagtataaacaaaatcctcaaagacaaaaagattatgaagcgtatatttgttcctaacaaaataataa

SEQ ID NO: 303840 - DNA, 238 bp, Unknown
  Bacterial polypeptide expressing nucleotide sequence isolated from the Sargasso Sea
gatgctttaaaaaccttttgtattttgttggctccatttgcccctcatattgctgaagaaatatggcaacttataggatttaaaaaatctgtgcatttagagaactggccttcatttaatgccgaggcactaaaggaagattcatacgaactagtaatacaagtgaatggaaaagttagagacaaagtgaatattaataatgatatgagtgaagatcaaattaaagaattgactctta

SEQ ID NO: 303841 - DNA, 241 bp, Unknown
  Bacterial polypeptide expressing nucleotide sequence isolated from the Sargasso Sea
gacctcgacggcctcggctggcccgagcgcgtgaagatcatgcagcagaactggatcggcaagagcttcggcgtgaacttcggcttcccgtatgaactcgacggcgagaagaagctgctgcgcgtgttcacgacgcgtgccgacacgatcatgggcgtcacgttctgcgcgatcgcggccgagcatccgctcgccacgcgccttgcccaggacaagcccgagctgctcgcgttcatcgacg

SEQ ID NO: 303842 - DNA, 712 bp, Unknown
  Bacterial polypeptide expressing nucleotide sequence isolated from the Sargasso Sea
aaaggaaacactgttgatccgcagtcatacattgaaaaatatggcgctgatacagtcagactttatatgatgtttacctctcatccagaacagagcctagaatggagcgaatcgtctgtcgaaggtgcttcaagattcttaaaaaaaatatggaaactaattaatggaaaaaaatataatcgcttaagtagtcaatttgattttaccaaagaggagcttagtcttagacgaaaatctcatgcaactttaaaaaaggtagaaaatgattatgaagttagattttcctttaatactgcaatagcagcaataatggaattattaaatttcatacctgatgaatataaaaatgaaaactctctagattcacaaaagtattgccttgatgaggcaatactttttatattgcaaatgctatctccaatcgctcctcatatatgtgaatatctatgggatagcttctatgaagatggtcctagcattgaatgttcttggccaaagctaagcgagacccttctagaaattgaagagtttgaattaattgttcaagtgaatggcaaggtcagaggaaaagttaatataaataaaggcagtgaccaaaaagaaattgaaaatattgcattaaatattgaaaatgtaaaaaattacataaatgattctgaagtaaaaaaagtcatatatgtaaaaaataaattagttaattttgtaatctaac

SEQ ID NO: 303843 - DNA, 673 bp, Unknown
  Bacterial polypeptide expressing nucleotide sequence isolated from the Sargasso Sea
atggaaattaactggaatcaactggatgtaaagtggagaacaaaatggcacgacgccaaagactttgaaactaaccctaatgagaaaccaaaaaaattcattacagttgcatacccatatccaaactcacctcaacacataggacatggtagaacatacacgctagctgatgtccatgcaagattttacagaatgaaaggttacaatgtattattcccaatgggatttcattacaccggtactccagttcttggaatggcaaaaagaattgaagcaggagaaaaagaaatccttgatggattacgaaacatctaccacgttccagaagatgtaatcaaaacatttgttgaaccaattaaaattgcagattatttccatgaagagataaaatctggaatgattgagatgggctactccattgattggagacgagagtttacaacaatagttccaggatatcaaaagtttatcgaatggcaaatttcgactttacgagataataatagaataattcaaggctctcatccagtcggatggtgcccagttgatcaaaacccagtatcacagcacgatacaatgggcgatgtagaaccaaagataaacaatgaaaactaccttgtcaaatttaggctagatgagtttgtattcccaaattacaacattaagacctgaa

SEQ ID NO: 303844 - DNA, 685 bp, Unknown
  Bacterial polypeptide expressing nucleotide sequence isolated from the Sargasso Sea
tatgaaagaattttttattactggtaccgacaccgatgcgggaaaaacacatgtaaccagtttattgttaaaactgcttgcccaacataaaaaaaaggcaatagggtataaaccactagctgctgggtctgaaatggcgtttgaccaacttgttaatgctgatgcacttatgctaatggaaagtgcaacagttagcgcaaagtatgacgtggtaaacccctttacttttgcaccacccatagccccccacatagccgcagagcaggcgggtgtaactattaatgtaagtgaacttactgcagcctataaaacggtaaaacagcaaggcgctgactacctgcttacagaaggtgctggtggttgggctttgcctattaataataccgagtatttatacgattgggtaaaagctgagaaactaccggttatattagtggttggtatgaagttgggctgcttaaatcatgcacttttaaccgcagcacacatacaaagcttaggtattaactgtataggttggatagccaaccaagttgatgaacacatggatgaataccaagcaaaccttgatagtttaaaggcacgcttaccgtttcccattcttgctattagcccgtatagcgaacaaacaccaaaattacaaatttataaaacacttcttgaaaatttatcaataaatccataa

SEQ ID NO: 303845 - DNA, 715 bp, Unknown
  Bacterial polypeptide expressing nucleotide sequence isolated from the Sargasso Sea
aattgaaaaaatgagtaagtctaaaaaaaatgtaatagatccaagccaaactatagagatgtatggcgcagatactgcaagatggtttatgttgtctgatagcccgcccgaaagagatttagagtggacagaatatggtatttctagttcttataaatttataaacaaaatatgggaattgtcttcagagttatttgaagataaatatgaagaaaaagacagctcagatgataataaaattaaaatagatattaacaacacaataaaaaaagtaacggataacataaatttatttcactacaataaggccattgctaacattcatgagtttattaacaacgcacaaaaatttattgttaataaaacaatatctaaaaaagaagcaataaattcatttaagaaactatctttaattattcagccttttattcctcatttgagtgaggaaatttggcgaaaatttggagaaaaagaactggctatagagcaagcgtggccaattgtagacaagacgctcttagtagaaaatttcaatattgcaatacagataaatggaaaaacaaaagatgttctttcgtcaactaaagagcttgataaagatagtgttgttaacattttaaaagaaaataacaagatatcgagattgctaaaaaacaaaagggttataaaaacaatatatgtttctggaaaaattattaactttgttacaaattag

SEQ ID NO: 303846 - DNA, 992 bp, Unknown
  Bacterial polypeptide expressing nucleotide sequence isolated from the Sargasso Sea
gatggacataaactggaatcaaattgacgaaaaatggagaagtaagtggcaagaatctaaagattttgaaacaaatccaaatgagaaaccaaaaaaattcatcacagtagcatatccatatccaaattcacctcaacatattgggcatgggagaacatacacactagctgatgtccatgcaagattttacagaatgaagggatataatgtgctattcccaatgggatttcattatactggaactccggttcttggaatggcaacaagaattgaagcaggtgaaaaagaaattcttgatggattacgaaacatataccatgttccagatgaagtgatcaaaacatttgttgaaccaataaaaattgcagactattttcatgaagaaattaaatctggaatgattgagatgggttactctattgactggagaagagaatttacaacaatagttccaggttatcagaaatttatcgaatggcagattactaccttacgtgacaatgacaggattattcagggttcacatccagtaggatggtgtcaagtttgtcaaaatccggtatcacagcatgatacaatgggagatgttgaaccaaaaattaataatgaaaattatcttgtcaaatttagactagatgaatatgtatttccaataacaacattaagacccgaaactctctttggcattacaaatctctgggttaatccaaataccacatacaagaaaatcaaagttgatgatgaaaagtggattgtttcacaagaatgcgctgaaaaattaaagttctttggaaaagaaatttcaaatgaaggagacatcaaaggaacagaaattattggtaaaacagctaaatcaccacatacagaacaagagattccaatttttgaagcaggttttgttgaacctggaatgggtacaggtttggtgatgtcagttccagcacatgcacctaaaaactatcaagcattgatggatttaaaatcaaaaaatc

SEQ ID NO: 303847 - DNA, 430 bp, Unknown
  Bacterial polypeptide expressing nucleotide sequence isolated from the Sargasso Sea
tgagggcgatgagttgcagttcaacaccgcagtctctgagttgatgaaactgagcaatgccatggccggtcagttggacaaggtcagtgctccagtcgcgcatgagtcagtgcgcaacttgttgctgctgttagccccctttgctccccatctagctgatgagctgtgggagcagctccaaggcaacggaagcatccatcaacagcgttggcccaaagtcgatgcctcagctttggtacgcgacaccatcaccgtcgtgttgcaggtcaaaggcaaggtgcgcggcaacctggaggtgccagcgacgatcagcaaagaggaattggagcaggtcgctctggctagcgaagtggcccagaaatggctggagggcaatccccctaagcgtgtgattgttgtgccaggcaagcttgtcaacctggtgccttag

SEQ ID NO: 303848 - DNA, 659 bp, Unknown
  Bacterial polypeptide expressing nucleotide sequence isolated from the Sargasso Sea
tgttaggctttatatgatgttcacatctcccccagagcaaagtcttgaatggagtgaatcctctgtagagggttcagctagatttctaaaaaaagtgtggaatctaattagtgcaagaaaatatagcaaattagatggtcgatttgatttttctaaagaggagcttgctttaagaaggaaatctcatgcaacattaaaaaaagtagaaaacgattatgaggttagattttctttcaacacagcaattgctgcaataatggaactattaaattctatacctgaggattttaaagattctatggcacctgattcaaaaaaatattgccttgatgaagctatattattcatattacaaatgctttctccaattgctcctcatatttgcgaatatttatggagtaacttttacggagaagattttgacattgagagctcatggccagaggtaaatgagaatttgttagaaattgaggaatttgaattaattattcaggttaacggaaaagtaagaggtaaattaaaagtaaataaaagcaccgaacaagaagaaattgaagaaatggcgctaaacgtagaaaatgtaaataatttcataggttcatcaaagctgaagaaaacgatatatgttcaagaaaaacttataaattttgtaatctaag

SEQ ID NO: 303849 - DNA, 835 bp, Unknown
  Bacterial polypeptide expressing nucleotide sequence isolated from the Sargasso Sea
gatgcctgttgatccatacataggaggtgtagaacatgcaatcttacatcttttatattcaagattttttatgagagcaattgattataaaaatgataaatttaatatcaaagaaccatttgaaggattgtttacgcaaggtatggtctgccatgaaacatataaagatcaaaataataattggttaagtccagaagaaatagaaagtaaggatggaaaaaatttttatattaagaataatccaggaaaaaaagttattgtgggaccttcagaatcaatgtcaaaatcaaaaaaaaatacaatagatccagaaactattattgaaaattatggagcagattcagtaagattatttatattatccgacagtcctccagaaaaagacgtacaatggtctgagcaaggtatggctgcttcttataaatttattcaaaagctttgggtattacatggaaaaattaaagaaaaattaaagaaaaaaaattctaatgtatcttctatagatatttcaaaaaatacaaataaatttatcagtaaaattaacaataatttggatagatttcattacaatgttatcatagctaatatttatgaaatttataattttttaaatcaaagtattaatgcagagcttaatagccaagaacttagagaaaattatactaaaatcttatcagttttgttgcctattgttcctcactatgcatcagaatgcttaaatgatttaaatgataatatattccaaaattggccacagattgataaaaaaatgttacaagaagattatgtagaatatgtggtacaaattaatggtaaaaaaagagcaatgataaaa

SEQ ID NO: 303850 - DNA, 163 bp, Unknown
  Bacterial polypeptide expressing nucleotide sequence isolated from the Sargasso Sea
tatggaaagaataaattttcaagtaattgaaaaaaaatggcaagaaaaatttaaaactgccaaactttaccataaagagaagacatcaaaaaaattttatttgtctgaaattgttccgtacccatcgggtaaaattcatatgggtcatgttagaaatacacta

SEQ ID NO: 303851 - DNA, 388 bp, Unknown
  Bacterial polypeptide expressing nucleotide sequence isolated from the Sargasso Sea
tgccaacaaagtacaaaaagcgcctgtggatacggacgctgacaagcaagtgaaacgtgaaggtattcagactttaattcagttactgaacccaatcacaccacacttgtcgcagtacctgtggaaagagttaggttttgctactgcgctggaacaaagcccatggccagtggctgatgcagctgctatggtggaagacgaaaagctggtggtggtacaaattaacggtaaagtccgcgccaaagtaacagtctcagtggatgcgactgaagctcaggtgctggaacttgctcatgctgaagaaaacgtgcagcgtttcctggaaggggtcactatccgtaaagtgatttatgttccgggtaaattgctgagtctggccgtaggataa

SEQ ID NO: 303852 - DNA, 617 bp, Unknown
  Bacterial polypeptide expressing nucleotide sequence isolated from the Sargasso Sea
tcttgagtggagcgaatcttcagttgaaggagctgcaagatttctaaaaaaagtttggaatcttgtagatggaagaaaaaatatagaagtaaataataaatttgattttaataaagaggaacttgaacttagaagaaaatctcattcaacattgaagaaagttcaacatgactatgaagttagattttcttttaatactgcaattgcagcaattatggaactcttaaactctattcctgatagttataaagaagaaaatgcaaccgattctcaaaaattttgtttaaatgaagcaatagtcttttcattaaaaatgctatcgccaatagcgcctcatatctgtgaacatctttggaataattttcaaataagtgaatcatgtattgaatcttcttggccaaaatttgatgaagatataattaaatctgaagaatttgaattaataattcaagttaatggcaaggtaagaggcaaaattaatatagataagaatttagaagaggaagaaattaaaaatatcgcccttgaagtagataacgtaagtaacaacattggtgagaatcaaattaaaaaaattatttatgtaaaagataaattaattaattttgtaatttaaa

SEQ ID NO: 303853 - DNA, 859 bp, Unknown
  Bacterial polypeptide expressing nucleotide sequence isolated from the Sargasso Sea
gagccatttgacgcccttttcacccagggtatggtaacccacgccatatataaaagcactgggactgatggtcgagatttgtttcattatccagaggaagtggaattacgtgagggcaaagcttatttgattaaaggtggcatagaagtagaaatcatcccctcagcaaaaatgtcaaaatctaaaaataatgttgtagatccggtcaatatagtcgatgcatttggagctgacactgccaggtggtttgtcctatcagatagcccacccgaacgagatgttgagtggacagcctccggcgctgaagcggctaataagcacttatcgagagtttatcgtgtaattgacgagattgttaaaaataatattcctgcaactactaacgatgaaacccttttaaaggaaatgcacaaaacagcccatgatgtaactcaagcaatagaaagttttggtttcaatgctgctgtcgccagactttatagctttacgaacagtttagccaagtcaaaagccgggacaaaaactaagattgcagcagccaaaactctcgcccagttaatgtcaccaatgacaccacacctatccgaagaaatatggaaaaagctaggagaaaaaaacttggtggtgcagcaaccgtggccaatagttgatgaaacaatgcttaacgatgatacgataaccatgccaatacaggtaaatggaaaacgccgagggcagatagaagtaaaaaaagatttagagccttctgaaattgaaaatctagcgcttaaagaagaggccgtgaaaagagctttaaatgatgcagtccccaagaaggtaatagtggtgccaggtagaatagttaatgttgtcatttaaa

SEQ ID NO: 303854 - DNA, 1068 bp, Unknown
  Bacterial polypeptide expressing nucleotide sequence isolated from the Sargasso Sea
aatgataaagaaacttctcattgccaatagaggtgagatagctctgcgaattttgcgagcctgtaaggagctagacatatctactgttgctgcttattcagaggctgatagagatctcatgcatgtaaaaatggctgatgaatctatctgtataggtcctgccgaatcaagtaaaagctatctcaacataccttcattaattagtgcaatggaactttgtggagctgatggcattcaccctggttatggttttctttctgaaaatggagattttgctgagcaagtagaaaaaagcgacttccaatttgttgggccatcttctgaaattataagattgatgggtaataaagtttctgcaaaaagatttgctaaagaaatgggactgccagttgtgccaggtactgacggacctatagacgaaaaccttaaagaagaagcaatgaagatcggttatccaatcatccttaaagctgcctcagggggtggaggtagaggaatgagaattgtgaatgatgagtctgaactagaagatgctattgcattaacacaagcggaatctgagactgcatttggagattcaaccatatatatggagaaatttctttcttcaccaaggcatatagaagtccaagttatggcagatagatttggaaatgtattgcatttaggagatagagactgctctttacagagaagacatcaaaaagttattgaagaagcccctgcaattgggattccccagggagaaaaagaagatatattcaaaaaatgtgttgaagcttgtaagaagatgaaatatgtaagtgctggtacatttgaattcttgtatgaagatggtgaattttactttattgaaatgaatacaagaattcaggtagaacacccagtaacagaaagcattactggtttagatttagtgaaactacaattgaggattgctagaaatgaagaattaaagatcaagcaagaagatgttgtgtttagtggtcatgcaattgaatgcagaattaatgctgaacaccccaaaaccttctttccttctccaggaaaggtagttgattatcatgc

SEQ ID NO: 303855 - DNA, 250 bp, Unknown
  Bacterial polypeptide expressing nucleotide sequence isolated from the Sargasso Sea
atgatcagccgattattgatgctaggtggcccaaaatttgactccagtctcctcaaaagtgaaacatcgctaattgtagttcaggtaaacggtaaattgagatccaagcttgaagttgatgcttcaattagtgaggatgaattaaaatcaatggcattgtctgacgaaaaggtagtgcgcttcattgatggaaatgagattaagaaaattatcgtgatacccgaaaagttagttaacatcgtagtttagt

SEQ ID NO: 303856 - DNA, 465 bp, Unknown
  Bacterial polypeptide expressing nucleotide sequence isolated from the Sargasso Sea
ttcctattatgtatagagaagacggtaaggtaattgaagttcctgaagaccaactgccactggaattgccagatgatattgacttaagcatacctggcaatcctttggacaatcatccagagtggaaattcacaaaatgtcctgaaacaggaatgaatgctataagggaaacagacacgcttgatactttcgtcgattcagcgtggtattttttaagattttgttcaccgcttgagacaaaagagccttttaacttagatgaaattaattattggatgccagttgatcaatacgttggtggagtcgagcatgccatcctacatttattgtattctagattttttactaaagcactcaacatcaaagaaatgatgagccctttgatagcctatttacacaaggcatggtttgtcatcacacgtttcaaaatgaatctaaagcctgggtttatcctgatgatgtaga

SEQ ID NO: 303857 - DNA, 280 bp, Unknown
  Bacterial polypeptide expressing nucleotide sequence isolated from the Sargasso Sea
tttgaatacctataatatagagtataatcataaaagatcagagaaatattggcaagaaatctggaataagaataattgtttcaaattaaaaaaaactgataatccttattatgttttagaaatgtttccttatccttcaggaagaatacatatgggacatgttagagtctacacacttggagatgtgctagctaggtataaaagagctcaagggtttgatgtaatgcactcctatgggatgggattcttttggtatgctcagctgaaaatgctgcaatag

SEQ ID NO: 303858 - DNA, 653 bp, Unknown
  Bacterial polypeptide expressing nucleotide sequence isolated from the Sargasso Sea
tattaatctttacggagctgatacagcaagatggtttatgctatcagacagcccgccggatagagatttgcagtggtcagaaacaggcatagctgcctcttataaatttataaataaactttgggattttgtattaaaatacgaagagtataaaaataaagaaaaaagcaagggtggttgtatagaaaatttaaaaattaaaattaatgaagttggtagatatatagaggacttccagtttaataagtcagtggctaaaatatatgaatattcaaatggtttaaataatttgataataaaaaaagacatatcaaaagaagattttaagtggtcattagaaaagctggctataattctacagccatttgttcctcatataagtgaagaaatttggtttagactaaatcaagctggtttgtgtattgatcaaaaatggccaaaggaaataatcaatgaagccaacataacaagagatatagctatacaagttaatggtaaaacgagacatgttgtttccatagatgttaatatgtctaaagaaaaggttttagaaattattaaaggagatgatagaataataaaatatattaaaaataaaaaaatagttagggaaatatatgttccaggaaagatagttaattttgttttatgat

SEQ ID NO: 303859 - DNA, 631 bp, Unknown
  Bacterial polypeptide expressing nucleotide sequence isolated from the Sargasso Sea
atggaaattaactggaatcaactggatgtaaagtggagaacaaaatggcacgacgccaaagattttgaaactaaccctaatgaaaaaccaaaaaaattcattacagttgcatacccatatccaaactcacctcaacacataggacatggcagaacatacacgctagctgatgtccatgcaagattttacagaatgaaaggttacaatgtattgttcccaatgggatttcattacaccggcactccagttcttggaatggcaaaaagaattgaagcaggtgaaaaagaaatccttgatggattacgaaacatctatcacgttccagaagatgtaatcaaaacatttgttgaaccaattaaaattgcagattatttccatgaagagataaaatccggaatgattgagatgggctactccattgattggagacgagagtttacaacaatagttccaggatatcaaaagtttattgaatggcaaatttcgactttacgagataataatagaataattcaaggctctcatccagtcggatggtgtccagttgatcaaaatccagtatcacagcacgatacaatgggcgatgtagaaccaaagataaacaatgaaaaactaccttgtcaaatttaga

SEQ ID NO: 303860 - DNA, 193 bp, Unknown
  Bacterial polypeptide expressing nucleotide sequence isolated from the Sargasso Sea
ctggaacaaccgaagaaagcaatagctcatgctgaaaaaataggctttaaaacagatttagtggcaattaaccctttagataataaaagatcagttcctgtatattttgcaaattttgttttaatggattatggatttggtgcagtgtttggttgtccagctcatgatcaaagagatatggacttttgctaat

SEQ ID NO: 303861 - DNA, 212 bp, Unknown
  Bacterial polypeptide expressing nucleotide sequence isolated from the Sargasso Sea
aatggaccgatataactttaaaactgtagaggaaaaatggcaaaaaaaatggcaggatacaaatgctttttcatccaaaatagacaggtctaaagataaattttattgtctagaaatgttcccatatccctctgggaaaatacatatggggcatgtgagaaattatactattggagatgttttatcacgatacaaatccttgaaaggattta

SEQ ID NO: 303862 - DNA, 1143 bp, Unknown
  Bacterial polypeptide expressing nucleotide sequence isolated from the Sargasso Sea
tggtctgtcaggggatgctcaatgctcctgccccttactgctccgattgtaattctgagtaccacgttgactacttcgaatccgcttgcccatcctgcggaaaagaactatccagcagatcggcaaaaatgagcaaatctctcggaaacaccgttagccccgaagagatgatttccagattcggagcggatacggtaaggctgttcattctattcggtgctaatcctgaggcaggaatggactggtctgatagcgccttggaagctaaccatcgccagatcaactctcttttcgacgccatcgatgaagcaatggcactatcggactctccttcgaaaattgatggatggctgttatcgagaatgagggcgagtcagaatagatggatcgaagcgatgtccgatgtcagtctaagggagggggtgatgataagccacttcgaaatgctatcggattggaattggtaccttcgaagagggggtctggatagaaatactgcaatgaaattcttagagggatggattccaatgctcgcccccgcaacacctcacattgcagaggaattctggaataagttcggcggaaaagacctccttgcagcacttgagattcctactctcagcatcgaatcagatgacttgcacatcttggccgaagaggaatacgtgaagaacatcatatccagtgcgaggaatctaaggaatctggcagagagacactccaagaaaccgatttccagagtagtcatacagacgtctccaatctggaaatcagatctagcatcggaggctatcaaacttcacttctctgagtttgacttcaaagcaaacggtcaggagcatgtcaaatctctggaaatattcaatgaagagtcaacaaggggggaggtttttcacacgtggaactcaattactgttggaggaaagaaaactagaggaaaaatctacacttggtcagatggatccagatatctactatcagagggaatcgatgaactaggtataatctcagctaactcagatttcattgcatcagccctaggagtcgagaatgtcgaagcctacagggtaggagaaggcgaagacgttggggggaaggcaagaatttccttcccgttagaacccggaattgctttcctgtagg

SEQ ID NO: 303863 - DNA, 755 bp, Unknown
  Bacterial polypeptide expressing nucleotide sequence isolated from the Sargasso Sea
cacaaaagagccatttcaaaagctttttaatcagggaatgatacagggtgaagacggtcaaaaaatgagtaaatcaagggggaatgtgattaaccctgatgatgtagtaaaagaatatggtgcagattcttttcgtctttacgaaatgtttatggggccgctagataaatcaaaaccatggaatacaaaaggtctacaaggttgctataggtttttatcaaaagtctggcgattgtttcatgaaaatactgaaaatataaaagttgattgctccaccaaaaaaactaaaatgttgctccatcaaaccattaaaaaaattactgaagatattgaagggcttagatttaatacatcagtgtcacaacttatgatatttacaaatcatttagtttcattagaaaatttagattatgaaacgctacatgttttcttgcagttattaaatccatttgctccccacataactgaagaaataaatcaaactattttaaaaaacgctaacgctccattgtcatctattaaatggccaagtcatgatgaatccctcataaagtcagaatcatatacgcttgccgtgcaattcaatggaaaaatgcgaggtaccattgaaatcgaagcaaacttagatgaaagtcaaatcattgaattaattactaatgatacaaaattaaaagcatactttaataatgttattgtaataaaaagaatccacattccaaataaactaataaactttgtattaaaaccttcataac

SEQ ID NO: 303864 - DNA, 121 bp, Unknown
  Bacterial polypeptide expressing nucleotide sequence isolated from the Sargasso Sea
actgtaaattacaaactaagagattggttgttttctagacaaagatattggggagaacctttcccgttgattcacaaagatgataaagtagaattattccagaagaagatttacctgtaat

SEQ ID NO: 303865 - DNA, 959 bp, Unknown
  Bacterial polypeptide expressing nucleotide sequence isolated from the Sargasso Sea
ttacagggaagatggtgaaattatccctgttccaaaagaaatgctaccagtaacactgcctaacgttagagagattggaaaccaaggaaatcttcttaatggtttaaaagaatggaaaaatacagtttgcccacatactgggatgaaagctgtgagagaaacagatacttttgatacgttttttgaatcttcttggtattttcttagatattgtagtcccagagaaaaagagaagccatttttatcaaatgaggtagactattggttgccggtcgaccaatatatagggggggtagagcacgcaattttacatttattgtactcaaggttttttgttaaggctttgagggatatgggttacgttaaaattgatgagccctttaaaggcctttttactcaaggaatggttacgcacaaaacatttaaagacaaaaaaaataattggctatatcctcacgaaataacaattaaaaacaatagttatttcgatgcagagggtagtgaagttgctgtaggcaagattgaaaaaatgagcaaatcaaaaaaaaatgtcgttgatccctcctatataattaatctttacggagctgatacagccagatggtatatgttgtcagatagtcctccagatagggatcttgagtggactgaaaaaggaattatcggtgcccataaatttataaacaagatatgggacttaagtatgaaagcaatagagtacaaaagtgacagcgttctcgaaaatgaagaaatgctaacgcagcaaaataagttaatactatctgttacagagaatattgaaaagtttcattttaataaggcagttgcaaatatttatgaaatggtgaatttaattcaaaaacacataattgcaaaatctgtttctattgaattgttaaaagagagtataataaatttggctaaagttactcacccttttattccacatataagtgaaa

SEQ ID NO: 303866 - DNA, 1038 bp, Unknown
  Bacterial polypeptide expressing nucleotide sequence isolated from the Sargasso Sea
ggattttgcaaaaaatataagttagatattttggaagttgtttcacctgacgggaaaaagcatagtaatttcagtaaaagaagtgaagcttttactgacgatggggttttagtaaattcggaatttttagacggtttaagtgtagaaagtgcaaaaaataaaattataggcgaaatagaaaaaaaaaagataggaaaaaagaaaattacttttcgtttaaaagattggggtatatcaagacaaagatattggggatgtccgatcccaatgatttatttgggagatgggagtattgttccagttgaaaaagatgaacttcctattaaacttcctgaaaatatagatctaaacacctcaggaaatcctttagaaaatcataaagagtggaaaaaaacaaaacataaaaaaacaggaaaaccagcaacaagggaaacagatactttagatacttttgttgattcttcttggtattttatgagattttgttcaccaaaatctgtggagagaccatttgaaatagatgatttaaattactggatgccagttgatcaatatattggaggaattgaacatgcaattcttcatttactttactcaagattttttatgaaagccctaaaagcaaataataactctattaaatacagtgaaccttttaaaggactatttacacaaggtatggtttgtcatgaaacttacaaagatagtaagggaatttggttatcccctgatgaaattgaaaaagggtcaaacgatcaagcaattaaaaaaaccgataaatcaaaaatcactgttggcccctcagaggcaatgtcaaaatctaaaaaaaatataattgatcctgaaagtatgattaaaatttatggtgcagatgctgtgagatggtttattttatctgacagcccgccagaaaaagatattcaatggtcaaaccaaggggtgactgcttcttataaatttttacaaaaaatttggagtttgaacagtaaagtcgttgagcgtaaaaatcctaaaatctcaaaggaagtgaaaataagg

SEQ ID NO: 303867 - DNA, 927 bp, Unknown
  Bacterial polypeptide expressing nucleotide sequence isolated from the Sargasso Sea
tgtgaattaaatttcaaaatagaaggtgatttacctgttaaagaaataaaatgttttacaacaagaccagatacattatttggattttcatttttagctctttccccagatcatccaatatctaagtattatgagagtaatcctgagtttataaaatttaaagaggaatgttcaaagactgggaccacggaagaatcgttagccctagctgaaaagataggttttaaaacaaacttaaaagctataaatcctctaaaagaagaggaaaaagtaccagtttattttgctaatttcgtgctgatggactatggatttggtgcaatatttggttgtcctggtcatgatcaaagagattttgattttgcaaaaaaatacgatctttccataaaaacagttgtcagaccaaaagataaagaaaaatttgaagttaaaacagaagcatattctggagagggtatcataattaattcagaatttttagatggtcttaacgcaccagatcaatctgtattggaagctataaaaattttaaatgataaacagattggaaaagaaaaaattaactttaggttaaaagattggggcgtttcaagacaaagatactggggatgtccaattcctatagcttacgatgaaaaaggagaaattaaaccaattccaaaaaatcttttaccagtaagactcccaaaaaatattgatcttaactgcaagggtaatccattagaaaatgatgaaaattggagaactgtgaatatagatggaaaaaaatattttagagaaactgatactttggatacatttgttgactcctcatggtattttttaaggttttgctcaccgaaatatgatgattatggttttgacttagaagaaataaattattggatgccggtagaccagtatattggtggcgtggagcacgcgatt

SEQ ID NO: 303868 - DNA, 886 bp, Unknown
  Bacterial polypeptide expressing nucleotide sequence isolated from the Sargasso Sea
tgtcatccagaatattataaacatgagcaaaaattttttattgatatgtttaatgctgggcttgcttataaaaaagaggctgaggttaattgggatcctgtagacaaaacagttctggcaaatgaacaggtaattgatggtaaaggatggagatctggagcagtggttgagaagaaaaaactttctcagtggtttttaaatattagcaaatattcagatgagcttttgaatgacctagacaaattacacaattggccaaacaaagttaaaataatgcaatcaaactggattggaaaatcagttggtgctgaaattaaattcaaggtgtctgataaagatttatatataactgtttttacaactaggcctgatactatttttggagcaacttttttagcattatctacagagcatgaaatatctcaaagcttatcaataaaagatggtaaactaaataaatttattaaggattgcgaaaatttaaatcctgaaaaaaataaaaagggttttaaattaaaactaatggtggaccatccttttattaaagagaaaaaattaccagtttttgtagctaattttgtattaaaagaatatgggcttggagccatttttggatgtccagcacatgatcaaagggatttggattttgctaatgaatataatattgatgtaatacctgttgtaaaaccagttaatatttcagaagaaaattttataatcaaaaaagatgcttttgttgatagtggaactttaattaactcaagctttttaaatgagctaactgtagagagagcaaaagaaaaaataattaatcgaattgaaaatgaaaaaattggaagaaaaaaaattaattataaactaagagactggggtatttctaggcaaa

SEQ ID NO: 303869 - DNA, 888 bp, Unknown
  Bacterial polypeptide expressing nucleotide sequence isolated from the Sargasso Sea
tgatagatggccgtggctggcggtcaggtgctttagtcgaacggaaaaatatcccgcagtggtttattaagattaccgcatttgcccaagagctattagacgacttaacccagcttgaaggatggccaagtagagttcgaactatgcagtcgaactggataggtcgctccgaaggattaacgctggaatttgaagtagtcgacgcgaaagatggtacggagccaatatctgtttacacaacccgccctgacaccctgatgggtgtgacttatttagcagttgcacccaagcaccctcttgccgaaatagcagcagcaaagaataataagcttgccaatttcattgaagaacaaaatagattgaaagtcgctgaagcagagttagcaacccttgagaaaatgggtattgatacgggattcaaagcaatacatccaattacgaaagaagagttgcccatttttatagcgaatttcgtccttatgagttacggatcaggagcagttatggccgtgcccgctcatgaccaacgggactgggaatttgcaaaaaaatataatcttccaattaaattggtaatcgaaccaaatgatgccaccatgagcgctgatttggaaaaaagcgcatttgttgaaaagggcaaggtaataaattctggacaattcgatggcctaaattttgacgaagctttcgattctattgctgcatatttaagcgaacagggttcaggtaaaaaaaccacaaactttcgcctgagggactggggcgtatcgcgccaacgatactggggtgctccaataccaatggtgaattgtaaggcttgcggttctgtccctgtaccagagaaagatttgcccgttttgttgcccagaagatgtagaactagatgaa

SEQ ID NO: 303870 - DNA, 898 bp, Unknown
  Bacterial polypeptide expressing nucleotide sequence isolated from the Sargasso Sea
ctggtgctttaataatattcctgattggaaagaaacggtttgtccaaaaaccggtatgaaggcttatagagagacagatacattcgatactttttttgaatcatcatggtattattttagatattgcaactcaaggttaagcgaaccgtttgacaaaaaagatgtagattattggttgcctgttgatcaatatataggtggaattgaacatgctatactacaccttttatattcaagattttttactaaagccctaagagatcttggttactttaatttaaatgaaccctttaaagggttgtttacacaagggatggtaactcacataacttataaaaatcaaaatggtgagtgggttgaaccaaaaaatgtaaaagggaataataaaaaattaaaagataataaaaatttaaatgttgaaacaggaaaaatagaaaaaatgagtaaatcaaaaaaaaatgtagtggatccaaatgatataattaatttatacggagctgatacagctagatggtttatgttatctgatagcccgcctgaaagagatttgcagtggacagagactggtataagtgcttcattcaaatttattaacaggttatatgagttagtcgataaatataaaatttacaaaggaaataatttaaatgacaatgatataaaagaggagttgaaaaaaataattaatcaagtatcgaaaaatattgaagcttttcagtttaataaatctgttgcaaaaatttatgaatttgtaaatattcttaataataatttatcaaaaaataaaatttcaaaggatgtttttggttggtctttaaacaaactttcaataattttacaaccttttgttcctcatataagtgaagaaatttggtcaaatattggaaacaagaccctt

SEQ ID NO: 303871 - DNA, 562 bp, Unknown
  Bacterial polypeptide expressing nucleotide sequence isolated from the Sargasso Sea
atggcggatatagaaattccttatgatccagccaagatagaacaaaaaatacaatcatactggaaagaaaatgagaccttttcagtggttgaagatcccaataaagaaaaatatttttgcttaagcatgtttccttacccaagcggctctatacatatgggtcatgtaagaaattatacgattggtgacgttataagtagattccatcgaatgttaggtaaaaatgtactgcaaccaatgggctgggatgcttttggtcttccagcagaaaatgcggctataaaaaatgatattcaaccttctgaatggactcaggagaatataaaaaatatgaaaaatcaactttctaggatgggatttgcttatgactggaaaagagaattcgctacttcagatgaaaattactataaatgggaacaatggtttttcttagaattagtaaaaaaaggattggcctatcaagaagaggctgaagttaattgggatccggtagatcaaactgttttagcgaatgagcaagttattgatggtaaaggatggagatcaggagcagaagttcaaa

SEQ ID NO: 303872 - DNA, 493 bp, Unknown
  Bacterial polypeptide expressing nucleotide sequence isolated from the Sargasso Sea
aatgaagcgctataattttcgagaaaccgagcagaagtggcagcaaaaatggtctgaagctaaaaccttccaagtatttgaaaacacggaccttccaaaatactatgtcttagagatgtttccatatccatcaggccggatccacatgggtcatgttcgcaactacaccctcggtgatttacttgcaaggtacaaaaaggcgtgcggctttaacgtgatgcaccctatgggttgggatgcctttgggctgcctgcggaaaatgcggcctttgagaggaatatacatcccgcaaagtggacagatcaaaatattagcaccatgcgtgagcaacttaaagcaatgggtctctcgtatgactgggaccgggaactatcaacgtgcgatccagaatattataagcatgaacagaagatgttcttggattttgttaaaaataatcttgcttaccgaaaagaaagttgggtgaactgggaccctgtagagaatacggtt

SEQ ID NO: 303873 - DNA, 932 bp, Unknown
  Bacterial polypeptide expressing nucleotide sequence isolated from the Sargasso Sea
gaaaaaaaaatattatgttttagaaatgtttccttatccgtctggaaaaattcatatgggacatgtgagaaattatactttgggagatgtaatagctagatataaaagaatgaagggttttaatgttcttcacccaatgggttgggatgcttttggtctacctgctgaaaatgcagctataactgaaaaaaagcaccctaaggagtggacatacaaaaatatagaaacaatgaaaaaacaactattacaaatggggttgtctttagattggaaaagagaaatagcaacatgtcatccagattactacaaacatgaacaaaagttttttatagatttattcaatgcaggtttagcttataaaaaagaggctgaagttaattgggatccagttgataaaactgtattagcaaacgaacaggttattgatggaaagggttggagatctggtgctgttgttgaaaaaaagaagttatctcagtggtttttaaagacctctaaatattccgaagaacttcttaatgatcttgaaaaactagataagtggccaaataaagttaaaataatgcaatctaattggataggtcgttctgtaggtgctgaaatcgacttccaagtatctaatagtgttgataaaataaaaatttttacaaccaggcctgatacaatatatggcgctactttcttagctttatcaactgaccataagatatcaaagggattatctaaaaaacatcctgctattaaaaagtttatagaggagtgcaaagttataaaccctgataaggtcaaaaaaggttataatacaggccttactgttgatcacccttttatcaaagaaaagaaaattccagtttttatcgctaactttgttctaatggaatatggtttgggagcaatttttggatgtccggctcacgatcaacgagattaga

SEQ ID NO: 303874 - DNA, 883 bp, Unknown
  Bacterial polypeptide expressing nucleotide sequence isolated from the Sargasso Sea
atggattatggacttggagctgtttttggttgtcctgctcacgatcagagagatctagattttgcgaacaaatataatttatctattaaaactgtagttcaaccaaatgattcaattgatgaacttgtggttaaaaaagaagcatatactggtggaggaaaaataattaattcaaagtttttaaatggtttaaatgttcccaatgaatcaattattaaaactattgaaattttagaaaagaaaaagttaggaataaaaaaaattaactttagattaaaagactggggtgtatccagacaaagatattggggatgcccaattccagttgcttatgacaataatggtaatgtcttcaaaattccaaaagaggatttgccagttttgttaccagaaaatattaatttaaaaacaaaaggtaatcccttagacgctcaaaaagaatggaaatctgtagaaattaattcaaaattattaaccagggaaactgatactcttgatacgtttgttgactcatcatggtatttcttgagattttgttcacctcaaaatagctcttatggatttaattttgatgaaattaattattggatgcctgtagatcaatatataggaggtgtggaacatgcaattcttcacctgctttattctagattttttatgagagcgataaattataaaaatgaaaattttgaaataaaggagcctttccaagggttatttacccagggaatggtatgtcatgaaacatataaagatgaaaaaaataattggctaggtccagacgaaattgagtccaaaaatggtaaagatttttttataaagaaatctaagaaaaaagtaattattggaccttctgaatcaatgtcaaaatcaaaaaaaaata

SEQ ID NO: 303875 - DNA, 663 bp, Unknown
  Bacterial polypeptide expressing nucleotide sequence isolated from the Sargasso Sea
ttttttgaatcctcatggtactacgcaagattcgcaagttatgacaatgacgaatttatgttggatgatagggctaagtattggctgccagttgatcaatacattgggggaatagaacatgctgtactgcaccttttatactctaggttcttttttaggtgcatgagagatatgggacttgttgagggcgatgaaccattcttaaaccttttatgccaaggtatggttttaaaagacggagctaagatgtctaagtccaaaggcaatactgttgaccctcaaggattaattgagaaatatggagctgataccgtaagattgttcgttatgtttgcagctcctcctgagcaatcactagaatggtctgatcagggggttcaaggagcccacagatttataaatagaatatggagactggtaaataagcatattcaagctggtataaaaaaagagagtattgaagtaacaagcgaagcctgtaaggcactaaaatctaaaattcataaaacattagcaaaagtaaaagatgactatcttagaagacatagtttcaatactgcaattgccgcaatcatggagctttctaatgatattcccggcgattttttggattcaaaagcaaatccagagatgagagaagttgcaaacgaagctattgagtct

SEQ ID NO: 303876 - DNA, 1018 bp, Unknown
  Bacterial polypeptide expressing nucleotide sequence isolated from the Sargasso Sea
tccattgaaaacaatgagtgatttttatgaggtgaatgacagagatattccattggttcgtgaaacagatacgttcgatacttttatggagtcttcttggtactatgctagattttgttcaagtgattctgacaaagcgatgttggatgatagagctaaatattggcttccagttgacctgtatattggtggaattgagcacgcgatcttacacctcctgtatgcaaggttctatcataagctacttcgagatgagggtctcgttgaaggaaatgagccatttaaaaggctgttaacccagggcatggttctaaatgatggcgcaaagatgtcaaaatctttaggcaacacagtcgatccagaggagatgattcaaaattacggcgcagatacagttcgtttattcatgatgtttacctctcctccagagcaatctttagagtggtcagatacagctatcaacggctcatatcggtttttaaaaaagttatggaaactgataaaaacccatcaagactctataaaagatatttctggtatttcgtcgaatgaaaagtttaatggaaatcaaaataagttgagaagaaaaacgcatcaaacaatttcaaaggtcacagacgatatcggaagaaggtatactttcaataccgcaattgcagcagtcatggagcttgttaatgaagtttcaactttcaatgtcgatgatgaattggatcgccaagtaatcaaagaggcaattgaaagcatactattattgctttcaccgatcgttccacatatttgtcatcagctttggctggatattaatcatgatcagccgattattgatgctaggtggccaaaatttgactccagtctcctcaaaagtgaaacatcgctaattgtagttcaggtaaacggtaaattgagatccaagcttgaagttgatgcttcaattagtgaggatgaattaaaatcaatggcattgtctgacgaaaaggtagtgcgcttcattgatgggaatgagattaagaaaatt

SEQ ID NO: 303877 - DNA, 879 bp, Unknown
  Bacterial polypeptide expressing nucleotide sequence isolated from the Sargasso Sea
agactggttaatttcaagacaaaggtattggggcacacctattcctatttattatgataaaaatgaaaatataatcccagttgatattaatgaattacctgttgttttacctgaagctaaagaatttatgcctactggccagtcccctcttacactagacgaagagttcctctggtttgaccatcctaaatatggaaaacttagaagagagactgacacaatggacactttcgtagattcatcttggtatcacttaagatttgcctctgatgaatcaagtaaagtagacccttttaataaagaaagactaaaaaattggctgcctgttcaccaatacactggtggtgctgaacatgctgtgatgcacttactctatgctagattttttaataaagttttaagagaccttggctttgttgattttgatgaaccttaccaaaatctttttaaccaaggtgtattgcttaaagatcatcaaaaaatatcaaaaagatccaaccctcttgctccagatcctttagttaaagaatttggagctgacgcggttagattgtatctaatgtttcttgggccttgggatcaaggaggtgattggagcgatgatgcatttaatggaatcacgagatggttgaacagagtatgggacatatcaacaagagatacagatgaaataatatcaaatgatgataataataaagattttgaaattttaattaactcaactgtaaaaaaagtaagtgaagatttagaaaaatttaaatttaacacgtcaatatctacattgatggaatatacaaatagtttgagtaaaatttggagcgcgggatgcaacaatgacttatggaaagaatctataataattttaatcaaattgttatc

SEQ ID NO: 303878 - DNA, 967 bp, Unknown
  Bacterial polypeptide expressing nucleotide sequence isolated from the Sargasso Sea
aatagcaattggagaaaagattggttttaaaacaaagcttgaagcaataaatcctctaaatccaagccaaaaagtgcctgttttctttgctaattttgtcttaatggactacggttttggtgcagtttttgggtgtcctgctcatgatcaaagagatttcgactttgcaaaaaaatatagtctagatattaaaaccgtagttagaccagaagaagaaaatgaaaattttgaagttaaagatgaagcctattcaggtcctggagttttaataaattcagaatttcttaataaacttaaagtgccagaagagtcagttcttaaaacaattgatattttagaagagaaaaaaataggccaaaaacaaattaattttagattaaaggattggggagtatctagacaaagatattgggggtgccctatacctatggcttatgatgagcatggaaatgtaagaacaattccaaaagagaatttacctgtaaaacttccagaaaatgtaaatttaaactcaaaaggtaacccattagactcaaaattagattggaagaatattattattgatggaaaaaaatatataagagaaactgacacattagatacttttgtttgttcatcttggtattatcttagattttgctcgtcagataactcagaatatggattcaaacaagaagaaatcgattactggatgcccgttgatcaatatatcggaggagttgagcacgctattcttcacttattatattctaggttttttatgaaagctttaggatacaaaaacgagaattttaagttcaacgaaccttttgaaggtttattcactcaaggtatggtttgtcatgagacatataaagatcagaataataattggttaagcccagatgaaatagaattagtaggagatcaattttttaaaaaaggtgactcaaaacatttagtaaaagttggaccttcagaatcaatg

SEQ ID NO: 303879 - DNA, 1089 bp, Unknown
  Bacterial polypeptide expressing nucleotide sequence isolated from the Sargasso Sea
atctggtgtacaaatcgaaattaaagaaatagatcaatggtttataaaaatcactaattacgctgacgaacttcttagttcacttgaggatcttgagtggccagataacgtaaaactaatgcagaagaattggataggcaaatcatttggtgctgaaattaaatatcaaattgatgggagtaaagattcactaactacattttcaactaggccagacactatttttggagtatcttttcttgctatatctcccaatcatcctcttgcaacaaaaatttctaaaggtgataaaaaaatatcaaattttcttgaaaaatgtaaggaggccaaagccgcagaagcagatatagcaaaggcagaaaaactcggtattgatacaaacctaagagtaattcatccattaactggagataaattaccagtgtggattggaaatttcgttttacttgactatggaacaggcgtcgttatgggagtaccagctcacgattcaagagattatgaatttgcaaaaaaatataatcttaatatcaaagaagtaattaaaaataatgaagaggtattaccaagaactgaaaatggaattttaataaattcagagaaatttaacggtctttcgtcagaagaggggtcaaaaaaaattatcgaagaattagtcaaattaaaatctggcaagcagctcattcaatataggcttagggattggggagtaagcaggcaaagatattggggctgtccaataccagtcatttatgaaaatggcgatccgaaagttattgacgaagatgatatgcctgttgagcttccaaaactaaaagataattcgtcgccaattccattaagtcaaaacgaggattttataaatttgggcaataatctttacagagaaagtgacacattcgatacttttatggattcatcttggtattacgcaagatttacatcttctaacaataataatgaaatttttgatgaaaacactaaatattggcttccagtagatttgtatattggtggaatagagcacgctatattgcatttgctatattcaagattttttcataaagctctcagagatatttggacttg

SEQ ID NO: 303880 - DNA, 549 bp, Unknown
  Bacterial polypeptide expressing nucleotide sequence isolated from the Sargasso Sea
aatggaaagagtgaattttcatttattagaggaaaaatggcaaaaaaattggaataaaaagaaactctataattccaaatttaagaagaatttttattgcctggaaatgtttccttatccctcaggaaaaatacacatgggtcacgtcagaaattatacaattggtgatgtgatagcgagatataaatttatgaaaaattataacgtacttcatccaatgggttgggatgcatttggacttcctgcggaaaatgcggctaaagaaaataaaatgagtcctagtgcctggacaaagaaaaatatacaagaaatgaaacgacaattgaaaatgcttggtttatcaattgattgggaactcgaaattgctacctgcgatgagagttactataagcatcaacaagaattatttattgacttctacaatgcaggattagtttctagaaaagaaacctacgtcaattgggatcctgtggaaaaaacagttttagctaatgaacaagtgattaatggaagaggttggaggtctaacgccattgttgaaagaaaaaa

SEQ ID NO: 303881 - DNA, 962 bp, Unknown
  Bacterial polypeptide expressing nucleotide sequence isolated from the Sargasso Sea
tttgaaagctgtaaatccatttaaagaaaatgaaagagtaccagtttactttgcaaattttgtgttaatggattatggatttggtgcagtatttggatgtcctggtcatgatcaaagagattttgattttgccaagaaatataacctttcaataaaaactgttgtgagaccaaaagatgtggaaaattttgatgtaaaaacagaagcatttcctggggaaggtataataataaactcagattttttgaatgacctgaaagcaccggaccagtcagtagtaaaagctatagaaattttagaagaaagaaaaattggaagagaaaagattaattatagattaaaagattggggtgtttcaaggcaaagatactggggatgtccaattcctatcgcttataatgaaaaaggtgagattaaaacaattccaaaagatcaactaccagtaaaacttccaaaaaatattaatcttaattgtaaaggtaatccattagacaacgatgaaaactggaagatcatagatattgagggggaaaaatattttagagagacagatactttagatacttttgtagattcatcctggtattttttgagattttgttcacctaaaaatgataaatatggttttgatttagatgagataaattattggatgccagtagatcagtatattggcggagtagaacacgctattcttcacttgttatattcaagattttttatgagatctatagcttacaataatgataagtttaaatttaaagaaccatttgaaggtctgttcactcaaggtatggtttgtcacgaaacctacaaagatgaaaataataattggctaagtcctgacgaagtagaacttaatggaaaacattattatattaaaaccaattcctcatctaaggtaattgtgggaccatcagaatcaatgtcgaaatctaaaagaaatgtaattgaccctgaaa

SEQ ID NO: 303882 - DNA, 942 bp, Unknown
  Bacterial polypeptide expressing nucleotide sequence isolated from the Sargasso Sea
atttcaacctgtgatgaggagtattataaacaccagcaagaactgtttattgatttttttaataaaggcctagtaattcgtaaagaaacttatgtaaattgggatcctgttgatgaaactgttttagcgaatgagcaagttattaatggaagaggatggcgatcaaatgcagtagttgaaagaaaaaaattatcacagtggttttttaatatttcaaaattctcaaatgaacttctagaagatttaaatacactcgatgagtggcctgaaaaagtgaaattaatgcaaaaaaattggattggaaaatctgtaggttgtgaaatagattttaaaattagctcaaaaaatacaaatattaaaatttttacaacacgtccagatactatatttggcgccacttttttagcaatttcagtagaccatcctttgtgtaaaggtttagaaaagaataaagattttattgaatttaaaaaaaaatcttctcaagttggaactacagaagaagctatagcaaatgcagaaaaaataggatttgatactagacttaaagcaaaacacccttttatcaagaacaaaactataccggtttttgtcgcaaacttcatattgatggattatggaacaggagcaatttttggctgtcctgcacacgaccagcgagactttgattttgcaacaaaatataacattgaaataataccagtagtaaaatctgaaaaagatgacaataacaaaaaaattaatgaagcttatacaggcgatggaaaaattattaattccgaatttttgaatggatttaatgttgaagaagcaaaaaataaaataatatctaaaatcgaaaaaaaaaaaattggaaaaaagaaaataacctttagattaaaagattggggaatttcaagacaaagatactggggttgcccgataccaatgctttatttaaaa

SEQ ID NO: 303883 - DNA, 1012 bp, Unknown
  Bacterial polypeptide expressing nucleotide sequence isolated from the Sargasso Sea
ttcccttaccccagcggcaagctacacatggggcacgtgcgcaactacaccatcggcgacgtgatttcgcgctaccagcgcatgctcggcaagaacgtgctgcaacccatgggttgggacgccttcggcatgccggcagaaaacgccgcgatgaaaaacaacgtggcgcccgccaagtggacctacgaaaacatcgcctacatgaagacccagttgcgcagcctgggcctggcggtggactggtcccgcgaggtcaccacctgcaagccggattactaccgctgggaacaatggctgttcacgcgcctgttcgaaaaaggtgtgatctacaaaaaaagcggcaccgtgaactgggacccgatcgaccagaccgtactggccaacgaacaggtcatcgacggtcgcggctggcgttccggcgcgctgatcgaaaagcgcgaaatcccgatgtactacttcaagatcaccgcctacgcggatgaactgttgtcgagccttgacgatctgccgggctggcctgaacaggtcaagaccatgcagcgcaactggatcggcaaatccaagggcatggaagtgcagttcccgtacaacgtcgactccatcggcgaagccggcgcactcaaggtgttcaccacccgccccgacaccctgatgggcgcgacctacgtcgccgtggccgccgaacacccgctggccacccaggccgcacagaacaaccctgagctgcaggcgttcatcgctgaatgcaaaggcggcagcgtggccgaagccgatgtcgccacccaggagaaaaaaggcctgccgaccggcctgttcgtcgagcacccgttgaccggcgagaaactgccggtttgggtcgccaactacgtattgatgcactacggcgatggcgccgtcatggccgtgccggcccacgacgagcgcgatttcgaattcgccaccaagtacagcctgcctatcaagtcggtcgtgcgcactagctcgggtgataccaaccccgctccgtggcaag

SEQ ID NO: 303884 - DNA, 1018 bp, Unknown
  Bacterial polypeptide expressing nucleotide sequence isolated from the Sargasso Sea
atgaaaaaaaaaattttaggcaaaaaacaaactaactatcgattaaaagattggggtgtatcacgtcaaagatattgggggtgtcccataccagtagcttatgacgagaatggtaaggttcacccaatacctaaatcaatgttaccagtgaaacttcctgaaaatatagatcttaaggtaaaaggaaatccattagatagtcaaaaaaaatggaaagagataattatagatggaaaaaaaatgacaagagaaactgatactttagatacttttgtatgctcttcttggtattatttaaggttttgttctcctaatgaaaaacattatggttttaataaggaggaaatagattactggatgcctgtagatcaatacataggaggggtcgagcacgcaattttacatttattatattcacgtttttttatgagggcaatagattatagaaatgaaaattttcaaataaaggaaccatttcaaagtttatttacacaaggtatggtttgtcatgaaacttacaaagatgaagataataattggttaagcccagatgaagttgaaaaagtaaatggcaaaattgtaaagaaaattgatgaaaacaaaatagtcaaagttggtccatctgagtcaatgtcaaaatcaaaaaaaaatgtggttgatccagaatttataattaaaaattatggagctgatgccgtaaggttatttattttatctgatagcccaccagagaaagatattcaatggtctgagcaaggaatggtatcttcttataaatttgtacaaaaactttggattttgcacaatgagatcaagaatataatatttaaaaacaaatatgagaatgatgacaaaaaaattgaaaaatttgtaaaccaaatgatttcgaaaataacagttaatctcgaaaaatttaactacaatgtaataattgcgaacatgtatgaaacatataattttttaattaattatttaaaagaagagaaaagtttaaaaaacttaaaagataactactata

SEQ ID NO: 303885 - DNA, 916 bp, Unknown
  Bacterial polypeptide expressing nucleotide sequence isolated from the Sargasso Sea
actgtagagttaaaagaaattgatcaatggtttttaaaaattacagattatgctgatgaacttcttgcttctatagaaaaccttgattggcctgaaaatgtaaagtcaatgcaaaaaaattggattggtaaatcttttggatcagaaataagtttttctctctctagcggagagaagctaactgcttttacaacaagaattgatactatatatggagttacataccttgcgatatcaccaaatcaccctatttcacagaatttagcgaatcaagatactgagatagacgactttattaaaaaatgcaatgaaacaaagatggctgaagcagatatggctaaggctgataagttgggattaaaaacgaatttaaaagttaaacatccttttacaggaattgatcttgatgtctggattgccaattatgtcctaatggattatggaacaggagtagtgatgggagttccagctcatgacgaaagagatcatgagtttgctctcaaatataatatagatatcaagcaagtcataaaagctgatgaactgccctcctctgaaaaaggtgagctcattaactctgagaaatttaatggtttgagttcagaaaatgcaatccaagatattaatagcttccttgaaaaagaaaaaataggtaaaggcattgagaattttcgattacgtgactggggcgtcagcagacaaagattttggggatgtccaataccagtagtctataaaaatgatgagcctatttttttagagaaaacagatctgcctgttgagttaccaaaaataaaagatggagagtctccaaaaccactcagtcaaaataatgatttctttgaaattagctccaacgaaacaagagaagttgatacatttgatacttttgtagattcgtcctgggtattatgca

SEQ ID NO: 303886 - DNA, 662 bp, Unknown
  Bacterial polypeptide expressing nucleotide sequence isolated from the Sargasso Sea
ccgcatgttcatcctgttcaaagctccaccggaaaaggatctggagtgggatgacgccgatgtggaagggcaattccgcttcttgcaacgcatctggcgcctgtgtgatggagccaaagcctctggtttgcagttgcaatcgctgctgccgctgcccgctgaactcgctggtgccgaaaccgatctgcgaagggcagtgcacaccgcgatcgaagccgtcagcgacgatctccaaggtgatgaattgcagttcaacaccgccgtctctgagctgatgaaactcagcaacgccatgggcggacaactcgatgctgtgtctgctcccgtggcccaggaagctgtgcgcagtttgctgctgctactggccccctttgctccgcacctcgctgaagaactgtgggagcaactgcaaggcagcggcagcattcatcaacaacgctggccggaggtggacgcctcggcattggtgcgcgacacgatcaccgtggtgttgcaggtgaaaggcaaggtgcgcggcaatttggaggtgcccgcagccatcagcaaagacgagctggagcaggtggctctcgccagtgacgtggccaaaaaatggctggaaggcaatgcccccaagcgggtgattgtggtaccgggcaagctcgtcaacctggtgccctaag

SEQ ID NO: 303887 - DNA, 892 bp, Unknown
  Bacterial polypeptide expressing nucleotide sequence isolated from the Sargasso Sea
gattctccaaggatttaatgttttacatccaatgggatgggactcatttggtatgccagcagaaaatgctgcaagacaaaataatttagatcctaaaacttggacagaaactaacatctcaaatatgaaatctcagttaaaaaaattaggtttatcaatagattgggatagagaaatatcaacttgcactccagaatattataaacatcaacaagaatttttcttagaactctatgataaaggattggtttatagaaaagaacaatatgtcaattgggatcctgtagatcaaacagttttagcaaatgaacaagtaatagacggaaaaggttggagatctggtgccagtgtagaaagaaaaaaattaaatcagtggttttttaatatatcaaaattttcagaaaaattattagaaaatcttaacttacttaaagagtggccgaataaagtaaaagtgatgcaaaaaaactggataggtaaatcatttggatgtgaagttgattttaaaattcaaaattcagagaaaattaaaaatattaaatgttttactacaagaccagatacattatttggtatgtcttttattgctttatctgttgatcatccagtatctaaattatatgaaaatgatgaaggctttatcaattttaaaaaagagtgttcagccacaggaacaactgaggaagcaatcgcaaatgcagaaaaattaggatttaaaacaaaccttgttgcaataaatcctttagatgaaaatattaaagtacctgtttattttgctaattttgtacttatggactatggtttgggtgcagtatttggttgtcctgctcacgatcaaagagatttggactttgctctgaaatataacctcgaagtcaatacagtagtaagg

SEQ ID NO: 303888 - DNA, 610 bp, Unknown
  Bacterial polypeptide expressing nucleotide sequence isolated from the Sargasso Sea
aatggaacgagtaaattttcaattaattgaaaaaaaatggcagtcagtttgggaaaaaaagaaaatttatagagaaaaaagtagtaaaaaattttactgtttggaaatgtttccttacccttccggcaagatacatatgggtcatgtaagaaactatgcaataggagacgtggtagctagatttaaattccttaatggatttacagttttgcatcctatgggttgggattcttttggtttacctgctgaaaacgcagcaagagaaaataatctgcatcccaaagaatggacaaagaaaaatatttccgaaatgaaaaggcaacttaaaatgcttggtctttcaatagactgggatttagaaatttcaacctgcgaagaagattactataaacatcagcaagaacttttcatagatttttataacaaagggttggtttctagaaaggaaaactatgtgaactgggatccagtcgaacagacagtcctagctaacgaacaagttgttaatgggcggggatggcgatctggtgcagttgttgagagaaagaagctatcacaatggttttttaatataactaaattctcggaatcacttttaaaaaatttagaa

SEQ ID NO: 303889 - DNA, 907 bp, Unknown
  Bacterial polypeptide expressing nucleotide sequence isolated from the Sargasso Sea
tcaaactggattggtaaatcggttggggcagaaattaattttgatattcagaaaattaacaaaaaaataaaaatatttactacacgacctgacacaatttatggcgcaacatttttagctttgtctcctgaacatgatattgcattagaattgtcttcaaaaaaccaaggagctttagagtttattgagtcgtgtaaaaacatcaatcctgacaaagttaaaaaaggttataatactggactgtttgcaaaacatccttttgttgaaaataaaacaatacccgtttttatagcaaattttgtcttaaaagaatatggacttggagcaatatttgggtgtcctgcacatgatcagagagatttagattttgctaatcaatataacttggacgtaatacctgttgttaagcctagctcatataaaaataatgatttcactattaaaaaagaatcttttacagaagaaggtattgtaattaattctgattttttaaatggcctaacaacaaaagaagctaagacaaaaatactaaaaacaatagaagacaaaaaaattggtcaaaaaaaaataaatttcaagcttagagactggggtatatcaaggcaaagattctggggctgtccaatacctataatctatagagaagatggagaaataatgtctgttgaagaaaatgaattgcctgtaaaacttcctgaggtcaaagaattcaatgagtcatcaagtactttaaaaaatattgaaggttggaatcaaacaacttgtaaaaaaacaggaatgaaagctataagagaaactgacacttttgatacttttttcgagtcttcgtggtattattttagatattgtaatgcgcgtttagaaaaaccctttaatgaaaaagatataaattattggttacccagta

SEQ ID NO: 303890 - DNA, 892 bp, Unknown
  Bacterial polypeptide expressing nucleotide sequence isolated from the Sargasso Sea
agttgttcttccagaaattgaaaattacataaatactgatggatctccactttcgaaaagtgaagaatttattaatgctgaatgtccaaaatgtaaaatacctggaattagagagacagacacaatggatacttttgttgattcctcgtggtactatttgagatttttagattctaaaaatgatgaagaaccttttaaatctgaatttataaataattggcttcctgtagaccaatatataggaggtgttgaacatgcaattctacatttactatattctagattttttgttaaagccttgagagatttaggaattattgaaatagatgaaccatttaataatttattttctcaaggaatgataaattttgagggagcaaaaatgtcaaaatcaaaggggaatatagtagatcctgaagcttattttaaatctcatggagcagatgctcttaggttatatatcttatttatggctccaccaagtgatggagttgattggaatgatggagggattgaaggaactaaaagatttttaaataaattatgggaaaatttagatcagattattgaaatgaagactgacgaaagcaataataatgaatttggaaatgaaattgaaagaaaacttaaccaaacaattgaatctgtaaccaatcatcttgaaaagttcgaattcaatacagtagtatctgacttaatgattttaaataatgacctttctagttatttaaataaaacagaaatgattaataaagatcttaaagaccaaattgttaaaaatatatgtttattgatatatccgcttgcaccacattttggttcagaaaagtataaaaactattttaatgaagaaatcaataatcagacatggccaaaattcaataaagaaaaa

SEQ ID NO: 303891 - DNA, 933 bp, Unknown
  Bacterial polypeptide expressing nucleotide sequence isolated from the Sargasso Sea
aagagattttgattttgctaaaaaatataatctaccaattataagagttgtatccgataaaaataattctaatgacggagaaaaaatgcaagaggcttacgtcggtaatggaacaatggttaattcagaatttttaaacgatttacctgtagaagaagcaaaaaagaaaattatcagtaaaattgaagaaaaaaaaataggaaaaaaacaaactttattcagattaaaagactggggtatttctagacaaagatattggggatgtcctatacctatgatttatttagaagatggttctgtagttcctgtagataaaagtgaactaccaataaaacttccatacgatgctgatcttagatcctcgggcaaccctttagataatcatccaaattggaaaaaaacaactcataaaaagactggaaaaccagcaataagagaaactgacactttagatacttttgtagactcctcctggtattttttaagattttgttcacccaagtataaaaacgcgccttttgataatgataaagttaattattggatgcctgttgatcaatatattggaggtatagaacatgcaattttgcatttgctatattctcgtttttttatgaaagcaattaagaaatgtgatgataaattcaaatattcagaaccttttaataatttatttacacaaggaatggtatgtcatgaaacatataaggatctaagtggtaactggctttacccagatgaagtaaaaataacttctaaaaaaaaggcaattaaaatattagacaaatctgaagttaaaattggttcttcagaatctatgtctaaatctaaaaaaaataccatagaccctgaaactatgatcaagcaatatggagcagatgcggttagatggtttatcttgtcagacagtcctccagaaaaagatatacagtg

SEQ ID NO: 303892 - DNA, 949 bp, Unknown
  Bacterial polypeptide expressing nucleotide sequence isolated from the Sargasso Sea
caaaaaaactggattggaaaatcatttggttgtgaattaacttttaaagttgataattcaaaaaatgtaaatgaaattaaatgctttacaacaagacctgacacactttttggaatgtcatttcttgcattatctatagatcatccaattgctaaactttatgaaaataacaatgaatttataaaatttaaaaaagaatgttctaaagttggcacaacagaagaagcaattgctaatgctgaaaaactaggatttaaaactgaacttatagcaatcaacccaattgataccaatataaaggtcccagtttattttgctaattttgttcttatggattatggttttggtgctgtatttggttgtccagcacatgatcaaagggatttggattttgccctaaaatataaattagatgtcaaaaccgtagttaaaccagatctaaatgaaaatgaatttaaagtaacaaataaagcttacactggacctggttttttatttaattcctcgttcttagatggattaaaatgtccagaagaatcaattattaaaacaattgaatatcttgaagaaaaaaattttggaaataagaaaattaattttagactcaaagactggggtgtttctcgtcaaagatattggggatgtcctataccaattatgtatgatgaagatggtatacctcacaaagttcccaaagataagctaccagttaagttacctgaaattacaaaacttgattctgcagggaaccctttagataatttaacagaatggaaagaaataaatgtgaatggaaaaaaatatatccgagaaacagacactctagatacattcgttgactcttcgtggtatttcttaagattttgttcaccaaaaaatagtgaatatggtttcaataatgaagaagttaaatattggatgcctgtagatcaatatatggcggggtgaa

SEQ ID NO: 303893 - DNA, 577 bp, Unknown
  Bacterial polypeptide expressing nucleotide sequence isolated from the Sargasso Sea
tttcttacgccggatctggactttagcggctgaacacaaagagctgttcaacacagcagtgacctcgctggaattaaactccgaccaaaaagccttgcgccgtgatattcataaaacgatcgctaaagtgtctgacgatatcggccgtcgtaatgtatttaataccgctgtcgcagccattatggaactggcaaataaagtacaaaaagcgccagttgagacggacgccgataaacaagtgaaacgtgaaggcattcagaccttaattcagttgctaaaccctatcacgcctcacttgtcgcagtacctgtggaaagagttaggttttgcaacagcactggagcaaagctcatggccagtggctgatgcagctgctatggtggaagatgaaaaactggtggtggtgcaaataaacggtaaagtccgggctaaagtgactgtctccgctgatgcgacagaagcacaagtactggaacttgctcatgctgaagaaaatgttcagcgtttcctggaaggcgtcactattcgtaaggtgatttatgtgccgggtaaactgctgagtctggccgtaggataa

SEQ ID NO: 303894 - DNA, 346 bp, Unknown
  Bacterial polypeptide expressing nucleotide sequence isolated from the Sargasso Sea
catggaaccgcgctattcaccggagcaactcgaacctgttgtgcagacccattgggaagagcagcagagtttccaggtcgttgaagacccggcgcgggaaaagttctactgcctgtccatgttgccgtatccctcgggccagctgcacatgggtcatgtccgcaactacacgatcggcgatgtgatgagccgctatcagaggatgctggggcgaaatgtcctgcagcccatgggctgggatgcattcgggctgccggccgagaacgcggcgatccagcgcgcggtcccgcccgcagagtggacctatcagaacatcgcccatatgcgcgggcagttgcagcggatg

SEQ ID NO: 303895 - DNA, 931 bp, Unknown
  Bacterial polypeptide expressing nucleotide sequence isolated from the Sargasso Sea
agatattggggctgtccgatacccataatttacagagaggacggaaagatcattgaagttccagaaaatgaattgccgttaagattacctgatgatattgatcttagtgtttcaggaaatcctcttgataatcatccaacatggaaatacacaaaatgtcctgaaacaggcatgaatgctatcagagaaaccgatacattggatacttttgtagattctgcatggtattttcttaggttttgttctcctcaaaacactaatagccccttcgatgaaaaggaaacgagttattggatgcctgttgaccaatatgtaggcggtgtggagcatgctatacttcatttgctttattctcgattttttactaaagcgcttcacttagaagatattaaagaaccttttcaaagtctttttacacaaggaatggtttgtcataatacttatcaaaatgaagaaaagacttgggtctttcctgatgatgttgaaaagaagaacaatactttcattcagatttctacaggtcaaaaagtaagtgagggaccaattgagtcaatgtcaaaatcaaaaaaaaatgtgattgatccccagtccataatacaaacttatggcgctgactcagcaaggtggtttatgttatctgacagcccgcccgaaaaagatataaattggtccgagtcaggaataaatggatcatggaaaatttgccagaaaatttggtcattagttagcaaaaataaagaatacttacagttaaaaaataaagttagtaatccagttttttcacctgaagcaactagtttactaagatcagtgcatcaaaacctaaatgctataacacaaggtattgaaaaatttcagatgaacgtagcaatcgcaagagttttcgagatggtaaatactatttcaaaatttaaagttgaaaaagaaaatg

SEQ ID NO: 303896 - DNA, 903 bp, Unknown
  Bacterial polypeptide expressing nucleotide sequence isolated from the Sargasso Sea
ctcaaaaaataagcgaagaatcaattgcaaaaaacgaaaaaattggtgtcaaaacaggtttattcataaaacatccctttattaacaataagctactacctgtgtacattgcaaattttattttaatggactatggatcgggggcaatctatggttgtcctgcacatgaccaaagagacttagattttgcaaataaatataagcttgaagtaattcaagttattgatccaaacgataaagttcctttcgataaaaaaacagcttttgtaggagatggtaaattaataaattctgattttctaaatggttcttcgatagaaaatgcgaaaaaagaaattattaaaagagttgaagaattaaaaattggtaaaaagactattaattacagattaagagattggggaatttcaagacaaagatattggggttgtccaatacccataatttatagagaagatggcgaaattattgaagttcctgaagatcaactcccattaaaattacctgaggatattgatttaagtattccgggaaatccactagataatcatccaacatggaagttcaccacatgcccggagacagggatgtctgccattagagaaactgacacgctagatacatttgttgactctgcttggtattttctaagattctgttctccatcaaatcaagatagtccgtacgaggatatagaaacagactattggatgccggttgatcaatatgttggaggagttgaacacgcgatactgcatctactgtattctcgattttttactaaggcattaaaaattaaaaatgtaaatgaaccgtttgatagtctctttacacaaggcatggtttgtcacaatacttatcaaaatcaggacaatgcgtgggtatttccacgacgatgttgaa

SEQ ID NO: 303897 - DNA, 913 bp, Unknown
  Bacterial polypeptide expressing nucleotide sequence isolated from the Sargasso Sea
tactgaatatgctgaatctcttctttctggattggatgaattagattggcctgaaagcgtcaaagaacttcaacgtaattggataggtaaatctgaggggtcaagagttaactttagactatcagatataaatacaaatattattgtatatacaactcgccccgatactctatttggtgcaacttatatggttttatccccagagcatccacttgttgatagattggtaactaatgataataaagccaaagtagcagagtataaaaaactagcatcaaataaatctgattttgatagaggtgaggttaataaggacaagaccggagttccactaggagcctatgccataaatccagttaataataaagaagttccaatctggattgctgattatgttctaatgagctacggaactggcgcgattatggctgttcctggacatgatgaaagggattatgagtttgcaagaaaatttgacctaccagttgtcgaggtagtttctggtggtgatatcgaaaaagaagctcacactgatacaaaaaatggaataatgatcaattcgtctaatgattttggtcttaatctgaatggcatgaaagtatcagaagcaatatcagttactattgaatggctagagtccaataaaaaaggagaaaaagccatccaatacaagctaagagattggctattttcaagacaaagatattggggtgaacccatgcctattatccatagtgataatggagagattattcctcttaataattctgatctaccgctaacgctacctgaggtagataaatatgaacccacaggcaccggtgagtcaccacttgctggaattaatgattgggtcaatacaaatagcggaaaaagagaaaccaatactatgccgcaatgggcaggatcgtgc

SEQ ID NO: 303898 - DNA, 214 bp, Unknown
  Bacterial polypeptide expressing nucleotide sequence isolated from the Sargasso Sea
aatgcttgaagaacaatacaatccagaaaaaatagaatctagcattcagtctgaatgggaaaaaataagcaaatataagactactccagatgatagagagaagtattattgcttatccatgttcccatatccctctggaaaacttcatatgggacatgtaaggaactatacgattggtgatgttatttctagatataaaagaatgagaggattc

SEQ ID NO: 303899 - DNA, 940 bp, Unknown
  Bacterial polypeptide expressing nucleotide sequence isolated from the Sargasso Sea
tttacttctgctgataataatgaagatatctttgatcaaaatacaaaatattggcttccagttgatctttatataggaggcattgagcatgcaatacttcatttattatattctagattttttcataaggctctcagagatattggtctcttagaaggtaatgagcccttcaaaagattgctaactcaagggatggttttaaaagatggagcaaaaatgtcaaaatccaaaggcaacactgtggacccacaatcatacatagaaaaatatggagctgatacggttagactttacatgatgtttacatcacctccagaacaaagtcttgagtggagcgagtcatctgttgagggtgcatcgagatttctaaaaaaggtgtggaatcttgtagatggaagaaaatttgaaatatctgatatcgacaataatttttctaaagaagagcttgaacttcgcaggaaatcacatgcaactcttaaaaaagtagaaaacgattttgaggttagattttcatttaatactgcaatcgcagcaattatggagctactcaattttattcctgacaattttaaaagtgaaaatgctagtgattctcaaaaattttgtttaaacgaagcaataatcttcaccttaaaaatgttatttccaatcgctcctcatgttagcgaatatttatggaataactttaaggctgaggaatcacatatcgaatcatcatggcctaaatttgaaccatgcctaattgaggcagaagaatttgatcttatcattcaagtaaatggaaaggttagaggaaaaataaaccttaataaagatatctctcaaaaagacattgagcaagctgcgttaagtgtagaaaatgtaaaaaactttattgactcatctgaaataaaaaaaactatatatattaaagagaaattaattaattttgtaatttaat

SEQ ID NO: 303900 - DNA, 874 bp, Unknown
  Bacterial polypeptide expressing nucleotide sequence isolated from the Sargasso Sea
aactgatactttagacacatttgtttgttcttcatggtattatcttcgtttttgttcgcctaaagaaactaaatatggtttcaatcaagaagaaattaactactggatgccggttgaccaatatattggaggtatagaacatgcaattttacatttgctttactcacgttttttcataaaagctttaggatataaaaataaaaactttaatattgaagaaccattcaaagggttatttacccaaggaatggtttgtcatgaaacatataaagatcaagaaaataattggatcagtcctgaggaaatagagataaaggataaaaaatactataaaaaaaacgatccaagttctcaagtcattgtaggaccttcagagtcaatgtctaagtctaaaaaaaatgtaattgatcctcaaaatataattaaaaattatggagctgattcagttagattatttattctttcagacagtcctccagaaaaagatgttcaatggtctgagcagggtatggtttcatcatttaaatttgttcaaaaattatggatattgcattctaaaataaagaaaaaactatctaataaaaatgatttaaaagaggaagatttagaattaaatcaattcacaaatcagttaattaataaaataaaagataatttagaaagctttagctataatgttataattgcaagtatgtatgaaacatataattttttgataaaatatatagaaaaaaacattaatactaaatgtttacttgaaaattacacaaaaattttaacagttttttcaccaatagtacctcaccttgctagtgaatgtttgatagatataggttacgaaaaaaagttaaattggccaatagtaaacaaaaat

SEQ ID NO: 303901 - DNA, 371 bp, Unknown
  Bacterial polypeptide expressing nucleotide sequence isolated from the Sargasso Sea
aatgcttgaagaacaatataatccagaaaaaattgaatcaagtattcagtctgaatgggaaaagataaataagtataaggctactccagatgatagagagaagtattattgtttgtctatgttcccttatccctctggaaaacttcacatggggcatgtgaggaattatacgattggcgacgttatttctagatataaaagaatgagaggattcaatgtctttcagcctatgggctgggacgcctttggactgcctgctgaaaatgcagctattcaaaataaagttgatccaaaaagttggactgagcaaaacataaagaatatgaagttacagcttaaaagacttgggtttagctatgattggtcgaagg

SEQ ID NO: 303902 - DNA, 921 bp, Unknown
  Bacterial polypeptide expressing nucleotide sequence isolated from the Sargasso Sea
ttattttttttagagctatatgaaaaaggtttggtttacagaaaagaaaattatgtaaattgggatccagtagatcaaactgtactagcaaatgaacaagtaatagacggaaaaggctggagatctggtgcgatagtagagagaaaaaaattaaaccagtggttttttaaaatatctcaattttctgatgaactacagagtgatttagataagttaaaagagtggcccaacaaagtaaaagtgatgcaaaaaaattggatcggtaaatcttttgggtgtgaaattgcatttagaacagagggaaaattgcctgttaatgaaatcaagtgttttacaacaagaccagatactttatttggattttcatttttggctctttcggtggaccatgaaatatcaaagttttattcagaaaaccaggaatttcaaaaatttaaaaaagagtgttcgaaaactggaacgacagaagaggcaattgctataggtgaaaaaattggttttaaaactgatttaatggccactaaccccctagataatagtcaaaaagtacctgtttttttcgcaaatttcgttttaatggactatggatttggggctgtatttggctgtcctgcccatgatcaaagagattttgattttgcaaagaaatacaagctaaacattaaaactgtagttagacccccagaagaaaatgatgattatgaagttaaaaatgaagcctataccggcccaggatcaataataaattctgaatatttaaacggccttaaagttccagaggagtcaattttaaaagcaattgacattttagaagaaaaaaagatagggaaaaaaaagataaattttagattaaaagattggggagtttctagacaaagatattggggatgtccaattccaatggcttatgatgaaaaaggg

SEQ ID NO: 303903 - DNA, 452 bp, Unknown
  Bacterial polypeptide expressing nucleotide sequence isolated from the Sargasso Sea
aatggatcgatataacgcgaaaaaaactgaaagaaaatggcaggaaagatgggaaagcaaaaagacttaccttaccgagaaaaataccaataaaaaaaaatattacgtactagagatgtttccctatccctcaggaaaaatccatatgggtcatgttcgcaattacacaatgggggatgtcattgctcgctacaaacggcataaaggatttaatgttttgcaccctatgggttgggatgctttcggtatgcccgctgaaaacgctgcgatggaacagaatacccatccaggtacatggacctacaaaaatatagcagaaatgaaatcccagctaaagccaatgggactatcaatcgattggtcaagagagtttgctacttgtgatgcaaattattacaaacaccagcaagagatctttatcgatatgctaaatcagaaacttgcgtacagaa

SEQ ID NO: 303904 - DNA, 984 bp, Unknown
  Bacterial polypeptide expressing nucleotide sequence isolated from the Sargasso Sea
atataatcttgagattacagaagttgtttcggataatccttccagaccaaaaaattttgataagttatcagaggcttatgttggagatggaacaataataaattctgattttcttgacggtttaaaagttgatgaagctaaaactaaaattataaataaaattgaaaaattaaaaattggagaaagaaaaattacttttagattaaaagactgggggatctcaagacagagatactggggttgccctattcccatgatacatctggaagatggaacagttgtgccggttgaaaaaagtgaattgccagtgaaactacctgacgatattgatttaagtcaaagcggaaatccgttggagaaacacaaaagttggaaaaaaactattcataaaaaaactggtaagccagcaactagagaaacagatactctagacacttttgttgactcttcttggtatttcttaagattttgctcccctgggttaaaatctgagccttttgacattgaaaaagttaattactggatgccagttgatcaatatattgggggcatagaacacgcaattcttcatttactttactcaagattctttatgagggctttaaaaaaaaataataaaaaaattaaagacagcgaacctttcaaaggtttatttactcaaggaatggtttgtcatgaaacttataaggataaaaatggaaaatggttaactccatcagaagttgaaaaaaattccaatggaaaatttttaaaaatatctgacaaaagtgaagttaaagttggtccttctgagtcgatgtctaagtcaaaaaaaaacgtgattgatcctgaaaatatgatcaaaacatatggagccgactcagtaagatggtttatactctccgacagtcctccagaaaaagatattcaatggtcaaatcaaggtgtaaacgctgcctataaatttcttcaaaaaatacataatctctgttgtacagttaatga

SEQ ID NO: 303905 - DNA, 857 bp, Unknown
  Bacterial polypeptide expressing nucleotide sequence isolated from the Sargasso Sea
gttaaacagtttttaaataaatgtgaaaattcaaactctgaaaaagaaaagttggggcttaagctcaatattgaagtcgagcaccctgttacaaaaaaaccattgcctgtatttatagcaaattttgttttaatggattatggccttggcgccatctttggttgccctgctcacgatcaaagggatttagattttgctagaaaatataacctggatgttattatggttgtaaaaccaaattctcataaaattgaaaaaatacaaagtgaagcttttataggtgagggaacgataataaattcagagtttttaaacggcctagatattgaatcagcaaaaaacaaaatggtagaatatttagaagctaaaggtttgggatttagtaaaacgaattttaaattaagggattgggggatttctaggcaaagatattggggatgtccgatacctgtattgtacagagaagatggtgagattattccggtttcaaaaaaagatcttccagtattgttgccacaaaatagtgcagaaaacggggtttttaaatctttgaaagatctagaaaattggaaaaccacaaaatgttctaaaacaggcttaaaagcatacagagaaacagacaccttcgatactttctttgaatcttcttggtattttcttcgtttttgcaatccaagaaacaaatcccctcttgattttaatgatataaattattggcttcctgtagaccaatacattggtggtattgaacacgcaatactacaccttctgtactcaaggttttttacaaaagtattaagagatctaaaatatattgaccttgatgaaccgtttaaaggcttgtttacacaaggaat

SEQ ID NO: 303906 - DNA, 967 bp, Unknown
  Bacterial polypeptide expressing nucleotide sequence isolated from the Sargasso Sea
tggtcacaaaaaaaaaccaatacagtaaaaatagataaaaataaaaaaaaattttattgcctagaaatgtttccttacccatctgggaaaatacatatgggtcacgtacgaaactatactattggtgacgttctagcccgttataaaaaacttcgtggatataatgttttgcacccaatggggtgggattcctttggattaccagcagaaaacgctgctaaagaaaataagcttcatcctaaagattggaccaaaaaaaatatagaaactatgaaaagacaacttaaacttttaggtctttctttagattgggaaagagaaatttccacctgcgatccaaaatattataaacatcaacaagaatttttcttagagttatttgctaaagatttagtatacaaaaaagatacatacgttaattgggatcctgtagagcaaacagttcttgctaatgaacaggttattaatggtaaaggatggagatcaggagctgttgttgaaagaaaaaaactctcacaatggtttttcaatataaaaaaattctcacaaaatctattagatgaacttgataaattaaaaaattggcctgaaaaagtcaaattaatgcaaaaaaattggataggaaaatcttatggttgtgaaatcaatttcaaaatcaataaaaaaaataaatttaaagagataaaagttttcacaacaagacctgatacaatttttggagcttcttttattgccctttcaactgatcatccaattgcaaaaacttttgaaaaagatagtaaatttttatcatttaaatccgaatgctctaaaatgggaactactgaagaggccttagctaatgcagaaaaaattggctttaacactgatttatttgttcaacacccttttaataaaaaaattactttgccaatttatattgctaaacttgtattgatggattatgaaactggagcaatattttgat

SEQ ID NO: 303907 - DNA, 916 bp, Unknown
  Bacterial polypeptide expressing nucleotide sequence isolated from the Sargasso Sea
atgggacatgtaagaaactataccattggtgatgtgtgggctcgttataaatatttaaatggtttcaacgttctgcaccctatgggttgggactcttttggtttgccagctgaaaatgcagctagactaaacaatttgaatcctagaacttggactgaagagaatatcaaaacaatgaaaaaacagcttaaaatgttaggactttctattgattgggacttggaagtttctacatgcaacaaagattattacaaacatcagcaagaactatttattgatttctataacgcaggacttgtctcaagaaaagaaacctatgttaattgggatccaattgaaaaaacagtattagctaacgaacaagttataaatggaaaaggctggagatcaaatgcagtagtagaaagaaaaaagttatctcaatggttttttaatattacaaaattttctgatgagcttttaaaagatttagagagtctagatgggtggccagaaaaggttaaactaatgcaaaaaaactggattggaaagtcaattggctgcgaattagattttaaaattgaaagtcttgaaaaaaatttaagaatatttactaccagaccagatacaatatttggagcaagttttattgctatctcaacagatcatgacatttgtaaaaattttaataatagctctgaatttaaaaaatttcaggacaaatgttctaaaatcggaacaactgaagaggcgatggctaatgctgaaaagttaggttttaaaacaaatttatttgccgaacatccatttattaaaaataaaaaattaccgatttatgtagcaaattttgttttaatggattacggaaatggtgcaatttttggatgcccagctcatgatcaaagagattttgattttgctaaaaaatataaactcc

SEQ ID NO: 303908 - DNA, 440 bp, Unknown
  Bacterial polypeptide expressing nucleotide sequence isolated from the Sargasso Sea
aatggaaagatacaattttaaaactatcgaggaaaaatggcaagaaaagtggcataaatcaggagtttttcgatctaaaatagattattctaaagaaaaattttattgtcttgaaatgtttccatatccatctggaaagatacatatgggtcatgttagaaattatacaataggtgatgttttatcacgttataaatctttgcaaggttttaatgtaatgcatccaatgggttgggatgcatttggtatgccggcggaaaatgctgcaagagaaaataatttagatcctaaagaatggactaataaaaatatttcaaccatgaaagatcaattaaaaaagcttggtctttctattgattgggacagggaaatttcaacatgctctaaagaatattacaaacatcaacaaatattttttttggagctttatgaaaaaggat

SEQ ID NO: 303909 - DNA, 835 bp, Unknown
  Bacterial polypeptide expressing nucleotide sequence isolated from the Sargasso Sea
tttgctaggtttgcaggtattagtgacaaagaaatgatcagcaaagaagctaattattggctcccggtagatcaatatgtcggaggtatagagcatgcaatccttcaccttttgtatgcaagattcttcaatatcctaatgcatgagaataagcttatccttaatgaagagcccttcaccaagcttctaactcaaggcatggttttggcagatgctttttatttgctggatgaggcaggaaataaaacttggctgaataaagactttcttgacgacaaaaatgatgagcttcttgataattcaggaaacaaagtttttaaagatggcatgtcaaaaatgagtaaatcaaaacttaacggagtggatccaaaagagatgattgataaatatggggctgatacagtgcggttatatatgatgtttacatcacctccggaacagactcttgaatggtcagagaatgcaattgaaggttcttacagatttattaagagattctggacgttagttgaaggcagatctaataatattgaagagccatctatatttaataaagaggaagaaacattaagaagaaaatcccatcaaacgcttaaaaaagtcttaaaagattatgaagaaagaaactcatttaataccgttattgcagcggtaatggagttaattaatgcaatcccagagtcatttaaaaaagaggatgcttcagaatcacaaaaatactgccttaatgaagcaattgagttttcacttaagattttatccccaatagcacctcatgtaactttagagttatggtccaaatttaattcctctcaagataaaagtttattttgaa

SEQ ID NO: 303910 - DNA, 776 bp, Unknown
  Bacterial polypeptide expressing nucleotide sequence isolated from the Sargasso Sea
gatgccagccgaaaatgcagcgaaagagaataagttagatccaaaagaatggactaataaaaatatatcaacgatgaaaggacaattaaaaagacttgggctttcaattgattgggatagagaaatatcgacctgttctgaagattattacagaaatcagcaattattatttttagaactttttaaaaaaggtttggtttatagaaaagagaattatgttaattgggacccagtagatcagacagttctagccaacgaacaagtaattgatggaaagggatggaggtcaggagctgttgtagaaagaaaaaaattaaatcagtggttctttaatatatctaaattttctcaagaattattagatgatttagaaaaattagataaatggccaaataaagtaaaagtaatgcaaaaaaattggataggtaaatcatttggatgcgaaatttcttttaaaactgaaggagatctgccaattgatgaaattaaatgcttcacaactagaccagatacattgtttgggttttcttttttggcactttcagttgatcatgagatttcaaaatatttttccaaagatatcaaatttcaagaatttaaaaaagagtgctcaaaaactggaactactgaggagtcaattgcaattggtgaaaaaataggttttaaaacaaatctaatggcgattaatcctttagatccttcacaaaaagttccagtcttctttgctaactttgtgttaatggattatggatttggagcagtatttggatgtcctg

SEQ ID NO: 303911 - DNA, 872 bp, Unknown
  Bacterial polypeptide expressing nucleotide sequence isolated from the Sargasso Sea
cgaagaatggactgagaataatattcagaccatgaaaaagcagcttaaacaactaggtttatcaattgattggaacagagaaatttcaacttgctcagaggaatattacaaacatcaacaaaaattttttatagatatgtttaaaaaaggattagtttataaaaaagaaaattatgtaaattgggatccaattgacgaaacggtacttgcaaatgaacaagttatagatggaaaaggttggagatcaggtgccacagtagaacgaaaaaaacttagtcagtggttttttaatatttcaaagtttgcagatgaacttcaaagtgaattagacaatttagatgaatggccaaataaagttaaggttatgcaaaaaaattggatcggtaaatcttttggatgtgaaatagattttcagattaaaggtaattctaaaattgaaaaaatcacatgttttactactagaccagatactctatttggattttcctttttggccttatctgtagaccatccattatcaaagttttttgaagatgatccaaagtttaaagaatttaagttagaatgttcaaaatcaggaactacagaggagtctatagctaatgcagaaaaagttggctttaagactaatttatttgcaaagaatcctctggatgagagtcaaatggttcctgtttattttgcaaactttgtattaatggattatggttttggtgcagtttttggatgtcctgcccacgatcagagagattttgattttgcaaagaaatacaatttggaaataaaaactgttgtaaaaccctttgatgagaaagatacttttaaagtaaaaaatgaggcctttagtggatctggagttaaattaattctga

SEQ ID NO: 303912 - DNA, 914 bp, Unknown
  Bacterial polypeptide expressing nucleotide sequence isolated from the Sargasso Sea
agccagagggtttaatgttctccacccaatgggatgggatgcctttgggatgccagcggaaaatgctgctatgcaaaataacatacaccccgcaaaatggacttatcaaaatatctcaaatatgcgtgaacagctaaaattgctagggctttctattgactggtcacgagaaattgcgacatgcgaccctcaatattaccagcatgagcaaagattatttttagatttctacaagaaagggctcgttgggagaaaaaaatcaaaagtcaactgggacccagtagataatactgttcttgccaatgagcaagtcatagatggaaaaggttggaggtctggtgcagaagttgaaataaaagagctcactcaatggtttttcaatattacaaactatgcaagtgatctactcagcaggcttgagagcttagataaatggccggataaggtcaaaacaatgcaaaatcattggataggacagtcaactggcttacaatttaaatttgaaataacaaatgtaaccgatagtgattacaaaacaattgatgtttttactacgcgacctgacacacttttcggagcaagctttgttgcgatagcagcagaccatccgataactaaagaaattgaaaaaacaaatcctgaaatctcaagtttcatcaaggagtgcagatcgaaaggaacaacattagccgaaatcgaaaaagctgaaaaaataggatttaatactggggttaaagttaagcacccattcataaaaaataaagatctagatgtctatatcgcaaattttgtcttgatggagtacggaacaggtgcaatatttggctgcccggcgcatgaccaaagagatctggattttgcacgtaaatataatttggaagttataccagttgtgttaccagaagataaagaaa

SEQ ID NO: 303913 - DNA, 886 bp, Unknown
  Bacterial polypeptide expressing nucleotide sequence isolated from the Sargasso Sea
cgctataaaaggttacaaggatataatgtttttcatccaatggggtgggatgcttttggattaccagcagagcagtacgctttaaaaactggaactcacccgatagaaaccacagaaaagaacatcgacaggtatagacagcaactgaaaatgcttggattttcttatgactgggacagagaaataaataccactgagcctagttattataaatggactcaatggattttcttgcagctatacaacaaaggtctagcatatgaagctgaggttccagtcaattggtgcccggagctaaaggctgttttatccaatgaggaagtagttgatggcagatctgatattggtggacatccagtgcacagagttccaatgagacagtggatgttaaaaattactgaatatgctgaatctcttctttctggattggatgaattagattggcctgaaagcgtcaaagaacttcaacgtaattggataggcaaatctgaagggtcaagagtaaactttaaactgccgtatataaatacaaatattattgtatatacaacacgtcctgacactctatttggtgcaacgtatatggttttatccccagagcatccacttgttgatagattggtaaccaataataataaagccaaagtagcagagtataaaaaattagcatcaaataaatctgattttgatagaggcgaggttaataaagataaaaccggagtgccactaggggcctatgctataaatccagttaataatgaaaagattccaatctggattgcggactacgttctaatgagctatggaactggggcaattatggccgtaccaggccatgacgaaagagattatgagtttgcaagaaaatttaaccttccaattgtcg

SEQ ID NO: 303914 - DNA, 951 bp, Unknown
  Bacterial polypeptide expressing nucleotide sequence isolated from the Sargasso Sea
gaggtctgtttcacaactgatcttgaattctataagtggactcaatggatattcttacaattgtttaactcttggtatgacagcgaagctgatcgagcaagaccaatcactgaacttgaatcgcttctttcaaatggccatctcaaattggaaaatggaactgattggaatgtacttactatttctgagaaacgggagataattgactcatatcgattggcttatttagccgaagctccagtcaattggtgcccagcgttaggaactgtgttagcgaatgaggaagtaacagccgagggtagaagtgagcgaggaaatcaccctgttttccgtcgacctttgaagcaatggatgatgcgaattactgcatacgccgacagactactcgatgacttagagatcctcgattggagcgacgcaataaagactatgcagaggaactggatcggaaaaagtgaaggagctgaaatcacttttaaagctggtgatgaagatttaaaagttttcacgactagacctgacacattatttggcgctacttacatggtattggctccagaacatcctcttatagaagttgtcgtagcagactcttggccagatggtactcctgacaaatggaaaaatggaatggcaactccaacagaagctgttcaaaattatcaaaaagaagcttcccaaaaatctgatcttgataggcaagagaataaagacaaaaccggagtctttgttggtgaatttgcggcagtgcccgtaaatgggaaaaaaattccaattttcatttctgactatgtactaatgggatatgggaccggtgcaattatggcagttcctggtcaggatgaacgcgactgggagtttgcacaagaatatggtctagagattatccgaactgttcagccacctgaaggttgggatggtgatgctttcattggtgatggtcccgctatc

SEQ ID NO: 303915 - DNA, 700 bp, Unknown
  Bacterial polypeptide expressing nucleotide sequence isolated from the Sargasso Sea
aatgaatgattttgattttcaacaaatcgaaaaaaagtggcaggattattggtcaaaaagcaatattattgaatgcgatcttaattcagaaaaacctaaattttataatctttgtatgtatccatatccttcaggggatttacatatggggcacgttcgaaactacacaattggcgatgtaattactagatataaattattaaatgggtttaatgttttatctcctatgggatgggactcctttggcttaccagctgaaaatgctgcaattaaaactggtattcatccacgtaagtttactgaagaacgaattgaaaatatgaaagatcaaatcataagattaggttcactttatgactgggatagagaggtagctgcacattctgaggattattataaatggactcaatatctttttattaaattattcgagtctggtttagcttataaaaaagatgccccagttaattggtgtgattcttgtacaactgtcttagctaatgaacaggttatagatggaaattgtgataggtgtgatacagaagttagtccaaaaaacttaaatcaatggtttctgaaaatctcaaaatattcagatgagctactttctggattagaaaaaattggaaactggcctgaaaatgttaagactatgcagaaaaattggattggaaagtcagagggtgcacaattccaatta

SEQ ID NO: 303916 - DNA, 616 bp, Unknown
  Bacterial polypeptide expressing nucleotide sequence isolated from the Sargasso Sea
actgtactagcaaacgaacaagtaattgatggacgtggatggcgatctggtgcaattgttgaaagaaaaaaattaagtcaatggtttttcaatatttcaaaattttcacaagagttattagatggtcttgataagcttgataattggccaaataaggtaaaaacaatgcaaaaaaactggattggaaaatcttttggctgtgaaattgattttaaagtagaaggtgagttgccagtaagcaacataaaatgttttaccacaagaccagatacactatttggattttcatttatagccctatcaacagatcatgaagtttcgaaatattataaagatgacgatgattttaaaaaattcaaagaagattgttcgaaaacaggaaccacagaagaggcaattgctgtaggagaaaaaataggttttaaaacaagtttatttgcaataaatcctttaaatccaaaacaaaaagttccagtttactttgcgaattttgttttaatggattacggttttggagccgtgtttggttgtcctgcacacgaccaaagagattttgattttgctaaaaaatataatctagaaataaaaacagttgttaaacctgataatcaatgat

SEQ ID NO: 303917 - DNA, 832 bp, Unknown
  Bacterial polypeptide expressing nucleotide sequence isolated from the Sargasso Sea
agatgttgttgcaagatataaaaaaatgaaaggctttaatgttttgcatcctatggggtgggacgcctttggtttgcctgcagaaaatgctgcattagttgaaaaaaagcctccatcagaatggacgtataacaatattaacgtaatgcgttctcaattaaaatctatgggtctttctctagattggtcgagagaaatagctacttgtcatccaaaatattaccagcatgaacaagctttttttatagatatgtttaacaatgatttggcttataaaaaaaaatctctggtaaactgggacccagtagatcaaacagttttagcaaatgaacaagttatagatggaaaaggctggaggtcaggagcccaggtagagtctaaagaattatctcagtggtttctaaaaacaagcgcatattctgaagagcttttaagctacttaaatgaattagacagatggccagagaaggttaaaataatgcaatctaactggataggaaaatcgataggagcagaagtaatatttgaaatgattaattcaaataattattcatctaaattattgaaagtgtttactactagaccagatactatttttggagcaaccttttgtgctatatcattagaacatccattagctaaagaaattattaaaaaaaaccctgaagctaaaaattttcaaacttcttgttccggcgcagatattgacaaagataaattgggttttaaaacagaaattttgataaaacatccatttatagaaaacaaaaggatccccttatttttagctaactttgttttaatggattatggttcaggagctatattcggt

SEQ ID NO: 303918 - DNA, 896 bp, Unknown
  Bacterial polypeptide expressing nucleotide sequence isolated from the Sargasso Sea
tcttaaaattacagcatattcagatgaacttctcagcagtattgataatttagattcttggccatcttctgtgaagtcgatgcaaaaaaattggattggtaaatctgaaggtgcaaaggttgtttttaaactagtaggtattaatcaaaccctagaagtttatacaacaagaatagatacaatatatggtgttacttttttagcattatcaccaaatcatagtttaattaaaactatgctagattctaatagcgagattaatttattcattgagcaatgttcaggtttgaaggtatctgaggaaacagtggggaatattgacaaaaaaggcattgatactggcatcaaagcaatcaatccaattaatggaaaaataataccagtgtgggtcgccaattatattttatctgattatggaacgggatgtgttatgtccgttccgggtcacgacgaaagggataacgattttgctctaaagtataatttgcctgtgattgaggtagtaacgccaaaaaaaaatttaaaaagcaagagaaaggtttttacggatgatgggatattaataaaatcagataaacatacaggtttagattctgctgcagccagaaagagtattcttgaagagcttgtaaaaaaagattctgcagaatcaaaaataaactacagactaagagactggggcatttcaagacaacgatactggggttgtcctataccaattatctatcatgatgatggcactgtctatcctgtgcctgaaaaagatttaccagtcacgctaccagatgatatagatttaaccaaagatggaaaccctttagaaaatcatcctacatggaagtatattaaatgcccttatactggcaaagatgccatcaagagaaacagatacattt

SEQ ID NO: 303919 - DNA, 940 bp, Unknown
  Bacterial polypeptide expressing nucleotide sequence isolated from the Sargasso Sea
aaagaatgctcaaaaacaggtacaactgaagaagcaatcgccatgggagaaaagataggatttaaaactaatttaatggcaattaaccctctaaattccaatcaaaaagttccagtttattttgcaaattttgttctaatggattacggctttggagcagtttttggatgtcctgcacatgatcaaagagattttgattttgcaaaaaaatataatcttgaaattaaaacagtggtttgtcctaatgataagtctgaaaattttgaagttaaagaaaaagcatataccggagcaggaattataattaactcaaattttttggatggcttaaaggtaccagaagagtctattattaaaaccatagatattctagaagaaaaaaaacttggcaaaaaacaaactaattttagattaaaagattggggagtttcaagacaaagatattggggttgcccaattccaattgcatatgacgaaaatggtaaagcggtaccaattccaaaaaaagatttaccagtaaagcttccagaaaatgtagatcttaatgctaaaggaaatccattaaattctatagataactggaaaaatattatgattgatggaaaacaaatgacaagagaaacagatactctagatacttttgtttgctcttcttggtattatttaagattttgttctcccaaaaatactgaatatggatttaataaagaagaaattgactactggatgccagttgatcaatatataggtggaatagaacatgcaattttacatttactttactctagattttttatgcaggcattagcttttaaaaataatatttttaaaataaaagaaccttttacaggattattcacccaaggaatggtttgtcatgaaacatacaaagatctagataacaattggctaagtccagaagaaatagaacaaaaagaca

SEQ ID NO: 303920 - DNA, 821 bp, Unknown
  Bacterial polypeptide expressing nucleotide sequence isolated from the Sargasso Sea
actattaacgcaaggaatggttcaggccgcagcctataaaaacaataaaacgggtaaatatgtttctccttccgatattactgacttatcaaatccaacagatccaattgataataccaaactcgaagttctttacgagaagatgtctaagtcaaaatataatggaatagaccctgaatcagtaattaaaaaatatggagcagatacagcaagaatgtttatattatttaaagcaccgccagaaaaagatttggaatggggagatacagatgttgaaggacaatttagatttttaagcaggatttggaagctttatattaattgtacaaaagatataaatagtaaatctaattcatatccagataaagaaaaaagtttaataaagtcaatgaatatagctataaaagaaatttcaaatgacatattaaataaccaatttaataccgcgatttcagaactaatgaagttttataattcattatcaaattccattaatgacgtaaacaataatttaaaaattgatgctttaaaaacgttttgtattttgttggctccatttgcacctcatattgcagaagaaatatggcatcttataggatttaaaaaatctgtacatttagaacactggccttcatttaatgccgaagcactaaaggaagattcatatgaacttgtaatacaagtgaatggaaaagttagagataaaattaatattaataatgatatgagtgatgatcaaattaaagaattgactcttaaaagacctaatatattaaaatggacacaagataaggaaataagaaaaataattattgttaaag

SEQ ID NO: 303921 - DNA, 818 bp, Unknown
  Bacterial polypeptide expressing nucleotide sequence isolated from the Sargasso Sea
ttcagatttcataaacggcctaagtattaataaggctaaagaaagaattatttctgaattagaaaaaaataaaattggtaagaaaaaaataaactataaattaagagattggggtatttcaagacagagattttggggctgtcccataccaataatatatagagaggacggagagatattggcggtggaagaaagacagttacctgttaaacttcctgatattaaaaactttagtgaatcatccagtgcactaagtaatattcctggttggaaagaaacaatttgtccaaaaactggaatgaaagcttacagagaaacagatacgtttgatactttttttgaatcatcgtggtattattttcgttactgcaatgcaagactagacaagccttttgataaaaaagatgtagattattggcttcccgttgatcaatatattggtgggattgaacatgcaatattacaccttctttattcaaggttttttacaaaagctttgagagatttaaattattttaatttggatgagccttttcagggtcttttcacccaaggaatggtaacacacgttacgtataaaaacaaaaatggtgagtgggtagagccaaaagatgttgagggggttggggatgttttaaaagataacaatgggtttgaggttgaagtgggtaaagttgaaaaaatgagcaagtcaaaaaaaaatgtggtagatccgaacgatataattaacacatatggagcagataccgctagatggtttatgttatctgatagtccgccagatagagatttacagtggacagacactggtattgctg

SEQ ID NO: 303922 - DNA, 777 bp, Unknown
  Bacterial polypeptide expressing nucleotide sequence isolated from the Sargasso Sea
ggtgaagaaaatttccatgccaaagatttgccagttgagttaccttccaaggttgaattcaagggtgtcagttctcctttgaaggatatgtctgaattcttaaacgtcgatcaagaaggtaaatctcttattagagaaactgatacttttgatacattctttgaatcatcttggtattacgcaaggtttgctagttttgatagtcatgattctatgcttgatgatagagctaactactggcttccagtagaccagtatataggtggcatagaacatgcagtattacatcttctatattcacgttttttctttagatgcatgagagatttgggtctagttgaaggagacgaacctttcacaaacttgctttgccaaggtatggttttgaaagatggtgccaaaatgtctaaatcaaaaggaaatacggttgatccacaaggtttaattgaaaaatatggggcagatactgtcagactttttgtattatttgctgctccccctgagcaatctctcgaatggtctgatcaaggagtacaaggtgctcatagatttattaacagaatatggaaactggttaataagcatatacatgcaggcctgtcagatgattttgatgtaaatcattcaaataaagatttgaaattaatgcgatcaaagattcataagactttatttaaggtaaaagatgattatttaagaaggcatagtttcaatactgctatagcagctgtaatggagctctctaatgatattcctcaagaatggtttgactcaagt

SEQ ID NO: 303923 - DNA, 829 bp, Unknown
  Bacterial polypeptide expressing nucleotide sequence isolated from the Sargasso Sea
ttggataccttggtagactcttcttggtactttcttagattttgttcaccattagaagaaaataagggttttaatattgaagatgtaaactattggatgcctgttgaccaatatattggcggggtagaacatgcgatattgcatcttttatattcaagattttttactaaagccttaagttataaaaactctgaatttaatttatcagagccctttaatggtctttttacccaaggcatggtttgtcatgaaacatataaaattaacaatgaatggaaaaatccatcagaagtgcaatctgaaaacggaaaagatttttttcttaaagacaagcctaatcaaagagttattgttggtccctcagagtcaatgtctaaatcaaaaaaaaataccatagacccagcgataatgattaaaaattatggggcagactctgttaggttttttattttatctgatagtccacctgaaaaagatatccaatggtctgaacagggtatgcaagcagcttttaaatatgtgcaaaagttttggaatttgcattgtgaaataaaaaataaaattttatctaaaaatttaaaaaacaataattttgatcctcaatcaacaaataaaataaatgtttttacaaatcaaactgtaaaaaaaattacacaaaacttagaaaattttcagtataatgttattattgctaatcttcacgaaatttacaatttttttagtaaacttaaaaattttgaaaattgtgaaattgagatttttaaaaaaaattacattaaaatattaactttaatgcacccaatacttcctcacctaattaccgaatgtc

SEQ ID NO: 303924 - DNA, 928 bp, Unknown
  Bacterial polypeptide expressing nucleotide sequence isolated from the Sargasso Sea
aattttgtacttatggattatggttttggggcagtgtttgggtgtccagcccacgatcaaagagattttgactttgcaaaaaaatacaaacttgaaattaaaactgtagttaaaccagaaagtgaggatgataattttgaagtgggagacgaggcttactcgggttctggcgtaatgataaactctgaatttctcaacaaactcaaagtaccagatgagtcaattattaaaacaattgatattttagaacagagaaaaataggaaaaaaacagattaattttagattaaaagattggggtgtttctagacaaagatattggggatgcccaataccaatggcttatgatcaaaatgggaatgtaacggcaataccaaaagatcaattacctgtaaaacttccagaaaatgtaaatttaaattctaaaggaaatccattggactcaatgaacgattggaaaaatatagatatagatggaaaaaagtatgttagagaaactgacactctagatacatttgtgtgttcatcatggtattatctcagattctgttcaccaaaaaatgtagattatggatataaaaaagaggatattgattattggatgcctgtcgatcaatatattggtggtgtagaacatgcaatccttcatttgctttactcacgtttttttatgaaaggattaggatataaaaatagtgattttaaatttagtgagcccttcaagggattatttacccaaggaatggtatgtcatgaaacttataaagatcaaaataataattggcttagcccagatgaaatagaattagttggaaatcattatcgaaaaaagagcgatcctagtgaaaaagttaaagttggaccatccgagtctatgtcaaaatcaaaaaaaaatgtaattgatcctgaaaatataataagtaactacg

SEQ ID NO: 303925 - DNA, 839 bp, Unknown
  Bacterial polypeptide expressing nucleotide sequence isolated from the Sargasso Sea
ttcttggtactacgctagattttgttcaagcgattctgacaaagcgatgttggatgatagagccaaatattggcttccagttgacctctatattggtggaattgagcacgcgatcttacacctcctgtatgcaaggttctatcataagctacttcgagatgagggtctcgttgaaggaaatgagccatttaaaaggctattaacccaaggcatggttctaaatgatggcgcaaagatgtcaaaatctttaggcaatacagtcgatccagaggagatgattcaaaattacggcgcagatacagttcgtttattcatgatgtttacctctcctccagagcaatctttagagtggtcagatacagcaatcaacggctcatatcggtttttaaaaaagttatggaaactgataaaaacccatcaagactctataaaagatatttctggtatttcgtcgaatgaaaagtttaatggaaatcaaaataagttgagaagaaaaacgcatcaaacaatttcaaaggtcacagacgatatcggaagaaggtatactttcaataccgcaattgcagcagtcatggaacttgttaatgaagtttcagctttcaatgtcgatgatgaattggatcgaaaagtaatcaaagaggcaattgaaagcatactattattgctctcaccgatcgttccacatatttgtcatcagctttggctggatattaatcatgatcagccgattattgatgctaggtggccaaaatttgactccagtctcctcaaaagtgaaacatcgctaattgtagttcaggtaaacggtaaattgagatccaagcttgaagttgatgctt

SEQ ID NO: 303926 - DNA, 748 bp, Unknown
  Bacterial polypeptide expressing nucleotide sequence isolated from the Sargasso Sea
agtagtagaacaaaagtggcagaataaatggtctgaagaaaagatatttgcttcacaaatagataagaataaaaaaaaatattacgtattagaaatgtttccttatccatcagggaaaattcatatggggcatgtcagaaattatactctcggagacgtggttgcaaggtacaaaagaatgaggggttttaatgtcttacatccaatgggatgggatgcttttggtttacctgcggaaaatgcagctatgacagaaaaaaaacacccagaagaatggacttataaaaatataaaaaccatgaagagtcagttactacaaatgggtttatctttagattgggacagggaattagcaacatgccatccagactattataaacatgaacaaaaatttttcatagatatgtttaatgcaggtttagcttataagaaagaatctgaagttaattgggacccggtagacaaaacggtattagctaatgaacaagtaattgatggaaagggttggaggtctggggcagttgttgaaaaaagaaagttgtcacaatggttcttaaaaattagtaaatattcagatgagcttttaaatgatttggaaaaacttactaattggccaaataaagttaaagttatgcaatcaaactggattggcaaatccataggtgctgaaattgatttcaaactaagtaacaataatgaaaaaattaagatttttacaacaaggcctgatacaatttatggcgcaacc

SEQ ID NO: 303927 - DNA, 897 bp, Unknown
  Bacterial polypeptide expressing nucleotide sequence isolated from the Sargasso Sea
aaagcgtgttctaaaacaggaaccacagaagagtcaaatgcacaggcaaccaaaatagggtttaaaacagaacttacagctgtaaatcctcttaataaaaaatcaaaagttcctgtttatttcgctaactttgttttaatggactatggatttggagcagtgtttggttgtccagctcatgatcaaagagattttgattttgcgaaaaaatacaatcttaaaattaaaacggttgtaaaacctgtcgaagagaatgctgaatttgaggttaaagaccaagcttacacaggacctgggataataataaattctgaatttttaaatggattatccgtaccaaaagaatcgataaatgagacaattaaaatcttagaagataaaaaattaggcaaaaagaaaatcaactacagattaaaagattggggtatttcaagacaaagatactggggatgtccgataccaatcgcgtatgacaataataataatgtaataaaaattcctgaaaaagatttgccagttgaacttcctgaaaaaattgatcttaatacaaatgggaatcctttggatggacaaaagaaatggcaagaagttattattgatggaaaaaaatgtaaaagagaaactgacactttggatacatttgtagattcttcttggtattatcttagattttgttcagcacataataaaagggaaccattcgatactaatgaattagattattggatgcctgttgatcaatatatcggtggcgttgaacatgcaatattacatcttctttattcacgcttttttatgagagccataagtttaaataacaatgagacaaaactaaaggaaccatttgacgggttatttactcaaggaatggtttgtcatcaaacttttaaagatgag

SEQ ID NO: 303928 - DNA, 770 bp, Unknown
  Bacterial polypeptide expressing nucleotide sequence isolated from the Sargasso Sea
gatacttttgtttgctcatcctggtattacttaagattttgctctcctaaagaaaaaggatatggttttaataaagaggatatcaactattggatgccagttgatcaatatataggaggagtagagcatgcaattttacatttgctgtactcaagattttttatgcaagcattatctcataataataatgaatttaatatattagaaccatttgaaggtctttttactcaaggcatggtctgtcatgaaacatataaagattcagataacaattgggtaagtcctgatgaaattgaaacaataaatggaaaaaagtatttaaaaattgacaattcaaaagtagttaaggttggtccatcagagtccatgtcaaaatcaaaaaaaaatacgattgacccagaaaatattattacaaactatggtgctgatgcagcaagattatttattttatctgatagcccaccagaaaaagatgtgcagtggtcagaagaaggcataatttcctcttttaaattcgttcaaaaactatggaatttacatgaaaaaattttagatgaagcacacaaggaccataaaaaaaataataacgatttaatcgaaaaatatactaataaatttttaaaaaatattactcataatcttgaaaattttagttacaataaattaatagcaaatttacatgaaatgtattcttttatgtacaaacaaattcaagagccctatacaaaaataactttaatagaaaattatcaaaaaattttgattgcaat

SEQ ID NO: 303929 - DNA, 675 bp, Unknown
  Bacterial polypeptide expressing nucleotide sequence isolated from the Sargasso Sea
agacctgatactttatttggcttttcttttttggctgtttccattgaccaccctatttctaaatacttttcagataatcctgatttcaaaaaatttaaagaagaatgttcaaaaactggaaccacagaagagtctatagctcaaggtgaaaaaattggttttaaaacaaacctttgtgcaattaatcctttagatgaaaatcaaaaagttcccgtgtattttgcaaattttgttttaatggattatggttttggtgctgtttttggttgtcccgcacatgaccaaagagatttggattttgcaaataagtataatttacttgttaagactgtagtaaaaccaaaggatgaaaataataattttaaagttaacaaggaagcgtatactggtccaggaattattattaattcgaattttttagatggtttgaaggtccctgaagagtctattactaaaactattaatatacttgagaaaaaaaatttagggaaaaagagaattaattttagattaaaagattggggtgtgtctagacaaagatattggggctgtcctataccaatagcctatgacaaaaatggaaaagttgttcctattcctaaagaaaaattgcctgtaaaacttccagataaaattaatcttaattcaaaaggtaacccgcttgatagtgccaag

SEQ ID NO: 303930 - DNA, 915 bp, Unknown
  Bacterial polypeptide expressing nucleotide sequence isolated from the Sargasso Sea
aaaccgtactagcaaatgaacaagtggttgatggtcgtggttggcgttctggtgctgaagtacaaaagaaaaaaatgaaaggctggtttctaaaaatctctaattttgcagatgatttacttaatgaaatagataatttaaatgattggcctgaaaaagttaagacaatgcaaagaaattggattggcaaaagccatggagctttaattaaattttcaatagaaaattcttcagaaaatttagaggttttcacaacaaggccagatacaatttttggtgctaccttcattgctatttctcctcaacatgaacttgcaaaaaaagttgctcaaaaagattctaaagcgtttgattttataaagttttgtgaaaatcaatccacaaaagagattgatatagaaaaagcagataaacatggatatgaaacagatcttactgtctcgcatccatttaaaaaagatgtaagcttaaaaatttacatagcaaatttcattttaatggactacggaactggagcaatttttggttgccctgctcatgatcaaagagattatgactttgctgttaagtattctttagaaattatccctgttataaaaacagacgaagatcttccatttacaggagatggtgctcatatcaattcagattttcttaataatttaaatacagacgaagctaagacattttgtattaaaaaattaagtgaaatgaatataggtgaagagaaaataacatatagaatacgtgattggggtgtttctcgtcaaagatattggggatgtcctatacccatagtattttgtaatgattgtggggaggtacctgttccagaaaaaaaattgccaatttccttacctaaagatgtagattttagtaagagaggaaatccactggataaccacccaaactgaa

SEQ ID NO: 303931 - DNA, 969 bp, Unknown
  Bacterial polypeptide expressing nucleotide sequence isolated from the Sargasso Sea
tttcaataaagagtgccggcaaatgagcacatcagaagcagatatggaaaaagccgaaaaaaaaggggttgatacgggtttgcgtgttaggcacccacttcaacctgattgggaattaccagtctggattgctaacttcattttaatggattacggaactggtgccatttttgcttgcccagcgcacgatcaacgtgatctagattttgcgcgaaaatataagttaccagtaattgacacattttaccgattaaaaaacagttcaccagtagaagagacggcttttgtgcctccaaagtcagaaaaagtgaagtggataaatcattttacagacattgatgttgccactgggcaggaggcaatagataaaacaattgattttgctgaaaaaaatggttggggaaagagtgtcactaactttagattgcgtgactggggtctaagtcgccaaagatattggggctgccctattcctgttgttcactgtggtaattgtggagtagttcccgagaaaaaggaaaatttacctatcactcttccagatgatgtgacatttgatgttccaggcaatcccctagaccgtcacccgacctggcgaaaatgtgagtgtccttcctgtggcagtccagccctacgcgaaacagatactatggatacttttgtagatagctcatggtattttgcccgcttcacttcacccaagtcggaaaaaccaacttcgaaagaagacgtcagctattggatgaatgtagaccaatacataggtggggttgaacacgccattttgcatctactgtactcaaggttctttgcacgtgccatgcaaattaccggacatttacccaaaacagcgaaagaaccattcgacgcactatttactcaaggcatggtaacccacgcaatatataaaagcatagggtctgatgggcgagatttattccattatccagaagaagtaaagtttcgtga

SEQ ID NO: 303932 - DNA, 700 bp, Unknown
  Bacterial polypeptide expressing nucleotide sequence isolated from the Sargasso Sea
ggactagaggacttagattggcctgaaagtgtgaaagacctccaaaggaattggattggaaaatcagaaggtgctgaagtaaaatttaaattagattccttaaatcaatatattaaggtgtttacaactaggcctgatacactatttggagctacatatatggttttagcgccagaacatccactagtttccaaattaacaactattgaaaatcgaaaagtagttgaagagtatgttcttgcagcgcagcaaaagagcgaactagataggggagaattaaataaagacaagaccggggtatttataggcgcatatgtaattaatcctgtaaatgatcaacagattccaatatggatagcagattatgttctaatgagctatggaactggggctattatggctgttccaggtcacgatgagcgtgatcatgaatttgcaacgaaatttaatcttccaattgtagaagttgtatcaggtggaaatgtaagcaaagaggcatttactgattctgaaaatggtgtgatggttaattcggccaatgatactggattggaccttaatggtaagagtgttaaagatgcgataaaaaaaaccatatcatggctcaaggataatgataatggaatagaaaaggtgcagtataagctgagagattggttattctctagacaacgttattggggagagcccattccagtta

SEQ ID NO: 303933 - DNA, 175 bp, Unknown
  Bacterial polypeptide expressing nucleotide sequence isolated from the Sargasso Sea
atgaagtacaattttctggaaatagaaaagaaatggcaaaagttttggagtgataatcgagtatatgaagttaagagctctagttctaagccaaaattctatgttttagatatgttcccatacccatctggggcaggacttcatgttgaacatccagctagggtatatagctagt

SEQ ID NO: 303934 - DNA, 904 bp, Unknown
  Bacterial polypeptide expressing nucleotide sequence isolated from the Sargasso Sea
agaaactggattggaaaatcatttggctgtgaaattgattttaaaattgaaggatcagataagattaaatctataaaatgttatacaacaagaccagacaccttatttggtttttcttttcttgctatatctgtagatcacccattagcgaagctttatgaaaataataaagactttttaaaatttaaaacagaatgttctaagactggaacaacagaagaatcaattgcgcaggctccaaaaataggatttaaaacagatcttttagcaataaaccctttagatacagagaataaggtaccagtatattttgcaaactttgttttaatggattacggttttggtgctgtttttggttgtccagctcatgatcaaagagattttgattttgcaaaaaaatacgatttaaaaataaaaaccgtcgtcaaaccaaatgataaagatgaaaattttaaagtttctgatgaggcttattcaggccctggttctattattaattcaaaatttttaaacgggctttctgttcctaatgagtcaatttctaaaactattgaaattttagaagaaagaaaaataggaaataaaaaaactaattatagattaaaagattggggtatttctcgacaaagatattggggttgcccaatacctgttgcttatgatgaaaataatgaaattaaaataattccaaaagatcaattgcctgtattactccctgataaagtagatttaaatactaatggaaatcctttagatacaaatgaagattggaaaaatataacaatagatggaaaaaaatataggcgtgaaactgataccttagatacttttgtcgattcttcttggtattttttaagattttgttcagctgataattctaaattaagttttgaacctagggaat

SEQ ID NO: 303935 - DNA, 511 bp, Unknown
  Bacterial polypeptide expressing nucleotide sequence isolated from the Sargasso Sea
ataaacaaaattttaactttatcacaaaattcacaagagattcaaacctatatagatgctgcgaaatcaaaaacagaatttgagagaatgtcaataacaaaggaaaaaacaggtgtagatactgggttaaaagtcacaaacccaataaacaataaaagtgttccattatggattgcagactatgtcttaataaattatggaactggtgcaattatggctgtaccaggtcatgatgaaagagattatgaatttgctaaaaaatacaatattgaaattattcaggtaataactgataaagatcaaaaaattgatatttccaataaaccatttattgaaaaaggagttctcattaattcaggtgattatgatggtttgaactcacacgatgaagcatcagattctatacttaactatttgtcagaaaaagatctaggtgaaaaaaaaataacttacagattaagagattggttaattagtcgtcaaagatattggggatgtccaatacctttga

SEQ ID NO: 303936 - DNA, 588 bp, Unknown
  Bacterial polypeptide expressing nucleotide sequence isolated from the Sargasso Sea
aagtggagcaagttttatagctttatcagtcgatcatagtttaaataaaaatttcaaagataataaagattttataaaatttaaagaagattgtaataaaacaggaactactgaagaagctttagcgaatgcagaaaaactggggttaaagacaaatctatacgttaaacatcctttgatcaaagataaaattctaccagtttactttgctaactttgttttaatggattacggaagtggggctatatttggttgccctgcacatgatcagagagattttgattttgcaaaaaaatataatttagaaataattgaggtagtatcagatgaatcaaaagaaaagaaactagagaaagcttatacaggcaatggaaaattaataaattcgtcatttttgaatggtttaaatattgagcaggccaaagaaaaaattataaatgaaattgaaaaaaataatttaggaactaaaaaaactttatatcgtcttaaggattggggtatatcgagacaaagatactggggttgcccaattcccattctttatttagaagatggtacaatcgtacctgtagaaaaagatgaattacc

SEQ ID NO: 303937 - DNA, 393 bp, Unknown
  Bacterial polypeptide expressing nucleotide sequence isolated from the Sargasso Sea
tatggagagatataattttaaaaaaattgaagaaaagtggcaagatttttggattaaaaataaatcatttaagtctcaaataaatcctaaattaaaaaaattttattgtctcgaaatgttcccttatccatctggcaagatccacatgggacatgttagaaattatactattggagatgtattatccaggtttaaatcgatgcaaggttttaatgtactacatcccatgggctgggattcttttggaatgcctgcggaaaacgcagcaagagaaaacaatctacatccaaaagaatggacggaaaagaatattttagtaatgaaagaacaattaaaaagtctaggactttcaatagattgggatagagaaatttcaacatgcaatgaaaatta

SEQ ID NO: 303938 - DNA, 904 bp, Unknown
  Bacterial polypeptide expressing nucleotide sequence isolated from the Sargasso Sea
tacaaatttttcaaatgagcttctaaatgatctagaaaacttacctggatggccagaaaaagttaaattaatgcaaaaaaattggataggtaagtctttaggttgtgaaattaattttgaattagttaatgactctagaaaagtaaatgttttcacaactaggcctgatacaatatttggcgcaagttttcttgcactttcagtagatcatcctctaaattcaggttttaaggaggatccaacttttaaaaagttcaaggaagagtgcaataaaactggcactactgaagaagcattagcaaatgctgaaaaacttggatttaatacaggtttatttgcaaaacatccttttcaaaataaaaaaataccaatttactttgctaactttgttttaatggactatggaactggagcaatttttggctgccctgctcacgaccaaagagatttcgattttgctaaaaaatataaactacaaataattcaagtggtttcgggtgataaaaagaatgctgatcttaatgaagcttttacgggtagtggtatacttataaattctgaattcttaaataatttagatgttgaaaaagccaaaacgaagattatttctgaaatagaaaaaagaaaaattggaaagaaaaaaacattatttcgtttaaaagattggggtatttctagacaaagatattggggttgtcctattcctatgatttatctagaagatgggagtgtagtcccagttgataaaagtgagttaccagtagagttacccaatgatattgaccttaattctcagggcaatccattagatgcacatccagattggaaaaatactaaacaaaaatcaactggaaaaaaagctgtaagggagacagatacattagatacttttgttgattcatca

SEQ ID NO: 303939 - DNA, 481 bp, Unknown
  Bacterial polypeptide expressing nucleotide sequence isolated from the Sargasso Sea
catggataaaattaacgtcggagaaatcgataaaaaatggcagatcttttggtctaagaaaaagaatcaatttaaattcacagataaaaagaaaaaattctactgtctcgaaatgtttccttatccttctgggaagatccatatggggcacgttagaaattatgcgataggggatgtaatagccagatacaaaatgatgaataaatttaacgtattacatccaatgggctgggactcttttggtttgccagcagaaaatgctgcgagagaaaataatttgagcccgaaagattggacaaaaaaaaatatttcaactatgaaacatcagttacaattactaggtctatctattgattgggacttggaaatatcaacttgcgatcaagaatattataaacatcaacaagaattatttattgatttttttaacaaaggtttggttataagaaaagaaacttatgttaatttgggatcccgttga

SEQ ID NO: 303940 - DNA, 639 bp, Unknown
  Bacterial polypeptide expressing nucleotide sequence isolated from the Sargasso Sea
aacggttgttaaaccagataatcataatgatgattttaaagttgaagatgaagcatatacgggacctggaaaattaataaattcagattttctaaatggattgaaagtacctgaagagtcaattgataaaactataaaaattttagaaggaaaaaaattaggtaataagaaaacaaattacagactaaaagattggggtatttccagacaaagatattggggctgccccatacctgttgcctatgatgatgataataatattataaaaattccaaaaaatgaattaccagttaaacttcctgaagatattaagataaactcaagtggaaatcctttaaatgcccatgatgaatggaaagaaataattatagatggaaaaaagtgtactagagaaacagatactcttgatacatttgtagattcctcttggtattacctaagattttgctcctctacagataaatcaaattctttcaataaatcggatattgattattggatgccagttgatcaatatattggaggtgtagaacatgcaattcttcatcttttatattctagattttttatgagagcactaaatatggataatgaagatataagcttaacagaaccatttaagggattgtttactcaggg

SEQ ID NO: 303941 - DNA, 836 bp, Unknown
  Bacterial polypeptide expressing nucleotide sequence isolated from the Sargasso Sea
gatggttgcgactaaaaatagcaagcttgccaaattcattgaagaacaaagtaaattaaaagttgctgaggcggaactcgcaacgcttgaaaaaatgggtctagatactggattaaaagcagttcatccgatcacgaaagaagaggtacccatatttgtcgctaattttgttctgatgacctacgggtcaggtgctgttatggccgtaccagcgcacgaccaaagagattgggagttcgcaaaaaaatatgatcttcctatcaaattagtaatagaacctattgactctaatagaaaaactaacttagaaaatggcgctttcgttgataaaggtagattgattaattctggagaatttgatggactcgattttgatgaggcatttaaggctatctcgacttttttgaacgatagaggcttaggtgagaaaaccgtaaattttcgcctaagagattggggcgtgtctcgccaaagatattggggagctccaatacccatgataaattgtcaaacatgtggttcaattcccgtaccagaggaagatctacctgtactattacctgagaatgtacagatagatgaaactggatcaccactcaaaaaaatggaagaatttttaaatgttaattgtccaatttgcgataatccagcaaatcgagaaacagatacatttgatacctttatggaatcttcatggtattacgctaggttcgcgagcccaaatcaaagtaataagatgttagatgaacgagccgattactggctacccgttgatcaatatataggtggaatcgaacatgcaatactccatttattatatgctcgtttttatcata

SEQ ID NO: 303942 - DNA, 724 bp, Unknown
  Bacterial polypeptide expressing nucleotide sequence isolated from the Sargasso Sea
catgatccttggcgaagatcacgaaaagatgtcgaaaagtcgcggaaatgtcgttaatcccgatgatctggtcaaaaaatacggtgccgatacagttcgttgctacctcatgtttcttggtccctgggatgctggtgctccctggaatcctcatggaatcgaaggactttcccgtttttttaaagggatttggaatctttgccatcaacctcagaaaccagaaaatattgaccaggagtcagaaaagaagttgaagaaggctcagcataggaccctgaaaaaagtaacggaggaccttggtcgttttcgttttaatacggccatcgccgccatgatgagcttccgtaacgacctcaaagaccatgttcatcgctgccgggaagaaacacgcactgaagccttgaaaaccatgctgttgatgctcgctccttttgccccacatgtttccgaggaattatggcagtggatggcacctgaaacaggttccattcatcagcaagattggcctgcttttgatgaacaattggcatctgcagaaatggtgaccctcgtggtgcaaatcaatggaaaggttcgggaccggattcaatgtccagtagggatggaacaaaaacaaactgaagaaaaagtgctcgcctcagaaaaaatccaaaatctgcttgaaggaaaagcagtcagaaaattgattgtggttccagataggttggttaatttggtggcttaa

SEQ ID NO: 303943 - DNA, 868 bp, Unknown
  Bacterial polypeptide expressing nucleotide sequence isolated from the Sargasso Sea
gaaattgaacgcacctcggaggagaaggaaaaagacggtgtcttcactggagcatatgcgattaatcccatgaacggtgaactggtaccagtctggattgctgattacgtgctggcttcgtatggtacaggggcaataatgggtgttccaggacatgatgaacgggattttaattttgcaagaaaatatggactggacactccggttgtgattgtttcaaaggagaagctcgattctgttccgtgtggagatgaattatcagagcctattttgcagaaagaagattcggtaatggtaaacagttcgggatttgatggattggtatggccggacagcttcaaccgtgttgcagatcatttgcaaaaggaaggctttggtgagcgtcaggttaattaccgtttgcgtgactggctaatcagccgccagagaatgtggggaacccctattcccgtagtttactgcgaaagctgtggtatgcagcctgtgccttacaatgaactgccggtggtacttccggatgatgctgaattcaagcctacaggggagagtcctttaaaatatcataatggatttctgaaaacctcatgtccaaattgtggaggaaatgccgaaagagaaactgatacgatggataccttcatatgttcctcttggtactattatgcctatgtttcaccttactggaaaaaagggggaaagctagtccgtgatgatttcccatgggatgtggaaaaaataaattctttttgtccggttgaccagtataccggaggtattgagcacgccaccatgcatcttctttattttcgatttttcaccaaagtcctagctgatttaggtctgctgaattttcgtgagcctacaaaat

SEQ ID NO: 303944 - DNA, 813 bp, Unknown
  Bacterial polypeptide expressing nucleotide sequence isolated from the Sargasso Sea
gcaattccagtttcaaaagaactgcttccagtaaaactccctgaaaaaataaatttaaacgtaaaaggtaatccattagacagccaaaaagactggaaggaaattaatatagatggaaaaaatttcacacgagaaaccgatacacttgacactttcgtttgttcatcatggtattatttaagattttgctctcctaaagaggaaggttatggatttaaaaatgaagatataaaatattggatgcctgttgatcaatatataggaggagttgaacatgcaattttacatctcttatactcacgttttttcatgagagcgataagttacaagaatgaagatataactataaatgaaccatttattggcctattcacgcagggaatggtttgtcatgaaacttataaagatgaaaataacaactgggttagtccagatcagatagaaataactggaaaaaattaccatttaaaaaattttccaaaatctaaaattatagtcggaccatcggagtctatgtcaaaatcaaaaaaaaatgtgatagatcccgaaagtatgatcgaaaattttggtgctgatgcagtaagactttttatattatcagatagtcctccagcaaaagatgttcaatggtcagaacaaggaatgatcgcttcatacaaattcattcaaaaactttggatactacacaataaaattaaagaaaatttaaataacaagtctaaaaatgagacggacactttaaataaatttactaataaactgattgaaaaattcaactttaatttggaaaaatttaactacaacgtattgata

SEQ ID NO: 303945 - DNA, 474 bp, Unknown
  Bacterial polypeptide expressing nucleotide sequence isolated from the Sargasso Sea
aatgaggtttaccctcgaagaaatagtaaaaaaagaaacagggcaactttttcacaaaaaaaatggaaaaaaagtaagagagttaaggtctgaaaaaatgtccaaatctaagaaaaatatagttgacccagttaacattataaaaaaatatggagcagatacagcaagattttttatgttatctgatagtcctcctgaaagaaaactaaaatggactaatagtggcatcgatggatccaataagtatctcataaaagtttggaagttttttaacagttttcccttaaatgatattccttaccaggaaaactatgtttatttagataaacaaaacattcatctaagagaaaaaactcattattatattgatagaattactaaaagtcttgatagatttcaatataatgtttctgttgctttaataagagagttctctaatatatttctctccttagatgttaataatactgatga

SEQ ID NO: 303946 - DNA, 841 bp, Unknown
  Bacterial polypeptide expressing nucleotide sequence isolated from the Sargasso Sea
atgaaatctcaactaaaacaacttggtttgtcaattgattgggacagagaaatttcaacttgttcagatgattattataaacatcaacagcttttttttcttgaactatacgaaaaaggtttggtgtataggaaagaaaattatgtaaattgggatcctgttgatgaaacagtcttagctaatgagcaagtaatagatggcaaaggttggaggtcaggtgcaactgttgaaaggaaaaagttaaatcagtggttttttaatatttctagattttctgaagatcttttgtcctcattagatagtttagatgagtggcctaacaaagttaagataatgcaaaaaaactggattggtaaatctttgggatgtgagattagctttaatatcaaaggtaatttgccaattaaaaatataaaatgttttactacaagacctgatacattgtttggattttcatttttagcagtatctgtggaccatccattatctgaatattataaagatgatgaagaatttatcaattttaaaaaaatttgctcaaaaactggcactactgaggaatctattgctcaagctgaaaaacttggatttaaaacaaatttaatggcaattaaccctttagataataataacaaagtaccggtgtattttgcgaactttgtgcttatggattatggatttggagcagtttttggatgtcctgcacatgaccagagagatttcgattttgcaaaaaaatataaattagaaattaaaactgttgtaaaacctgaaaatgaaaaagataattttaaagtttcaaacgaagcttatcctggccctggtattttaattaattcaa

SEQ ID NO: 303947 - DNA, 891 bp, Unknown
  Bacterial polypeptide expressing nucleotide sequence isolated from the Sargasso Sea
attttagagaagtagaagataagtggcaaaatttgtggaccacaaaaaaaaaattttccgcgattaaaaataaagataaaaaaaaattttattgtttggaaatgtttccttatccttcaggaaaaattcacatgggtcacgtaagaaattatacaataggtgacgtattagctagatttaaaactttaataggctttaatgttttacatccaatgggttgggattcttttggtatgcccgctgaaaatgctgctaggcaaaataattcatcaccaaaagaatggaccgaaaaaaatataagtgttatgaaaactcaattaaaaaaacttggtctttcaatagactgggatagagaaatttcaacatgctcacccgattattataaacatcaacaaaaaatatttttagacttatatgacaaagggctagtgtacagaaaagaaagttatgtaaattgggatccagttgataaaacagttcttgctaatgaacaagtaattgatggaaaaggatggagatctggagcgttagtagaaagaaaaaaattaaatcaatggttttttaagatttcaaaattttctgaggaattattagaagatctcaaaaaccttgatacctggccagaaaaagtaaaaataatgcaaaaaaactggataggtaaatcttttggatgcgaagtggattttaaagttgaaggctcagaaaatgttaaatctataaaatgttatacaacaaggcctgatacattatttggtttttcttttcttgctctctccgtagatcatcctttagcaaagtattatgaaaaaaatgaggaatttatcaaatttaaggaggattgttctaaaacagggacaacagaagagtcaatcgcccaagcgaaaaaatagg

SEQ ID NO: 303948 - DNA, 334 bp, Unknown
  Bacterial polypeptide expressing nucleotide sequence isolated from the Sargasso Sea
aatggaaaggtataattttcaagcaattgaaaagaaatggcaatctatttttacaaaagaaaaattatttaatggtaagacatccaaaaagttttattgtttagaaatgttcccatacccctctggtaaaattcacatgggtcatgttagaaattacacaataggtgatgttatagctagatttaaatatatgaatggatataatgttcttcatccaatgggctgggactcgtttggtttacctgccgaaaatgctgctaaagaaaacaatttgcatcctaaagagtggacacaaaaaaatatatctgaaatgaaaagacaacttaaacttatg

SEQ ID NO: 303949 - DNA, 904 bp, Unknown
  Bacterial polypeptide expressing nucleotide sequence isolated from the Sargasso Sea
atagaaacaattatcaagtattttgagaataataagtcgggtaatagaaagacaaactataaattaagggattggggagtttcaagacaaagatactggggctgcccaatacctgttatttactatgaagatggaagctatagagtattagacaaagatgaattaccagttgaattaccttatgacatagaaatggatggtaaaggtaacccgctaatcaaacatgataagtggaggaacattatttgttcaaagacaggaaagagagcccttagagaaacagatacttttgatacttttgttgactcttcctggtatttcataagatttttagataacaaaaatcctaatagaccttttaacgaagaaatagttaacgaattaatgccagtagataaatacataggtggtattgaacatgcgatattacatttgctttatgccagattttttacaaaagcattaagagacatatatgatttaaaattttctgaaccttttaaagaactttttactcaaggaatgataacccacaaaacgtatcaaaataatgaaaatgcatgggttttgccaagtgacgttgccataaagaataaaaaactaatacaaatttctacaaaccaagaagtaaaagagggtccctcagaaaaaatgtcaaagtcaaagaagaatgttgttgatcccgatgaaattatcaaaaattttggtgtaaatgcaactagggctttcatgatatctgactcacctcctgaaagagatctagagtggacagatgcaggaatacaaagttccaagaatttaaccaacagaatagaaagatttttttcaaaagattttgataataaaaaaataagtgaagaccaaaataaattcatttacaaaaatctttatgaaatggacaaaa

SEQ ID NO: 303950 - DNA, 232 bp, Unknown
  Bacterial polypeptide expressing nucleotide sequence isolated from the Sargasso Sea
atggaaagatacaatataaaaaatattgaaaaaaaatggcaagatatctggtcttcaaaaaaaactgattctgttattatagacaaaaataaaaaaaaattttattgcctcgaaatgtttccatatccatctggaaaaatacatatgggccatgttagaaactatacaattggtgatgttctagcacgatataaaaaacttcgcggttataacgtattacatcccaatggga

SEQ ID NO: 303951 - DNA, 456 bp, Unknown
  Bacterial polypeptide expressing nucleotide sequence isolated from the Sargasso Sea
aatgcaaaaaaaatatattttagagatgtttccttacccatctggaaacatccatatgggccatgtaagaaattatgtaataggtgatatatgcgcgagatatcataagcttaaaggagatgaagttattcaccccatgggttgggatgcctttggtttgcctgctgaaaatgcagctattcaatttaacacccaccctcaagattggacctttgaaaacattaagattatgaaagaccagttaaaaaaactggacttagatttagactgggacagagaattagcaacttgtaatgaggactactatcgttttcaacaagaacttttcattgatttatataacgcaggattagcttacaaaaaagatgcactggttaattgggatccagaagatcaaactgtgttagcaaatgaacaggttatagatggtaaaggttggagaactggtgcattagt

SEQ ID NO: 303952 - DNA, 887 bp, Unknown
  Bacterial polypeptide expressing nucleotide sequence isolated from the Sargasso Sea
gctctcccaaagaaataattacggattttctaaagaagatattgattactggatgcctgttgatcaatatattggtggagtagaacacgcaattctgcatcttctttattcacgtttttttatgaaagctatcggatataaaaacaaagattttaattttaaagaaccatttaaaggattatttacgcaaggtatggtgtgtcatgaaacctataaagataaaaatggaaaatggcttagtcctgatgaaatagagttaataggaaatcaatatcaaaaaaaaggcgatccaaaaaataagataaaagttggcccatcagagtcaatgtctaaatcgaaaaaaaatgtaatcgatccagaatatataatgaataactatggtgcagatgctgtaagattatttattctatctgatagcccaccagagaaagatgtccaatggtctgatcggggaatggttgcttcttacaagtttttgcaaaaattatggatgcttcataataaaattaaaattaaaatagaaaataatctagatattttaaatgatgataatgaaatagaaaaattcacaaatcagatgattaataaaataactaataatcttgaaaattttagttataatgtaatgattgcaaatatttatgaaacttacaattttttaaacaagcaaattgcaaagaaaattaatagtaagagtttaaaagaaaattatatcaagatattaattctattaactccagcgataccacactttacttctgaatgcatagaggatctaaatgttttaggtaacttagaatggcctgaaacgaattccaaatttttgaatgaagataaaattgattatgttgtacagataaatggaaaaaaaaaggctaattttaaac

SEQ ID NO: 303953 - DNA, 919 bp, Unknown
  Bacterial polypeptide expressing nucleotide sequence isolated from the Sargasso Sea
tcacatttttcagaggtattattaaacgatctagatcagcttgagaaatggcctgaaaaagttaaaacgatgcaaaaaaattggattggtaaatcttatggatgtgaaattaattttaaaattgaaggatctgataaaattgattctataaaatgttatactacgagacctgatacgttatttggtttttcatttttagccctgtctgttgatcaccccttgtcaaaatattatgaaaaacatactgattttgtcaaatttaaagaaagctgttcaaaaactgggacaactgaggaatcaattgctttagcagaaaaaattggttttaagactgatttattagctgtaaatcctttagatgaacaaaataaagtaccagtttattttgcaaattttgttttgatggactacgggtttggtgctgtttttggatgtccagcacacgatcaaagggattttgatttttcaaaaaaatataatttagaaataaaaactgtcgttaaacctaacaatgaaaatgataattatgttgttaaatctgaaccacataccggacccggtataatgattaattcaggttttttaaatggtttatctgcaccggaggagtctattttaaaaactattgaatacttagaggaaaataagttaggcaataaaaaaacaaattatagactaaaagattgggggatatctagacaaaggtattggggatgtccaattccaattgcatatgatgaaaataaaaatgttgttaaaattccagtaaaagatttacccgtagccctgcctaatattgaaaaacttgatacagatggcaatcctttaaataatcatgaaaaatggaaaacagttataattaatggaaaaaaatgtacgagagaaactgacactttagatacttttgttgattcattct

SEQ ID NO: 303954 - DNA, 385 bp, Unknown
  Bacterial polypeptide expressing nucleotide sequence isolated from the Sargasso Sea
gacctacgacaacatcgactacatgaagggccagatgcagtcgatgggcctcgcgatcgactggtcgcgcgaaatcgcgacgtgcaagcccgactactacaagtggaaccagtggctgttcctgaagatgctcgagaagggcatcgcgtacaagaagacgggcaccgtgaactgggacccggtcgaccagaccgtgctcgcgaacgagcaggtgatcgacggccgcggctggcgttcgggcgcgctcgtcgagaagcgcgagatcccgatgtactacctgcgtatcacgcagtacgcggatgagctgctgaacgacctcgacggcctcggctggcccgagcgcgtgaagatcatgcagcagaactggatcggcaagagcttcggc

SEQ ID NO: 303955 - DNA, 928 bp, Unknown
  Bacterial polypeptide expressing nucleotide sequence isolated from the Sargasso Sea
tgaggagcttagggctgacctagctcaactagaaggttggccagacaaagtgcgtattatgcaggaaaactggatagggcgatccgagggagctttcatccactttcccttgtcccaaaaagacatccacctcaaggtctatactacccgccaggatactttgtttggtgcaagcttttgcgccatctcggccaaccatacaatcgcccaagaattggccaaaacgaacctagcgctgagaaatttcatcgctgactgtaatcggcttgatacgagcgaagcaaccatagaaacagcagaaaaacttggttttaatacagggctaaccgcggaacatccactgataaaaggtaaaaagcttcccatctttgttgctaactttgtgctgatggaatacggcacaggcgccatttttgggtgccccgctcatgatcaacgagatttagacttcgcaagaaaatataatcttagcattattcccgtggttaaaccgaaagatgtatcatcagccacttttaatattggggttgaggcctatacaggggacggagttatgactaattctggttttctcaatggccttagcgttgaggatgcaaagattaaaatgatatctaaacttgaaaaactcggtgcaggagaaaaggctgtaaactatcgactccgcgactggggggtttcccggcagcgttactggggatgtcctattccaataattcactgtacgcactgtggaattgttccagttccaaaagaagatttacctgtaacccttccagaggatattgatctagataaaccaggaaacccactaaccaaccacccgacatggaaacatgttacctgccccaatgcgggcaagctgccgaacgcgaaaccgatacctttgatacattttttgagtcttcatggtatttcgcacgtttcg

SEQ ID NO: 303956 - DNA, 739 bp, Unknown
  Bacterial polypeptide expressing nucleotide sequence isolated from the Sargasso Sea
aatgcttgaagaacaatataatcctgaacaaatcgaatctaatattcagtctgaatgggaaaagataaataaatataaggctactccagatgatagagagaagtattattgcttgtctatgttcccatatccatcaggaaagcttcatatggggcatgtaaggaattatacgattggcgacgttatttctagatataaaagaatgagaggattcaatgtcttccagcctatgggctgggatgcctttggactgcctgctgaaaatgcagctattcaaaataaagttgatccacaaagttggactgaacaaaacattgagaatatgaagtcacaactcaaaagacttgggtttagctatgactggtcaaaggagcttaaaacctgtgatccaaattattataggtgggagcaagaaatttttagtcttcttcacaagcaaggtctagtttatagaaagaaatctctagttaattgggacccagttgatgagacagtacttgcgaatgaacaagttatagatggaaaaggatggagatcaggagctactgtagagttaaaagaaattgatcaatggtttttaaaaattacagattatgctgatgagctccttacttctatagaaaatcttgattggccagaaaatgtaaaatcaatgcaaaaaaactggattggtaaatcttttggatcagagataagtttcactctttcaaatgaagagaagctaactgctttacaacaa

SEQ ID NO: 303957 - DNA, 841 bp, Unknown
  Bacterial polypeptide expressing nucleotide sequence isolated from the Sargasso Sea
tggttgcccagctcatgatcaaagagattttgaatttgcgaaaaaatataatcttgaaattatcaaagttgtttcagataatgatgataaaaaagaattaattgaggcattcattgggaatggcaagttgataaactctgactttctcaacggccttaaagttgacgatgcaaaatcaaaaattattaacgaaatagaaaaaagaggaattggatcaaaaaaaactttatatcgattaaaagattggggtatttcaaggcaaagatattgggggtgtccaatcccaatgatttatctagaggacggaacgattgtaccagttgataaaagtgagctaccagtagtattaccagatgacattgacctttctactcaaggaaatcctttggagtctcatccaaattggaaaatgaccacgcaaaaatctactgggaaaaaggcaactagggaaacggatactcttgatactttcgttgactcatcttggtattttatgcgattttgctctccaaaatacaagaatggtccttttgatgaaaaaaaaatcaattactggatgccagtcgatcaatatattggtggaatagagcatgcgatactccatttgttatattcaagattttttactaaaggtattaataaatttaataaaaacattaacattaatgaaccatttaaaaatctttttactcaaggaatggtttgccatgagtcttataaagatcttaatggagagtggttatacccagaggaagtggaacgaaaagacaataaaaacgtaattaaaagaaaagataaaactaaagtcatagttggcccccctgagtcaatgtcaaaatct

SEQ ID NO: 303958 - DNA, 880 bp, Unknown
  Bacterial polypeptide expressing nucleotide sequence isolated from the Sargasso Sea
taaaaatattaatacaatgaaaagccagttgaaaagcatgggtttttcttttgactggaaaaaagaattggctacctgccacccagaatattaccgacacgagcaagagttttttgttgaaatgtttaataatggcctggcttataaaaaagaatctgaagttaattgggaccctgttgataaaacggttttagcaaatgagcaggttattgatggtcgaggttggcgctctggagctatggtggaaaaaaaaattttgtcacaatggtttctaaaaataagtaagtattctgaagagctgctcaaagatctgaaaggactaaatgagtggcctgaaaaagttaaaaccatgcaaacaaactggattggaaaatcagagggtgtagaaattgattttaaattaaactcatcatttttaaagggtgagataattaaggtgtatacaacaagacctgacactttgtatggcgcctcctttattgcaatttccccccaacacaaaatttcattagacttatcaaaaaaaaatattgatactaaaaagtttattattgagtgtgaaaaaactaatcccgataaagaaaagctcggatttaaaacaggcttaagagttgagcatcctattacaaaaaaactacttgatgtttatatagccaattttgttttgatggattatgggcttggtgctatttttggttgtcctgcccatgatcaaagagatttagattttgcaaataaatttagtttagaagtaataatggtcgtaaaaccaaaagacgataatttaatacaaattactaatgaggcctatcttggtgatggtacaataattaattctgattttttaaatggtttagatgtggattctgctaaaaacaaa

SEQ ID NO: 303959 - DNA, 678 bp, Unknown
  Bacterial polypeptide expressing nucleotide sequence isolated from the Sargasso Sea
gaaaaaaaattaggaaataaaaaaattaattttagattaaaagactggggtgtatcaagacaaagatattggggttgcccaataccaatggcttatgacaaaaatggcaatgttataaaaatcccaaatgatcaacttccagttaagcttcctgaaaatgttaatttaaaagaaaaaggcaaccctcttgataaattaaaatcttggaaaaatataaagataaatgaaaaagattgttttagagaaactgatacactggatacatttgtagactcgtcttggtattttttaagattttgttctcctaaaaacaatgattatggatatgatatagatgaaataaattactggatgccagttgaccaatacattggtggtgttgaacatgcaatactacatttactttattcaagattttttatgagagcaataaactacaaaaataataattttaaaattactgaacctttcaaaggtttatttacacaaggaatggtttgccatgaaacatataaagatgaaaataataaatggcttagacctgatgaagtagaaaatagagacggaaaaaatttttatattaaaaaccaaccagaaaagaaagtgattgttgggtcatctgaatcaatgtcaaaatcaaaaaaaaatacaattgatccagaagatattattaatgat

SEQ ID NO: 303960 - DNA, 787 bp, Unknown
  Bacterial polypeptide expressing nucleotide sequence isolated from the Sargasso Sea
aatgagcaggtgattgatggtaaaggctggcgctcaggagcaattgtcgaaagaaaaaagctcaaccagtggttttttaatatatctaaattttcacaaaatcttttagatggtttagaaaaattagatacttggccaaaaaaagttaaaacaatgcaaaaaaattggattggaaaatcttttggatgtgagattaattttaaaattgagggagacttacctattaaaaatattaagtgtttcactacaagacctgatacactttttgggttttcctttttagcattatcagtagatcacgaggtgtctaatttttttaagaatgatagggattttttgagttttaaaaaggagtgttccaaaactggtacaaccgaagaagctatagctgttggtgaaaaaattggatttaaaacaaatcttttagctgttaatcctcttaatccaaaacaaaaagtgccggtgtattttgctaacttcgttttgatggattatggatttggtgctgttttcggttgcccagcccatgaccaaagagattttgattttgcaaaaaaatataatttagaaataaagactgtcgttcgcccgaatgataaagatgaaaaatttaaggtaattgatgaaccatatccaggaccaggctatataattaattcagattttctaaatagtcttaaagcgccagaagattctatcatcgaaacaattaaaattttggaacaaaaaaaattaggaaaaaaacagattaactttagattaaaagattgggggtttccagacaaag

SEQ ID NO: 303961 - DNA, 734 bp, Unknown
  Bacterial polypeptide expressing nucleotide sequence isolated from the Sargasso Sea
taaagcaaaagatgaagcttattcgggtccaggggtaattatcaactcaaaatttttaaacggtcttcaggcaccagaaagttctatattagaaacaattaaaattttagagcaaaaaaatttaggaaagaaaaaaattaactttagattaaaagattggggagtttctagacagagatactggggttgtccaataccaatattatacgatgaaaatggaaaaccacatcctgtagaaaaggaaatgctaccagtaaaattgccagaaaacataaatctaaatactaaaggtaatcctcttgataatgaaaaaaattggaaagaaatagaaattgctggaaaaaaatttacaagagaaaccgacacattagatacttttgtttgttcttcttggtattatttaagattttgctctcctaaaaattctgattatgggtacgatataaatgacattaattattggatgcctgttgaccaatatattggtggtgtagaacatgcaatattacatttgctttattctagattttttatgagggcgttatcatatgaaaatgaaaatcttaatctatttgaaccttttaaaggtctatttacacaaggaatggtttgccacgaaacatataaagatccagataataattgggtaagtccagaggagatagaaactattaatgggaaaaaatatttaaagaatgataactcaaaaatgataactgttggttcatcagagt

SEQ ID NO: 303962 - DNA, 889 bp, Unknown
  Bacterial polypeptide expressing nucleotide sequence isolated from the Sargasso Sea
cacacatagcaacatctccagcataagatctgatcaggagagaatgggatattcatacgattggagccgtttcttagcaacttccgacgtagactattacaaatggaatcaggacatgttcctaactctaaatgagagaggcctagttgaaaggagaatggctcctgtaaattggtgtgtagattgcgacactgtactagccaatgagcaggtgaagaacaaccgctgctggagatgcggtctcgaagtggtgcagaaagatatggcacagtggtttctgaggatgactgaatactctgatgaacttctagaagagcttgacaatatctcgttccccgaaaacgtcaagacaatgcagagaaactggattggtaggtcaaatggagctcatatcgattttcccatagacggtaccgactcagtgatcggagtcttcaccaccaggcccgataccatcttcggagtcacattcgtcacactctcccctgaacatgaattgtgtgagcaattgtgtactgggactaagtgggaaggaggatggagaaatctaaaggaagagtgtgccaagatttcagagttcgagagaattaacatgctcaaggataagaaaggagtttttctcggaaaaaatgcaataaacccgatcagcggagaaaaagtcccaatttatgcaggaaattttgtagtcgcctcatatggaactggtgcagttatgggggttcctgggcatgaccaaagagattttgattttgccaaggaatatgaattggaaatcaaaagaacactaatcgaggacaatggagaaaaccccgacttccccctacatagggcattcgaagggtatgggcagatggtcaactcatcaattgctggtttcgacggactatcg

SEQ ID NO: 303963 - DNA, 478 bp, Unknown
  Bacterial polypeptide expressing nucleotide sequence isolated from the Sargasso Sea
atgaatgattttgattttcaacaaattgaaaagaaatggcaggattattggtcagaaagcaatattattgaatgcgaccttgattcagaaaaacctaaattttataatctctgtatgtatccatacccttcaggggatttgcatatggggcatgttcgaaactatacaattggcgatgtaattactagatataagttattaaatgggtttaatgttttatctccaatgggatgggactcctttggcttaccggctgaaaatgctgcaatcaaaacaggtattcatccacgtgagtttactgaagaacgtattgaaaatatgaaagatcaaattatacgattaggttcactttacgactgggatagagaattagctgcacattcagaagattattataaatggactcaatttctttttataaaattgtttgagtctggtttagcttataaaaaagacgctccagttaattggtgtgatt

SEQ ID NO: 303964 - DNA, 910 bp, Unknown
  Bacterial polypeptide expressing nucleotide sequence isolated from the Sargasso Sea
aaactggtctacagaaaagaaaattatgttaattgggatccaatagatgaaacagttcttgcaaatgagcaagtgatagatggaaaaggatggaggtcaggtgctgtagttgaaagaaagaaattaagtcaatggttttttaaaatttcaaaattttcacaagatttattagatggattagaaaaattagatacatggcctaataaagttaaaactatgcaaaaaaactggataggtaaatcatttggatgtgaaatagagtttaaagttgagggaaatcttccagttgagaaaataaaatgttttacaactagaccggatacactttttggattttcttttttagctctttcagttgatcatgaggtatcaaagtacttcaaagatgataaggaattcattaaatttaaagaagagtgttcgaaaatgggtaccactgaagaggctatagcagttggggaaaagataggctttaaaactggtcttgaggccataaatcctttaaaaccaaatgaaaaggtaccgatttattttgctaatttcgttttaatggattatggatttggagcagtatttggttgtccagcacatgatcaaagagacttcgattttgctaagaaatataaacttgatatcaaaacagttgtaagaccttttgataaagatgatacatttaaagtagaagacgaatcttatcctggtgcaggaatattaataaattcagaatttctaaatggtcttgaagctccgaacgattcggtcgccaaaactatagaaatattagaaaagaaaaaattgggcaataaacaaattaattatagattaaaagactggggtgtttctaggcaaagatactggggttgtcctataccaatagtttatgatgaaaaaggaaaaatacatccagttc

SEQ ID NO: 303965 - DNA, 724 bp, Unknown
  Bacterial polypeptide expressing nucleotide sequence isolated from the Sargasso Sea
atgagtgagtataaatttcaagaaattgaatcaaaatggcaaaagcattggtcagacaatgattcaattaaatgtgatataacatcagtagataaaaatttttataatctatgtatgtatccatatccttctggagatttacatatgggccatatcaggaattacacaattggtgatgttattactcgttataaaatgatgaatggttttaatgttttatcaccaatgggttgggattcatttggtctcccagcagagaatgcagcaatacaaactggaattcatcctaaaacctttacagaagaacgtataaataatatgaaagatcaaataattagactcggctcactttatgagtgggatagagaggttgctgcacacaataaaaattactataaatggacacaatttatttttgttaagctttttaaaaataagttagcttacaaaaaagatgcacctgtaaattggtgtaattcatgtaagacggtactagcaaatgaacaagttattgaaggaaactgcgatagatgtgatgccatagttgatcaaaaaaacctaaatcaatggtttttaaaaatatcagattattcagatgagcttttagatggacttaatgaaataggagattggcctgagaatgtaaaagcaatgcagcaaaattggataggaagatctgaaggtgcagaattttcactaaaaattgatggtacaaaattaagtt

SEQ ID NO: 303966 - DNA, 322 bp, Unknown
  Bacterial polypeptide expressing nucleotide sequence isolated from the Sargasso Sea
catgaatgaaacaagatacaactttaaaataatagaagataagtggcaaaaatattgggaagaaaaaaagatattcaaatctgtttcaaataaaaaaaaagaaaaattttactgtcttgaaatgtttccttacccatctggaaaaattcatatgggacatgttagaaattatacaattggagatgttttatctagatacaaaagtttaaaaggttttaacgttttacaccctatgggatgggattcatttgggatgcctgctgagaatgctgcaaaacaaaataacttaaatccaaaaaattggactgaaagtaatatacaa

SEQ ID NO: 303967 - DNA, 855 bp, Unknown
  Bacterial polypeptide expressing nucleotide sequence isolated from the Sargasso Sea
ctatttatagatttttataataacggtttagtctcaaggaaggaaacttatgtgaattgggatcctgtgaaaaaaactgtacttgcgaatgagcaagttatcgacggtagaggatggaggtctaacgcagtcgtagagagaaagaaattatctcaatggttttttaatattacaaaattttcaaataatttattaagtgatttggaaaagttgggtggatggcctgaaaaagtaaaactaatgcaaaaaaactggataggtaaatctttcggatgtgaaataaaatttgaattaagcagtgagacaagcaaaataaatatttttacaactagaccagacacaatttttggggcaacatttattgctttatctgttgaccatcccctgagtaagaaatttataaatagtaatgaatttcaagaatttaagaatgaatgcaacaaaacaggtaccactgaagagtctttagctaacgcagaaaaaattggatttgacactaaattatttgcaaaacatccttttataaaagagaaaaaaataccaatattttttgcaaattttgttttgatggattacggcaatggggcaatctttgggtgtcctgcgcatgatcaaagggattttgattttgcaaaaaaatataatcttgaagttattaaagttgtatctgataaacaagaagaagaattaaaagaagcttacactggagatggtgttattataaactcagaatttttaaataatttaaatgtagaaaatgctaaagaaaagattatcgaagaaattgagaaaaggggaataggtaaaagaaaaactttatttagattaaaagactggggaatatctagacaaaga

SEQ ID NO: 303968 - DNA, 902 bp, Unknown
  Bacterial polypeptide expressing nucleotide sequence isolated from the Sargasso Sea
ttttgacataacaaaattctcaaatgaattactccgaggattagaccaattggataattggccagataaagtaaaaataatgcaaaaaaactggattggaaaatctattggctgcgaaattaattttaaaattaaaggggaaaataaaacaataaatgtttttacgacaaggccagacacaatatttggtgcctcttttttagctgtttcagtagatcatcctatatgtgcaaaatttttaaaagatgaaaaatataatagtttcaaaaatgaatgccttaaagttggtacaacagaagaagctttggctaatgcagaaaaaattgggtttgataccaaactattcgctgctcatccttttgttgaaggaaaaaaaattccaatctatgtagccaattttattttaatggactacggtacaggtgcaatatttggttgtcctgctcacgaccaaagagatttagattttgcaaaaaaatataatctcccaattacagaagttgtatcggataatccaactaagcccaaaaacttcaataatttatcagaagctttcattggtgatggaacattaattaattctgattttctagatggattaacagttgaacaagccaagacaaaaattattaaggaaattgaaaaattaaaaataggtaaaaagaaaataacttttagattaaaagattggggaatctcaagacagagatattggggttgtccaatcccaatgattcatttgcaagatggatctattgtgccggttgataaaagcgaactaccaattaaacttccggaggacattgatttaaatcaaagtggaaatccacttgagaatcataagagttggaaaaatacaattaacaaaaaaactggtgaaccagcaacaagggaaactgaca

SEQ ID NO: 303969 - DNA, 988 bp, Unknown
  Bacterial polypeptide expressing nucleotide sequence isolated from the Sargasso Sea
tatgacccctcctcactggagaagcgctggcagaggctctggaatgagaagcagatcgatcaaacccccgatgggaacaccgatcaagccttttatgcgctctccatgttcccgtatccatcgggaaacctgcacatgggccatgtgcggaactacgtgatcaccgatgtgatcgcccgtgtaaggcggatgcaggggttttcggtgctccatcccatgggctgggatgccttcggattaccagcagaaaatgctgcgatcgaacgcaatgtggatcccggcgactggacggatcagaacatcgcccagatgcgggctcaactcgatcggctggggctctcgatcgattgggatcgggaacaggcaacttgccacagcgactattaccgctggacccagtggttgtttctggaactgtttgatgggggtttggcgtatcgcaaaaacgccactgtcaactgggatccaattgatcaaaccgttctggccaatgaacaggtcgacgcagatggcaaatcatggcgatctggagccctggtggagcaacgccaactgaatcaatggttcctgcgcatcaccgattacgccgaggctcttctcaaggatctcgatcagctcgacggctggcctgaacgggttcgcaccatgcaggcgaactggatcggacgttcagaaggtgccgaaatcaactttgcggttcgcgggcacgacagcgcctcaatcacggtgttcaccaccagaccagacaccctggctggagcaagttatgtggttttggcgccagagcatccacttgtcgatgctctgctggatcctgcacaggaggctgctgttcggacatttcaaaaggatgtcgcacgcctgagcagcctggaacgcaccagcgacgacagacctaagcatggcgttccgattggtgcctcagtcaccaatccactcaacggtgatgaacttcccgtttggattgccgacctatgtgctggctgag

SEQ ID NO: 303970 - DNA, 922 bp, Unknown
  Bacterial polypeptide expressing nucleotide sequence isolated from the Sargasso Sea
ttatattgctaattttgttttgatggactatggaactggagcaatatttggatgccccgcacatgaccagagagacttggacttcgcaaacaaatataagcttaatgtcttgcctgttgtaaaacctgaaaaaattgatccaaaagaatttaaaattacagataaagcttacacagatgatggaatattatttaattcagattttttaaataatttaaaagtaactgatgctattaaaaaagccatagaagtcataacaaataaaaattttggagaaaaaaaagtaacatttagacttaaagactggggggtttcaagacaaagatattggggttgtccaattccaatagtttacaacgagaaaggagaagcttttccagttgataaaaaagacttacctattttattgcctgaagacgttgatttaaattcaaaaggtaacccattagaaaaacatcctacatggaaatttactaaactttcatccggtgaaaaagcacttagagaaaccgatacacttgatacctttgttgattcttcttggtattttttaagattttgttctccaaaaaataaaaaatatggttatgaaatagaggatataaactactggatgccagttgaccaatatataggtggtgtagagcatgcgattttgcatttgctttactcaagattttttatgcgagctttagctttcgaaaataaaaaatttaattattctgaaccttttgaaagtttatttacacaaggcatggtttgtcatgaaacctataaaaatgaaaataataattggttatatccagacgaaatagaaaaaaactcaaagggacaatttataactaaaaaagataaagaaaaggttatggtcggtccatctgaatcgatgtctaaatctaaaaaaaatattatgatccagagg

SEQ ID NO: 303971 - DNA, 902 bp, Unknown
  Bacterial polypeptide expressing nucleotide sequence isolated from the Sargasso Sea
tctggaaattgccatatgggtcacgtaagaaattatacgattggtgatgttatatctagatataagagaatgaaaaactttaatgtatttcagccaatgggttgggatgcgtttggtctgcctgcagagaatgctgctattgcaaacaaagtaagtccaaatgattggacaaaccaaaatattgaaaatatgaaatcacaacttcaatctcttggttttagttatgattggtcaaaagaacttagaacatgtgactcaagttactataaatgggaacagttaatttttaaaaaattttacgacgcgggtcttgtttatagaaaaaaatctatggttaattgggatcctgaagataaaaccgttttagcaaatgagcaagtaatagatggaaaaggttggcgctctggagctcaaattgaaataaaagaaatagatcaatggtttataaaaatcactgactatgctgatgagcttctatcttctcttgaagaacttgattggccagaaaatgttaagctgatgcaaaagaattggattgggaaatcatttggtgctgagattgaatataaaattgatgctagcaaagattcactaataaccttttcgacaagaccagatactatcttcggagtatcttttcttgcaatatctcccaatcatccccttgcaataaagattgctaaagataatgaaaaaatatcgaactttctcgaaaaatgcaaagaaactaaggctgcagaagctgatatggcaaaggcagaaaaacttggtattgatacaaatctaagagtaattcatcctttaactaaagaaaaattaccagtatggattggaaattttgtattgcttgactatggaacaggggttgtaatgggagttccagcacacgattcaagagatta

SEQ ID NO: 303972 - DNA, 857 bp, Unknown
  Bacterial polypeptide expressing nucleotide sequence isolated from the Sargasso Sea
tggtgttccagctcatgatcaaagagattttgagtttgcaaaaaaatattatcttgaaattattcaagtaattaaaaataaagatagaaaagataataaagatttagttgaagcttatactgaagatggtgaagtaatcaattcagatttcttaaatggtctttctgttgatgacgcaaaaaaaactattatttcaaaattagaagaattaaaaataggcagtagacaagttaattatcgtctaagagattggggagtctcacgtcaacgatactggggatgccctataccaattatctacagagaagatggagaagtgattccagtaccagacaatgaattaccagttagtttaccagatgatattgattttgattcaccagggaatccacttgaaaaacacccaacatggaaatatacaacttgctctgaaacaggaatgaaagctgttagagagacagatactctggacacatttgtagattcttcatggtattttatgaaatattgttcagaaaatattcaaaatcattcttttgatgatgaagatttgaattattggatgccggttgatcagtatgttggtggtgttgaacatgctattcttcatcttttatattctcgattttttagtaaggcattaagtgacactggtgtaggtaactttaatgaaccttttgaaggtttatttacgcagggtatggtttgccatgaaacatttaaaacaaaaaaaggagaatggatattacctagtgatatatacgaaaaaaataatcaattttatagattagaaacaaatgaacttctaaccaaagggccatcggagtcaatgtcaaaatcaaaaaaaaatgtagttg

SEQ ID NO: 303973 - DNA, 979 bp, Unknown
  Bacterial polypeptide expressing nucleotide sequence isolated from the Sargasso Sea
tgggtgtcctgctcatgatcaaagagactttgatttcgcaactaaatacaaattaacaattattcctgttgtagaaccatttgataaaaataaaaattttgtaactcttaaagaagcctataccggacctggaaaaataattaattcaaaatttttaaatgaccttaaggttcctgaagaatcaattattaaaaccatagaatatttagaaaaaaataatattggaaaaaagaaaattaattttagacttaaagattggggtgtatcaagacaaagatattggggatgcccaataccaattgcttatgatgaaaataataatataaaaaaaataccgttagaaaatttaccagttgaacttcctgaaaatattaatttaaaaacaaatggtaatccattagatcatgtggaaagttggaaaaatataactattgatggaaaaaaatataaaagagaaactgacactttggatacatttgttgattcttcttggtattttttaagattttgttcgcccaaaaatgagaaaaaaggttttaatattgaggatgttaagtactggatgcctgttgatcaatatattggaggtgttgaacacgcaattttacatttactttattcaagattttttatgcaagcaattaactttaatcaaaaagaatttaatattactgaaccttttagtggtttatttacacaaggaatggtttgtcatgagacatataaaagccaacaaggtaattggttaagtccagatgagtatgaacttgcaaaatctagaggtgaaaaaatacaaattggttctccagaatcaatgtctaaatcaaaaaaaaatacaattgatcctgaaaatataattgaaaattatggtgctgatgcagtaaggttatttattctttcagatagccctccagaaaaagacgtgcaatggtctgatacaggaatgttatcttcatataaattcctcaaaagctttggg

SEQ ID NO: 303974 - DNA, 686 bp, Unknown
  Bacterial polypeptide expressing nucleotide sequence isolated from the Sargasso Sea
tatggagagatacaattttaagattgtcgaaaataaatggcagaacttttgggaaaaaaaaaaagtatttaagtcaaaattagataaatctaaaaaaaaattttactgccttgaaatgtttccctatccttcgggaaaaattcacatgggacatgtcagaaattacactataggtgatgttttagcccgttataaatctatgaaagggtataatgttcttcatcctatggggtgggacgcattcggtatgccagcagaaaatgcagcaagagaaaataaattagatccaaaggattggacaaataaaaatattgatacaatgaaaaaccaacttaaaaaactaggtttatcaatagattgggatagagaaatttctacatgctcagaggattattataagcatcaacaaacattctttttagaactatatgaaaaaggacttgtatatagaaaagaaaactatgttaactgggacccgatagatgagacagttcttgcaaatgaacaggtaattgatggaaagggatggagatcgggtgcaatagtagaaagaaagaaattaagccaatggtttttcaatatttcaaaattttcacaagatttgcttgatggtctcgaaacattagatacttggccaaataaagtgaaaactatgcaaaaaaattggataggaaaatcatttggta

SEQ ID NO: 303975 - DNA, 841 bp, Unknown
  Bacterial polypeptide expressing nucleotide sequence isolated from the Sargasso Sea
ttttcacaagatttacttgatggtctagaagaacttgaagcttggccaaataaagtaaaggtgatgcagaaaaattggataggcaaatcatttggttgtgaaatagattttaaaatagagggtaatttacccataaaaaatattaaatgttttactacaagaccagatactttatttggattttcatttttagcattatcaattgatcatgaagttgctgcattttataaaaatgatgaaaattttaaattatttaaggaagaatgctcaaagacaggtacaacagaagaagctattgctgttggagaaaagataggttttaaaacgagtttactggctgttaatcccctgaaccctaaacaaaaagtccctgtatattttgcaaattttgtattaatggattacggatttggagcagtatttggttgtccagcacacgaccaaagagattttgactttgctaagaagtataaattaggaataaaaactgttgtaagaccacatgatcaagatgagagtttcaaagtaacgaatgaagcatattcaggaccaggaataatgattaattcaaattttcttgatggactagaggcaccagatcagtcaatattaaagacaattgatatacttgaagaaaaaaaaataggaaaaaaaaaaattaattacaggttaaaagactggggtgtttctagacagaggtattggggatgcccaataccaattgcatacaacaaagataacaagccagttcctattcctaaatcaatgttaccagtcaaattaccaaataaaataggcctcaagagtaaaggaaatcccttagatcatgataaagatggaa

SEQ ID NO: 303976 - DNA, 305 bp, Unknown
  Bacterial polypeptide expressing nucleotide sequence isolated from the Sargasso Sea
tatgcaatacgatcatttaaaaatagaaagaaaatggcaagagtattgggataacaataagactttcaagtcagatgtagacccagaaaaagagaagctctatattttggatatgtttccttatccttctggggcagggttacatgtaggtcatcctttaggttatactgccacagatatatactcaaggtttaaacgcctccaggggttcaacgtattgcatccaatgggctgggatgcatttggactacctgctgagcagtatgccatcaggactggtacccatcaaaaaataccactgaaga

SEQ ID NO: 303977 - DNA, 847 bp, Unknown
  Bacterial polypeptide expressing nucleotide sequence isolated from the Sargasso Sea
tatggtactggtgtaataatggcggttcctgggcaatatcaacgcgattgggattttgcaaagaaatttgatttaaagatcgtaagaaccgtagaaactcctgacaattttgatggtgaagcctattctgaagatggcccagctattaatagtgaatttttagatggattgcatattgatgatgcaaaggagaaaatgataaaatggcttgaaaaagaaggaaaaggtaagagggcagtgcagttcaagttgcgagactggctattctctcgacaaagatattggggtgaacccattcctattatacatcaagacggaaagcctgtacctcttaatgaaagtgaattaccactggaactacctgaagttgataagtacgaacctagtggaaccggtgaatctcctttagcaaatattaaatcatgggttgaagttaaagattcagagtctaatattattggacttagagaaactaatacaatgcctcaatgggcgggatcctgttggtattacttaagatttattgatccgaataatttagaaaaagggtgggattcagaaaaagaaaagtactggatgcccgttgatctgtacataggtggcgcagagcatgctgtccttcatttattatattctcgcttttggcatcatgtcttatatgatttggggttagtgtctacaaaagaacccttcaaaaaactatttaatcaagggatgatattgggatcagatggttcaaaaatgagtaaatccagaggaaatgtagtgaatcctgatgaaactgttgatatttatggatctgatgcattacgtatttatgagatgttcatgggacctttggaaaagg

SEQ ID NO: 303978 - DNA, 858 bp, Unknown
  Bacterial polypeptide expressing nucleotide sequence isolated from the Sargasso Sea
ctgttcgcgagacagatacttttgatactttttttgagtcctcttggtattttttgcgttactgcaaccctcgcttagataaaccgtttttaaaagaagatattgattactggcttcctgtcgaccaatatattggaggtattgagcatgcaattcttcaccttttgtactctagattttttacaaaggtgctaagagacttaggatacattaacataaatgagccttttaaaggcttgtttactcaaggaatggtcacccataaaacattcaagagcaagaaaggtgagtgggttgagccaagttatatatttgaaaagaaaaatggttattttgataataacaacgaaaaggttgagattggaaaaattgaaaaaatgagcaaatccaaaaaaaatgttgtgaacccatcttctattattgacatgtatggagcagatacagctagatggtttatgttgtccgactctccccctgaaagagacttggagtggacggatgtgggtgttgcctcctctcacaaatttattaataaaatttgggatacttgcattaaggcaaaaaactataaaaagggtgggggggattcaaaagcaagtatgtttaacaagcatataattaatatttctgaaaacattgacaaatttcatttcaataaatctgttgcaaacatttatgaatatgtaaatgacctaaacaagcttatggaacaaaaaactattactgaaaaagaaataaaaaaagccacaaacaatttatgtatcgttttacagccttttacaccccacttaagtgaagaaatttgggagatgcttggaaataatggcttttgcgctaatgctagctggccagaataac

SEQ ID NO: 303979 - DNA, 880 bp, Unknown
  Bacterial polypeptide expressing nucleotide sequence isolated from the Sargasso Sea
caatatctatttttagagttatacaaggcaggtcttgtatatcaaaaggaatcagaagttaattgggatcctatagataacacagtcttagcaaatgaacaagtcgactcagagggtaaatcttggagatctggagcaatagttgaaaagaaattattaaagcaatggtttttaaggattactaactatgctgatgagttattaaaagatttagaaaaattagattattggccagaaagagtaaaaataatgcaagataattggattggaaagtcaattggtacaaatattaattttaatattaataccaatccacaagagaaattaactgttttcacaacaaggccagatactttgtttggagttacctatttggcaatttcggttaatcattcattaattaaaaatatttctgatcaagcaactttacaagatatagaaaaactaaaagaatatttgaaagaaaataaaaacactgaatttgaaaaaattggtttaaaaacaaacttaatagcgataaatccactaaattctgaacctattcctatttgggtggcaagttatgttcttgatgaatacggtacaggagctgttatgggtgtacctgctcatgatatgagggattttgaatttgctaagaaaaacgatattgatataaagcaggtaataataaaagaaaaaagtgactcaagtaatgagcttgaaaatgcttatgttgaaaatggatatcttattaattcaaatcaatacgatggtatggcaaataatattgctaaattaaaaatttcagaggagggagtaaataatggatgggctgaaaataagattcaatatcgtctaagagattggttaatatctagacaaagatatggggatgtcc

SEQ ID NO: 303980 - DNA, 806 bp, Unknown
  Bacterial polypeptide expressing nucleotide sequence isolated from the Sargasso Sea
tggagatcaggtgctatagtcgaaagaaagaaactgaatcaatggttttttaatatttcaaaattttctcaagaacttctggatggactagaaaaattagatcaatggccaaataaagtaaaagtcatgcaaaagaactggataggcaaatcatttggttgtgaaataatttttaaaattgaaggtgaacttcctgttgacaatataaaatgttttactacaagacctgatacattatttggtttttcatttttagctgtatcaattgatcatgaaatttcaaaatattttgctaaagataaatcttttatagaatttaaaaagcagtgttctaaaactggaacaacagaagaagccatagccatgggtgaaaaaataggttttaaaactaatttaatagcaattaatcctcttgaacctaatcaaaaagttccagtttattttgcaaattttgtattgatggactatggttttggagcagtatttggttgtcctgcacacgaccaaagagattttgactttgcaaaaaaatatgatttagaaattaaaactgtggttagaccagatgaagaaaaagataattataaagtaaaagataaggcatacactggtccaggaataattgtaaattctaattttctaaatggtttaaaagttccagaacaatcaataattaaaactattgattttctagaagaaaaaaaaataggcaagaagcaaacaaattttagattaaaggattggggagtttcacgacaaaggtattggggttgtccaattcctatagcatatgaccaaaatggaaa

SEQ ID NO: 303981 - DNA, 850 bp, Unknown
  Bacterial polypeptide expressing nucleotide sequence isolated from the Sargasso Sea
aataagattcaatatcgtttaagagattggttaatatctagacaaagatattggggatgtccgattcctatcgttaattgcaaaaaatgtggatctgttcctttaaaccaatcggaattaccagttgcattaccaaaagatatagatatctcggctaacaagattaatgctttaggtgataataataattggttaaatacaacatgtccaaaatgtggaatagcggcaaaaaaagaaactgatactatggatacttttatgtgttcatcatggtattttttaagatatccatcttcaaagtgttcaaataagccatttgaaaagattgaaattaataagtggttacctgttgatcaatatgttggaggagtagagcatgcaatattgcatttgttatatgcaagatttttcactaaagctttgcgggataatgaactctttgaaattgatgaaccatttaaaaaactattaacgcaaggaatggttcaggccgcagcctataaaaacaataaaacaggtaaatatgtttctccttccgatattactgacttatcaaatcctacagatccaattgacaataccaaactcgaagtactttacgagaagatgtctaagtcaaaatataatggaatagaccctgaatcagtaattaaaaaatatggagcagatactgcaagaatgtttatattatttaaagcaccgccagaaaaagatttggaatggggagatacagatgttgaaggacaatttagatttttaagcaggatttggaagctttatataaattgtgcaaaagatataaatagtaaatctaattcctttccagataaagaaaaaagtttaacaaagt

SEQ ID NO: 303982 - DNA, 553 bp, Unknown
  Bacterial polypeptide expressing nucleotide sequence isolated from the Sargasso Sea
atgaacagatataattttaaaatagtagaagaaaaatggcagacttattgggacaaaaataaaacttataaaacaaaaatagataaaactaaaaagaaattctactgcctggaaatgtttccatatccttctggcaaaattcacatgggacatgtaagaaattatacaattggtgatgttttggcgcgcgtaaaatcacttcaaggttataatgttttacatcctatgggatgggattcttttggattgcctgcagaaaatgcagctagagaaaataaattgcatccaaaaaaatggactgaaaccaatatttcaacaatgaaaatgcaattaaaaaaaattggtttatctttggactgggatagagagatatctacatgttctgaggaatattataaacaccagcaaattttttttctcgaattatatgaaaaaggtttagtttacagaaaagaaaactatgtaaattgggaccctgttgaacaaacagttttaaagaatgaacaagttattgacggtaagggatggagatctggtgttaccgtgaaagaaa

SEQ ID NO: 303983 - DNA, 675 bp, Unknown
  Bacterial polypeptide expressing nucleotide sequence isolated from the Sargasso Sea
tgggaccctgtcgatcagactgttctcgccaacgagcaggtaattgatggtcgcggctggcgctcgggcgccatcgtggagcgacgcgagattccgcagtggttcattcgcatcacggcctatgctgaagagctattggcgggcttggatacactggacggttggcctgaagccgtccgcatcatgcaacgaaactggattggaaaaagtcggggcgtagaactggcctttggattgagttcacctattgctgaccacgagcgcatcgaagtctataccacccggccagatacgctttttggcgtgacgtatctcagcctcgcagccgagcatcccatcacattggcactggccgaaaaaaaccctgaactcaaggaatttgtgacgtcttgccagcaggcatccgtagcggaagccgatatggcccaagccgagaagttgggcatggacaccgggctacgcgcatcgcatccgctgacgggagaggccatacccgtctgggtcgccaactatgtgctgatggactacggctccggtgccgtcatggcggtaccggctcacgatgaacgggactgggaatttgcgcaaaagtatcagttgccgatcaaagccgtggtgtgcgagacggagggcaagcccgccaacacaacacacggtgcctatacggatcgcggc

SEQ ID NO: 303984 - DNA, 572 bp, Unknown
  Bacterial polypeptide expressing nucleotide sequence isolated from the Sargasso Sea
tttgcttaaagtgagatataattttctagaaatagaaaagaaatggcaggaattttggaaaactaatgaaacttataaagttggtttttcttcaaaacccaaattttatgttttagatatgtttccttacccatccggagctggtcttcatgttggtcatccacttggatatatagcgagtgatatatattctagatttaaaagacacaaaggatataatgtgttacatcctcaaggttatgattcatttggactgcctgcagaacaatatgcaattaggactggtcaacatccaagaaagactacgtctgaaaatatagatatgtatagaaaccaattagatagaataggcttttcttttgattggtctagagaaattagaacatctgatccaaaatactataaatggactcaatggatatttattctaatgtttaactcatactattgtccaaaagacaaaaaagcaaagagtatagaaagtttgataagtatgtttgagagagaaggtgataaaagtatgaaagaggatctattactttatgggtactcttttacaaattctcagtgga

SEQ ID NO: 303985 - DNA, 815 bp, Unknown
  Bacterial polypeptide expressing nucleotide sequence isolated from the Sargasso Sea
taatacaaaaggaaatccattaaattctaatgatgactggaaaaaggttaatattgaaggtaaagatttatttagagaaactgataccttggacacatttgtttgctcttcatggtattatcttagattttgttccccgaaagaaaataaatatggttttaatcaagaagagattgactattggatgccagttgatcagtacataggaggtattgaacatgcaatattgcacttgctttattcacgtttttttatgaaagctttgggatttaaaaataaaacatttaatattgaagagccatttaaaggcctatttactcaaggcatggtatgccatgaaacatataaagatcaaaataataattggataagtccagatgaaatagaaataagaaatagaaaatattataaaaaaaatgaaccagattctgaaattattgttggaccttctgagtctatgtctaaatcaaaaaaaaatgtaattgaccctgaaaatataattaataattatggagctgattcagttaggttatttattctttcagacagtcctccagaaaaagatgtgcaatggtctgaacaaggtatggtttcatcgtttaaatttattcaaaaattatggcttttacactcaaaaattaaagttaaaattttaaataaaaatcaaacaacaaacgaagatacagaacttaataaatttactaaccagttaataagtaaaattactgataatttagaaagctttagttataatgtaataattgcgaacatgtacgaaacatataacttcttaacaaaacatattgaaaaaaata

SEQ ID NO: 303986 - DNA, 886 bp, Unknown
  Bacterial polypeptide expressing nucleotide sequence isolated from the Sargasso Sea
caacttttttttatagaaatgtttgaaaaaggtctcgtttatagaaaagaaaattatgtgaattgggacccaattgatcagactgttttagcaaatgagcaagtaattgatggtaaaggttggagatctggtgcagtagttgaaaggaaaaaattaaatcaatggttttttaatatttcaaaattttcagacagccttttagaaagtttaaatagtctaaaaaattggcctaaaaaagttaaaagaatgcaagcaaattggatcggaaaatccttagggtgtgaaataaatttcaaaatcagcggagatgttgaaattaatgaaataaaatgcttcacaactcgacctgatactttgtttggtttctctttcttggctgtttctgtagatcaccctatttcaaaattttataaagatgatcctaaattcaaaaaatttaaagatgactgttctaaaactggtacaacagaagagtcgattgcacaaggtgaaaaaattggatttaaaacaaatttgcttgccacaaacccgttaaacgaaaatgagagagttccagtgtattttgcaaattttgttcttatggattatggatttggtgctgtatttggttgtcctgctcacgatcaaagagatttagattttgcgctcaaatatgatttgccagttaagactgttgtaaaaccaccagatgaaagtgatgcctttaagattaataaagaagcttatactggtggaggtgttattataaattcaaaattcctagacggattaaaagttccagatgaatcaattattaaaactataaacataatcgaagagaaaaaaattggaaaaaaaacaattaattttaggttaaaagactggggtgtctcaaggcaaagatatt

SEQ ID NO: 303987 - DNA, 423 bp, Unknown
  Bacterial polypeptide expressing nucleotide sequence isolated from the Sargasso Sea
aatggaaagatataattttaaaactgtagaagaaaaatggcaagaaaagtggcttaaatcacaagtttttcgatctaaagtagatcatacaaaagaaaaattctattgtcttgaaatgtttccatatccatctggaaaaatacatatgggtcatgtcagaaactatacaataggtgatgttttatcacgttacaaatctttgcaaggttttaatgtaatgcatccaatgggttgggatgcatttggtatgccagcagaaaatgctgcaagagaaaataatttagatcctaaagaatggactaataaaaatatttcaaccatgaaagatcaattaaaaaagcttggtctttctattgattgggaaagggaaatttcaacatgctctgaagaatattacaaacatcaacaaatatttttttttgg

SEQ ID NO: 303988 - DNA, 862 bp, Unknown
  Bacterial polypeptide expressing nucleotide sequence isolated from the Sargasso Sea
taatgcagaaaaaattggattcaaaacagatcttgtggccataaatcctctagataataatctaaaagttccagtttattttgcaaattttgttttgatggactatggactaggtgctgtatttggttgtccagcccatgaccaaagagatttagattttgcactaaaatacaaattaaaagttacacctgttgtatctcctgaattgagagttaaaaattttaaagttcaagacaaagcttacacgggtcctggatacatatttaattcatcttttttagatggattaaaatgtcctgatgaatcaatcacaaaaacaattgaacatctcgaaaaggaaaagctaggggtaaaaaaaattaattttagattaaaagattggggggtttcaagacagcgatattggggttgtcctatcccaattttatatgatgaagaaggaattgcacacaaagtaccaaaagaacatcttcctgttcagctacctgatttagagaaactggaacctactggaaacccactagataatcaaattgaatggaaaaaagttaaattagatggaaaaaattatgttagggaaactgatacacttgatacatttgttgactcctcatggtattttttaaggttctgttctcctcacaaagaagattatggatttgattctgaagaaataaaatattggatgcctgttgatcaatatattggtggtgtagagcacgcaatattacacttgctttattcaagattttttatgcaagctatctcttataaaaatgaccaaatagatttgaaagaaccatttaaggggttaaaaatcagggcatggtttgtcatgaaacttataaagatactcaaaata

SEQ ID NO: 303989 - DNA, 814 bp, Unknown
  Bacterial polypeptide expressing nucleotide sequence isolated from the Sargasso Sea
tggtattatcttaggtattgtagtccaagatcaaataaacctttttgaaaaaagtgatgttgattattggttgccagtagatcaatatatcggcggtattgaacacgcaattttacacttattatattcgaggttttttacaaaagccttgcgagatctaaattacataaacttaagcgagccttttaaaggtttgtttactcaaggaatggttacgcaccagacatataaagactctaaaggaaactggttagagcccggggaaattaagatattaaatggctctgttttgaatttaaataataacgaggttcaggctggaaaaattgaaaaaatgagtaagtctaaaaaaaatgtaatagaccccacagatatcatagaaaattatggggccgatacagctagatggtttatgttatctgacagcccccctgatagagatttagagtggactgatagtggaatttctggttctcataaatatataaacaaagtttggaatttaatgcaagaagttgttgagggagactacaaagaaaaaaattcaaaacaagaagacaccttaaaggataaaataaattatacgattgaaagtgtaactaaaaacatagagaattttcatttcaacaaatctgttgcaaatttatatgagcttgtaaatatttttcaaaaagtaatatcagaaaaaactgtatcaaaaaaatatttaattcaaagtttcaaaacactttcagttcttctacaaccctttactccacacttaagcgaagaaatgtggaaatgtttaggcggcgcacgactagcaataaacgaa

SEQ ID NO: 303990 - DNA, 896 bp, Unknown
  Bacterial polypeptide expressing nucleotide sequence isolated from the Sargasso Sea
aatgtttccctatccttctgggaaaatacacatgggtcacgtgagaaattatacaattggtgacgttttagcgagatataagtcaatgtgtggttttaatgttcttcaccctatgggatgggactccttcggaatgccagctgaaaatgcagcaagagaaaataatttagatccaaaagattggactaaaaaaaatattgcaacaatgaaaaaccaattacaatcacttggtctatcaattgattgggatttagaaatttctacttgtgatgaagaatattacaagcaccaacaagctcttttcatagatatgtataataaaggattggtcaaaagaaaagcaacatatgtaaattgggatccagttgataaaacagttttagcaaatgaacaagtgataaatggcagagggtggagatctaacgcaattgtcgaaagaaaaaaattatcacaatggttttttaatatttcaaaattctcaaacgaactcttggaagatctcaaaacacttaatcagtggccagacaaggtaaagcttatgcaaaaaaattggattggaaaatcggttggttgtgaaatagattttgaaatacagggaaatcagaaagtaaagatttttactacccgtccagatacaatatttggcgccacttttttggcgttatcagtcgatcatccactttgcaaaggcttcgatgaaagagaagattttatcaaattcaagaaaactgtgtcccaggttggaactacagaagaagcaattgcaaatgcagaaaagattggttttgatactggttttaaagctaaacacccttttataaaaaataagactatcccagtatatgttgcaaactttatttctatggactacggaactggtgcaatatttggatgtc

SEQ ID NO: 303991 - DNA, 883 bp, Unknown
  Bacterial polypeptide expressing nucleotide sequence isolated from the Sargasso Sea
aattttgttttaaaagaatacgggcttggtgcaatttttggatgtcctgcacacgatcaaagagatttagaatttgctaatgaatataatttagatgttattcctgttgtaaaacctattaatgctgaacaaagtagttttaaaatcaaagatattgcctttacagatgatgggttgattataaattcagattttttaaacggactaagtgttgaaaacgcgaaatataaaataattgagcagattgaaaagagccagataggaagaaaaaaaactaactttaaattaagggactggggtatttcaaggcaaagattttggggttgtccaataccaataatttatagagaagatggtgaagtgttggcagttgaagaaaatgagcttccagttaagcttcctgaagttgagaactttggtgaatcatcaaaaacgttaaataatattcctggctggaacgaaaccgtgtgtccaaaaactggaatgaaagcgtatagggaaactgatacctttgatacattttttgagtcatcttggtattattttagatattgtaatgcaagaaacgataatccttttgataaagaagatatagattactggttaccagttgatcagtatataggtggtatcgagcacgcaatacttcatttgctttattcaagattttttacgaaagctctaagagatctaaattactttaatttaaatgaacctttcaaaggtttgttcactcaaggaatggtgacacacattacatataaaaataaaaatggagaatggatagaaccaaaagatgtagaaataattgatggcaaaccaaaagatataaatggctttgatatagaaactggtaaaattgaaaagatgagtaaatcaaaaa

SEQ ID NO: 303992 - DNA, 823 bp, Unknown
  Bacterial polypeptide expressing nucleotide sequence isolated from the Sargasso Sea
atggaatgatgaagaagttttttctgtaaagactgatctcaataaaaaaaaatattatgttttagaaatgttcccttatccatcagggaaaatacatatgggacatgttaggaattatactcttggtgatgtagtagcaagatacaaaaaaatgtgtgggtttaatgtattgcacccaatgggatgggatgcatttggtcttcctgcagaaaacgcggcattaacagaaaaaaaagctcctggggaatggacttacaataacattaagacaatgaaaagtcagcttttaaaaatgggtctttcattggattgggatagagaaatagccacatgtcaccctgactactataaacatgaacaaaaattttttatagatatgttcaaagctggactagcatataaaaaggaggctgaagttaattgggaccctgttgataaaacagttttagcaaacgagcaagttgttgaaggtagggggtggagatcaggtgcattagttgagaaaaaaaaactatcacaatggtttcttaaaataagcaaatattctgaagaattattagatgatttaaataaattagataattggcctgaaaaagttaaaataatgcagtctaattggataggaaaatcaattggtgctgaaattagttttaaaattattgattttaatgaaaataaaattgataaaattaaggtatttacaacaaggcctgatactatttttggcgctacgtttattgctttatctactgaacatgaaatatcaaaaatactagccaataacaattctgaaattaattcttttattaatgattgtaaaaaa

SEQ ID NO: 303993 - DNA, 804 bp, Unknown
  Bacterial polypeptide expressing nucleotide sequence isolated from the Sargasso Sea
atttaggtttattaaaatgtgatgaaccgtttactaatttactcactcagggaatggtatggaaagatggcgctaaaatgtctaaatcgaaaggtaacactgttgacccgcaatctttaattgatgaatacggggcagatacggttcgtttatttatgatgtttgcatcacctcctgaacaaagtcttgaatggaaagatgaaggtgttgaaggtgcgcatcgttttttaaaaaggctatggaaatttgcgagcacacatattaatgaagggaaatctccagctttaaaccaaacatcaatgactgatgcgcagcgtgagttacgtcgtaaaattcatatgacaattgataaggtaaatgatgacattggtcgtcggtatacttttaatactgcaattgcagcggtaatggaaatgattaatgcactgttgcgctctaaattaacaaatgataatgaccatgcaattatgcgcgaaggagttgaaaccgcaattctgctactttccccaattgtcccacatataactgatgcactttgggttgaactcggtcatagcgaacccctaattgatgtgccctggcccaaatcagacccgaatgcattagaacaaaatgagatagaaatggttgttcaaattaacggcaaactccgcgggaagattactgttacaaaaaatgccgaacaaaaacaaatagaaaatcaagcagttgaagatgaaaaagtaaaacaaaatttaaaagggaaaacaattaaaaaaatcatcgtaatcccagaacgtctagtgaacatcgtggtgtcatagg

SEQ ID NO: 303994 - DNA, 841 bp, Unknown
  Bacterial polypeptide expressing nucleotide sequence isolated from the Sargasso Sea
aaatgaacaagtaattgatggaaaaggttggagatctggtgcgactgttgagctaaaagaaattgatcaatggttcttaaagattactgactatgcggaggaattgcttacttcaatcgaaaatttagattggccagaaaatgttaaatccatgcaaaaaaactggattggtaaatcatttggctcagagataaagtttagcttacttgataagactgagctgactgcttttacaacaagaattgatacaatttttggcgtaacgtacttggctatttcaccaaatcatccattggctcaaagtcttgcagctgaatgtatggaaacaagtgaatttattaaaaaatgtaatgcaactaaaatggcagaagcagacatggcaaaggcagaaaaactaggccataaaactaacctaaaagtaaaacacccattttctgatattgatcttgatgtttggattgcgaactatgttctcatggactatggaacgggagtgataatgggagttccagcacatgatgaaagagattttgagtttgctaaaaaatataacattgaaatcaaacaagtcattgaaggagatgagttgccctctccaaagaaaggaatccttattcattcagatagttttactggacaagaatccaatgatgcaattcagaatattaataattttctagaaatgaacaatattggaaaaagtatcgaaaattttagattaagagattggggtgtaagtagacagagattttggggctgtcctattcctgtaatctatgaggacggcgaaccagtttttctagagaaggaagatctaccagtgcagttgcccaagataaat

SEQ ID NO: 303995 - DNA, 505 bp, Unknown
  Bacterial polypeptide expressing nucleotide sequence isolated from the Sargasso Sea
aatgtctgaaaaatataatccaaaagtgattgaaaaaaggtggcaatcattctgggatcgtgaaaaaatatttgagagtgaaattcaagccgataaagaaaaatattatattctagaaatgtttccctacccatctggtaaaattcatatgggacatgtaagaaactatactttaggtgatgtaattgctcgttataaaagagctaaagggtttaatgttttacatcctatggggtgggatgcttttggattacctgctgaaaatgctgccaaggaaaatgttatttcaccgaagaaatggacgtatgaaaatatttcaactatgaaagatcaactgagacaaatgggattatctctagactggtctcgagaattagctacatgtgatgagaaatattatcatcaacaacaaaaattattcttaaatttttttcgcaaaaagttaatttataaaaaagagtctcttgttaactgggacccagttgaaaatacagttctagcaaat

SEQ ID NO: 303996 - DNA, 170 bp, Unknown
  Bacterial polypeptide expressing nucleotide sequence isolated from the Sargasso Sea
tatggcacgttataatcacaagaagacggaacccaaatggcagaaggtgtgggaagaccgcggctgcttccaggtttatgaggatccgaaccggccgaaatactacgtccttgagatgttcccatatccatcaggtcgtatccatatggggcacgtcagaaactataccc

SEQ ID NO: 303997 - DNA, 880 bp, Unknown
  Bacterial polypeptide expressing nucleotide sequence isolated from the Sargasso Sea
aaaggttaaactcatgcaaaaaaattggattggaaaatcttttggatgtgaaattgactttcaaatagacagtgaaaaggaatttgttaaaatttttacgaccagaccagacacaatttttggtgcaagttttatagctttatctgtcgaccatccattaagtaaaaattttcaaagtaatggaaattttaatgagtttaagaaagagtgtaacaaaactggaacgaccgaagaagctctagcgcatgcggaaaaaataggtttcgatactgggctttttgtaaaacacccttttctcgataagaaaattccaatttattttgcaaattttgtattgatggattacggaactggagccatatttggatgccctgcacacgatcagcgtgattttgattttgctaaaaaatataatctaggaataataaaagttgttgatgatagtaaactaggagagctagaggaggcatatactggtagtggaaaattgattaactcagattttttaaacggtttagatgtatctgcagctaaagaaaaaataattagcgaaatcgaaagtaaaaatatcggagtgagaaaaactctatatcgattaaaagattggggggtttctagacaaagatattggggttgcccaataccaatgatttatcttgaagatggaagtgttgttcctgttgagaaaaatgaattacccgtagaattacctgatgatatagatttaaactctcaaggtaatccattggaatctcacccaaaatggaagtacacgactcataaagctactggtgaaaaagcaattagagaaaccgacacgcttgatacctttgttgattcctcgtgggtactttttgagattttgttcaccaaatcatca

SEQ ID NO: 303998 - DNA, 916 bp, Unknown
  Bacterial polypeptide expressing nucleotide sequence isolated from the Sargasso Sea
gtaaaaaaagaggatcttccaataaggcttcctgatataaaaaaatttaacaaaacctcaggattgcttaagggttttgatgagtggaaagaaacaacttgtccagaaacaggaatgaaagctgtgagggaaactgatacttttgatactttttttgagtcatcttggtattacctaagatactgtaatccaagagatattaaaccatttgataaaaaagacattagttactggctgcctgttgatcagtatattggtgggattgaacacgctatacttcatttgttgtattcacgtttctttacaaaggtgcttcgtgatttaaaatacatcaatattgatgagccttttaaaggcttatttactcaaggaatggtgactcacaaaacatataaaaataaaaagggtgagtggattgagcctgaagaagtttcatttgggggaagcaattatgtggatgcaagtggcgacaaagtattagttggtaaaattgaaaaaatgagtaaatcaaaaaaaaatgttgttaatccatccaaaattatagaattgtatggtgctgatactgcaaggtggttcatgttatctgatagtccaccagatagagacctggagtggactgacaaaggagtttctgcatcttataagtttttaaataaaatttgggacacatatataaaatccagagactatttaataaccacaaagacaaataaaattataacatcaagcttaaataaaatcataaatgaggtttcagaaaatattgaaagttttcattttaataaatctgttgctaaaatttatgaatatattaaccttttaaacagctctataagttcaaaaaatataaataaatccgatcttaataaagcaataaagaacttagcattaataacacaaccctttattccacata

SEQ ID NO: 303999 - DNA, 841 bp, Unknown
  Bacterial polypeptide expressing nucleotide sequence isolated from the Sargasso Sea
tttggctgtcctgcacatgaccaaagagatttagattttgcacaacaatatgatgtagaagtaattaaggttgttgagcaagaaagatcgccggaggtagttgacaaccaaataaatagggcgtttgtcgaaagcgggattatgataaactccggttttttaaatggattacacaacgaaatagcaaaagaagaagtgttaaaaagattagaaaaagagggaaagggaaacagaaaaacaaattataagttgcgtgactggggtatatcaagacagcgttattggggctgccccataccaatattgtatagagaagatggttcggttgtccctgtaagaaaagaggaccttccagtgcttctaccctcaactagtcacaacaaccctagcccaacaaaagaagaggtcaacgagtggaaaaacactgtttgcccaaccactgggatgaaggctatcagagagacggacacttttgatacgttttttgaatcttcttggtattatctgcgttattgtaacccgcgtaatgaaaagccttttataaaagaagatatcaattattggcttcctgtagatcaatacattgggggggttgaacacgcaatacttcaccttttgtattctaggttttttacaaaagctttaagagatatggattttgtagatataaatgagccttttaaggggctatttacacaaggtatggttacccacaagacatttaaaaacgcacatggtgaatgggttgagccaaaaaacatttttgaaagcaatggaaatttttttgatagccacaaagaaaaggtaaaggtggggaaaattgaaaaaatgagcaagtcaa

SEQ ID NO: 304000 - DNA, 799 bp, Unknown
  Bacterial polypeptide expressing nucleotide sequence isolated from the Sargasso Sea
tctccctttcacccctttgtggataggttgatgaaacaaagtgaagctcttaatagtcaagtcaatgaattgagatcacaaaaaattagcgaggagtcgatcgccaaaaatgagaaagtaggaattcaaacagagttatttatcaaacatccttttattgaaaacaaactacttccagtctttatagcaaatttcatcttaatggattacggatctggagctatttatggttgtcctgcgcacgaccaaagagacttagattttgcaaataaatatgatttagaaattatccaggttataaagccaactgacagtatcgaacttgataagaaaactgcttacactggaagtggtaaactaattaattctcaatttttaaatgatctatctattgaagaagctaagaaagaaattattaaaagagttgaggaacttaacataggaaagaagactactaactttagacttcgcgattggggtgtctctagacaaagatattggggatgtccaattcctattatgtatagagaagacggtaaggtaattgaagtccctgaagaccaactaccattggaattgccagaagatattgacttgagtattcctggcaaccctcttgacaatcatccagagtggaaattcacaaaatgtcccgaaacaggaatgaatgctattagagaaacagacacgcttgataccttcgtagactcagcatggtattttttaagattttgttcaccactcgaaacaaaagagccttttaacttagatgaaattgattattggatgccaagttgat

SEQ ID NO: 304001 - DNA, 804 bp, Unknown
  Bacterial polypeptide expressing nucleotide sequence isolated from the Sargasso Sea
gtgggcaaaaacacctacaacggccaggccgctttgcatgaaactgacaccttcgatacctttatggaatcgagctggtactatgcccgttactgcagccctgatcatgaccaagctatgctggacccagccaaagccaactactggttacctgtcgatcagtacattggtggtattgaacacgccattttgcacttactgtactcacgtttcttccacaaactgttacgggacgtaggtttagtgcagtgcgacgaacccttcaaacgtttattgtgccagggcatggtattggcagacactttctaccgtgaaacagaaaacggtggcaaagagtggttctctcctgctgatgttgcgacagaacgggacgaaaaaggtcgtattactgcatctattttaaagacggacggcaagccggtgttatcagctggcatgagcaaaatgtccaagtcgaaaaacaacggtatagacccgcaattggtcatagaccaatacggcgccgacacagtacgtttatttatgatgtttactgcgccaccagaacaaactctggaatggcaggactcagccgtagaaggtgcaaaccgtttcttacgccgtatctggactttggcagccgatcataaagagctgttcagcacagctgtaacctctttggaattaaactcagatcaaaaagcgctgcgccgtgatattcacaaaaccatagccaaagtgtctgacgatataggccgtcgtaacgtgtttaacactgctgttgccgctattatggaacttgccaacaagtacaaaaagcgcctg

SEQ ID NO: 304002 - DNA, 907 bp, Unknown
  Bacterial polypeptide expressing nucleotide sequence isolated from the Sargasso Sea
atagggaagtcaattgggtgtgaaatcaattttgaaatagataagaacaaagataaagtaaaaatttttactacaaggccagatactatatttggcgccacttttttagcagtttctgtagaccatcctttaagtagaagttttgaaactcaaaaaaaatttttagaatttaaaaaaaaatgttctcaagtaggtactactgaagaagcaattgcaaatgctgaaaaaataggttttgatactaatttaaaagcaagacatccctttataaaaggaaaaactattccaattttcattgcaaattttattttgatggattatggaactggtgcaatttttggatgtccagctcatgaccaaagagattttgatttcgcaaaaaaatataagttggatataatccctgtagtaaaatcaaaagagtctattgaaattaatcaaatgaaaaatgcttatacaggtgatggaaaaataataaattccaattttttagatgatttaaatattgaagatgcaaaaaagaaaataatcaaggaaattgaaaagaaaaatattggatgtaagaaaatatcatttaggttaaaagactggggtatatcaagacaaagatattggggatgcccaatacccatgatatatttaaaaaatggcgaggttgttccagtcgataaaagcgaacttccagtaaaattgcctgaagatatagacctaaattctaaaggaaatcctttagtaaatcatcctacatggaaaaatgttaaatttaaaaaaacaggagaggatgcaattagggaaacagataccctcgatacttttgttgactcatcttggtattttataagattttgctcaccaagattaaaagggaaacccttcgatgaaaaagcattaagttattggatgccgg

SEQ ID NO: 304003 - DNA, 457 bp, Unknown
  Bacterial polypeptide expressing nucleotide sequence isolated from the Sargasso Sea
aatggaaagagtaaattttcaagtaattgaaaaaaaatggcaagaaaaatttgcgtcttccaagttatacaataaaaatggtaaaaaattttattgtttggaaatgttcccctatccatcaggaaaaatacatatgggtcatgttagaaattacactattggcgatgttattgcccgttataaatatatgaaaggctttaatgttttgcatccaatgggttgggatgcttttggtttgccagctgaaaatgcagcaagaatgaataatttaaaaccaaaagattggacacagaaaaatattaaattaatgaaaagccaactaaaaatgcttggattgtccattgattgggatttagaaatatctacttgtgatgagagttattacaaacatcaacaagaattatttattgatttctacaatcaaggattggtttcccgtaaagaaacttatgttaac

SEQ ID NO: 304004 - DNA, 787 bp, Unknown
  Bacterial polypeptide expressing nucleotide sequence isolated from the Sargasso Sea
ttatactggtccaggatacatatttaactcaagtttcttagatggtctaaaatgtccagaggattctataataaaaacaattgatcatcttgaaaaaaataaatttggtgaaaaaaaaattaattttagattaaaagattggggtatttcaagacaaagatattggggttgtccaattcctataatatacgatgataataacaatccacaaaaactgcctaaaaaaatgcttccagttgaacttcctaaaattgataagttacaagcaaaaggcaatcctcttgataaagaaaatgagtggaaaaatttaacaatagatggaaaaaaatatgcaagagaaacagacactcttgatacttttgtagattcgtcttggtattttttaaggttttgttctcccaaaaacaatgagtatggattttcttatgaagatattaaatattggatgccagttgatcaatatataggaggtgttgaacatgcaattttacatttattatattcaagatttttcatgcaagcactttctcataaaaataataagttaaacattacagaaccttttaaaggtctctttactcaagggatggtttgccatgaaacttacaaagatccagagaacaattgggtaagcccagatgagataatttcaaaagacggaaaaaaataccttaaaaataatccatcaaaagaggttaaagttgggccatcagagtcgatgtcaaaatcaaaaaaaaatactatagatccagaaaatataattaacaattatgagcagattctgtca

SEQ ID NO: 304005 - DNA, 835 bp, Unknown
  Bacterial polypeptide expressing nucleotide sequence isolated from the Sargasso Sea
ctcaaaagacttggattcagctatgactggtcaaaagagcttaaaacctgtgacccaaactattataagtgggagcaggaaatttttagtcttcttcacaagcaaggtctagtttatagaaagaaatctctagttaactgggatccagttgatgagacagtgcttgcaaatgagcaagttatagatggaaaaggatggagatcgggagcaactgtagagttaaaagaaattgatcaatggtttttaaaaattacagattatgctgatgaacttcttagttccatagaaaaccttgattggcctgaaaatgtaaagtcaatgcaaaaaaattggattggtaaatcttttggatcagaaataagtttttctctctctagcggagagaagctaactgcttttacaacaagaattgatactatatatggggttacataccttgcgatatcaccaaatcacccaatttcacagaatttagcgaatcaagatactgatatagacgactttattaaaaaatgcaatgaaacaaagatggctgaagcagatatggctaaagctgataagttgggattaaaaacaaatttaaaagttaaacatccttttacaggaattgatcttgatgtctggattgccaattatgtcctaatggattatggaacaggagtagtgatgggagttccagctcatgacgaaagagatcatgagtttgctcacaaatataatatagatatcaagcaagtcataaaagctgatgaagtgccctcctctgaaaaaggtgagctcattaactctgagaaaaataatggtttgacttcggaaaatgcaatccaagatatta

SEQ ID NO: 304006 - DNA, 795 bp, Unknown
  Bacterial polypeptide expressing nucleotide sequence isolated from the Sargasso Sea
gtcgcgcgctacaagcgcgcccagggttacaacgtgctgcacccgatgggttgggacgcgttcgggctcccggccgaaaacgccgccatggaaaagggcgttcatcctgcatcctggacctacgaaaacatcgcgaccatgcgcgagcagctgcaggcaatggggctctccatcgactgggagcgcgagatcgcgacctgcgaccccgactattacaggcacgaacagacgatgttcgtcgatttcctgaaaaaggatctggtctaccggcaggacggctgggtgaactgggatccggtcgatcagaccgtgctggccaacgagcaggtgatcgatggcaagggctggcgctcgggcgcactgatcgagcggcgccgactgtcgcaatggttctgccgcatcaccgcgttcagcgacgagttgctaagcgcgctggacacgctggatcgttggccgcccaaggtccgggcgatgcaggagaactggatcggccgttcggagggggcctatatcgagttcgcgttcacggacggccgggagacaccgctgcgggtctacacgacccgccccgatacgatcttcggcgcaagtttctgcgccatcgcagcggaccatccgctggccgaggaactggcagccggcgaccccgaggcggcggccttcatcgaggaatgccgccagctcggcaccagcgaggaagcgatccagaccgcggataagcgcggctacgacaccggcctgcgggtcaagaatccgttcgcggacggaatcgaacttccggtctacatcgccaac

SEQ ID NO: 304007 - DNA, 793 bp, Unknown
  Bacterial polypeptide expressing nucleotide sequence isolated from the Sargasso Sea
caattaaaaaggcttggattatcaattgattgggaaagagaaatttcaacttgtaatgaagaatattacaagcatcagcaacttttttttttagagttgtatgataaaggcttagtatataaaaaagaaaactatgtaaattgggatccaatagatgaaactgttcttgcaaacgagcaagtaattgatggtaaaggatggagatcaggtgcaatagttgaaagaaaaaaattaaatcagtggttttttaatatttcaaaattctcagacgatctattaaaaggtctagaagaactaaaatcttggcccaataaagtaaagatcatgcaacaaaattggattggtaaatcatttggttgtgaaattgattttaaaattgaaggaaacttaccaattaattctgttaaatgttttactactaggcctgatacgttatttggtttctcttttttagcagtatcaatagatcatcctatctctgaacattttaaagaaaaccaagattttataaaatttaaaaaagaatgttctaaaactggaacaactgaagagtcgattgctcaaggagaaaaaattggcttcaataccaatcttacggcagttaatcctcttaacactagagaaaaggtcccagtatattttgcaaactttgtattaatggattatggatttggtgcagtttttggatgtccagctcatgaccaaagagatttggattttgcattaaaatataacttaccagttaaaactgtagtaagaccattagataaagatgaaaaattccaggtaaaaa

SEQ ID NO: 304008 - DNA, 320 bp, Unknown
  Bacterial polypeptide expressing nucleotide sequence isolated from the Sargasso Sea
aatggacaaggtaaactttaataatatagaaaaaaaatggcaaaagatttgggaaaaaacaaatctttatagagcgaacaaagaaaaaaagttttattgcttagaaatgtttccgtacccatcaggaaaaattcacatgggtcatgttagaaattacacaatcggagatgtgatagctagatacaaatacctaaattcttttaatgttttgcatccaatgggctgggactcctttggtttaccggctgaaaatgcagcgcgcgagaataatcttaacccaaaaatttggacgcaaaaaaatattttcggaaatgaaaaga

SEQ ID NO: 304009 - DNA, 921 bp, Unknown
  Bacterial polypeptide expressing nucleotide sequence isolated from the Sargasso Sea
aatgacaagggagactgacacgcttgatacctttgtgtgttcgtcttggtattacattagattttgttctccaaatgaaaagaattatggtttcaaaaaagatgacatagactactggatgcctgtggatcaatacataggaggagttgagcatgcaattttgcatttgttatattcacgtttttttatgagagcaataagctaccaaaataaaaattttaatataaatgaaccttttgaaagtttgttcactcaagggatggtttgtcatgaaacttataaagatgaaaaccaaaattggctcactccaaatgaagttgtgaaaaaaggtaataaatttgtaaaaaaagataaaccagatgaaattgttaaagttggaccatctgagtctatgtcaaaatcaaaaaaaaatgtaatagacccagaatttataattaacaattatggggcagatgctgttagattattcattctatcagatagcccacctgaaaaagatgttcagtggtcagaacagggtatgctatcatcctacaaattcattcaaaaattgtggactttacatctaaaaataaaggataaagtttcaaaagaagacgaaaaattagtagatcgagaaatcgagacttttacaaatcaaacgattgccaaaatttcaaataatttagaaaaatttaattataatgtgataatagcaaatatgtatgaaacttataattatttgataaaatatattcaaaaaaataaaaatttaaaaaatttaaaagataactacaaaaagattttgatttgtttttctccagttataccacattttgctagcgagtgtttagaagagcttggtgaaacagataatatggtctggcctaactttgatacaacacttttagaaagtgaagacatcagttatgtgatacaatt

SEQ ID NO: 304010 - DNA, 887 bp, Unknown
  Bacterial polypeptide expressing nucleotide sequence isolated from the Sargasso Sea
tttggaaaatcataggacatggaagctgaccaaacaaaaaagcacaggtaaaaaggctattcgagaaactgatactttagacacttttgtagactcttcatggtattttttaagattctgttcaccaaaagaaaaaggtcagccttttgatgttaaaaaaataaattactggatgcctgtagaccaatatattggcggtatagaacatgcaatattgcacttactatactcaagattttttatgcgtgctttaaaaaaaaataacaagaatataaacgacaacgagccgtttaggggtctttttactcagggtatggtatgtcatgaaacctataaagatcagaatggaaaatggcttaatccaactgaagttgaaaaaagctctaagggagaagctataaaaataaaagataaatctatagttaaagtaggtccatcagagtctatgtccaaatcaaaaaaaaatgtaatcgatcctgaacagatgattacttcttatggagctgatgcagtaagatggtttattctctctgatagccctcccgagaaagatattcaatggtcaaatcaaggtgttaatgctgcatataaatttttgcaaaaaatttataatttatgctgtgttatcaaagacagagaaaaaagtaaaaatacactagataatgaatttaacttaaaaatgaattcttatttaaacaaaataacaaagttcattgagaactttaatcttaatgttgtagtagctaacgtttatgaaatttatagtctcttcaattcacatttaaaagaaaacgtcagcgacaaatgtttcagggataatttaataaaacttatgaaaattttaatcccatttacaccacatctagcctatgaatgcctagagcttt

SEQ ID NO: 304011 - DNA, 782 bp, Unknown
  Bacterial polypeptide expressing nucleotide sequence isolated from the Sargasso Sea
aatggatacttttgttgattcatcttggtactttttgagatttcttgattcaaaaaatgaaaaatctccatttgataaaaatattgcaaactcgtggcttcccattgatcaatatattggtggagttgaacacgcaattttgcaccttttatattcaagattttttgttaaagctttaagagatataaatttacttaatgtggatgaaccattccataatttatttagtcaaggaatgattaattttggtggttcaaaaatgtcaaagtctaaaggtaatgtagtagatccagaagcatattttgcaactcatggcgctgatgcgttgagattgtatattctatttatggcacctccaagtgatggagtagagtggaatgatggaggaattgagggtactaaacgatttttaaacaaattttgggataatatgacaaaacttaaagatttagaaaacgtcgaaactagtaatgaagacagtcttgtgaggacaatgaatcagacaatatttagtgtaacaaatcatctagaaaaatttgaatttaacactggtgtctcagacttaatgaaggcaaacaacgcgatttctttatatctaaatcaaaacaaaactgtttctattgagactaaagatcttgtcctagaatcaatgtgtaatcttttatatcctttttctcctcatatatcatccgaaatatatcatttatatttaaataaagatatctcaactattgattggccggcttatgaagaatcgaatttaagaaatccaacgatatgaa

SEQ ID NO: 304012 - DNA, 895 bp, Unknown
  Bacterial polypeptide expressing nucleotide sequence isolated from the Sargasso Sea
aatgcaaaaaaaatacattttagagatgtttccgtacccatcaggaaacatacatatgggccatgtaagaaattatgttattggtgatatctgtgctcgctaccataaactcaaaggcgatgaagtcattcatcctatggggtgggatgcatttgggctaccagctgaaaatgctgcaattcaattcgatactcaccctaaagattggacacttagcaacatagagaatatgaaaaaccaattaaaaagacttaacttagatcttgattgggaaagagaattagcaacatgcaatgaagactattataaatatcaacaagaattgtttatagatttttataatgcaggactcgcctacaaaaaggatgcgttagtaaattgggaccctgtggatcaaactgtactagcaaatgagcaggttattgacggtaaagggtggagaactggggcagccgtagaacaaaaagtattatctcagtggttttttaaaatcacacattatgcagaggaactacttagcaatttagatgagcttcctttatggccagaaaaagtaaagactatgcaaagaaattggattggtaaatctattggtgctgaaataaagtttcaagttgtcggcatgaatgaatggctaaatgtatatactacaagaccggatacaatatatggagcaacttttattgcattatctgtaaatcatcaacttgtaagtatgtttttaaaacctcaagaaattgataagattaaaaaatcttttgctaataaatctaatgagaaagaaaaaataggcttttgtctagacattaaatgtaaacatccaatattagacaaagaaatacctgtatatattgcaaattttgttttggacaattatggagagagggtgcaatat

SEQ ID NO: 304013 - DNA, 703 bp, Unknown
  Bacterial polypeptide expressing nucleotide sequence isolated from the Sargasso Sea
atggagagatacaacataaaactgattgagaagaaatggcaaaatatttggttaaaggaaaagaccaatgcttctatcctgaataaaaataaaaaaaaattttactgtttagaaatgtttccttatccatcgggcaaaatccatatgggacatgttagaaattatacaattggagatgttcttgctaggtataaaaaactacaaggctttaatgtactccacccaatgggttgggattcttttggtttacctgcagaaaatgcagctcgtgaaaataatttacatccaaaaatttggaccagaaaaaatattcaaacgatgaaaaagcaattaaaacttcttggcttatcattagattgggatcgagaaatatctacctgtgaaccagagtattacaagcatcaacaagaattttttatagaattgtttaaaaaaaagttagtttataaaaaagatacttatgtaaattgggatcctaaagaacaaactgttttggctaacgaacaagtaatagatggtaaaggttggcgctctggtgtggttgttgaaagaaaaaaactttcccaatggttttttaatattaaaaaattttctcaagatttgctagatgatttaaataaattaaaaaattggcctgataaagtcaagctaatgcaaaaaaactggattggaaaatcttttggttgtgaaataaattttcaga

SEQ ID NO: 304014 - DNA, 808 bp, Unknown
  Bacterial polypeptide expressing nucleotide sequence isolated from the Sargasso Sea
gctttgcatccgtttattaaaaataaaaagatacctatttatgtcgcaaactttgttttaatggactatggaaaaggtgcaatttttggatgtcctgcccatgaccaaagagattttgactttgccaaaaaatataaattgccaattataagagttgtttcggataaagataaatctaaaaataacgaagaaatgagagaagctttcactggtgtcggaaaaataattaactcaaattttttagataatttagatattccagaggcaaaaaaaacaattatcaaagaagtcgaaaaaaaaaagatagggcaaaaaaaaactttgtttagacttaaagactggggtatttcacgtcagagatattggggttgtccaataccaatgatctacttagaagatggatcggttattcctgtagaaaaaagtgaattgcccataaaacttccgaatgatgttgatttaaattctaatggtaatcctttggataaccatcctttttggaaaaaaacttttcacaaaaaatctggaaaaccagcaatcagagaaacagatacgctagacacttttgttgactcatcatggtattttcttcgtttttgttctccaaagtttagaaaaggatcatttgaagaaaaagatgctaattattggatgcctgtagaccaatatattgggggtgttgaacacgctatacttcatcttctgtattcaagattttttatgaaagcaattaataaatcaaataaaaaaataaaatgttctgaaccttttaaaaatttgtttacacaaaggtatggtttgtcatgaa

SEQ ID NO: 304015 - DNA, 913 bp, Unknown
  Bacterial polypeptide expressing nucleotide sequence isolated from the Sargasso Sea
gatcctgttgaaaaaacagttcttgcaaatgagcaagttattaacggaaaaggatggagatcaaacgctactgttcagagaaaaaaattatcccaatggttttttaatataacgaaattttcaaatgaactgttaaacgaattagataagttacatggttggcctgaaaaagtgaaactaatgcaaaaaaattggattggaaaatcttttggatgtgaaattaattttgatatcgtgcaaaataaaaataaaattactgtctttacaacaagacctgatacaatttttggagcaagttttttggcattatcagttgatcatccgttaagtaaatcttttgtagacaaagatgattttaaaaaatttaaagaaaaatgcgataagacaggaacaactgaagaagctttagcgaacgcagaaaaattgggttataaaacaggtttagaagcaaatcatccttttttagaaaataagaaaataccaatctttttcgcaaattttgtactgatggattatggaactggagcgctttttggatgtccggctcatgatcaaagagattttgattttgccaaaaagtatgatttgaaaataacaagagttgtatcagacgaaaaaggtgacaaagaattgcaagaagcatttacaggtgaaggtaaaattattaattctgaatttttaaatggtttagaaattaataaggccaaagaaagagttattgatactatagagaaaaatagattaggaactagaaaaactctatttagattaaaagattggggggtctccagacaaagatattggggttgtcctatacccatgatttatttagaagacggatcagttgtacctgtagacaaaagtgaacttccagtagagctaccagaagatattgacttaaattctgccggca

SEQ ID NO: 304016 - DNA, 934 bp, Unknown
  Bacterial polypeptide expressing nucleotide sequence isolated from the Sargasso Sea
gcctcctattaagaatatctttgcaaatgttgatatttctgatgccgcttacggatcaaaagataacgtggaaatcgcaaattctgatttcttaaacggattagattataaaaaaggaacgcaaaaagcgattgaaaaattagaagaaatcgggcaaggaaaaggtaaaacaaattatcgtttgcgtgatgctgttttctctcgtcagcgttattggggtgagccattcccagtttattatgtgaatggattgccaaaaatgatcgagtctcagcatttgccaattattttgccagaagtagagaaatatttgccaactgaagacggtttaccaccattaggaaatgcagcagtttgggcttgggatacaaaacaaaataaagttgtggcaactgatttagttgacaatgcaacgatttttcctttagaattgaacaccatgccaggttgggcgggaagttcatggtactggatgcgttatatggatgcacacaatgaaaatgaatttgcatctgcagcagctttggcttactgggaaaatgtagatttatacattggaggaagcgagcacgcaactggtcacttattgtattctcgtttttggaacaaattcttaaaagacaaaggttttgctccaaccgaagaaccattcaaaaaactgatcaatcagggaatgattttggggactagtgcttttgtttatagattagaaggaacaaatacttttgtgtctaaaaataaaattggagatcaaaaagtacagccaattcacgcagatgtttcaatggtaaattcttctgatgaattaaatgtggaaaaattcaaagcttggagagaagattatactgatgctgaatttattctagatgataacggaaaatacatcgttggtcgagaagtcgaaaaatgtctaaatcgagaatacatgttgtaa

SEQ ID NO: 304017 - DNA, 772 bp, Unknown
  Bacterial polypeptide expressing nucleotide sequence isolated from the Sargasso Sea
tcaaatttagataaaaaaaagaaaaaattctattgtcttgaaatgtttccttatccatcaggaaaaattcatatgggacacgtgagaaattatacaattggagatgtgttagcgcgctataaaaaacttcaaggttttaatgttttgcacccaatgggatgggattcttttggacttcctgcagaaaatgctgctcgtgaaaataatctgcacccgaaagattggacaaaaaaaaatattgaaactatgaaaaaacaactaaaacttcttggtctttctttagattgggatagagaaatatccacttgtgaaccagaatattataagcatcagcaggaattttttatagaactatttaaaaaaaaattagtttacaaaaaagatacgtatgtaaattgggatccggcagaacaaaccgtcttggctaatgaacaagttattgatggaaaaggttggcgttcaggggtcgctgttgaacgaaaaaaactttctcaatggtttttcaatattaaaaagttttctcaaaatttattagatgaattggaaaaattgaaaaattggcctgataaagttaaacttatgcaaaaaaattggataggaaaatcttttggttgtgaaataaattttcaaattgataaaaaaaataataatgaaaatataaaagtttttactacaagaccagatactatattcggcgcctcgtttattgcactttctattgatcatccggtcgcaaaaaattttgaaaataataaggattttataaatttaa

SEQ ID NO: 304018 - DNA, 882 bp, Unknown
  Bacterial polypeptide expressing nucleotide sequence isolated from the Sargasso Sea
atggatttggagctgtattttggatgtccagcacatgatcaaagagacctagattttgcaattaaatacaatcttccttttaaaactgttgttaaaccaaaagacgaaacagataaatttaaagtaaaaaacgaagcttacactggaaccggcataataataaattctgattttttaaatggtcttaaagttccagaagactcaataataaaaacaattgaagttttagaagaaaaaaaaattggaaaaagaaaaataaattttagattaaaggattggggagtttcaagacaaagatattggggttgtcctataccaatagcgtatgatgttgatggaaatgtcatgactataccaaaagatcagctgccagtaaaattacctagtgaaatagatcttaaatctaaaggtaatcctttagataaaaagaaagagtggaaaacagtttcaataaatgggaaagaatgtattagagaaacagatactcttgatacttttgtagattcttcttggtactttttaagattttgttctccaaaaaatgatatttatggttttgatttagagtccattaaatactggatgccagtagatcagtatattggtggagttgaacacgctattcttcatctgctttattcgcgtttttttatgagagctataaactataaaaatgaaaaatttcctataactgaaccatttgagagtctttttacacaaggtatggtttgccatgaaacttataaagataaaaacaataactggttaaatcctgaagaagtagaaactaaggatggaaaaaatttctttattaaagataatccagaaaaaaaagttttagttggtccttcagaatctatgtcaaagtctaaaaaaaatacg

SEQ ID NO: 304019 - DNA, 885 bp, Unknown
  Bacterial polypeptide expressing nucleotide sequence isolated from the Sargasso Sea
aatggcctatacagaaaaagaggcagttttaaaaaactctaatagtttaaatggattaagttacagaaaggctttagaaaaaataacaaaacatatggtgaaaaaagggttggcaaaaattcaaactaactacaaattaagagatgcggttttttcaagacaaagatattggggagagcctttccccatttattatgaaaacaatattcctaaagtaattgaaaaacaaaacgttgtgttgccaaaaataaataaatacctccctacaaaagaaggcaacccaccattagctagagcaaaaaaagaagattggaatgtgtttaaaggagaaagaatggaatataacaccatgcctgggtgggctggttcttcttggtattttttaagattcatggaccccaacaatgaaaaaaactttgcagataagaacaaattaaattattggaagcaagtagacctatatgttggaggtgctgaacatgcagtaggacacttactttatgcaagattttggacaaaggttttatatgatcatggtcttgtcaaaataaaagaaccatttaaaagacttgtcaaccaaggaatgataggagccccgattcattttttattacttaaaaaagagaaagaaagaggtaggacagtttttgtttcaaacaataatatatataacaatcaaaacttcattaaaatagcatgccacatagacctagtatcattgccgggaacaaaagaagcacacttaaataatgaacaattaataaggtttattaaatggagaccagaatttaaaaaagcgttgtttgaaattaaagaaaaaaaactttcagaaaaagaaataaaaaagaacaaaaaagcaaaatttaaaataattttagaacaagg

SEQ ID NO: 304020 - DNA, 909 bp, Unknown
  Bacterial polypeptide expressing nucleotide sequence isolated from the Sargasso Sea
ttattctctagacagcgttattgggggggagccaattccagtcattcataaggatgatggtacaacgctacctcttaatacatcggatttacctttaacccttccacaagtagagaaatacgaacctgcagaaacgggtgagtcacctttagcaaatatcaaggattgggttgagactgatgaaggaaggagagaaactaatactatgcctcaatgggctgggtcatgttggtatttcttacgatttgttgatcctatcaatgacaaattgccttggagtaaagaaaaagaatcctattggatgccagttgacctttatattggtggtgtagagcatgctgtattgcacctgttatattccaggttttggcatcatgtcctatatgattttggattagtttcaactaaagaaccatttaaaaaactatttaaccaaggaatgatcagaggtgaagacggtcaaaaaatgagtaaatcacgtggtaatgtgatcaatccagatgacgtagtaaaagattatggcgcagatagtttgaggttgtacgaaatgttcatgggtccattggagaaatcgaagccatggagtacaaaaggactccagggatgctatagatttttacaaaaagtttggcgcatttttaataatgagaaaataaaaataaaagaaggttgttcgacagaagagacgaaaaaactattacatcaaactattaaaaaggcttctgacgacctagatgggttaaggtttaatactgttgtctcacaattaatgattttcgcaaatcatttatcaactttagatgttttggataaagaagtattacatcaatttttaatactgttaaatccttttgcgcctcatttgtctgaagaactaaatgaaataataggatatccgccaataaccac

SEQ ID NO: 304021 - DNA, 807 bp, Unknown
  Bacterial polypeptide expressing nucleotide sequence isolated from the Sargasso Sea
cacatgcgttcacaaaaaataagtgaggaagctatatcaaaaaatgaaaaagaaggtgtggacaccaaattgtttattaaacacccctttataaaagacaaattcttaccagtttatattgctaattttatactaatggattacggatctggagcaatttatggttgccccgcacatgatcaaagagattttgattttgcatctaaatataatttagagattatcccagttataaaagcattcgataattcagaatttgaatttgaagaggcttatgaaggaaacggtcttcttattaattcacaatttttagatggtcttgaaatagaagaagcaaaaaatttagtaattaaaaaattagaaaaaatgaaagcaggaaaaaaaacgattaattataggttaagagattggggagtatctagacaaaggtactggggttgtcctattcctataatgtatagggaagatggagaaattattgaggttcctgaaagtgagttacctcttgaattaccagaagatgttgacttaacaattcccggaaaccctctggataaccatcctacatggaagtttacaaaatgtccgttaactggaatgagtgctactagggagacagacactctggatacatttgttgactcagcctggtattttttaagattttgttccccgaatagtagtgaacctttcgacaaagatgaaatagattattggatgcccgtagatcagtacgtaggcggcgttgaacatgcaatattacatttactttattctagattttttactaaagcacttaaaattgat

SEQ ID NO: 304022 - DNA, 766 bp, Unknown
  Bacterial polypeptide expressing nucleotide sequence isolated from the Sargasso Sea
gatgccagttgaccagtatattggcggagtggaacatgcaattttacatttactttactcaagattttttatgcaagcaatctcatataaaaattctaaattcaatattcttgaaccatttgaagggttatttacgcaaggaatggtttgtcatgagacctataaggatgagaataatgaatgggtaagtccagatgaaattgagattaaaaatggcaaaaaggttttgaagaaaaattcaatgcagcaggtaaatattggtccatctgagtcaatgtcaaaatcaaagaaaaatacaattgacccagaaaaaataatagaaatgtatggagcagattcagctagattgtttatattatctgatagccccccagaaaaagacgtgcaatggtcagacgaggggataacttcttcttacaaatttattcaaaaactatggtctttaaatcaaagaattttagaggagatacaaaaaaatcatagtcaagatgagggaatagaaatatctaaatttacaaataaatttttaaaaaaaatgacagataatcttgataattttagctacaatattttaatcgcaaatttacatgaaatgcaaaactttttttcaaaggagataaataaaaaatataaagcaaaaacattaacggagaattttggaaaaatactgataacaatgataccaattgttcctcatcttgccaatgaatgtctgatgaaaattaattacaatgttgcaaagtggcccgaatacgatccaagtcta

SEQ ID NO: 304023 - DNA, 602 bp, Unknown
  Bacterial polypeptide expressing nucleotide sequence isolated from the Sargasso Sea
gctggagccgcttggaattctcagggtattgaaggactttccaagattttttaaaactgtgtggacactttgtaatttggaggggaaaaattcttcaaatgtttctaatgagattgacgaaaaacttcttaaatctcttcatcaaactataaaaaaggtaacaaatgaactacagaatttccgcttcaatactgcgattgcttcattgatggcctttcgaaacattttaaaggcagaaggagaagcagcaggaattgaagtctggaatgaatgccttgaagggatgctactgatgctagctccaatagcaccgcacataacagaagagttgtggcaaaaaatgaagccaggaaatggaagtattcacatgcagacatggcctgcatttgatgagaatcttgcagcagagaagctcattatactcgtagtgcaggtcaatgggaaagtacgcgaccggcttgaaatatctgccggaacaagcaaagaagaaactgaaaaaactgcgttggcctctcccaaggtccagtcttacctcgtaggcaagaaggtccgtaaagttatcgtcgtccctgaacgtctggtgaatatagtaagtgattaaa

SEQ ID NO: 304024 - DNA, 886 bp, Unknown
  Bacterial polypeptide expressing nucleotide sequence isolated from the Sargasso Sea
gtgttattaccgggacgatgtaaatcttaatgtaaaaggaaaccctttagaaaaacatccgacctggaaatattttaaactttcttcaggaaaaaaagttactagggaaacagatactcttgatacatttgttgattcttcttggtacttcataagattttgttccccaaaaaatagagaatatggatataaatttgatgaaattaaatattggatgcctgtggaccaatatattggtggggtcgaacatgctattttgcatttactttattctagattctttatgagagctttagcctttaaaaataaaaaatttaattacattgagccatttacgagtttatttactcaaggaatggtatgtcatgaaacttataaaaatgagcaaaatgaatggctttatcctgatgaaattgacaaaacttctgatggaaaatttttaacaaggaaagatagaaaaaaggttttagtgggatcttctgaagcaatgtctaaatcaaaaaaaaatattgtagatccagaagaaatgataaatacatatggtgctgactctattagatggtttatgctttcggacagtcctcctgaaagagatgttcaatggtcagtggagggagtttcggctgcttttaaatttatacaaaaactttggaaactacatagcgatattttacaaaaaacaaattcaacattagaaactgaggatcttactttacaaaaagctgtgaataaaactgtttataatgtaactaaaaacttagataattttcagtataatgtagtaatagcaaatattcatgaaatatataatttactttacgaacacgttttaaataataaaacttcgagtaaaaccttaaaaaatgaatgggaaaaaattactatg

SEQ ID NO: 304025 - DNA, 869 bp, Unknown
  Bacterial polypeptide expressing nucleotide sequence isolated from the Sargasso Sea
tatgaatgattcttatgtccccgtcgaagtggagcaggaggcgcaacagcgctgggagcaagagcaaagcttcgttgcagtggatgatcaaaaaagggagagatttttctgtctctcgatgtttccctatcccagtggtcagcttcatatggggcatatcaggaactataccctcggagatgtgatcagccgataccaacgtatgaagggttataatgttttgcatccgatgggctgggatgcgtttggcttgcccgctgagaacgcggcaattaagaatgatatcccaccttcggattggactcgggccaatatcgagaatatgaaggctcaaatgaagcagttgggcttcggtatcgactggtcccgagaattcgctacctgtgatcccgagtactatcgttgggagcaatggttatttgtccgtttatttaaaaaaggactcgtttaccgaaaaaactcgatagtcaattgggatccggtcgatcagactgttctggccaacgaacaagtgattgacggaaggggttggcggtctggcgagtttgtcgaacgaaaagaaatggcccagtggtttttaaaaatcacagagtatgcggacgaactgctcgaagagatagagttgcttgaaggctggcccgaatcagttaaaacgatgcagcgaaattggattggccgttcagaaggagtggaaatagactttccagtggttgggcgcgagtcggaagttttgagagtatttacgacacgaccagacaccttgatgggggctacctatttagcattagcgcctgagcacccgttggcggttgaagccgctgaaaatgacccggatattatggctgctatcgcgggtatgaaaaaaatct

SEQ ID NO: 304026 - DNA, 919 bp, Unknown
  Bacterial polypeptide expressing nucleotide sequence isolated from the Sargasso Sea
aaatatgatctagaaataaagactgttgttcgaccaatggataaagatgaaaattttaaagtactcaatgaggcatatccaggaccaggtgttttgattaattcagagtttctaaatggtcttaaagcaccagaaaactctatacttgaaacaattaagattttagaaaaaaaaaaattgggaaaaaaacaaataaattttagattgaaagattggggtgtatctagacaaagatattggggatgtcctattccaatagcatatgatgaaaatggtattgcttacccaatccctaaatcaatgttaccagtagagcttcccgaaaatataaatcttaatgttaaaggtaatccactagataaccaaaatgattggagaaaagtaattatagatggaaaacaattgataagagagacagacactttggatacatttgtatgttcgtcttggtattacttaagattttgttcaccaaaagaagctgaatatggatttaaaaaagaagatatcgattactggatgcctgtagatcaatatatcggtggtgttgaacatgcaattttacatttactttactcaagattttttatgcgagctttatctgaaaaaaatagtaattttaatatctcagaacctttcagtggtctatttacacaaggaatggtatgtcatgaaacttataaagatccagacaataattggataagtcctgaagaaattgaaaacatagatggaaagaagtatcttaaacaagatagatcaaagttaatttcgattggtccttcagaatctatgtcaaaatcaaaaaaaaatactatagatcctgaaaatataattgccaattatggtgctgactcagcaagactttttatattatcagatagccctccagaaaaagacgttcaatggtctgaggaag

SEQ ID NO: 304027 - DNA, 898 bp, Unknown
  Bacterial polypeptide expressing nucleotide sequence isolated from the Sargasso Sea
cttaaaacctgtgatccagactatataaagtggagcaaagaaatttttagtcttcttcataagcaaggactagtttatcgaaagaaatctctagttaattgggatccagttgatgagacagtacttgcgaatgaacaagtaatagatggtaaaggatggagatcaggtgctactgtagagttaaaagaaattgaccaatggtttttaaaaattacagattatgctgatgagcttcttacttctatagaaaatcttgattggccagaaaatgtaaaatcaatgcaaaaaaactggattggtaaatcttttggatcagagataagttttcctcttgcaaatggagaggagctaactgcttttacaacaagaattgatactatttatggggttacataccttgcgatatcaccaaatcatccaatttcacagaatttagccaatcaagatactcagatagatgactttattaaaaaatgtaatgaaacaaagatggctgaagcagacatggctaaggctgataagttgggtttaaaaacaaatttaaaagttaagcatccttttacaggaattgatcttgatgtctggattgccaattatgtcctaatggattatggaacaggagttgtgatgggagttccagctcacgacgaaagggatcatgagtttgctctcaaatataatatagatatcaagcaagtcataaaagctgatgaagtgccctcctctgaaaaaggggaactcattaactctgagaaatttaatggtctgacttcagaaaatgcaatccaagatattaataacttccttgaaaaagaaaaaataggtaaaggcattgagaatttccgattacgtgattggggtgtcagtagacaaagattttggggatgtcctataccgg

SEQ ID NO: 304028 - DNA, 892 bp, Unknown
  Bacterial polypeptide expressing nucleotide sequence isolated from the Sargasso Sea
tcatatgttggaggagtagagcacgcaatattacatttgttatatgccagatttttcactaaggccttgagagataatcaactatttgaaatagatgaaccattcaaaaaacttttaacgcaaggaatggttcaggccgctgcctataaaaacaataaaacgggtaaatatgtttctccttccgatattactgacctttcaaatcctacagatccaattgacaattctaaactcgaagttcttttcgagaagatgtcaaagtcaaaatataatggaatagaccctgaatcagtaattaaaaaatatggagcagatacagcaagaatgtttatattatttaaagcacctccagaaaaagatttggaatggggagatacagatgtagaaggacaatttagatttttaagcaggatttggaagctttatataaattgtgctaaagatgtaaatagtaaaagtaagtcctatccagataaagaaaaaacattaataaagtcaatgaacatggctataaaagaaatttcaaatgacatattaaataaccaatataatactgcgatttcagaactaatgaagttttataattcattatcaaattccattaatgaagtaaacaataatttaaaaaaagatgctttaaaaacattttgtattttattggctccatttgctcctcatattgcagaagaaatatggcatcttataggatttaaaaattctgttcatttagaacactggccttcatgtaatgccgaagcattaaaagaagagtcatatgaactagtaatacaagtaaatggaaaagttcgagacaaaataaatattaataatgaaattaaagaagatcaaattaagaaattaactctttatagaccgaacattttaaaatgga

SEQ ID NO: 304029 - DNA, 855 bp, Unknown
  Bacterial polypeptide expressing nucleotide sequence isolated from the Sargasso Sea
ttggttgtccagccatgatcaaagagattttgattttgcaaaaaaatacaaacttgacattattcctgtcgtcaaaccaaaaagtgaagacgaacaagaattaaaaaatgcttatactggagacggtaaaatcataaattctgaatttttaaataatttaaatatagatgaggccaaacaaaaaattttaattgaaattgaagggaaaaaaattgggaaaaaaagaattacttttagattgaaagactggggtgtatcaaggcaaagatactggggctgtccaattccaatgatttatttaaaaaatggtaacgttgtgccagtagataaaagtgaactacctgttcgattgcctaatgatataaatataaatcagaagggaaatccacttgatagtcatcccacttggaaaaaaaccaagtataaaaaaacaggcgaggaagctaccagagaaacagatactttggatacatttgtggattcctcatggtattttataagattttgctctcctaagcttaaagataagccgtttgatgagaaatcttttagctactggatgccagttgatcaatacataggtggggtggaacatgcgatcttacatcttttgtattcaagattttttatgagagcaatcgctttatgtaataataaaattaaattgaaagagccgtttaaaggtcttttcacacaaggaatggtttgtcacgaaacatacaaagataaaaatgaaaaatggctaagtcctgatcaaataaataaaactaaagagggactaatatccaaaatcgatggttctaaagtaaaagtaggtccgtcagaagccatgtcaaaatcaaaaaaaaatatagt

SEQ ID NO: 304030 - DNA, 537 bp, Unknown
  Bacterial polypeptide expressing nucleotide sequence isolated from the Sargasso Sea
actgtcttgaaatgtttccttacccatcaggaaaaattcatatgggtcacgtcagaaattacactatcggggatgttctagctcgttataaaaagcttcgtggttttaatgttttgcatccaatgggttgggattctttcggtttaccagcagaaaatgccgccagagaaaataatctgcacccaaaagattggacaaaaaaaaatataaaaactatgaaaaaacaattaaaactgcttggtctttcattagactgggatcgagaaatatctacctgtgatccagaatactatagacatcagcaagaattttttttggaattatttgaaaaagatttagtttataaaaaagatacctatgttaattgggatccagttgaacaatcagttttagctaacgagcaagtaataaatggaaaaggttggcgctcaggagcggtagtggagagaaaaaaactttcacagtggttttttgatataaaaaaattctcgcgaaaatttgttggacgaacttcaaaatctgaaaaattggcctgaa

SEQ ID NO: 304031 - DNA, 803 bp, Unknown
  Bacterial polypeptide expressing nucleotide sequence isolated from the Sargasso Sea
ttcgatactttctttgagtcttcttggtattatttgcgttattgtaacccacgtttagacaacaaacctttcttaaaagaagatgttaattattggcttcctgttgatcaatacataggtggtattgagcatgcaattcttcatcttttgtattctaggttttttacaaaagcactaagagacctaaagtttataaatatcagcgagccttttacgggtctttttactcaaggaatggttacccacaaaacatttaaagacaatgggggcaactgggttgagcctaacaaaattgtcgaaagaaaagggaattattttgatatcaacaatgagaaggtggtagttggtaaaattgagaaaatgagtaagtccaaaaaaaatgtagttaacccctcatctataattgataattatggtgcagacacagctaggtggtttatgttatcggactctccaccagaaagagacttggaatggacggatgttggtgttgcctcgtcacataagtttattaataaaatttgggacacttgtataaaagcaaaaaattataatgtcgcggaaggttttttaaaagcaaataaatttaaccttctcataaacagtgtttcagaaaatattgaaaaatttcactttaataagtccgtcgccaatatttatgaatatgtaaacgagattaacaagtctatagataaaaaagcgatctcagctgatggtttaaaaagtgtggttaaaaatttgtgtattattatacaaccattcacaccacatttaagtgaagagatttgggaactactaggtta

SEQ ID NO: 304032 - DNA, 650 bp, Unknown
  Bacterial polypeptide expressing nucleotide sequence isolated from the Sargasso Sea
ctataaacttagagactggggtatatctagacaaagattttgggggtgtccaattccaattatttatagagaggacggaaagattgtgccggtaaaagaagaaagcctaccaattaaacttccagaagttagtgaattaaacgaaacttcaagcacattaaaaaaatttgaagattgggttaatactaaatgtgaagaaactggtttagaagcaaaaagagaaactgatacttttgatactttttttgagtcatcttggtattattttagatattgtaattcaaggtcgacaaaggtgtttgaaaaaaaggatataaattattggttgcccgtagaccaatatattggaggaattgagcatgcaattttacacctattatactcaagattttttactaaagcattaagagaccttggttattttgatcttgatgaaccttttaaaggtttgtttacacagggcatggttactcatcaaacatataaaaactcaaaaaatgaatggctagagccaaaaaacataaaaaataccaatggtaattttgtggacctaaataataataaggtgacaactggaaaaatagaaaaaatgagcaaatctaaaaagaatgttgtagatccaaatgatataataaatctttatggagctg

SEQ ID NO: 304033 - DNA, 877 bp, Unknown
  Bacterial polypeptide expressing nucleotide sequence isolated from the Sargasso Sea
aaaggttttgtttcaagaaaagaaaattatgttaattgggatcctgtagaagaaacggttctggctaatgaacaagttattaatgggaaaggttggcgatctggtgctcttgtggaaaggaaaaaattatcacaatggttttttaacatcactaaatttactgaagaattgttaaagggtcttaaaaatttagaaaattggccagaaaaagtaaaattaatgcaaaagaattggatgggtaaatctacaggatgtgagattgatttcgagatcgcagataataaaactaatataaaagtttttacaacaaggcctgatacgatttttggagctacctttttagccttatctccagatcatcctgtaagtaaaaaattcgaaaaaaataaagaatttttaaaatttaaacaagattgtttaaaagttggaactacagaggaagccatggcaaatgctgaaaaaaaaggatttaacactggtttttttgcaaaacatccttttattaaaaataaaaagatacctatattttttgcaaattttatcctcatggattatgggactggtgctattttcggttgtccagctcatgaccaaagagattttgaatttgcgaaaaaatataaaattgaaatcattaaagttgtttccgatgaaaaaaattcatcacaacttaaagaagcttttattggggatggtaagataataaattctgatttcttaaatggtcttgatgtagaatccgcaaaaactaagattatttcagaggtagagaaaaaaaaaattggatcaaaaaaaatttcatatcgactaaaagattggaatatatccagacaaagatattggggatgtcctatccctataatttattggaggacgg

SEQ ID NO: 304034 - DNA, 847 bp, Unknown
  Bacterial polypeptide expressing nucleotide sequence isolated from the Sargasso Sea
gaattagaaaaattaaaaaactggccagataaagttaaattaatgcaaaagaattggataggaaaatcttatggttgtgaaattaattttcaaataattggtcgtaaaaagtctgataaaataacagtatttacaacaagacctgatactatttttggagcttcatttatagcactttcagttgatcatccaatttctaaaaactttgaaaaaaataaggattttctttcttttaagtcagaatgttcaaaaatgggaactacagaagaagcattagcaaatgcagaaaaaattggttttaaaacaaatttatttgcacaacatcctttcaataataaaattaagcttccaatttatatttcgaatttcgttctgatggattatggaacaggagcaatatttggttgccctgcacatgaccaaagggatttagattttgcaaataaatataaacttaaagtattgcctgtggttaaacctaaaaatataaattctgaggaatttgttataaaaaatgaagcttttactgatgatggcatattatttaattctgaatttttaaataatcttacagtaaatcaagctatagaaaaaattatccaagtaattaccaaaaagaaattaggtaaaaagaaaattacatttcgccttaaagattggggtgtttctagacaaagatattggggttgtcctattcctatagtttacgatgataaaggaaaggcaatagctttgaataaaaaagatttacccgtcctattaccagaaaatgtagatcttaatgttgcaggaaatcctttagacaaacatccaacttggaaacatacaaagctttcgagtgggaaaa

SEQ ID NO: 304035 - DNA, 760 bp, Unknown
  Bacterial polypeptide expressing nucleotide sequence isolated from the Sargasso Sea
atggccagttctgagtcccgttacagccccagcgatctagaggcgaaatggcagcagcgctggcagcagttggggctggatcagacccctgaacccagcagtaaccgggctgaaaatttttatgccctgtcgatgtttccctatccctcgggaaacttgcacatgggacatgtgcgtaattacgtcattactgatgtcattgcgcgcttgatgcgcctcaagggcaagcgtgtattgcatccaatgggctgggattcctttggactgccagcagaaaatgctgcaatcgagcggggtgttgatccagctgattggaccgaccgcaatattgcccagatgcgcgagcagctgcagcaacttggtttgtccattgactggaaccgagaggtagcgacctgccacagcgactactaccgctggacccaatggctctttttgcagttcctcaaagctgatctggcctatcgcaaggaagccacagtcaactgggatccgattgatcagaccgtgctggccaatgagcaagttgatgccgacggacgttcatggcgctccggcgccatggtcgaaaaacgtaagttgcgccagtggtttttgaaaatcaccgccgttgccgatgagcttctcgatgatcttgatcaactgactggttggccagagcgggtccgcacgatgcaggccaactggattggtcgttccaatggagccaccttgcgcttcgccatgtctgacaagggcgaggacgccattgaagtgttca

SEQ ID NO: 304036 - DNA, 603 bp, Unknown
  Bacterial polypeptide expressing nucleotide sequence isolated from the Sargasso Sea
tgactttgctgaagacttgaatgagggattgaaggatttaaaaaaatggcctaaaaaagttttgtcaatgcaagaaaactggattggaaaatctactggtgctttaataaattttaatctggttaattcagaagaaaaaatagaagtttttacaactaggcctgatacaatatttggtgcatcttttattggtctttctccagatcatccaatttcattaaatatggctaaagaaaactctgagataggggatttcatcaaatcctgcaaagctgctggttcaagtgttgtggatattgaaaaagcagaaaaacttggcatcgatactggactaagggtgaagcatccatattctaaactagagctacctgtttatattgcgaattttattttgatggattatggcacaggggccatttttggatgccctgcgcatgatcaaagggatttcgaatttgctaaaaaatatcatttaactattactcaagtagttggaaaataccctgacttagatgaagaattaaaagaagcatatacgggtgttggcgtaatgattaattctgattttttaaatggttgcacaatacaagaagcccaaacaaa

SEQ ID NO: 304037 - DNA, 965 bp, Unknown
  Bacterial polypeptide expressing nucleotide sequence isolated from the Sargasso Sea
taaagaagaaagatttatcgctaagatagatgatagagaaaaattttattgtttatctatgttcccctatccttctggaaagcttcatatgggtcatgtaagaaactacacaattggtgatgtaatctcaagatacaaaagaatgaatgattttaatgtttttcaaccaatgggttgggatgcttttgggttaccagcagaaaatgcagcaatagaaaataaagtaagtccaaaagattggacaaatgcaaatattgataatatgaaaaaacaacttaaatcattaggtttaagctatgactggtcgaaagaattaagaacatgtgacccaaaatactataaatgggaacagctaatatttaaaaagttctatgatgctggattagtgtatagaaaaaaatcaatagtaaattgggacccagttgatgaaacagttttagcaaatgagcaagtaatagatggaaagggatggcgatctggagcacaaattgagattaaagagattgatcaatggtttatcaaaataactgagtatgctgaagagcttcttgattcgctggatggtttggactggcctgaaaatgtaaagttaatgcaaaaaaattggattggaaaatctaatggggctgaaatcaaatataagattgatgaatcagatgaatatctaacaactttttcaacaaggccggatactatttttggagtatcttttctcgctatttcaccaaatcaccaactagcaattgacctatcaaaaaaagataaaaatattcttaaatttcttgaaagatgtaaagatataaaagcagctgaagcagatatagctaaggcagaaaaattaggaatagatactaatattaaagtcatacatcctcttacgggagagaaattaccattatggattggcaattttgttctacttgattatggaaacaggtgtggtcatgggtgttcctgggcatgat

SEQ ID NO: 304038 - DNA, 411 bp, Unknown
  Bacterial polypeptide expressing nucleotide sequence isolated from the Sargasso Sea
tcctaaaacaggtatgaaggctttcagagaaacggatacgtttgatactttttttgaatcttcttggtatttctttagatattgtaacgcaagactagaaaaaccttttgataaaaaagatataaaatattggttgccagttgatcagtatataggaggaattgagcacgccatattacaccttttgtattcgagattttttacaaaagttttaagagatttgggttactttaatctagatgagccttttaagggattatttacacaaggtatggttactcatttaacttttaaaaatgaaattggtgagtgggttgagccaaaggatgtaaaacaggacggtaaaatattaaaagatcaaaataacttgattgttgaaactgggaaaattgaaaagatgagtaaatcaca

SEQ ID NO: 304039 - DNA, 819 bp, Unknown
  Bacterial polypeptide expressing nucleotide sequence isolated from the Sargasso Sea
ttttcttaaaatgtttgaaaaaggaatagcttatagaaaaaatggtgctgtttggtgggacccaatagatcaaactactttagcaaatgagcaagtggtggatggaaaatctgaaagatcaggagcagaagttattagaaaaatgatgcctcaatggtatttcaaaattacagattatgctgaagaacttctggatatggaagatttgggttggccagaaaaaataaaacagatgcaaagaaattggattggaaaatcattaggaactacggttaaattcagtttaaattcatccaaaaataatatatcaacatttactacaagagtcgacacaatttatggagtcacatttattgtacttgctccagagcatccattggtggatgaggtaactgaaaattcatataaaaaaaatgtagaaagctatatatctacatcatcaaagtcatcagaaattgaaagaacttcaaccgatagagagaaaactggcgagtttactggtggttatgcaataaatcctataaatggagacaaagttcctatttttgttggagattatgttctgggtacctatggaactggagcagttatgggtgtgcctgcgcatgaccaaagagattttgaatttgcaaaaaaatataaccttccagtaaaggttgttattactaaagacggaatagatgaatttgaaattaatcaggcagatgaatcaaaaggaattttagtcaactcagatcaattcaacggaataaatagcgaagaggctctcaaaaatattacaaaatttatggaagataagaatatagggaatggcactgt

SEQ ID NO: 304040 - DNA, 787 bp, Unknown
  Bacterial polypeptide expressing nucleotide sequence isolated from the Sargasso Sea
atggaaagaataaatttccaggccattgaaaaaaaatggcaaaaaaaattctctaaaaaaaaactttataatagcggtaaaaaaaaattttattgcctagaaatgtttccatacccttcaggaaaaatccatatgggtcatgtaagaaattatacaattggtgatgtaatagcgcgatataaattccttaatggttttgatgttttacatccaatgggctgggatgcttttggtttacccgcagaaaatgcatctaagtctaataatcttcatccaaagatttggacacatcaaaatattgaaacaatgaaaagacaattaaaacttctaggtctctcaatagattgggatttagaaatttcaacttgtgacaaagaatattacaaacaccaacaagaattatttattgatttttacaacaatggtttagtttctagaaaagaaacatacgtaaattgggatccagttgaaaatacagttctagcgaatgagcaagtgattaatggtaagggttggagatcaaatgctgttgttgaaagaaaaaaattatctcaatggttttttaatattactaaattttcaaacgatcttctaaatgatttgcaagacctagatggatggcctgaaaaagttaaattaatgcaacaaaattggattggaaaatcttttggatgtgaaataaatttttcagtctcagataaaaagaaaaatataaaagtattcactactagaccagatactatatttggtgcaagttttcttgcattatctgcagaccatgaactaa

SEQ ID NO: 304041 - DNA, 898 bp, Unknown
  Bacterial polypeptide expressing nucleotide sequence isolated from the Sargasso Sea
acttgaccggtggcctgagaaagtaaaatctatgcagtcaaactggattggtaaatcacttggatgtcaaattcaatttgaagtttttgatgataaaaaaaattcaactaacgaaaaattggaaatctttacaaccaggcaagacactatttttggtgcaaccttctgtgctatttctcctaatcatccttttgcggaaactttatctcaacataatgaagctataaaaaatttcattaaagaatgtcagaaaaaaggttttagcgaggaaacattagctaaagaagaaaaagaaggagtatttacaaaccattttgtaaaacatccatttaaaaaggatacctttttaccaatttacttagcaaactttatattaatggattatggaactggtgctatttatggatgtcctgctcatgaccaaagagatttagattttgcgaataaatataaattagatgttatccctgtaatctgtcctaatgatgctgacttaaagacctttaagattgataatgaagcttataccgaaaatggaacactgattaattctgaatttttaaatggaaaaaatattgaggaagcaaaacaagaagtaaatcaaaagttagaaaaattagggatcggcgaatcaacaattaattatcgattgagagactggggaatatccagacaaaggtattggggttgtcctatcccagtaatttatcgtgaagatggagaaataattctagttccagaaaaagatttaccagttaaattacctgaagaagttaattttgaagaaaagggcaaccctctagattctcattccacatggaaacacactacatgtcctgaaacagggatgaaagcaataagggaaactgacacgttagatacatttgtagattcatct

SEQ ID NO: 304042 - DNA, 883 bp, Unknown
  Bacterial polypeptide expressing nucleotide sequence isolated from the Sargasso Sea
ctaaaacaaaaactttataataaaaaaggctcgaagttttattgtcttgaaatgtttccttacccgtctggaaaaattcatatggggcatgtaaggaattatacaataggtgatgtaatcgctcgatataaattcctaaatggttttaatgtcctccatccaatggggtgggatgcattcggcctacctgcagaaaacgcttctaaacaaaacaatctgcaccctaaaatctggactaaaaaaaatataaagactatgaaaaagcaattacaaatgcttggattatctattgattgggactacgagatctcaacttgcgataaagattattacaaacatcaacaggaactatttatagatttttacaataatggtttagttacgagaaaagaaacttatgtgaattgggacccaattgaaaaaactgtactagcaaatgagcaagttataaatggcagaggttggcgttcaaatgccactgttgaaagaaaaaaactttctcagtggttttttaatataactaaattttcaaatcaacttttagaagatctagataaattagatggctggcctgagaaagtcaaattaatgcaatcaaattggataggaaagtcttacggttgcgagttaaaatttaatttagttgacagtgatgagtccatcgatatttttacaactagacccgacactgtgtttggcgcgagtttcctagcactttcagtagaccataagttcaacaaaaaatttattaattcagatcaatttcaaagatttttaaaagagtgtaataaaacgggtaccactgaagaagcattagcaaatgcagataaattaggttttaatacaggtttttttgtaaaacatccatttataaacaataaaa

SEQ ID NO: 304043 - DNA, 859 bp, Unknown
  Bacterial polypeptide expressing nucleotide sequence isolated from the Sargasso Sea
tggtaagagtgtgttcgagcctatgggcttcgatgcgttcggtatccactctgagaacttcgcgctaaaagtcggtacgcatccgatggatctgattccatcgaacgtgaagaacttcacgaggcaactcaggcgaattggaggcatgttcgactgggagcattcgatcgatacgacagatccggcctactacaagtggacacagtggatcttcctgcagtttttcaaggctgggctcgccgagcgaaaggaggcaccagttaactggtgcccctcctgcatgacggttctcgctaatgagcaggtcgtaggtggggaatgcgagcgctgtgcaacaccggtagaacaaaggcggattgcgcagtggttcttccggatcacggactatgcgcagcgtcttctggacaatctagaccatatagactggtcggaaacgacactaaaggctcagagaaattggattggtcgcagtaccggtgctcaattgcgcttcccagtggttgacgaggctggagatgagacgggtacacacatcgaagtgtacacgacccgtccagacaccgtattcggagcgacttatgtcgtgctatctcctgagcacccactcgtccagagcgttaccgaggaggggatgattggtcatgtgtctgactatgtggaggccgcggcccaaagagacctggttgcccgccagaagacagataagacgaagacgggtgtcccgacgggtggcttttgccgtaatccggcgacgggtgaaatgattccgatctggattgccgactacgtactcatggagtatgggacgggcgcgataatggcggtgccaggacatgactcccgagactttgaatttgcg

SEQ ID NO: 304044 - DNA, 727 bp, Unknown
  Bacterial polypeptide expressing nucleotide sequence isolated from the Sargasso Sea
aaatcaaaaggaaatacggttgatccacagggttttattaaaaaatatggagcagatactgtcagactttttgtattatttgctgctcctcctgagcaatctctcgaatggtctgatcaaggagtacaaggtgcccatagatttattaacagaatatggaagcttgttaataagcatatagatgcaagcctgcccgaagatattgatgtaaatcattcaattaaagatttgaaattaatgcgatcaaagattcataagactttagctaaagtaaaagatgattatttaagaagacatagttttaatactgctatagcagctgtaatggagctctctaatgaaattccacaagaatggtttgactcaagtgcgagtccagaaatgcgaaaagttgccaacgaggctattgaatcaattctattaatgcttaatccaattacgcctcatttatgtcagcatctgtggtggcaactttatcctcaagaatcaattattgataagtcttggccaaaaattgaagaatctttgctgatagatgacaaattgaaaattgctgttcaagtaaatggaaagctgcgatctgaaatcgaaatagataaagaaactgaagatgattctgtgaaatctatagctctaagtgatgaaaaaataataaagcatttgaagggttctgaagttaaaaaaataatttatgttccaggaaagatactgaatatagttatatgaa

SEQ ID NO: 304045 - DNA, 694 bp, Unknown
  Bacterial polypeptide expressing nucleotide sequence isolated from the Sargasso Sea
atggtctcgttttcgccctccgttcttgaagccaaatggcaagctatatgggatgaagaacagtgtttcaaaacaaatatagatgtctgccgtgaaaaatattacgtccttgaaatgttcccctacccatcagggcgaatacacatgggacatgtccgtaattatgcgcttggagatgtaattgcgcggtttaagcgggcaaagggttttaatgtacttcaccctatgggatgggacgcttttggccttccagcggaaaatgcagcaattgagcgcggtatccatccaggcaaatggacaattgaaaatatttctgccatgcgagcccagctaaaaaccatgggtctctcatatgattgggacagagaagtaacaacctgttcacctaattattataaacatgaacagaaaatgtttttagactttctaaaagcaggacttgcttaccgcaaggaaagctgggtcaattgggacccggtggaacatactgttttagcaaatgaacaggttgtggatggcaaaggttggcggtccggtgccccggttgaacgccgccagctctcacaatggtttttgtccatatcagattatgcagaagacatgcttgctgctatcgaaaaacttgataaatggccagaccgcgtccgcttaatgcagcataactggatagggcgatcagaaggcgcaacggtct

SEQ ID NO: 304046 - DNA, 787 bp, Unknown
  Bacterial polypeptide expressing nucleotide sequence isolated from the Sargasso Sea
tggttcgggagcaatatttggatgcccagctcatgatcaaagagacctggactttgctaataaatataatttggacataattcctgttgttcttccaaatgataaaaaagaaggtgactttaaaataaccaatgaggcatttgtgggagaaggaaagctaattaattcttcttttttaaatggtttagaaattgaagatgcaaagaaagcggttattaaaaatttaaaaaaaattaattgtggaaaagataaaataacatataggttgagagattgggggctttctagacaaagatactggggttgtccaattcctatgatgtatagagaagatggaaaaataatacctgtttcaaaaaaagacctgcctataaccctgcctccaattaaaggcctaggagaaaaaaataatgatattggtattatagactcttggaaaaaaacagcctgtcctgaaactggaatgaaagcaacaagagagacagatacttttgatactttttttgaatcttcttggtattatttaagatattgcaacccaagaagtagtgagccgtttcttaaagaagatattaattattggttgcctgttgatcaatatattggtggaattgaacatgctatacttcatctcttatattctagattttttgttaaagcgttgagggacttggggtatgtaaatattaatgagccatttcagggactgtttactcagggcatggtaacacaccaaacctataaaaatagtagtgataattggcttgctccagatgaagtaattaaa

SEQ ID NO: 304047 - DNA, 970 bp, Unknown
  Bacterial polypeptide expressing nucleotide sequence isolated from the Sargasso Sea
agagaaaaaattgaaatttggatagctgattatgttttaattagttatggaacaggggcaatcatggcagttcctggacatgacgaaagagattgggattttgcatctaaatacaatcttcctattgttgaagttgtcgaagggggagatgtatctaaagcagcattcactgcaaaaggtaatgcaaaaattataaattcttctaatgataaaactttatcattagatggtttgaatgtagaccaagctattaaggaagcaattttatatattgagaaaaattcaattggaaaagctactgtaaattacaaactaagagattggttgttttctagacaaagatattggggagaaccttttccgttgattcacaaagatgataaagtagaattaatttcagaaaaagatttgcctgtaatgcttcctgaagttgaaaattataaaccatcagatgatggtaagtctccattatctttaattaataattgggttgaagtaaaagatgaagattcaaatattgttggacttagagaaacaaatactatgccacaatgggctggatcatgttggtattttttaagatttactgatcctaacaacacgaatgaagcttggtctaaagaaaatgaaaactattggatgccagtagatttatatattggtggacaagaacatgcagtacttcatttattatattcaagattttggcatcatgttttatatgatttaggtttagtgtctacaaaagaaccattcaaaaaattatataatcaaggaatgattctgggtgatgatggtacaaaaatgagtaagtctcgagggaatgtaataaatcctgaggaaattatggatgaatatggttctgattcaatgaggctgtacgaaatgtttatgggtcccttaaataaatcaaaaccttggagcacaaaaggtttacagggctgctatagatttttaaataaattatggt

SEQ ID NO: 304048 - DNA, 793 bp, Unknown
  Bacterial polypeptide expressing nucleotide sequence isolated from the Sargasso Sea
aacggtcaaaaattttattgtctagagatgtttccttatccctctggtaaaatccatatgggccatgttagaaactatacaattggtgatgtaattgctcgttataagtatatgaacggatttgatgtattacaccctatgggctgggatgcttttggtttacctgcagagaatgcatccaaagctaacaatttacatcctatggaatggacaaatgaaaatataaaaacaatgaaagcccaacttaagatgctcggtctttctatagattgggatcgagaaatttctacctgcgataaagattattacaaacatcaacaagaaatatttatcgatttttataataaaggattagtatcgcgcaaagagacttacgttaattgggatcctgcagagaaaactgttttagctaacgagcaagtgatagatggtaaaggttggagatcaaatgtcactgttgagagaaaaaaattgtctcaatggttttttaatattacaaaattttcaaatgaattgttaagtgatctagactcgttagttggttggcccgaaaaagttaaactaatgcaaaaaaattggattgggaaatcttttggatgtgaaataaattttgaaattgaaaatagtgatgaaaaaattaatatttttactacaagacctgatactatttttggagcaagtttcattgcactctcaatagatcatccacttaataaaaattttaaggatacaccagaatttgaaaaatttagagagtcttgtaacaaaactgggactactgaagaagctttag

SEQ ID NO: 304049 - DNA, 850 bp, Unknown
  Bacterial polypeptide expressing nucleotide sequence isolated from the Sargasso Sea
aaaattacttttcgacttaaagattggggtgtttcgagacaaagatattggggatgcccaataccaataacctataaccaaaagggtgaagcaactccagtgaataaaaaagatttacctatattattacctgaagatgtagatttaaatgttaagggtaaccctcttgaaaaacatcctacatggaaatttactacacttgcttctggtgaaaaggctattagagaaactgacactcttgatacttttgttgattcatcatggtattttttaagattttgttctcctaaatataaaaaatatggttatcaaatagaagatataaattattggatgcctgttgatcaatatattggtggtgttgaacatgcaattttacatttactttattcaagattttttatgagagctttagcttttgaaaataaaaattttaattatattgaaccatttgaaagtttatttactcagggtatggtatgccatgaaacatataaaaatcaaaaaaatcagtggttatatcccgatcaaatagaaaaaaattctgaaggacactttgttactaaaaatgatagaaaaaaagtaattgtaggtccatctgagtctatgtccaaatctaaaaaaaatactgtagatccagaggaaatgatcagtatgtatggagccgattctattagatggtttatgttatctgatagtcctcctgaaagagatgtacaatggtcacaagaaggagtttctgcagcttttaaatttattcaaaaactctggaaattaaacaatgaaattataattaaaaattcaaaatcttcaaacttgggggacactgttttaaagaaagctggttaat

SEQ ID NO: 304050 - DNA, 874 bp, Unknown
  Bacterial polypeptide expressing nucleotide sequence isolated from the Sargasso Sea
agttggttataggattagagactggctgatcagtcgccaacgctactggggcactcccatacctataatttattgcgataattgtggtgttcagcctgtcccgtttaatgaattacctgtccttttgcctgagaatgcagaatttaaaccaacgggggaatctcctttaaaatatagtagtgaatttctcaatgtgccctgtccttcctgtaggcttcctgccaggcgagagacagatactatggacacttttgtagattcatcttggtatttcttacgttacgtcagccctgaatctttagacgctccgtttgattccaacaagataggattatggaacccggttgatcaatatactggtggcgcagagcatgctgtaatgcacttactctatgctcgatttttcacaaaagtaataagggatttgggcctaattgaatttggggaaccttttttaaggctttttaaccaaggcactgttctctccaaccatacaaaaatgagtaaaagccgaggcaatgtcattgcccctgatatgtacactcaagaacttggggccgatgtggttcgactatacctgatgtttatgggcccttgggaaggtggtggtgactggagcgattctggtattaatggtgttgcccgatgggtgaatcgtttatgggatttatgtactaaaacctcagaggcgctgccagaagaggagcaggaattagatcgagagcttttgaggaaaatgcaccaaacgatcaaaaacgtaattactgattacgatcgatttaagtacaacacagctattgctgcgatgatggaacttacaaacgccgcgtctcctgcatatgaaaaaaaattagtatcacagaaggtttggatt

SEQ ID NO: 304051 - DNA, 370 bp, Unknown
  Bacterial polypeptide expressing nucleotide sequence isolated from the Sargasso Sea
atggagcgatataattttaaaaaaatagaaaaaaaatggcaagatttttggataaagaataagacttttaaatcacaaatagattcaaatctaaaaaaattttattgtcttgaaatgtttccctatccatctggaaaaattcacatgggacatgtaagaaattatactataggtgatgtattatccagatataaatcaatgaatggttttaatgtgcttcaccctatgggttgggattcattcggaatgcctgcagaaaatgctgcaagagagaatgatttacacccaaaagagtggactaaaaaaaatatatcagtcatgaaaacccagttaaaaagtcttggactttcaattgatgggatagagaaat

SEQ ID NO: 304052 - DNA, 651 bp, Unknown
  Bacterial polypeptide expressing nucleotide sequence isolated from the Sargasso Sea
aatggccgaagcagagctggccactatggagaaaaaaggttgcgcgaccggtatttatgccgtgcatccgttgaccggtgaacaggtaccggtgtgggtcgctaactttgtactgatggactacggttcaggtgcggtgatggccgtacccggccacgaccaacgtgattacgaatttgccagcaaataccagttagcgataaagcaggtagtacgcccggctgaaggctcggcgcaagaatgcgacttaaccaaagcggcttttaccgaaaaaggcgtactgattaactctggtgagtttgatggtgcagactttgagacagcttttaacgcgatcgctgccaagcttgccgcgatgggccgcggcgaagttaaggtaaactaccgtctgcgcgactggggcgtatcgcgccagcgttactggggtgcgcctatcccgatgttaaacctggcggatggtagccaggtaccagtgccagaagatcaattaccggtgcgtctgcccgaagatgtggtaatggatggtgtcacgtcgcccatcaaagcagacccggagtgggccaaaacgacgtacaacggcagtgaagcttttcatgaaaccgataccttcgacacctttatggagtcgagctggtactatgcccgttattg

SEQ ID NO: 304053 - DNA, 922 bp, Unknown
  Bacterial polypeptide expressing nucleotide sequence isolated from the Sargasso Sea
catggatagtcaaaagaaagcttacactggggacggatcaattattaattctgaatttttaaatgatttatctattccggaagcgaaaaaaaaaattattgaaaaaattgagaaaatgaaaattggaagtaaaaaagtctcatttagacttaaagattggggaatatctagacaaagatattgggggtgtcccataccaatgatttatttaaatgacgggacagttgtcccggttgataaaaaagaacttccagttaaattacccaataatatcgatttaaaatcaaaaggtaaccctctagaaaaccatccgaactggaagaaaacaatttataaaaaaactggagagcaagctacaagagaaactgacaccttagatacgttcgttgattcatcatggtattttgtaagattttgttcaccaaaattaaaaggcaaaccatttgatgaagatgcatttagctactggatgccagttgaccaatatattggtggagttgaacatgctattttgcacttattatattcgcgtttttttatgagagccattaaacttaataataataaaatcaaaattaaagagccttttaagggcttattcactcaaggtatggtttgtcatgaaacttataaaaataaaaatgggaattggatgagtcctgaagatataaaaaaaatgaataaatctgaaattattgttggaccgccagaagcaatgtcaaaatccaaaaaaaatgttattgatccggaaagcatgatcaatatttatggtgcggatgctattagatggtttatgctttctgatagcccacctgatagagatattcaatggtctaacgaaggagtttcgagcgctcataaatttgttcaaaaactatggctaactaaacaaaagattttagaaagaaaagatgttggataa

SEQ ID NO: 304054 - DNA, 733 bp, Unknown
  Bacterial polypeptide expressing nucleotide sequence isolated from the Sargasso Sea
atagacgaaacaattaaaattttagagaacaaaaatttaggaaaaagaaaaacaaactttagattaaaagattggggtatttcaagacaaagatattggggctgtcctataccaattgcatacgatgaaaacaacaatgttataaaaatccctgagaaagatttacctgtagaacttccaagtaaagttgatttaaatactaacgggaatccgcttaatgctcagcaagagtggaaacaaataactattaatggaaaaaaatgtgttagagaaacagatactttggacacatttgttgactcatcctggtactttctaagattttgctcagcgaaagtaaacaatgagccatttgatgatgatgatattgattattggatgccagttgatcaatatattggtggtgttgaacacgcaatattacatcttctatactcacgcttttttatgaaagctattagcttaaataataaaaagacaagacttcaagagccttttaaaggtttatttactcaaggaatggtttgtcatgaaacttacaaagatgaaaataacaactggctttttccagaagatgtttccactaaagacggcaaaaatttttatcttaataacaacccttcaaaaaaagttattgttggtccttcagagtcaatgtcaaaatcaaaaaaaaacactattgaccctgagaaaataataaaaatgtatggagcagatgcagtaagattattta

SEQ ID NO: 304055 - DNA, 493 bp, Unknown
  Bacterial polypeptide expressing nucleotide sequence isolated from the Sargasso Sea
atgaacaagcttgacgtaatagaaatagataaaaaatggcaaaatttttggcttgataaaaaagctatatttaaaaatacagacaaaaagaaaaaattttattgtcttgaaatgtttccttatccttcaggaaaaatacacatgggacatgtaagaaactacactattggagatgtattagcgagatacaaatcaatgtgcgggtttaatgttctccatcctatgggttgggattcattcgggatgcctgcagaaaacgctgctcgtgaaaataaattagatccaaaagattggacgaaaaaaaatattgctacaatgaaaagacaattacaatcacttggattatcgattgattgggatttagaaatctcaacatgtgatgaagaatattacaaacatcagcaatctctttttattgatatgtacaataaaggattggttataagaaaggaaacatatgttaattgggatccggtagataaaacagtttagc

SEQ ID NO: 304056 - DNA, 457 bp, Unknown
  Bacterial polypeptide expressing nucleotide sequence isolated from the Sargasso Sea
ggtttaaaatgtccagaagattcaataccaaaaactatcgaatatttagaaaaaaataaattaggaaaaaagaaagttaattttagacttaaagattggggggtatcaagacaaagatattggggttgcccaataccaataatgtacgatgaaaataataatcctaaaaaaatacctttagaactactacccgttgagctaccaaaaattgataaatttgaaacttcaggaaatcctttaaatgaaaataaagactggaaaaatatcattataaatggaaaaaaatatacaagagaaacagatactcttgatacatttgtagactcttcttggtattttttaagattttgtagtcctaataagaatgatggtggatttgatattgatgaagtgaaatattggatgccagtagatcaatacattggaggtgtcgagcatgcaattttacaccttttgt

SEQ ID NO: 304057 - DNA, 768 bp, Unknown
  Bacterial polypeptide expressing nucleotide sequence isolated from the Sargasso Sea
tacgttttagaaatgtttccatacccctctggaaaaatacacatgggccacgtaagaaactatacgcttggcgatgttgttgcgcgttataaaaaaatgagaggttttaacgttttacacccaatgggttgggatgcttttgggttgccggcggaaaatgctgctatgactgaaaaaaaacatcctgaggagtggacttacaaaaatattaagacaatgaaagatcagctgcttcaaatggggttgtctttagattggagtagggaggtagcaacgtgtcaccctgaatattataggcatgaacaaaaatttttcatagatatgtttaaggctggtttagcctacaaaaaagaggctgaggttaattgggacccagttgataaaacggttttagcaaatgaacaagtaattgatggaaggggttggagatcaggcgcggttgtggaaaagaaaaaactatctcagtggtttttaaaaattagcaaatattcagaggagcttcttcaagatctaaatactttagataattggccaaataaagtcaaaataatgcaatctaactggataggcaaatcaattggtgccgaaattaattttgatctatccgacagtgataaaaaaataaaagtttttacaactaggcccgacactttgtttggggcaacgtttgttgctttatctacagagcatagttttgtagaaagcttgtcaaaaaaaaatgataaattaaaaaactttattgaagagtgcaaaaatacaaaccccgat

SEQ ID NO: 304058 - DNA, 919 bp, Unknown
  Bacterial polypeptide expressing nucleotide sequence isolated from the Sargasso Sea
gatgtttccctatccttcaggtaaaatacacatgggccatgttagaaattatacaattggtgatgtgattgcgagatataaatttttaaatggatttaatgtattgcatcctatgggttgggatgcatttggcttacctgcagaaaatgcctccaaacaaaatgatctacatccaaaagaatggacgtataaaaatattgaaacaatgaagagtcagcttaaattgttaggactttccatagattgggatttggaaattgcaacctgtgataaagaatattacaaacatcaacaagaaatttttattgatttctataaacaaggattagtctcaagaaaagaaacttatgtaaattgggacccagttgaaaataccgtgctagcgaacgagcaagtgatcaatggaagaggctggcgatcaaatgcaatagtagagagaaaaaaattgtctcagtggttttttaatatcaccaaattttctaacgagcttttagatgatttagataagttagagggttggccaaataaagttaaattaatgcaaaaaaattggattggtaaatcctatggatgtgaaataaatttcaatttaacaaatagtaaagacaaaataaaagtattcacgacaagaccggacactatatttggagcaagttttctcgcactttcagtagaccacgatttaaacaaaaattttttaaaaaaagctagctttgaaaaatttaaagacgaatgcaataaaactggaacaactgaagaggctttagctaatgcagaaaaaataggtttcgatactgggttatttgtagatcatccatttatagataataaaaaaattccagtttattttgcaaattttgtattaatggattacggaactggtgcaatatttggatgcccggcacacgatcaaagagat

SEQ ID NO: 304059 - DNA, 758 bp, Unknown
  Bacterial polypeptide expressing nucleotide sequence isolated from the Sargasso Sea
actaacggaatggcccgacaaagttaagttaatgcagaaaaattggattggaaaatcaacaggttgtgaaatagattttgttgttaatagtaaagataaaaaaattaaagtttttacaacccgtccagatactatatttggcgctacttttttagccatttccgtggaccaccctttatgcaaagattttgagcaactagaggatttccaaaaattcaaaaaaaaagcttctcaggtaggtacaacggaggaagcaatagctaatgcagataaaataggatttgataccaaatttagagcaaaacatccgtttataaaaaataaaactttaccaatttttgtagctaattttattttgatggactatggaacgggtgcaatctttggatgcccagcacacgatcaaagggattttgattttgcaagaaaatatgctcttgaaattatatctgtagtaaagcccattgaaaatgttgagagtcataaattaaaaaatccgtatacaggtgatggtaaaataattaattcagaatttttaaatgatttaagcgtagaaaaagcaaaagaaaaaataataaaagaaattgagagaaaaaaaattgggaaaaaaaagattacttttagattaaaagactggggaatatcgagacaaaggtactggggctgtcccatacctatgatttatctaaaaagtggcaaagttgttcccgtagataaaagtgaacttccggtaagattaccagatgatgtgatttaaa

SEQ ID NO: 304060 - DNA, 814 bp, Unknown
  Bacterial polypeptide expressing nucleotide sequence isolated from the Sargasso Sea
gaaagtctctctcgtgagatataatcataaaaaaactgagccttattggcaggcggtctggttaaaagaaaattcagaagatacagaccaaaaatcaattaaaaaaaaatactatgttttagaaatgtttccatacccctcgggaaaaattcatatgggacatgtgagaaactatactttaggagatgtgttagcacggtataaaaaaatgcaaggctttaatgtcatgcaccctatgggatgggatgcttttggtcttcctgcagaaaacgctgcaattacagaaaaaaagaatccggcagactggacatataaaaacattaaagtaatgaaagaacagttacaacaaatgggttttctgcttgattggtcaagagaaatagctacctgtcatccggaatactataaacatgaacaggctttttttattgatttattaaaaaataaattagcctataaaaaagaatctgaggttaattgggatcctgttgacaaaacagttctagcaaatgaacaggtaatagatgggagggggtggagatctggagcgatagttgagaaaaaaaaactgtctcaatggtttctaaaaattagcaaatattctgaggaattattaaaagacttaagcgaccttgatgaatggcctgaaaaagtaaagttaatgcagtctaattggattggaaaatcagaaggtgttaaaattacatttaaaataacacctttggttcaagaaattgatgaaattgaagtttttaccacaaggcatgacacattatttggcgcttctttttgtgccatttcaattgatcaccct

SEQ ID NO: 304061 - DNA, 922 bp, Unknown
  Bacterial polypeptide expressing nucleotide sequence isolated from the Sargasso Sea
aatggcaaaaacttggaaagaatcaggcatatacaatgtttcgattgactcctctaaaaagaaattttatgttttggatatgtttccttatccctctggtgctggattacatgtaggtcatccactcggatatattgcatctgatatttattcaagatataaaaggcataaagggtttaatgtattacatcctcagggctatgattcgtttggtcttccagctgaacaatatgcaattcaaaccggacaacatcctcaaaaaacaactgaagaaaatattaacagatatagggaacagcttgatagaatgggtttttcttttgattggtcaagagaactaagaacatcagaaaaaaattattataagtggacacaatggatgtttacactattatttgacagttggtacgataaaaaattaaacaaagccagatctattcaagatttaaaagaaggttttttagaaaatggaagtgattatgtgattggttatgatagagaatttaacaataatgaatgggttgattttaacgatcatgaaaaagaagatattcttcaagagtttagaatagcatatatttcagaaacagacgtaaactggtgtcccaagttgggaactgttctagctaatgatgaagtaattgatggattatctcagagaggaggatatgaagttgttagaaaaaaaatgagacaatggagtataaggatttctgagtattcggaaagattgttaagtggattagaaattattgactggccagatccattaaaagaaatgcaaagaaattggataggaaaatctaaaggagcaatgattaaattttcagttgaaaattctgaatattctattgaggttttttctactcgtccagatactatttttggtgcaactttcataactcttgcaccagaacacgac

SEQ ID NO: 304062 - DNA, 834 bp, Unknown
  Bacterial polypeptide expressing nucleotide sequence isolated from the Sargasso Sea
ggcgctgtttttggatgtccagcacatgatcaaagggattttgattttgctaaaaaatataaccttaatatcacaacagtagtgaaaccaaatgataaagatgataattttaaagtttctacagaagcatatcctggttctggtattttaattaattctgattttcttaatggattagaggcaccaaatgactcaataatagaaacgattaaaatattagaaaaaaagaaattaggaaaaaagaaaattaactttagattaaaagactggggtgtatcaagacaaaggtattgggggtgcccaataccaattgcttatgacgaaaataatgaagcacatgaaatacctaattcaatgttgcctgttaaacttcctaaaaatataaatttaaatgtaaaaggtaatcctctagatagccaaaaagactggaaagaaatagaaatagatggaaaaaaattaataagagaaacagacacattagatacttttgtatgttcttcctggtattatttaagattttgctcaccaaaagagaatgaatatggatttaatatggacgatatagattattggatgcctgttgatcaatatattggtggagttgagcacgcgatattacatctattatattcaagatttttcatgcaagcaatttcctttgaaaataaaaattttaatttaactgagccatttgatggtctttttactcaaggaatggtttgtcacgaaacatataaagattcaaacaataattgggttagcccagatgaaattgaaaatattaatggaaaaaaatatttaaaaagtgacaactcacaggaaataactattggt

SEQ ID NO: 304063 - DNA, 774 bp, Unknown
  Bacterial polypeptide expressing nucleotide sequence isolated from the Sargasso Sea
caatccaacttcgaaagaagatgttagctattggatgaatgtcgaccagtacataggcggcgttgagcatgctatcttacatctattgtattcaaggttttttgcccgtgccatgcaaattactggacatctacccaagacggccaaggaaccatttgacgccctattcactcagggaatggtaacacatgccatctataagagtactggcgctgatggtagggatttgtttcactatccagaagaagtggaggtacgcgagggtaaagcttttctcattaaagataacaaggaggttaccattataccctctgcaaaaatgtcaaaatcgaaaaacaatgttgttgatcctgtgaacatagtggatgcattcggagctgacacagcgcgctggtttgttctttcagatagtccacccgaacgggatgttgaatggacagcctcaggcgctgaagccgccaataagcatttatcaagagtttatcgtataattgacgaaattgtttctaataacataccttccaatgacaacgatgaacggctgctaaaagaaatgcacaaaacaattcatgacgtcactcaagcaattgaaagttttggttttaacgctgctatcgccagactttacagttttacaaatagcttagcaaagtcaaaagctgggacaaaaactaaactttcagcggctaaaattctcgcaaaattaatgtcacctatgactccacacctatcggaggagatatgggaaaaattaggagaaaaaaacttggtggc

SEQ ID NO: 304064 - DNA, 417 bp, Unknown
  Bacterial polypeptide expressing nucleotide sequence isolated from the Sargasso Sea
ccatttactttattcaagattctatcaaaagtttttatttgatctaggtatatttaatagagatgagtatgcaaaaaaactgataaatcaaggaatgattcttggaaactctgcttttatttataggaaaaaaggaacctcagaatatttatcaaaaaatttaatagataaagttaaagttgaaaaaattagaatagatattaaatatctaattggagaaaatgaagttgatattgacctattgaaatatgatgacaaagattttaataaatcagttttccattttgataatggaaagtttcaatgcattagagagttagaaaaaatgtctaaatcaaaatttaatgtagttaatcccgatgaaatttgtgattattatggagctgatacattgaggatgtatgaaatgtttttagg

SEQ ID NO: 304065 - DNA, 901 bp, Unknown
  Bacterial polypeptide expressing nucleotide sequence isolated from the Sargasso Sea
agatttggattttgcaaacaaatatgatctagaagtcattcaagttattaatccatctgataattcagaatttgactccaagaatgctttcactggaaatggtaaactaatgaattctcaatttttaaatgaactctccattgaagatgccaaaaatgaaatcataaaaagaatagaaaaattaaatctaggaaagaaaacaactaattacaggcttagagattggggcgtatctagacaaagatattggggttgccccatccccattatgtacagggaagacggcaaagtgattgaagttcctgaaaaagatcttccattaaaattacctgatgatattgacttaagcattcctggtaatcctctagatcatcacccaacatggaaatatacgagatgcccagaaacaggaatgaaagcaataagggaaacagatacgcttgatacttttgtggactcagcatggtattttttaagattctgttcaccactcgaaaccaatgaaccgtacaatctagaagaagttaactattggatgccagttgatcaatatgttggaggtgtcgaacacgcaattttacatttattatattcaaggttcttcacaaaagctctaaacataaagggcatcgaggaaccttttgatagtttatttactcaaggcatggtttgtcacaatacctttcaaaatgaatcaaaagcatgggtttaccctaatgatgtcgagaggaaaaattcaaattattttcaaatatccactggtgaacaggtcacaatgggtgaaattgagtcaatgtcaaaatcaaagaaaaacgtaattgatcctgagtccatcattgatgcatacggagctgactcagcaaggtggtttatgttatcagacagtccacccgaaaaagat

SEQ ID NO: 304066 - DNA, 828 bp, Unknown
  Bacterial polypeptide expressing nucleotide sequence isolated from the Sargasso Sea
ttgatgcattacggctcaggtgctgtgatggccgtaccaggtcacgatcagcgcgattatgaatttgctacaaaatacggcctggctattaaacaagtcgttcagccagaagctggcagtactgctgtctgtgatttaaccactgctgcctttactgaaaaaggtgtgctggtgaattctgccgaatttaacggtttagattttaccgctgcttttaaagccatagccgacaagttaactgctatgggtgttggtcaggtgaaagtgaattaccgtttacgtgactggggtgtatcccgtcaacgttactggggttcacctattcctatgctgacactggaagatggcactcaagtgccggtaccagaggatatgctgccggtacgtttacctgaagatgtagtcatgaatggcgtcacctcgccgatcaaagccgacccggagtgggcaaaaacgacctatcaaggtcaggctgcgttgcatgaaaccgacaccttcgacacctttatggagtcgagctggtactatgcccgttactgcagcccggatcatgacaaagccatgctggacccggctaaagccaactactggctgccggttgatcaatatattggtggtatcgaacacgcgattttacatttattgtattcacgctttttccataaactgttgcgcgacgtaggtttagtccaatgtgatgagccatttaaacgtttattgtgtcagggcatggtattggctgaaaccttctaccgtgaaactgaaaacggcggtaaagagtggttctcgcctgccgatgtagcaacggagcgtgacgaaaaaggccgt

SEQ ID NO: 304067 - DNA, 778 bp, Unknown
  Bacterial polypeptide expressing nucleotide sequence isolated from the Sargasso Sea
ttttctgaagattatttgagtggtttagataagttagaaacttggccaaataaagttaaaataatgcaaaaaaactggataggaaaatcatttggctgtgaaattgattttaaaatagaaggtaaattaccaataaattcaataaaatgttttacaacaaggccagatactctatttggtttttcttttttagcagtatcagttgatcatcctctttctgaattttttaaagataatatagaatttacaaattttaaaaaagaatgttctaaaactggaacaacagaagaatcaatcgcacaaggagaaaaaatcggttttaaaactaatttaatggctataaatcctttaaatccagatcataaagtgccagtatactttgcaaattttgtattaatggattatggttttggtgctgtctttggctgtccagcccatgatcaaagggatttggactttgcaaataaatataatctaactgtaaaaactgttgtaaaaccaactaatgaaaaagatacgtttaaagtaaaaaatgaagcatatactgggcctggaaaaataattaattcagattttttaaatggacttgaagttccggatgaatcaattttaaaaactatagaaattattgaacaaaaaaaaatagggaataaaaaaattaattatagattaaaagattggggagtatcaagacagagatactggggttgtccaattcctatagcttacgataaagatggaaatgtaattaaaataccaaaaaatcaacttccaataa

SEQ ID NO: 304068 - DNA, 808 bp, Unknown
  Bacterial polypeptide expressing nucleotide sequence isolated from the Sargasso Sea
aagatattggggctgtccaattccgatgttgtaccgagaagatggaaaaatagttccagtggcaaaaaaagatcttcctgtattattgccaccaactaagggcttcaccggaataagcaatgcgcttaacaatatcgattcttggaaaaacactgtgtgtcctgagacaggattaaaggctgtaagagaaacagatacttttgacacgttttttgaatcttcttggtattttttaagatattgcaatcctagaagtaatgaaccattcttaaaagaagatataaattattggctacctgttgatcaatacattggtggtatagaacatgcgatacttcatcttttgtactccagattttttgtaaaagcacttagagatttggggtatgtaaatattaatgaaccatttcaaggattgtttacacaaggcatggttacacaccaaacatacaaaaatagcggtggtgcctggcttgctccagatgaaataattaaaaaaaatgataaatttttagatttacaaaatcaaagtgtaaaagttggcaaaattgaaaagatgagtaagtctaagaaaaatgttattgatccaggaaagacaatagatatgtatggggcagatacagcaaggtggtttatgttatcagatagccctcctgaaagagacttggagtggacagagtttggtatttctagctcgtacaaatttattaacaaaatatgggatctttcatcgcagttatttttaaataattatagtgaaaaaaataatgaaaatgacaatgatataaaaataaatattaacaaaaca

SEQ ID NO: 304069 - DNA, 907 bp, Unknown
  Bacterial polypeptide expressing nucleotide sequence isolated from the Sargasso Sea
acagcttggactttcaattgattgggatagagaaatttcaacttgctcacctgaatattataaacatcagcaaaaactttttttagacctttatgataaaggtttggtctatagaaaagaaagttatgtaaattgggatccagtagataaaaccgttttagcaaacgagcaagtagttgatggaaaaggatggagatcaggtgcattcgttgaaagaaaaaaacttaaccaatggtttttcaaaatatctcatttttcagaggaattattaaaagatctaggccaactaaataattggccagacaaagtaaaaactatgcaaaaaaattggataggaaaatcttttggctgtgaaatagattttccaattgaaggatcagacaaagtaaattcaataaaatgttacactacaagaccagatacactttttggattttcatttttagcactttcagtggatcatcctctatcaaaattttatgaaaatgaccctaaatttactaagtttaaggagacatgttctaagacaggaacaacagaggagtctattgctcaagctgaaaaaattggtttcaaaaccaacttgttagcaataaaccctttagataaaaataataaagttcctgttttctttgcaaactttgttttaatggactatggatttggagctgtatttgggtgcccaggtcatgatcagagagactttgattttgcaaaaaaatatgaattaaaaattaccacagttgtaaaacctttaaatgaagacgataattttgtggttgaatcagggcctcatacagggtctggaataatgattaactcaaaatttttaaatggcttaacagttccagaagaatctgtctctaaaacaataaaatatctggaagaaaaaaaattagaaaaaaaa

SEQ ID NO: 304070 - DNA, 821 bp, Unknown
  Bacterial polypeptide expressing nucleotide sequence isolated from the Sargasso Sea
aatgaataagattaatgtaaaagaaattgacaaaaaatggcaagatttttggttaaagaaaaaaaccaactttgagaacacaaaagaaagtaaaaaattttattgtttagaaatgtttccctatccttctggaaaaattcacatgggacatgtaagaaattacgcaattggagacgtactagctagatataagactatgaatggttttaacgtacttcacccaatgggttgggattcttttggtatgcccgctgaaaatgctgcaagagaaaacaaattaaatccaaaagattggacaaaaaaaaatattgcaacaatgaaaagacaacttcaatcgcttggtttatcaattgattggggtttggaaatttcaacttgtgatgaagaatattataagcatcaacaggagttatttattgatttttttaataaaggcttagtaatacgaaaagaaacttatgttaattgggatcctgtcgacgaaactgttctagccaacgaacaagtgattaatggaaaaggttggcgatccaatgcagttgtggaaagaaaaaaattatcacaatggttttttaatatttcaaaattttcaaatgagttattagaggatttggatatgcttactgaatggccagaaaaagtaaaattaatgcaaaaaaattggattggaaagtctgtagggtgcgaaatagattttaaaattgatggagaagaaaaaaaggtaaaagtttttactactcgtccagatactatatttggagccacttttttagcggtatctgtagatcatcctttatgtaaaaatttagaaaagcaaaaaa

SEQ ID NO: 304071 - DNA, 743 bp, Unknown
  Bacterial polypeptide expressing nucleotide sequence isolated from the Sargasso Sea
aaaacaggtgtttttactggtgcatatgctttttatccaatgtcaaagaaaaaaatgcccatttggatttctgattatgtattatactcgtatggaactggagctataatggctgttccagctcacgatgaaagagattatgaatttgccaaaaaatttaatctcgaaataacgcgggtaattgaaggtggagaagatgttgactgttatactggtgatggtaaaattataaattcagaaaattacaatggcctagataatcaggaattcaaaattattgttgtagactttttagaaaagcaaaaaaaaggagaaaagaaggtaaattacaaacttagagattggatatttacaagacagcgctactggggcgagccgattcctattttgtatgatggtgaaaaaaagaaagatttggaatatgaggatttacccttgaaattacccgaggttgagagttatcttccaacaaaagatggctcatcaccacttgctagaaataaaaattgggtctctgtgcaaaaagatggtaaagaatatctcagagaaactaatacaatgccacaatgggcaggatcttgttggtattttttaagatttttagaccctttaaacgataatgaatttgctaataaagatattatcaaatattggatgccagtggatttatatattggaggagccgaacacgctgttttacatttactttatgcaagattttggcataaagttttatttgattt

SEQ ID NO: 304072 - DNA, 811 bp, Unknown
  Bacterial polypeptide expressing nucleotide sequence isolated from the Sargasso Sea
tcgtaggcctatgaaacagtggatgttgcggatcactgactacgctgaacgtcttttggatgacctcgatggtttagactggccagagagtatcaaagagatgcagagaaactggattggccgatcagagggcgttcggttatcattccggcttccaggcgcagaagaaaaagttgaagtgttcacaacgcgtccagatacgttatttggcgtaacctaccttgtcctggcacccgaacacccacttatacatacgttgacttctaaagagcaggcagcggcggtgagagaatacgtagaaacatcaagcagaaagtctgaccttgagcgtacagacctggcaaaagagaaaactgggatttttaccggtgcttatgcgacgcatccacttacagaagaggaaatcccaatatgggttgcggactatgtacttggatcttatgggacaggtgctatcatggcagtgccggcgcatgatgaacgcgacaacgaatttgcagctgcatttgaattaccagttatacaggtggttacgccgcccgatggtgactgtacatgctacgctggtgatggcttcatgcaaaacagtgcgtccgaagcaatagacgtaaatggtctgacaaatagcgacgcaggacaaaggatattggaatggcttgaagagaactcgattgggaccaaaacaatcaattacaagttacgggattggctattcgcgcgtcagcgctattggggagagccatttcctgttgtttacgcagataatgaccgagacaaacctgttcctatcccatactctgatctcccactt

SEQ ID NO: 304073 - DNA, 832 bp, Unknown
  Bacterial polypeptide expressing nucleotide sequence isolated from the Sargasso Sea
aaaaagaaaggtaaaacattggtgtttaagaattagtaaatactcagagagactcttaaatgatctagataaaattgattggccggatccacttaaagaaatgcaaagaaattggattggaaaatctaaaggtgtgtctctaatttttaatgttgaaaattctaatgaaaaaattgaggtttttacaactagaccagatacaatattcggagtttcttttcttactattgcacccgagtataaagacatatctgagttcatatcatcaaatcataaatctgaaattgatagttacattgatgaagttttaaaaaaatctgagagagaaagattatctgatgtaaaaactgtttctggagtatttacaggttcttatgcaattcacccttttacaggaaaaaaaatacctatatggatttctgattatgttattgcaagttatggaactggagctgtaatgggagtgcctgcaggagatcaaagggattttgactttgcaaaaaagtttatgattgatattccaaatatttttgaaaatatagatgtctcacagcatgctttttccgataaatcagggtttaggcttattaattcagagttcctaaacggattagattatgaaaaatctttggaactaataattcaagaaattgaaaataatggaattggtaaatctaaaattcaatttaagttaagagatgctacatttagtaggcaaaggtattggggtgaacctattccaatatattataagaatggtattccaattaatattgagaaagactataaacccttagaattaccagatgtagataattttctaccaacaaaa

SEQ ID NO: 304074 - DNA, 301 bp, Unknown
  Bacterial polypeptide expressing nucleotide sequence isolated from the Sargasso Sea
attgaccaaaaatgctaaaaatgattcgaatttcactccttataatcctgcggaaatagagcccaaatggcaaaaaatctgggaagaaaacgaactctataaaaccccagatactataaatggtaaaaacaattattttgctctaacaatgtttccttatccttcaggagacttgcatataggccattggtacgcatttactcctgccgatgctcatgcaagatatatgagaatgaatggatataacgtaatgcaccctcaaggttttgatgcatttggtctaccagcagaaaatgcagcg

SEQ ID NO: 304075 - DNA, 769 bp, Unknown
  Bacterial polypeptide expressing nucleotide sequence isolated from the Sargasso Sea
tattgcgatgcaacaaacacaaatataccattcgacaaacaaacctgtgactattggatgaatgtagaccaatacattggtggtattgaacatgctatcttacatttactgtatgctagattctttacaaaagcttgtagggattgtggtctaacaactcacaacgagccttttaagcgtttattatgtcaaggcatggtcctaaaagacggtagtaaaatgtccaaatccgttggaaacacagtagacccaaatgcaattattgaaaaatacggtgctgatactgttcgcattttcattttatttggcgctccggtagaacgagatttagactacgctgaaactggcattgatggagcctacagatttttaaagcgcattcataatctcataaccaacccagataaatatccactaagcaatgaagctaaacttacccagcattaccacaaaacagtagctgctattacccaagatatcgaacgatttagttttaatactgccattagtcgcctaatggaatggattaacacacaatatgctgatggaacaactatagaatatttaaaaaacaccttaaaattactagctccatttgcaccttttttagccgatcatttatggcaacacttaaacgaaaaaaactccattcaccaagaagaatggccttcatttgatgaagaaaaactaaaaaacgaaaccattacaatggtttgccaaattaatggaaaagttcgcgataaacttaattgcccagcagacgcaactc

SEQ ID NO: 304076 - DNA, 787 bp, Unknown
  Bacterial polypeptide expressing nucleotide sequence isolated from the Sargasso Sea
atattataaacaccaacaagaattatttattgatttttttaacaaaggtctcgtaattagaaaagaaacatatgtaaattgggatccggttgaaaaaacagttttagcaaacgagcaagtgatcgacggaagaggatggaggtcaaatgccttggtggaaagaaaaaaattgtaccaatggttttttaatatttcaaaattctctgatgaattacttgaagatctagaaattttaaaagaatggccagaaaaagttaaattaatgcaaaagaattggattggaaaatctttaggttgtgaaataaattttgaagtatcaaatgaaaataaatttgtaaaaatttttacaactcgtccagataccatatttggcgctacttttttagctatatcagttgaccatccaatgtgtgaaagttttaaaaatcaaaaagattttatagaatttaaaaagaattgctcacaggttggcactactgaagaggccatcgcaaatgccgaaaaaattggttttaaaactaataaaacggctaatcatccgtttataaaaggtaaaaaaataccgatctatgtagcaaattttgttttaatggattatggaacgggtgcaatttttgggtgtcccgcacatgaccaaagagactttgattttgccaaaaaatataaacttgaaataattcctgtagtaaaaccagaaaatattgataatacatctatggatagcgcctacattggggatggtaaaattataaactcagattttttaaataatttagatatttcaaaa

SEQ ID NO: 304077 - DNA, 668 bp, Unknown
  Bacterial polypeptide expressing nucleotide sequence isolated from the Sargasso Sea
taaacatcaacagatattttttttagaacttttagaaaaaggtttagtttatagaaaagaaaattacgtcaattgggatccggtagatgaaacagtgcttgcaaatgagcaagtaattgatggtaaaggatggagatcaggggcaattgttgaaagaaaaaagttaagtcaatggttctttaatatctctaaattttcagaggaactattagaaggtctctctaatcttgataactggccaaataaagtaaaaactatgcaaaaaaattggataggaaaatcatttggttgtgaaattgattttgaaatcgagggtgatattccattaaaaacagttaaatgttttactacaagaccagatactctttttggattttcttttttagctttatctattgatcacgaaatttcaaaattttatgagaaagataaaaattttattaaattcaaagaagaatgctcaaaaacaggtacaacagaggaagcgatcgccataggggaaaaaattgggtttaaaaccaatttatctgcagtgaatccttttgataaaaatcaaaaagtaccaatttattttgctaacttcgttttgatggattatggatttggagcagtttttggctgtccaggacatgatcagagagattatgattttgcaaatgaaatataat

SEQ ID NO: 304078 - DNA, 855 bp, Unknown
  Bacterial polypeptide expressing nucleotide sequence isolated from the Sargasso Sea
aaagattttttttagaactacttgaaaaaaaattagtttataggaaagaaaattatgttaattgggatccagttgatgagactgttcttgcaaatgagcaagttattgatggaaaaggctggcgttctggagctactgtgcaaagaaaaaaattaaaccaatggttttttaatatatctaaattttctcaaaatttattggatggattaaatgatttaaattcttggcccaataaagtgaagattatgcaaaaaaattggattggtaaatcatttggatgtgaaattgattttaaagttgaaggagaactaccaattaataatatcaaatgctttactacaagacctgatactctttttggtttttcttttttggccttatcagtagatcatgaagtctcaaaattttataaaaacgatcctaattttataaagttcaaagaagaatgctcaaaaaccggaactactgaggaggcaatcgcagtaggtgaaaaaattggctttaaaactagccttatggcaacaaatcctttaaatccaaaaagtaaagtacctgttttttttgctaattttgtattaatggactatggatttggagcagtttttggttgccctgctcatgatcagcgagatttcgatttcgcaaaaaagtataaccttgatataaaaactgttgtaaaacctaatgatgaaaaagatgacttccaagttataaacaaggcttatcctgatcctggaattattataaattcgaattttttaaatggacttatcgcaccaaaagattctgtgattgaaacaattaaaattttagaagaaagaaaattaggcaaaaaaaaaattaattttagataaa

SEQ ID NO: 304079 - DNA, 736 bp, Unknown
  Bacterial polypeptide expressing nucleotide sequence isolated from the Sargasso Sea
aaaaaaatgggaaaaaaataaggagtttaaaagccaagtaaataaaaagaaaaaaaaattttattgccttgaaatgtttccatacccatcaggcaaaattcacatgggtcacgtgcgaaattatacaattggggatgtgttagcaagatacaaaaaactgcaaggatataatattcttcatcctatgggttgggactcgttcgggcttccagctgagaatgcagctaagcaaaataaattagatccgaaaacctggacggaaaaaaatatttctgtgatgaaaaaccaattaaaaaagttaggtctttcaattgattgggaaagagaaatttcaacatgttcatctgattattataaacatcagcagctttttttcttagagctatataaaaaaggacttgtttatagaaaggaaaattatgttaattgggatcctgtagacgaaaccgtattagctaatgaacaagttattgatggaaaaggttggagatctggagctactgttgagagaaaaaaattaaatcaatggttttttaatatttcaaaattttctaatgaattactaagtggcctaaataaattaccaaattggccaaataaagttaaaactatgcaaagaaattggattggaaagtcttatggctgtgaaatagattttaaaataattggaaacagttctattaaaaaaattaaatgctttacaactcgtcctgatactttatttggcttttctttt

SEQ ID NO: 304080 - DNA, 864 bp, Unknown
  Bacterial polypeptide expressing nucleotide sequence isolated from the Sargasso Sea
tgggatccagttgatcaaacggttctggctaacgaacaggttatagatggtaagggatggagatctggagttccagttgaaagaaaaaaactcaaccaatggttttttaatattactaagttttcaaaagaattgcttgaaagtttaaataatctttctgagtggccaaataaagttaaaattatgcaacaaaactggattggcaaatcatttggctgcgaaatagggtttaaaattgaaagtcaaaaaaatattgatgaaatcaagtgctatactactagaccagatactctatttggtatgtcttttttagcattatcgattgatcatccaattgcacaattttatgagaatgatccaaaatttagagattttaaaaatgaatgttcaagaactggtacaacagaagagtcaattgcagtggcggaaaagcttggtttcaaaacagatttactggcaatcaatcctttagatgaaacaaaaaaagttccggtgtactttgcaaattttgttttaatggattatggattaggagctgtctttggttgtccagcacacgatcaaagagacctagattttgctataaaatataatttaaaagtgactccagtagttaaacctgaaggggaacaatcttgtgaaataaaagagaaagcatttacaggagttggcgaactatttaattctgattttctaaatggtcttaaagttccaaatgaatctatttctaaaactatagatcatcttgaagaaaataaaataggagttcgaaaaacaaattataggcttaaagattggggcatttcgagacaaagatactggggatgtccaattccaatagcatatgacgaaaacaatgagcca

SEQ ID NO: 304081 - DNA, 758 bp, Unknown
  Bacterial polypeptide expressing nucleotide sequence isolated from the Sargasso Sea
tacaaaaaaaaatgacgctgctgttttagataaaaaaaaaaaaaaattttattgcttagaaatgtttccatacccatcaggaaaaattcacatgggtcatgtaagaaactatactattggagacgttctagctcgatataaaaaactacaaggtttcaatgttttgcatccgatgggttgggactcatttggcctgcctgctgaaaatgcagcacgggaaaataatcttcatcctaaagaatggaccaaaaaaaatatagagaccatgaagaaacaattaaaacttctaggtctttcattagattgggatcgagaaatatctacttgtgatcctaaatactacaaacatcaacaagaattttttttggagctatttgaaaaaaatttaatttacaaaaaagatacatatgtaaattgggacccagctgaacaaacagttttagctaatgaacaagtaattgatggaaaaggttggcgctcaaacgttgcggtcgaaagaaaaaaactctcacaatggttttttaatatcaaaaaattttcacaaaatttgttagatgaattggaaaaattaaaaaattggcctgataaagtcaagctaatgcaaaaaaactggataggaaaatcttttggttgcgatataaattttcaaattgataaaaaaaatagtaaggaaaaaataaaagtttttacgacaagaccagatacgatatttggagcttcgttcattgcactttctattgatcaccccaatttctaaa

SEQ ID NO: 304082 - DNA, 769 bp, Unknown
  Bacterial polypeptide expressing nucleotide sequence isolated from the Sargasso Sea
aatatccaagtcatgaaaaatcaactcaaacaaatgggtttatcatatgactgggaaagagaatttgcaacttgcagcccagattattacaaatttgaacaaaaaatgtttttggatttttttaaagcaggaattgcttataaaaaagaaactgttgttaattgggatccagttgagcagacagtcttagcaaatgaacaagtcgtagatggacgtggttggcgttcaggagtagaagtagaaaaaaagaaaatgaaagggtggtttcttaaaatttctgattttgccgaagacttgcttaatgaaattgacaacttaaaagaatggccagatagagtaaaaattatgcaaaggaattggattggtaagagtattggcgccactataaatttctcaataaacaactcaaaagatataattaaaatttttactaccaggccagatactatttttggggctacgtttattgctatttctccacaacatcatctatccaaagaaattgcaaaaaatgataaaaaagctaaaaattttataaaattttgtgaaaaacagtctaacagagaagcagatattgaaaaagccgaaaaatttggctacgaaactgatcttaccgtttcacatccatttaaaaaagaggtgaatttaaaaatttttatagcaaattttgtgttgatggactatggaactggggctatatttggctgccctgcccatgaccaaagagattatgattttgcacaaaaaatactcattagaaattatatct

SEQ ID NO: 304083 - DNA, 766 bp, Unknown
  Bacterial polypeptide expressing nucleotide sequence isolated from the Sargasso Sea
aacggcgtgccgcccgcgaagtggacctacgacaacatcgactacatgaagggccagatgcagtcgatgggcctcgcgatcgactggtcgcgcgaaatcgcgacgtgcaagcccgactactacaagtggaaccagtggctgttcctgaagatgctcgagaagggcatcgcgtacaagaagacgggcaccgtgaactgggacccggtcgaccagaccgtgctcgcgaacgagcaggtgatcgacggccgcggctggcgttcgggcgcgctcgtcgagaagcgcgagatcccgatgtactacctgcgtatcacgcagtacgcggatgagctgctgaacgacctcgacggcctcggctggcccgagcgcgtgaagatcatgcagcagaactggatcggcaagagcttcggcgtgaacttcggcttcccgtatgaactcgacggcgagaagaagctgctgcgcgtgttcacgacgcgtgccgacacgatcatgggcgtcacgttctgcgcgatcgcggccgagcatccgctcgccacgcgccttgcccaggacaagcccgagctgctcgcgttcatcgacgaatgcaagcgcggcggcgtcgccgaggccgacgtcgcgacgatggagaagaagggcgtcgcgacgggcttctcggtcacgcacccgctcaccggcgagccggtcgaggtgtggatcggcaactacgtgctgatgagctatggcgaaggcgcggtgatgggcgtgccgggccacgacgagcgcgatttcg

SEQ ID NO: 304084 - DNA, 916 bp, Unknown
  Bacterial polypeptide expressing nucleotide sequence isolated from the Sargasso Sea
gacagaatctctgatgtaaaatctgttacaggggtttttacaggttcttatgcaattcatccattgacattgaaaaagattcctatatgggtttcagactatgttattgctagttatggtactggagctgtaatggccgtaccatcaggtgatcaaagagattatgattttgccaagaagtttaacttagagattaaaaatatatttaaaggaattgatatttctaaatcagcttttgaagaaaaatctaattttactctagaaaattctgactttctagataatctatctttttctgatgcagtagataagattattctggaaatagaaaaaaaagatattggaaaatcaaagattcaatataagttaagagatgcaattttcagtagacaaagatactggggagaaccaataccaatttattatagaaatagtgaacctgtcgctttaagtttatctgacttgcctcttgagcttcctgaggtagataattttctgccaacaaaaaatggtgattccccattaggaaattccaaaaaatgggcatgggacttaaagaataaaactgtagtagaaaataatttaataaatgatagggatattttcccattagaacttaatactatgcctggctgggcagggagttcatggtatttctatagatatatggattcagcgaataaagatttctttgcttcaaaagaggcaatagattactggaagtgtgtagatatttaccttggagggagtgagcatgcaactggacatcttctatattcaagattttatcaaaaatttttgtttgacctaaatattctcccaattaatgagtacgctagcaaattgattaatcagggaatgattcttggaaactcatcatttatttacagagagagagggactaataacttttatt

SEQ ID NO: 304085 - DNA, 256 bp, Unknown
  Bacterial polypeptide expressing nucleotide sequence isolated from the Sargasso Sea
aatggattatagcccaaaaaaaatagaaccttattggcaagatttgtggtctaaagaaaaatcatttgcctctgagaaatctgataaaaatttaccaaagaaatatatactggaaatgtttccttacccttcaggaagaattcatatgggccacgtcaggaactatacaataggtgatgtgataactaggtacagaataaccaaaggtgataatgtattacatcctatgggatgggatgcttttggtatgccagca

SEQ ID NO: 304086 - DNA, 339 bp, Unknown
  Bacterial polypeptide expressing nucleotide sequence isolated from the Sargasso Sea
aatgcttgaagaacaatataatccagaaaaaattgaatcaagtattcagtctgaatgggaaaagataaataaatataaggctactccagatgatagagagaagtattattgcttgtctatgttcccttatccctctggaaaacttcacatggggcatgtaaggaactatacgattggcgacgttatttctagatataaaagaatgagaggattcaatgtcttccagcctatgggctgggatgcctttggactgcctgctgaaaatgcagctattcaaaataaagttgatccaaaaagttggactgagcaaaacatagagaatatgaagttacagcttaa

SEQ ID NO: 304087 - DNA, 787 bp, Unknown
  Bacterial polypeptide expressing nucleotide sequence isolated from the Sargasso Sea
gattttgcaaataaatataatttagaaataatcccagttataaatccatctgataatatcgaatttgataaaaaaacggcttacactgggagtggcaaacttattaattctcaatttttaaatgatctttctattgaagaagctaagaaagaaattatcgaaagagtggaagatctccatataggaaagaagactactaactttagacttcgtgattggggtgtctctcgacaaagatattggggatgtccaattcctattatgtatagggaagacggcaaagtaattgaagttcctgaggaccaactgccattggaattaccagatgatattgacttaagcatacccggcaatcctcttgacaatcatccagagtggaaatttacaaagtgtcctgaaacaggaatgaatgctgtaagagaaacggacacacttgatactttcgtcgactcagcatggtattttttaagattttgttcaccgctcgagacaaaagagccttttaacttagatgaaattaattattggatgccagttgatcaatacgttggtggtgtcgagcatgccatcctacatttattgtactctagattttttactaaagcactcgatatcaaaggaatggatgagccttttgatagtctatttacgcaaggaatggtttgtcatcatacgtttcaaaatgaatctaatgcctgggtttatcctgacgatgtagagaagaaagactcaaagtactttcaaatatccactggtgaaccggttacaatgggagaaattgaataga

SEQ ID NO: 304088 - DNA, 805 bp, Unknown
  Bacterial polypeptide expressing nucleotide sequence isolated from the Sargasso Sea
gaagaagatatgccgattgaacttcctgagcttgataaaaattcttcaccaatgccattaagtcaaaataatgaatttataaatattgaagatggtcttattagagagagtgatacctttgatacttttatggattcttcttggtaccacgcaagatttacgtctgcaaataatgataatgaaatctttgatgaaaactctaaatattggcttccagtagatctttatataggtggcattgaacatgcaattcttcacctactatattcaagattcttccataaagctttgagagatattggattggtcgaaggagatgaaccttttaaaaaactacttacacagggaatggtgctgaaggatggagcaaaaatgtcgaagtccaaaggtaatactgttgatccacaatcttatattgaaaaatatggagcagatactattcgactttatatgatgtttacttcaccacctgagcaaagtctagagtggagtgagtcatcagttgaaggggcatcaagatttttaagaaaaatatggggtctacttgatgaacgtaaatataatcaatttgataaaaagcctgattttaacaaagaagaaatgtctgttagaagaaaatctcatgcaaccttgaagaaagttgaaaatgattatgagattaggtttgcttttaacactgcaattgcagcaataatggagcttttaaattttatacctgataactataaaaatgaaaatgctaccgatgcccaaaaatattgtttagacgaatcaataatatttatattaaaaatgctttctccga

SEQ ID NO: 304089 - DNA, 703 bp, Unknown
  Bacterial polypeptide expressing nucleotide sequence isolated from the Sargasso Sea
ccttttaaaaaagacattaaactcccaatttatatagctaatttcgttttaatggattacggaactggagctatttttggttgtcccgcacatgatcaaagagacttggattttgcgaataaatataaacttaatgtactacctgttgtcagaccaaaaaatattgatccaacaaattttaaaattagtaatgaggcttacgtagaagatggaatattatttaattcggaatttttaaataacctaacagttgatatggctatagaaaaagcaatagaatttataacaaaaaaaaaatttggagaaaaaaaaataacatttcgattgaaagattggggtgtatcaagacagcgatattggggttgccctattccaattgtgtataatcaaaagggtgaagcattaccagttgatagaaaagatttacctattttattgccagaagatgttgatcttaatgtgaaaggaaacccattagaaaaacatcctacgtggaaatttgctaaactttcttctggagaaaaagttactagagaaactgatacacttgatacttttgtagattcttcctggtattttttaagattttgctctcctaaatataaaaaatacggatatgaaattaaggatattaactattggatgccggttgatcaatacattggtggagttgaacatgcaattttgcatttactttattcaa

SEQ ID NO: 304090 - DNA, 892 bp, Unknown
  Bacterial polypeptide expressing nucleotide sequence isolated from the Sargasso Sea
gaaagcgtcaaagaattacagcgaaattggattggtaagtctgagggatgtgaagttgactttaagataaaaaatataaatcaaaatattactgtatatacaaccagacctgatacattatttggtgctacatatatggtacttgcgcctgaacatcctttggtagatatgttggtctcagaaaatcaagtctccatcgtaaatgattataaaaagttatcatcgctcaaatcagattttgacagaggtgaattaaacaaagaaaaaactggtgttgctacaggggctagtgcaataaatcctgttaatggccaagtaattccaatttggatagcagattatgtattaatgagttatggcactggtgcaataatggccgttccagctcatgatgatagagactacgaatttgcaaagaaattcaaactacctattaaagaagtagtttcaggaggaaatattgaactagaggttcacaaagatacatcaaatggaacgttaattaattcttcaaatgataaaggtttgaatttaaatgacctaaatgtacaagatgctattcgggttgtggttgattggttagaaaaagaaggtttgggaacgagaaaaactcaatacaaacttagagattggcttttttctagacagagatattggggtgagccaatgccaatcattcataataatgatggttctattaatcctttaaaggattcagatttaccgctcacacttccagagattaaaaaatatgaaccatcaggtacaggcgagtcaccgttatctattataactgattgggtcaatgtagatggagggaaaagagaaacaaatacaatgcctcaatgggcaggctcatgttggtattatcttagatatatctcaccacata

SEQ ID NO: 304091 - DNA, 706 bp, Unknown
  Bacterial polypeptide expressing nucleotide sequence isolated from the Sargasso Sea
catgcaggattacgttccaaaagaaattgaggcaaagtggcaaaaatactgggaaaagcataatttattagattatgattttgattcagaaaatccaaagttttacatgctgactatgctcccctatccatcaggagatctccacattggtcactggtatgccatggcaccttcggactgctatgcccgttttatgaaaatgaaaggttacgaagtattttttccaataggtttcgatgcttttggacttcctgctgaaaatgcagctatcaaaaacaatattcatccaaaatcatggacttatgctaacatcgaacgcatgcagaagcagcttcgttctatgggaaatatgtttgcctggaaaaacgaagttgtctcatgtgatccggaatattacaaatggagccagtggtttttccttaggatgctggaatcggatttggcttatagagaatatgcacctgttgattactgtaatcattgccaaactactttagcacgggaacaagtttggggtgaagaaagggtatgtgaaagatgtaactatccagttataaaaaaagacttaaatcaatggaagttgcgaatcaccaactacgctgatgaattgcttgatttcgaaggactggattggcccgaacgtgtgcgttcaatgcaggcaaactggattggacgcagtgagggcgttgagtttaccttaaaaata

SEQ ID NO: 304092 - DNA, 825 bp, Unknown
  Bacterial polypeptide expressing nucleotide sequence isolated from the Sargasso Sea
atcaaagtatttttctgaaaatgaagaatttcaaaaatttaaaaatgagtgttcaaaaactgggacgactgaggaagcaattgctataggtgaaaaaattgggtttaaaacaaatttaatggccattaaccctcttaacaaaagccaaaaagtgccagttttctttgcaaatttcgttctgatggactacggattcggagctgtttttggatgtccagcacatgaccagagagattttgattttgcaaaaaaatataaactaaatattaaaacagtagttagaccttctgatgaggaaaatgattatatagtgaagaatgaggcctacaccggctcaggagtgatgataaattctgaatttctgaatgatcttaaagttccaaatgaatcaatctcaaaaacaattgatattttagaaaaaaaaaaaataggtaaaaagaaaataaattttagattaaaagattggggagtttctaggcaaagatattggggttgtccaataccaattgcttatgatgaaaatgaaaaagtaatttcaataccaaaaaaacaattacctgtaaaactccctgaaaatatagatataaatacaaaaggtaatccactagacgctgtagatgaatggaaatatattgagataaatggcaaaaaatatagacgagagaccgatacattagacacatttgtttgttcatcatggtactatctaagattctgttcaccaaaagaaactaattatggatttaagaaagatgaaatagattattggatgccagttgatcagtacattggtggaatagagcacgcgattttacacttgttgta

SEQ ID NO: 304093 - DNA, 876 bp, Unknown
  Bacterial polypeptide expressing nucleotide sequence isolated from the Sargasso Sea
actggttgtaaaaccaaataatgaaaatgaaaattttaaagtaaccactgaagcatacgctggaccaggtattttaattaattctcactttctaaatggattaaaggcaccagatgactcgattattgaaacaattaaaattttagaagaaaaaaatttaggaaaaaaacaaattaattttagactaaaagattggggcatatcacgtcagaggtattggggttgtccaattcctataatttatgacaaaaatgataaccctcaccctattccaaaatcaaagttgccagttaagcttcctgaaaatattgaacttaacgttaagggaaatccgttggatagtgttaaaaattggaaagaaattgagatagatggaaaaaaatttacacgtgaaactgatacactagatacatttgtgtgttcttcttggtattatcttagattttgttcgccgaacgaaaatgaatatggttttaaaaaagaggaaatcgattactggatgccagttgatcaatacataggtggtattgagcatgctatcttgcatttactttattcgagattttttatgcaagccctttcattcaaaaataagaattttgagttattagaaccttttgagggattatttactcaggggatggtttgtcatgaaacatataaagatccaaataataattggattagtcctgatgaagttgtaaatattgaaggagttaaatatcttaaaaaagacaaatctataaaagtaactataggtgcatctgaatctatgtcaaaatcaaaaaaaaataccattgatcctgaagatattatctttaactacggagctgactcagcaaggttatttatattatcagacagccctccagaaaa

SEQ ID NO: 304094 - DNA, 709 bp, Unknown
  Bacterial polypeptide expressing nucleotide sequence isolated from the Sargasso Sea
aaaaatttaggatctaaaactattaattttagattaaaggattggggagtttcaagacaaagatattggggttgtccaataccagtggcctatgacgaaaacggagaagttcataaaatcccagaatcaatgttgcccgttgaattaccacataacataaacttaaatgttaaaggaaatcctctagatcatcaaaatcattggaaagaaatagtagtagatgggaaaaaattagtgagagaaacagataccttggatacatttgtttgttcctcttggtattttttaagattttgctctcctgatgaaagtgattatggttttaaagaagaagatataaaatactggatgccagtagatcaatatattgggggtgttgagcatgctatattacatctgctatattcaagattttttatgagagcaatttctcaaaacaattacaaaattaacattgaagagccttttgatggtttatttactcagggaatggtttgtcatgaaacttataaagatactgataataattgggtaagtccagaagagatagagacaattaatggaaaaaaatgtttaaagattgataactcaaaattggtaaaggttggtccatcagaatcaatgtctaaatcaaaaaaaaatacaattgatccagaaaaaattatttcaatctatggagctgacgctgctagattgttcattttatctg

SEQ ID NO: 304095 - DNA, 859 bp, Unknown
  Bacterial polypeptide expressing nucleotide sequence isolated from the Sargasso Sea
ctcgccccgtgaaatagaagccgccgcgcagtcccactgggacgcgcagaaatccttcgtcgtcagcgaacagccgggcaaggacaccttctactgcctgtcgatgttcccctaccccagtggcaagctacacatggggcacgtgcgcaactacaccatcggtgacgtgatcgcgcgctaccagcgcatgcagggcaagaacgtgctgcagccgatgggctgggacgccttcggcatgccggcggaaaacgccgcgatgaagaaccaggtggcgccggccaagtggacctacgagaacatcgcctacatgaagtcccagctcaaatcgctgggtctggccattgactggacgcgcgaagtcaccacctgcaagccggactattaccgctgggaacagtggctgttcacccgcctgttcgaaaagggcgtgatctaccgcaagaacggtaccgtcaactgggacccggtggaccagaccgtactggccaacgagcaggtcatcgacggccgtggctggcgttcgggcgcgctgatcgagaagcgcgaaatcccgatgtactacttcaagatcaccgcctatgccgaagagctgctgagcagcctggatgaactggatggctggcccgagcaggtcaagaccatgcagcgcaactggatcggcaagagcttcggtgccgacatcgtgttcgactacgacgtcggcagcatcggcatcgaaggccagctcaaggtctattcgactcgacccgataccctgatgggcgcgacctacgtcgccgtggccgccgaacacccgctggcccaacgcgctgccgcaggcaacccgcagatcgccgcttttatcgccgagtgcaaggcc

SEQ ID NO: 304096 - DNA, 808 bp, Unknown
  Bacterial polypeptide expressing nucleotide sequence isolated from the Sargasso Sea
attatatgcaagattttggcatcatgttttacatgatttaggtcttgtctcgacgaaagaaccgtttaaaaaattatacaatcaaggaatgattttaggtgatgatggcacaaaaatgagtaaatcaagagggaatgtggtcaaccctgacgatataattaatgaatatggtgcagattctatgcgattgtatgaaatgtttatgggtccgctaaataagtcaaaaccatggaatactaaaggactacaaggatgttatcgatttattaaaaaattatggggtattatcgtcgatgaagagggtaatttatcctcaaaaattactgaagatgtcactccagataaagaaacattacatcttcatcatactactgtaaaaaaagtaggagatgacattgaacatcttcactttaatactgcagtttctcaattaatgatttattgtaatcatttgcaaaaatgcgaaaatatatcaaaagatttaattgcagatcttataaagatagcagcaccgtttatgccacatctctcagaggaattctggtcattattagggaataaaaacactcttgcatatgaagaatggcctggatatgatgaagccttaactcagagcgatgaagtcactgttgcagtacaaataaatggaaaattaagagccaatattactttagcaaaagattcagatgaaaaaacagctgtagatactgcattatccgtcgagaaagtgtcaaattatactagcgcaggatcaattgttaagacaatctatgttccaaatagattattaaactttgtcgtcaagtaa

SEQ ID NO: 304097 - DNA, 340 bp, Unknown
  Bacterial polypeptide expressing nucleotide sequence isolated from the Sargasso Sea
catggatcagtatgacgcatccgccattgaggctaaatggcaggcgcgctggaacgacggcgactgctttgccgccgagaccgggtcggaaaagcccaaatattacgtcctcgaaatgttcccctatccgtcgggacggatccatatggggcatgtccgcaactacgccctcggcgatgtcgtcgccagataccggcgtgcccgcggcttcaacgtcctccatccgatggggtgggacgcgttcgggcttccggcggaaaacgccgccatggaacgcggcgttcaccccgggcactggaccaccgagaacatcgccgccatgcgaacacagcttcgcggc

SEQ ID NO: 304098 - DNA, 840 bp, Unknown
  Bacterial polypeptide expressing nucleotide sequence isolated from the Sargasso Sea
tagagttgagcatcctttgatttctaataaacagattcctctgtttatagcaaattttgttttgatggattatggccttggtgcaatttttggttgtcctgcacacgatcaaagagatttagactttgctttgaattataatttagaagtaatacctgttgtgcgaccacataatgtgaaacaagaagagtttgaaataaaaaaaacagcatttactgaagatggtataattattaactctgattttttaaacggcttaagtatagataatgcaaaaacaaaaatactggattttctattaaaaaaaggacttgcaaaaaaaaaggttaactacaaactaagggactggggggtgtctagacagcgttattgggggtgcccaatacccgttttgtatagagaagatgggagtataacaactgtaccaaaagaagaattaccacttgccctacctgaattaaaaaaatttacaagcaagggaaatgttcttgaaaatcttgaaaactggaaacatacaacatgtccaataacagggctaaaagcaataagagacacagatacttttgatactttttttgagtcttcttggtattttttaagatattgtaacccaagatcagacaagccttttgtggaagaagatattaattattggttgcctgtagatcaatatataggcgggattgaacatgctattttacatctgctttactcaagattttttatcaaagcattgcgtgatattggtttggttagttttaatgagcctttcaagggtttgtttacccagggcatggttactcacaaaacatatatgaaaaaaagtggggagtgggtaag

SEQ ID NO: 304099 - DNA, 843 bp, Unknown
  Bacterial polypeptide expressing nucleotide sequence isolated from the Sargasso Sea
ttttaatatttcaaaattttcaaatgaacttctagaagatctttataaactcaccgagtggccagagaaagtaaaattaatgcagaagaattggattggaaagtctgttggttgtgaaattgattttgaaattaacgaatcaaaagaaaaagtaaaaatctttacaactcgtccagatactatattcggagccacttttttagctgtatctgttgatcatcctctatctaagaactttgaaaaagataaagattttattgaattcaaaaaaaaatcttctcaagtaggtacaactgaagaggctatagctaatgctgaaaaaattggttttgatactaaccttagagctaaacacccttttattaaaaataaaaaaataccaatttttgttgcaaactttattttaatggattacggaaccggcgcaatttttgggtgtcctgcacacgatcaaagagatttcgattttgctactaaatataaaattgaaatattgcctgttgtaaaatctgaaactgagaataaaggttctagcaaaaaaatgaagcaggcatatacaggtgatggcaaaataattaattcagaatttttaaataatttaaaaatagaagaagcaaaaaaaagaattgtagatgaaattgaaaggcaaaaaattggtaaaaaaaaaatatcatatcgtttaaaagattggggtatatctagacagaggtactggggatgtccaatacctatgatatatctaaaaaatggaaaagttattcctgtggaaaaaagtgaactaccaattaaattacctgacaatgttgatttaaactctaagggcaatccattagaaaatcatcc

SEQ ID NO: 304100 - DNA, 783 bp, Unknown
  Bacterial polypeptide expressing nucleotide sequence isolated from the Sargasso Sea
aagtggcaaaaaaaatggaatgaattaaacattttcaaagccaatattgattataataaacctaaatattacgtattagaaatgttcccatatccttcaggagcaatacatatgggacatgtacgtaattacactttaggtgaccttgtttccagatataagagggctcaaggttttaatgttcttcatcctatgggttgggatgcctttggattaccagcagaaaatgcagctattcaaaataacacccttccatctaaatggacatactcaaatattgaaattatgaaaaatcaactcaaacaaatgggcttgtcttatgactgggaaagggaattggctacttgtaatccaaattattataaatttgaacaaaaaatgtttttagatttctataaagctggaattgcctataaaaaagaaacagtagttaattgggatcctattgagcagacagtcttagctaatgaacaagtggttgatgggcgtggatggcgttcaggggtggaagtagagaaaaagaaaatgaaagggtggtttcttaaaatttctgattttgctgaagatttactcaacgaaattgataatttaaataaatggcctgatagagttaaaattatgcaaagaaattggattggtaaaagcgatggcgctactataagtttctcgataaatcattcagatgataaagttgaaatttttactactaggccagatacaatttttggcgcaaccatttattgctatttctcccacaacatccattatcataaaaatgccaaa

SEQ ID NO: 304101 - DNA, 900 bp, Unknown
  Bacterial polypeptide expressing nucleotide sequence isolated from the Sargasso Sea
actatttgatgccggtatcataagcacacctgagccttttaaaaaacttgttcaccaaggaatgatcttaggagaacttgagtatgcaaaatttgaagatgaggataacattccaatctctgctgatttcataagctctaacaaagatagccgtaccggctctgaggtcaaacgggtagtaatcagcgcagatgatgtgaaaaaagacggtgagcactttgtactagcgaatgatgcaagtattaaggtagaagctcgtgcccacaagatgagcaagagccgaggtaatgtagtaaaccctgatgaggtggttaaatcatatggagccgatgcttttcggttatatgaaatgtttatgggtcctctggaacaggtaaaaccctggagcacgcgcggcgtcgaaggtacctatcgattcctaaaccgagtatggagactaatggtaggtgatgaaaatggtgctcagttaagtaaagctgtttgtgataaaactccaaccccagaacaattgaaagttttacatcaaaccattttaaaagtgacaaatgacattcaggaattaagatttaatactgcaatttctgcgttaatggaatttattaatactgctaataaatgggatgtactaccacgagaaattgtaaatgactttgtgttgttgctttccccacttgcaccacatatagcagaagagctttgggagcgtcttggtaatactgaaacaattgcctatatgaaatggccagaatttgatgagaaatatttaaaaagtgatactgctgaagtaagtgttcaagtgaatggaaaaatgcgtagtcgtgtatctgttcctagtgatgccaccgaagcagaagcgttagctattgccaaaaatgatgaaaatgtagcaagacatattgc

SEQ ID NO: 304102 - DNA, 834 bp, Unknown
  Bacterial polypeptide expressing nucleotide sequence isolated from the Sargasso Sea
cgatacattagatacttttgtagattcttcttggtattttttaaggttttgttcgccaagtaaggatgattatggatttgatgaaaatgaaatgaaatattggatgccagtagatcaatatataggaggtgttgagcacgccattttacatctactttattcaagattttttatgcaagcattatcatttaaaaataaaaaaattaatattactgaaccgtttgaaggcctatttactcaaggtatggtttgtcatgaaacatataaagataatgacaataactgggttagtcctgatgaagtaattacaattaagggagaaaaatttttaaaaaaaaataattcaataaaagttgaggttggtgcatcagaatcaatgtcaaaatcaaaaaagaacacgattgatcctgccgatattatggaaaaatttggtgcagattctgttagactttttattttatctgatagtcctcctgaaaaagatgtgcaatggtcagacaatggtattgaagcttcttataaatttattcagaaattttggtttctacatagaaaaataatgaataaaattaatgaaaataataaaaatattgaaggaaaaaatttagaagtattaacaaataagtttgtaagggacataacaaataatttagacaattttaattataatatagcaattgcaaatattcatgaaatgtattcctcgttaaatagagaaatgaattacgattactcaaaagaaataatagaaaaaaattatttaaaaatattaatatgcttgttaccaattattccacatttgagtagtgaagctttggaagaactaaaaagtaa

SEQ ID NO: 304103 - DNA, 937 bp, Unknown
  Bacterial polypeptide expressing nucleotide sequence isolated from the Sargasso Sea
atgtctaagggagctttgataaagtttaatataaaagatactcaagaaagtcttgaggtatttacaactagagtagatacattatgcggagttagctttctcgccgtttctcctagccataatattctagataaaattgaaagtgatgtagttaaaaattttataataaagtgtaaagcattaaaggtttctgaagagacagtaagtaatatagaaaaggagggtgtccgcacagatttagtggcgattaaccctataaatggaaatgagatacctgtatgggttgctaattatgttttatctgattatggttcaggttgcgttatgtcagtacctgctcatgatgatagagattatgagttttctataaaatataaattacccataaaacaggttattagaaacaaagatgataatggtggaattaattctgcttacactggtgatggagaactaataaattcaggaaaatataatggacttgattctgaaatagcaaaatcgaaaatcttggaagatttagcaaaagtcaactcgggagaatcaaaagttaattatagattaagagactggggtatatcacgtcaacgatactggggttgtcctattccagttttttatcataaggatggaacagtatatccagttcccgaaaaagaccttccagtagtcttacccaaagatattgatttaactaaagacgggaaccccttggataatcatccaacatggaaatatatcaaatgtccatatactggaaaagatgctattagagaaactgatacgtttgatacattttttgagtcatcttggtattatttaagatttctttcctcagattataaagatggcttgatggatgaatcaaaaaaagactggttgccagttgatcaatacataggaggaatagagcatgcgattttgcatttattatatg

SEQ ID NO: 304104 - DNA, 943 bp, Unknown
  Bacterial polypeptide expressing nucleotide sequence isolated from the Sargasso Sea
gatgccagttgatcagtatattggcggtgtagaacatgcaattttacacttactatattctagattttttatgcaagctttgagttttaaaaatcaaagttttatctcacctgaaccatttaagggtttattcactcaagggatggtgtgtcatgaaacttacaaagatgaagagaataaatgggtaagtccggatgaggtctttactgaaaacggaaaagattttttcaaaattaaagataaaaaaaaaatttcagttggaccatccgagtcaatgtcgaaatcaaaaaagaatacaattgatcctgaaaaaattatggaccaatttggagcagatgcagttagattttttatactatctgatagtccgcctgaaaaagacgtccaatggtctgagcaaggcatggtggcatcttttaaatttattcagaaattttggttattacataaaaaaattattgaggaaataaaaaacaaaaaaagagtgggtgaaaatactgggctaactatttatacaaataaattaattgaaagatatacatcaagcctagaaaaatttaacatgaatgttttgatagcatacttgcatgagacttataactttttaagtaaagagattgataattctaataataaagatttagaggaaaattatttaaaaattctgatcttaatgtttccaatagtcccacatttagtttcagagtgtctagaagatattaaaaaagattttaacatttcttggcctgttgctcaaaaaaaatatttgatggagaaatatgtaaatatagtaattcaaattaatggcaaaaaaaaatccctaattcaaattgaaaaagatctagatgaaaaaattcttttagaaaatgttataaaggataaaaaaatttcaaatttcttacaaaagaaaagtgtttttaaacatataattgtgaaaaaataa

SEQ ID NO: 304105 - DNA, 938 bp, Unknown
  Bacterial polypeptide expressing nucleotide sequence isolated from the Sargasso Sea
cagctgtgattgaataccgtgatgcagcatcacggaaaagtgatctcgagagaactgaattagcaaaggaaaaaacgggtgtatttaccggggcctatgctgttaatcctgttaatgaagagaaggtgccaatatggattgcagactatgtgctctctacttatggcactggtgcaattatggcagtgcccgcacatgacgagcgagatctagagttctctcaaaagtttgatctacctgttcgagtggttgtgcaagcgcctgagggtgaagaatcgttagggtatacaggagctggagagagtattgaaagtgggtttcttaatgggttagggacttctgaggctaagaagaggattgttgattggcttgaggaaaaaagaaaaggtaagcgtacgattaattttaaacttcgggattggctgtttagtcggcagcgttattggggggagccttttccaataatatggcgacatggtcgtcatgaggcgcttcaggaaagtgagcttcctttgcttccgccagagctcgatgattacaagcctacagtagagggggagccacccttggctcgtgcagtcgattgggtaaatttggctgatggtgctacacgcgaaaccaatacgatgcctcagtgggcaggaagttgctggtattaccttcgttatctagatgctcaaaatgatgaatgctttgcaggtaaggaggcggagaagtattggatgaacgtcgacttatacgtaggtggtgcagaacacgcagtgttacaccttctctacgcgcgtttttggcataaggtgatgtatgaccttggtcatgtgtcaacttcagagccgtttcagaagcttgtcaatcaaggtattattctcggggaagatgggcaaaagatgagcaaaagtcgcgggaacgtagtgaatcccgaatgttgttcttgctga

SEQ ID NO: 304106 - DNA, 778 bp, Unknown
  Bacterial polypeptide expressing nucleotide sequence isolated from the Sargasso Sea
atacctgtttttgttgctaattttattttaatggattacggaactggggcaatctttggatgcccagctcatgaccagagagattttgattttgcaaaaaagtacaaaattgaaataataacagtggtaaaacccgatgataataaacaaagtgttgaattaaaacaggcctatacaggcgatggaaaaattatcaattctgacattttaaataatttaagcattttagaggctaaaaataaaataattaatgagattgaaaaaagaaaaattggaaataaaaaagtctcttttagattaaaggactggggaatatctagacagagatattggggctgtccaattcccatgttatatcttaaggatggcaaggttgttccagttgataaaagtgaactaccggtaaaacttccagaaaatatagatttaaattccaaaggaaacccattagacaatcatccaacttggaaaaaaacaaagtataaaaagacgggtgagaatgccacaagagagacggatactttagatacttttgttgactcttcctggtattttctaagattctgttcaccaaaattagaagataaaccatttgatgagaaatcattaagttattggatgccagttgatcagtatattggtgggattgagcatgcaatacttcatttgttgtattcaagattttttatgagagcggtaaaactaaataacgaaaaaatcaaaattaaggaaccttttaaaggcctttttacacaaggcatggtttgtcatgaaacat

SEQ ID NO: 304107 - DNA, 811 bp, Unknown
  Bacterial polypeptide expressing nucleotide sequence isolated from the Sargasso Sea
acttaatcaatggttctttaatatttcaaaattttcagatgatttattagagggacttaatgaattaacaaattggccaaataaggttaaagttatgcaaaaaaattggattggaaaatcttttggttgcgagcttaattttaagatagagggtgatttaccagttgatgaaataaaatgttttactacaagaccagatactttatttggcttttcttttttagctctttcaccagatcatccaatatccaaacattacgagagtgatccagattttataaagtttaaagatgaatgttcaaagacaggtactacagaggaatctttggcaatggccgaaaagataggttttaaaactaatttgaaagcgattaatccgtttgaggaaagcgaaaaagtgccagtttactttgcaaattttgttctaatggattatggatttggtgcagtttttggttgtcctggtcacgaccaaagagattttgattttgccaaaaaatataaccttaatataaaaacagttgtcagacctaaagatcaagaaaattttgaggtaaaaacagaagcatttcccggtgagggcataataataaactcagaatttttgaacggtctcgaagcgccagaccaatcggtagttaaggctatagaaattttagaggaaagaaaaattggaacagagaaaattaattttagattaaaagattggggtgtttcaaggcagagatactggggatgtcctattcctattgcatataatgaaaaaggtgaaattaaaacaattccagaagatcaactaccagtaaaactt

SEQ ID NO: 304108 - DNA, 841 bp, Unknown
  Bacterial polypeptide expressing nucleotide sequence isolated from the Sargasso Sea
gatcagagagattttgattttgccaaaaaatataaattaaatattgagacagtagtaagaccttatgatcaagatgaagatttcaaagtagaaaaagaagcatacactggtgatggagtaataattaactcagattttttaaatggtttaaacgcacctaaagaatctgttatcgagatgattaatatttttgaagaaaaaagaattggaaaaaaaaaaataaatttcagacttaaagattggggagtttcaagacagagatactggggttgtccaattccgataatgtatgatgaaaatggagaggcacaccctataccagattctattcttccagcaaaacttccaattaatattgatttgaatgtaaaaggtaatccacttgatagtcaaaaggattggaaaaaaattgaaattgacggaaaaatttatactagagaaactgatacactagatacttttgtatgttcatcatggtattttttaagattttgttctccaaataattcgaatcacggttttgattatgatgatattaaatactggatgccagttgatcaatacataggaggagtagaacatgctatactgcacttattatattcaagattttttatgcaagcattatcctatgaagataataaatttaatttaactgaacctttcgacggcttatttactcaaggtatggtttgccacgaaacctataaagatccagataacaattgggtaagtcctgaagaaatagaggaaataaatggaaaaaaatatcttaaaaaagataatactaaagaaataaaaataggtccctctgaatcaatgtctaaatcaaaaagaaaca

SEQ ID NO: 304109 - DNA, 852 bp, Unknown
  Bacterial polypeptide expressing nucleotide sequence isolated from the Sargasso Sea
gctgattatggtagtggggcagtctttgggtgccctgcacatgacaaaagagataacgattttgcaaaaaaatatagacttgaaataaaaaatgtaattcaacaaaaagagaacctaatcaacaaagaagacccttacgagaagaaaagtttaaaagataaaatgataaattctgattttttagatgatttaaatccagttgaagcaaaagaaaaagtgattgaaaaacttgaaaaaataggtgctggtagaagaaaatcaaaatttaaaattcgtgattggggtgtctctagacaaagatattggggatgtcctattcctattatatatagggaggatggagcaattcttcctgttgatgagattgatttgcctgttgttttgcctaaggatgttgatctttccaaaccaggaaacccattaaaaaatcatccaacatggaaatatactaagtgcaaaaaaactggtttgaaagctattcgtgaaacagatacattggatacattcttcgattcatcatggtatttcttgagattttgttctcctcattctcaaatagaaccttttaacaaatcatctattgattattggatgcctgtggatcagtatgttggtggaattgagcatgcaattttacatcttttatattctcgatttttttgtagagccttaaaagattgtggttactctgttccaatagagccttttaaaaaattactaactcaaggaatggtttgtcatgagactttccaaacaaaggataaaaaatgggttgaaccggataatgtaattaaaaaaaaaaatgagtatttttcaatgtctggtgaaaaattaattaaaggacgtcagaaa

SEQ ID NO: 304110 - DNA, 815 bp, Unknown
  Bacterial polypeptide expressing nucleotide sequence isolated from the Sargasso Sea
gagcacatcagaagcggatatggaaaaagctgaaaaaaaaggtattgatacgggattgcgtgttaagcaccccctcgaccccgattgggaattaccagtatggattgctaactttattttaatggactacgggaccggcgcaatttttgcttgcccggcgcatgaccaacgagatctagattttgcaaggaaatataaattacctgtaatagatacttttttgagcctagaagatagttcaccagttgtagatgaagcatttatccctccaaagtcagaaaaggtgcaatgggtaaatcactttacagaaattgatatcgccactgggcaggaagcaattgataaaacaattgattttgctgaaaaaaataaatgggggaaaagtgtaacaaactttaggttgagagactggggcctaagtcgccaaagatactggggctgcccaataccagtggtgcattgcgaaaattgtggggtagttcctgaaaaaaaagaaaatttaccaattagtctaccagatgatgtaaaatttgatattccaggtaatcctttagaccgtcaccctacctggcgaaaatgcaaatgcccttcatgtggcagtcaagccctccgcgaaacggatacaatggatacttttgtggatagctcttggtattttgttcgttttacttcgcccaagtcggaaaaaccaacttcgagtgaagatgtaaattactggatgaatgtcgaccaatacataggaggggttgaacacgctatcttgcacctgctctattcaagattttttgcccgagccatggtgattactggtcatt

SEQ ID NO: 304111 - DNA, 949 bp, Unknown
  Bacterial polypeptide expressing nucleotide sequence isolated from the Sargasso Sea
catgatgatcgagaccatgaatttgctaaaaaatacaaccttcctatacgtgaagtagtttccggaggagacgttactaaagaggcctacactgataacgaaaatggattattggtaaattcctcaaacgataatgatttagaccttaatggtaaattggtttctgatgctatagctcatgtaatatcatggctatctgataacaaaaagggtgtaagcaaaacccagtataaactgagagattggttattttcaaggcaaaggtactggggagagccaattcctataattcataaggacaatggtgatattgttcctgttgagtactcggatcttcctctaactttacctcaagtagataaatatgaaccagctgacacaggggaatcacctcttgcaaacataaaagaatgggtagaggtcgaagaagggcgacgagagacgaataccatgcctcagtgggcaggctcctgctggtacttcctaagattcacagatcctaataatgatgaactgccttggggaaaagatgaggagtcctattggatgccagttgatttatatattggcggtgttgaacacgctgtccttcaccttctttactcaaggttctggcatcatgtattatttgatcttggtctagtttctaccaaagagccatttaaaaagctatttaatcagggtatgattcagggtgaggatggtcaaaaaatgagcaaatctcgtggaaacgttataaaccctgatgaggttgttatagacttcggtgccgacagttttcgtctttatgaaatgtttatggggccacttgataagtcgaagccatggagcacaaaaggattacaaggctgttataggtttctccaaaaggtatggcgcctttttaacaaccctgatattgcaattaaagaaaattgttcgaatgatgagacccaaagggctgctacaa

SEQ ID NO: 304112 - DNA, 832 bp, Unknown
  Bacterial polypeptide expressing nucleotide sequence isolated from the Sargasso Sea
aatgggagaaaattgtataagagaaactgatactttagatacatttgtagattcttcttggtatttcttaaggttttgttcacctaaaaataatgattatggttttaatgctcaagaaattaaatattggatgccagtagaccagtacattggtggggttgaacatgcaatattacatttattgtattcaagattttttatgagatcaattgattataaaaacaatgactttgatattaaagaaccatttgatggtttatttactcaaggaatggtttgccatgaaacttacaaggaccaaaataataattggataagcccagaagagatagaaataattgataaaaaatattttaaaaaaaccgacaagaaatctaagatcattgttggaccgtcagagtcaatgtctaaatcaaagaaaaatgtaatagatcctgaaaacataattaatgattatggcgctgactctgtaagattatttattctttctgatagtccaccagaaaaagatgttcaatggtctgagcaaggtatgatttcatcatataaatttgttcagaaattatgggttttacacttaaaaataaaaaataaattaactaaacaaaaaaataaggtgtctgatgatttagaattaaataaatttactaatcaattaatttataaaattactaataatttagaaagctttagttataatgttattattgctaatatgtatgaaacatacaattttttaactaaacatattgagaaagaaattaatctaaaagatttaatgtataattataaaaaaattttaactatattttctcctattattccacattta

SEQ ID NO: 304113 - DNA, 896 bp, Unknown
  Bacterial polypeptide expressing nucleotide sequence isolated from the Sargasso Sea
cgagaatgctgcattgaaaataatgtttccccaaaagaatggaccgttcaaaatattgacgcaatgcggggacagcttaaaagtttgggcttcagttacgactggaacagagagtttgctacctcatcagctgattactataagtgggaacaatctttttttaataaactctttgaccaaggactgatttataaaaaggaatcagaagtaaattgggatcccgttgatgaaacagttttagccaatgaacaagtgattgatggaaagggatggagatctggagcaacaatagaaaaaaagaaaatagatcaatattttataaagataacagattatgcagaaaagcttttggagaacattcaagagctcgatggttggcccaaccaagtaaagctgatgcaggaaaattggattggaaaatctctgggattagagttcaattttcaaattaaagatcataatgatgccttaagagtttttacaacaaggcctgatacaatttttggtgcaacatattgtgctgtggctatggatcatcccttagcaatctcattgatagaatcgaatccaaaaattcatgattttattaagaataataaaaatataacgacatcagaggcagcaattgcaactcaagaaaaactaggaatggatactgggctaaaagcaattcatcctttcacaagggaagaaattccaatttggatagcaaattttattttgatggactatggcactggagcagtaatgtgtgttccaggacatgatcaaagggattgggagtttgcgaaaaagtacaatattttgatcaaacaagttattgagtccgatcaagataatggagttagtgatggtgcatttgaagacaaaggtattctcattaattctaaacaatt

SEQ ID NO: 304114 - DNA, 607 bp, Unknown
  Bacterial polypeptide expressing nucleotide sequence isolated from the Sargasso Sea
atgagttccacatataagcataaattaatcgaaaaaattatccaaaaaaagtgggatgatgaaaatcgatatgtttctaaaatagataaaagagaaaaatattattgcctttcaatgtttccttatccttccggaaaactgcatatggggcatgtaagaaactatacaattggagacgttatttcgagatataaaagaatgcaaaatcttaatgtttttcaacctatgggatgggatgcgtttggattacctgctgaaaatgctgccatagaaaacaaagttagccctcagaaatggacaaatgaaaatattagtaatatgaaaacacaactaaagtctttgggctttagttacgattggtcaaaagaattaagaacctgcgattcaaattactataaatgggaacagttaatctttaaaaaattctttgatgctggtttggtatataagaaaaaatcattagttaattgggatcctattgatcagacagtattagcaaacgaacaagttattgatggaaaaggttggcgatctggtgctcaagtagaaatgaaagaaattgatcaatggtttataaaaataactaattatgcagatgagttataag

SEQ ID NO: 304115 - DNA, 742 bp, Unknown
  Bacterial polypeptide expressing nucleotide sequence isolated from the Sargasso Sea
tgaaaaagcgaaaaaaggattcaatactggttttgtagtagatcatccttttattgaaggtaaaaaattgcctgttttcatagcaaactttgttttgaaagaatatggattaggagcaatttttggttgtccagctcacgatcaaagagatcttgattttgcaaatgagtataatcttgaagtaataccggttgtaaaacctgataacattgaagaggggtcttttaaaataaatactaaggccttcattgatgatggaaaaattataaattcaaaatttttaaatggactaaatatagaaaaggctaaaaataaaattataaatgaaatagaaagaaacaacataggaagaaaaaaaataaactacaagttaagagattggggtatttcaagacaaaggttttggggttgcccaatacccattatctacagagaggatggagaaatattaccagttgaagaaatagatcttccagtaaaacttcctgaaattaagaaatttaatgagtcttcaacagcattgaataatatttctggttggaaagaaactatttgtcctaaaactggaatgaaggcatatagagaaacagacacgtttgatactttttttgaatcttcttggtattatttccgatactgtaatgcaagattggaaaggcctttcgataagagtgatatagattattggttaccggtagatcagtatattggtggtattgagcacgctatattacatcttttg

SEQ ID NO: 304116 - DNA, 844 bp, Unknown
  Bacterial polypeptide expressing nucleotide sequence isolated from the Sargasso Sea
cgacgagccggcgaacagctgctgtgccaggggatggtactggctgacgccttctattacgttggtgaaaacggcgagcgcaactgggtttctccggttgatgccaccgtggagcgcgatgaaaaaggccgtatcgtcaaagcctacgatccgcagggtcgcgagctggtgtacaccggcatgagcaaaatgtccaagtcgaagaacaacggcatcgacccgcaggtaatggttgaacgctacggcgcggataccgttcgtctgttcatgatgttcgcctctccggcagatatgactctggaatggcaggagtccggcgttgaaggggcaaaccgcttcctgaaacgtgtctggaaactggtttatgagcacacgactcagggcccggttgccgcactggacgttgccagcctgagcgaagatcagcaggcgctgcgtcgcgatgtgcacaaaacgatcgccaaagtgaccgatgatatcggtcgtcgtcagaccttcaacaccgcgatcgccgcgatcatggagctgatgaacaaactggcgaaagcgccgcaggaaaacgaacaggatcgcgcgctgatgcgtgaggctctgctggcggttgtgcgtatgctcaatccgttcaccccgcacgcctgcttcacgctgtggcaggagctgggcggcgaaggcgatatcgacaacgcgccgtggccggtcgccgatgaaagcgccatggttgaaaataccaccctggttgttgttcaagttaatggtaaggtccgtggtaaaataccgttccggtcgatgcaaccgaaaaacaggttcgtgcacgtgcgggtcaggaacatctggtcgcgaagta

SEQ ID NO: 304117 - DNA, 895 bp, Unknown
  Bacterial polypeptide expressing nucleotide sequence isolated from the Sargasso Sea
gatgcttttggcttacctgtctgaaaatgcagcaatggtcgaaaaaaagagtcctgaagattggacttataaaaatattgaaacaatgaaaggccaattaaaaagtatgggtttttcatttgattggaaaaaggaattggccacatgtcatccaaaatactacaaacacgaacaagagtttttcattgaaatgtttaataaagggctcgcgtataaaaaaaaatcagaggttaattgggatcctgttgacaaaaccgttctagcaaacgaacaggtaattgatggtcgtgggtggagatcgggggcagtagtagaaaaaaaacatttatcccaatggttcttaaaaaccagtaaatattcagaggaacttttagagagtctagaaggtttgagtgagtggccagaaaaagttaaaacaatgcaaacaaattggattggcaaatcggtaggtgcagaaattaaatttcaaatatcagatggtccactaaaagagagttatattaaaatttacacaacaagaccagatactatttatggtgcttctttcatagcaatttctccacaacacccatttacaatagaattagcaaagcaagataataatataaaaaactttataaaaaaatgtgaaaaatcaaatacagaaaatgataaattaggtttcgaaacaaaaataaacgttacgcacccaataacaaaagaccaacttcctgtttatatagctaattttgttttaatggattatgggcttggtgctgtttttggttgccccgcgcatgatcaaagggatctggattttgcaaataagtataatttaaatgtaattactgtagtgcaacctgatgaaaatttacaagagataacaaatacagcatttactggtgagggcaaatag

SEQ ID NO: 304118 - DNA, 830 bp, Unknown
  Bacterial polypeptide expressing nucleotide sequence isolated from the Sargasso Sea
cctttagataagagtctagaatggaaaaatataattattaatggaaaaaaatataccagagaaacagatactttagacacatttgtagactcttcatggtattttcttagattttgctcttcacaaaataatttatatggttttgaagaaaatgaagttaaatactggatgccagttgatcaatatattggaggggtggaacacgctattttacacttattgtactcaagatttttcatgcaagcacttaattataaaaatgaaaaatttaatcttgaagagccttttaaaggtttattcacacaaggaatggtgtgtcatgaaacatataaagatcacaatggtaattgggtaagcccagatgaaattattacgattaatagtgaaaaatttcttgaatctgaccgtactaaaaaaattaaagttggaccttcagagtcaatgtcaaaatcaaaaaaaaatactatagatcctgagaaaataattaagcaatatggagctgatgcggttagactattcatattatctgatagcccacctgaaaaagatgtgcaatggtctgaagagggaattgcagcatcttacaagtttattcaaaaactttggacacttaatatgaaatttttatctaatattaaaatgaatcaaaaagaaaataaaggtgaagagttagaaaaatataccaataaatttttaaaaaaaatgaccgaaaatttacagaattttaattacaatattattattgccaatatgcatgaaatgtattcatttttaattaaagatttagataaacaatataatcctaatactctggtagacaattacagtaa

SEQ ID NO: 304119 - DNA, 858 bp, Unknown
  Bacterial polypeptide expressing nucleotide sequence isolated from the Sargasso Sea
aatcagtgggatgcgaaatagattttcaaattttacaaactaaaaaaactataaaaatttttacaacacggccagataccatatttggtgctacttttttagctgtatcaaccgaccacccaatttgtgagaattttaaggagtcgaatgattttataaaatttagaaataaatgttcttcagtaggtactactgaagaagctatagctaatgctgaaaaaatcggctttaaaactaatctatttgcacaacaccctttcattgagggaaagaaaattccaatctttattgcaaatttcattttgatggattacgggacaggagctatttttggatgcccagcacacgatcaaagagattatgattttgcaaaaaaatatgcccttgaaatacttccggttgtaaaaccagaaaattcagatcaaaaaaatattgaaggagcatatactggggatgggactattataaattcagattttttaaatgatttatcgatttcaaaagcaaaagaaagaataataaaagaagttgagaataaaaaaatcggcggaaaaaaaattacttttagattgaaggattggggtatttccagacaaagatattgggggtgcccaatacctatgatttatcttaaaaacggaaaagttgtcccagtagataaaagcgagcttccagtaaaattgcctgaagatattgatatgaattacaaaggtaatccattggataatcacccaacgtggaaaaaaacgaagtataaaaaaacaggagaagatgctgtaagagaaactgatactttagatacatttgtcgactcttcttggtatttcataagattttgctctccaaagattagataaa

SEQ ID NO: 304120 - DNA, 798 bp, Unknown
  Bacterial polypeptide expressing nucleotide sequence isolated from the Sargasso Sea
aatggtttttaaaaataagcaaatactctgatgaattattaaatgatttagataatctaaataactggccaaataaagtaaagctaatgcaatcaaattggattgggaagtcaacaggagcagaaataaattttaaaatttcaggagaagatggttttataaaaatatttacaacaagaccggatacaatttttggagctacttttttagctgtttcttttgatcatgagttagttttaaataaattaaaagaaaataatattttattaaattttattaaggaatgcgaaaacttagatacagaaaaggtaaaaagaggttttaatactggtttaactgttgatcatcctttcatagatggcaaaaaactccctgtgtttgttgctaattttgttttgaaagaatatgggcttggagcaatttttggttgtcccgcacatgaccagcgagatttagattttgcaaatgagtatagtttagatgttattccagttgttaagccaaatgatattgaggagaatggtttaaaaattgataaaaatgcatacactggcgaaggaacaataataaattcaaaattcttaaatggattaaacataaaatctgcaaaagaaaaaataatagaagaaattgaaaagagaaagattggatccaaaaaaataaattttaagttaagagattggggtatttcaagacaaagattttgggggtgtccaatacctgtaatctatagagaagatggtaaaattttaactgttgaggaaagtgaattgccagtgaaattaccagaatattaaa

SEQ ID NO: 304121 - DNA, 826 bp, Unknown
  Bacterial polypeptide expressing nucleotide sequence isolated from the Sargasso Sea
gatacttttgatacattttttgaatcttcttggtattattttagatattgtgctcctcgatctaaaaaagcttttgaaaaaagcgatatagattactggctccccgttgatcaatatattgggggaattgagcatgcaattttacatctattatactcaagattttttacaaaagctttgagagatctaggttattttaatcttagtgagccttttaagggcttatttacacaaggaatggtaactcacaaaacctttaaggatgaaaaaaataactgggtaagccctgacaatgttaattttgaagggggggttgctgttgataaaaatggggttgaaattaaagttggaaaaatagaaaaaatgagtaaatcaaaaaaaaatgtaatagacccctctgatattatagaacaatatggcgctgatacagcaaggtggtttatgttatcagatagtcctcctgatagagatttggaatggacagagaatggcataacaggatcttttaaatttataaacaaaatatggggtcttgcaaaagatgctcaaattataaaaaatgattcatctaacaatgaattagacaatattattaacgttaaagtaaacgaaactataaaaaatgttacaacaaacattgaggcatttcactataacaaggcaattgcaaacatatatgagttaattaacctgattcaaaaaaatctttatagcagtaaattaagtcttgatagtattaagtacgctttcaaaacactagccttattgcttcaaccattcacccctcacattagtgaggagttatggaaactgctagaagaaaagg

SEQ ID NO: 304122 - DNA, 903 bp, Unknown
  Bacterial polypeptide expressing nucleotide sequence isolated from the Sargasso Sea
ttgcaaatcaaaagtgcttaaagagtctgatttgccactagaattaccagatgttgaaaaatatgagccaagcggaacgggtgaatcgccactatctaatattaaaagttgggttgaagtaaaagatgttaatgataatataataggacttagagagactaatacgatgccacagtgggccggatcctgttggtattaccttagatatttggatccatccaacgatgaaaaagcatgggattcagagaaagaaaaatactggatgcctgtagatctctatataggaggagcggaacatgcggtactccatcttttatattcacggttttggcatcatgtactatttgatcttgggctggtatcaaccaaggaaccgtttaaaaaattattcaatcaaggtatgatacttggccaagatggctcaaagatgagcaagtctagaggtaatgtgattaatcccgatgaaactgttgaaacgtatggttccgactctatgaggatttatgaaatgtttatggggcctctagataaagcaaaaccgtggagtactaccggtcttcaaggctgctctcgatttattaaaaagttatggtctatcttggtagatgatgaaggtgtgttatcgtcaaatgttacagagaaaaaagacgataaagaaacgcttcaagctctgaatatgatgatcaagaagatttcagataatttagatcaaatgcaattcaatacttgcgtttcagaattcatgatatttacaaatcatattcaaaaacttgattcgataaatattgatacaataagatcgtttattattattatgaatccatttatgcctcatttagcgcaagaattgtgggagttaattggcgaaaccaatgaacttacctatcaagggtggccagatta

SEQ ID NO: 304123 - DNA, 823 bp, Unknown
  Bacterial polypeptide expressing nucleotide sequence isolated from the Sargasso Sea
gcagaaaatgctgcaagagaaaacaatttagatcctaaagattggactgaaaaaaatatatctgtgatgaaatcgcagttgaaaaaattaggattatcaatagattgggatagagaaatatccacctgttcacctgaatattataaacaccagcaaatattttttttagaattatataaaaagggattgatatataaaaaagaaaactatgttaattgggacccagtagaccaaactgtgttagcaaatgaacaagtaattgatggaagaggatggagatctggtgcaattgtagaaagaaaaaaattaagtcaatggttttttaaaatctctaaattttctgatgaattattaaaaggacttgatcaactagaaaattggccaaataaagttaaggtgatgcaaaaaaattggattggaaaatctttcggttgtgaaattaactttaatatagagggtaatagttcaataaaaaatattaaatgttttaccactagaccagatacattatttggattttcttttttagcagtttcagcagaccatcctatagcaagattttacgaaaaagatgagaaatttcaagagtttagaaaacagtgttcaaaaactggaacaaccgaagagtcaattgcacaagccgaaaaaattggtttcaaaacaaatcttattgcaataaatccctttgataaaaatattaaggttccagtttattttgcaaattttgttttaatggattacggttttggagctgtgtttggatgtccagctcatgatcaaagagattttgagtttgcaaaaaaaatacaatcttccgatcaaa

SEQ ID NO: 304124 - DNA, 745 bp, Unknown
  Bacterial polypeptide expressing nucleotide sequence isolated from the Sargasso Sea
atggttctaaatgatggcgcaaagatgtcaaaatctttaggcaacacagtcgatccagaggagatgattcaaaattacggcgcagatacagttcgtttattcatgatgtttacctctcctccagagcaatctttagagtggtcagatacagctatcaacggctcatatcggtttttaaaaaagttatggaaactgataaaaacccatcaagactctataaaagatatttctggtatttcgtcgaatgaaaagtttaatggaaatcaaaataagttgagaagaaaaacgcatcaaacaatttcaaaggtcacagacgatatcggaagaaggtatactttcaataccgcaattgcagcagtcatggagcttgttaatgaagtttcaactttcaatgtcgatgatgaattggatcgccaagtaatcaaagaggcaattgaaagcatactattattgctttcaccgatcgttccacatatttgtcatcagctttggctggatattaatcatgatcagccgattattgatgctaggtggccaaaatttgactccagtctcctcaaaagtgaaacatcgctaattgtagttcaggtaaacggtaaattgagatccaagcttgaagttgatgcttcaattagtgaggatgaattaaaatcaatggcattgtctgacgaaaaggtagtgcgcttcattgatggaaatgagattaagaaaattatcgtgatacccgaaaagttagttaacatcg

SEQ ID NO: 304125 - DNA, 886 bp, Unknown
  Bacterial polypeptide expressing nucleotide sequence isolated from the Sargasso Sea
gatgtcctgctccgaccagagagattatgattttgctaagaaatataaaattgaaattataaaagtagttagaccaaaggaaagttataagattggcaaggataataaggcctttgatggtgatggaagtataattaattccgaatttttaaatggcctaaatatttctgatgcaaaagataggataattggtgaaatagaaaagaaaaaaataggtaaaaggaaaatatcttacagactaaaagattggggaatttctagacaaagatattggggttgtccgataccaatgatttatttaaaaaatggcgagattgtacctgtcgataaaagtgaattgccaataacgttaccaggggattcagatctaaattcgaaaggtaatccactggaaaaccatcctaattggaaaaaaactaaatataaaaagacaggcgaagatgccgttagagagactgatactctagatacttttgtggattcttcctggtattttattaggttttgctctccaaaattgaaggacaaacctttcgatgaaaggtccctaagctattggatgccagtagatcaatatattggtggggtagagcatgcaatattgcatttgctctattcaagattttttatgagggcaattaaattaaacaatgataggataaaagttaaagaacctttcaaaggtctttttacgcaaggaatggtatgtcatgaaacctacaaaaataaaaaaggaaattggctgagtcctgaggaaataaaagactttaataaatctgaaattatagttgggcctcccgaagcaatgtctaaatcaaaaaaaaatgttgtagatcctgaaagcatgataaaaatttatggcgctgatgctattagatggtttatg

SEQ ID NO: 304126 - DNA, 904 bp, Unknown
  Bacterial polypeptide expressing nucleotide sequence isolated from the Sargasso Sea
cccaattgatgaaacggttttagcaaatgaacaggttattgatggtagaggttggagatccggagcagtagtacaaagaaaaaagttaaatcaatggttttttaacatttctaaattttcggaaaatttattaaatggactagataatttatcaaattggccaaacaaagtaaaaactatgcaaaaaaattggattggaaaatcttttggttgtgagatcgattttaaaatagaaggtagcaaagatgtaaaatcaataagatgtttcactacaagaccggatacgctttttggtttttcctttctagcattatctgtggaccatccaatgtcaaaatattttgaaaatgatgaaaaatttgtcaatttcagaaaagaatgctcaaagactggcactacagaagaatcgattgcccaaggcgaaaaaattggctttaaaacaaatcttctagctattaatccattcgacaaagaaaaaaaggtccctgtattcttcgccaattttgtattaatggattacggtttcggagctgtttttggatgtcctgcacatgaccaacgtgatatggactttgctctaaaatatcaattagagattaaaacggtcgttaaaccgcttgataaagacaatacttttaaagtgaaagacaaggcttatgtagatggaggtgagataattaactcaaaatttttgaatgggttaaaagtcccagaggaatcaattattaaaaccattaatattcttgaaaaaagaaggctaggagaaaaaaaaataaacttcagattaaaagattggggtgtttctcgacaaagatactggggatgccctattcctataatgtacgataatacaggcaatcctcaccctgtgccaaaagagcttttacccgttaaattaccggaa

SEQ ID NO: 304127 - DNA, 898 bp, Unknown
  Bacterial polypeptide expressing nucleotide sequence isolated from the Sargasso Sea
gacgaaaccgtacttgcaaatgaacaagtaatagatggtaaaggatggcgatcaggagctacagtcgaaagaaaaaaactaagtcagtggttttttaatatctcaaaattttctcaagatttattggatggactagataaactagatcactggccaaaaaaagttaaaactatgcaaaaaaattggataggtaaatcttttggatgtgaaatagacttcaaaatagaaggggatttacctgttaaaaacataaaatgttttaccacaagacctgacacgttatttggtttttcttttttagcactatcaattgatcatgaagtctccaaattttataaagaaaacaatgattttataaagtttaaagaagaatgttcaaaaacaggaacaactgaagaagcgatagctgtaggagaaaagattggttttaaaacaaatttaaaagcaattaaccctctgaatcctaaacaaaaagttccagtatactttgcaaactttgtacttatggattatggttttggggctgtatttggttgtccagcacatgatcaaagagactttgattttgcaaaaaaatataatcttgatatcaaaacagtagtaagaccatatgataagggagacgattataaagttactgatgaagcattctctggagaaggagttttaataaactcaaattttttaaatggtattgaggcaccaaataaatctgtaatcaagacaatagaaattctagaagaaaaaaatttaggatcaaaaactataaattttagattaaaggattggggcgtttccaggcaaagatattgggggtgtccaataccagtggcatatgatgaggatggagaaattcataaaatcccaaactcaatgttacctgtaaaattgccacaaa

SEQ ID NO: 304128 - DNA, 778 bp, Unknown
  Bacterial polypeptide expressing nucleotide sequence isolated from the Sargasso Sea
ccaatgggatgggatgcttttggaatgccagctgaaaatgctgcgcgtgaaaataatttagatccaaaagattggactaataaaaatattttaacaatgaaaagtcaattaaagaagcttggactttcaattgattgggatagagaaatttctacatgttcagaagaatactacacacatcaacaattattttttttagagctatatgaaaagggattagtttatagaaaagaaaactatgtaaattgggatccagttgatcaaaccgttcttgctaacgaacaggttattgatggtaaaggttggagatcaggggctacagtagagagaaaaaaattaaatcaatggttttttaaaatctcagagttttcacaagaacttctggatgatttagaaaaattaaatgagtggccgaataaggtcaaagtgatgcaaaaaaactggataggtaaatcttttggatgtgaaatcgcatttaaaaccgaaggagatttaccaattgatgaaataaagtgtttcacaacaagacccgatactttgtttggtttttcatttttagctctttcagttgatcatgaaatttcaaaatattttttagaagataaaaagtttcaagaatttaaaaaagagtgtcaaaaaaccggaactactgaggaagcgcttgcaataggtgataaaattggatttaggacaaatttgatggcaataaatccgttgaagccaagcgaaaaagtacctgttttctttgcaaactttgttttaatggattatggatttg

SEQ ID NO: 304129 - DNA, 869 bp, Unknown
  Bacterial polypeptide expressing nucleotide sequence isolated from the Sargasso Sea
ttttgatagaacagaagtaaataaggataaaactggtgtttttactggaagctatgcaataaatcctttcagcaaagaaaaaattgaaatatggatagctgactatgtactgattagttatggaactggtgctattatggctgttcctggtcatgacgaaagagattgggagtttgcatcaaaatataatcttcctatagtagaagttgttgagggaggcgatgtatcaaaagctgcatacactgcaaaaggaaatgccaaaattataaactcttcaaacgataaaacattatccatggatggtttaagcgtagatcaagcaataaaggaagcaattttatttattgaaaaaaattcaatcggaaaagccactgttaattacaaattaagagattggttattttcaagacaaagatattggggagagccatttccattaattcataaagacgattcagtagagttaattcaggaaaaagatttgccagtaatgcttcctgaagttgaaaattataaaccatcagatgatggtaagtctccattatcattagttaaaaattgggttgaagtaaaagatgaaagtaataatattattggacttagagaaacaaatactatgcctcaatgggctggatcttgttggtattttttaagatttacagatcctaataacacaattgaagcatggtcaaaagaaagagaaaactattggatgccagtagatttatatattggcggacaagagcatgcagtacttcatttattgtacgcaagattttggcatcatgtattatatgatttagacctagtatcgactaaagaaccatttaaaaaactatataatcaaggaatgattttgggagatgatg

SEQ ID NO: 304130 - DNA, 877 bp, Unknown
  Bacterial polypeptide expressing nucleotide sequence isolated from the Sargasso Sea
gaaatgtttccatacccgtctggaaaaattcacatgggacacgtccgtaattatacattgggggatgtaattgcaagatacaaaagagctcaaggatttaatgtgatgcatccaatggggtgggatgcatttggtctacccgctgaaaatgcggcaattgaaaataaaacttcacctaaaacgtggacttacgaaaatatagagacaatgaaaaatcaattaaagcaaatgggtctttcaattgattggtctagagaaattgcaacatgcgataaactttattatcaaaaccaacaaaaactctttttaaaattttaccgcaagaatttaatttacaaaaaagagtctctcgtgaattgggatcccgttgagaagacagtgcttgcaaacgaacaagtgatagatggtaagggttggcgatcaggagctgaggtagaacagaagaaactatcacaatggtttttcaaaattactgactatgcggaaagcctccttaaagctttggatgatatgtctcgatggccagaaaaagttcgaacaatgcaaaaaaattggattggaaaatcttttggttgtgaaattgattttgtgatttcttcaaaattagatgaatttaatgatgaaaagttgagaatttttacaactcgcccagatacaatttttggagcaactttttgcgcattgtctccctttcacccctttgtggatagattgataaaacaaaatgaaacccttaataatcaagtcaacgaattgagatctcaaaaaattagtgaagagtcgatagccagaaatgagaaagttggaattcagacagatttatttatcaagcatccttttattgagaataaactgcttccagtctttatagcaaact

SEQ ID NO: 304131 - DNA, 842 bp, Unknown
  Bacterial polypeptide expressing nucleotide sequence isolated from the Sargasso Sea
ccaattgtttatgatcctgaaggtaatcctcatcctatccctgatgaacatttaccgtggcttctgccggatgatgttgaatataaacctaagggtacatcacccttaggatcgtcaaaagagctcattcaaagaacagaggatatttttggaaagggttggaggccagagattgatacgatggatacctttgtttgttcttcgtggtattatcttagatatgttgacccaaataataacgaatgtgctttttctgatgattccttaagttggcttcccgtcgatcattatattggaggtgctgaacatgcaacaatgcacttgttgtatgctcgctttattactaaatgtttaagagatttaggttttttaaatttcaatgaaccatttaaacatttgtttcaccagggcatgataaccaaagatggctcaaaaatgtcaaaatctaaaggaaatacagtctctccggatgaatttgtaaaaaagtatggttcagatacttttagatgttatttgatgtttatgggaccttttgatgaaggaggtgattggaatgataaaggtattacaggtatcgatagatttttaaagagatcttataggatgatagtaaatgatgagtgcaaagaccacaatgatgaggatgactacgtaataaactcaacaattaggtttgtatcagaaggattgtctggtatgaaatttaatacttctataagtaaactaatggagttagttaatcatttttacgataagggtttaagtatgacctataaagaagtatatgtgaaatttgttatcacccctttgctccacatccttcagaaggaatgtgggagaaa

SEQ ID NO: 304132 - DNA, 940 bp, Unknown
  Bacterial polypeptide expressing nucleotide sequence isolated from the Sargasso Sea
aaaaaagatgcagtcgtcaactgggaccctgttgataaaacagtactagcaaatgaacaggttatagatggtaaaggatggcgaacaggtgcaaatgttgaaaagaagaatttatcacaatggttttttaaaataactgattatgcagaggagttattaaaagacttagatgatttaaaactctggcctgaaaaagtaaagactatgcagagaaattggataggaaaatcaataggggcagaagttaaattccaaattgtccaaaataaaagatttttaaacatttacacaacacggcctgatacgatttacggggccacatttatagctgtatctgttaatcaccaaattttgaatgatttgattgataaaaaaaccttagaaaagattagaaatgaatatgatttagttaatgaagaaaaagaaaagcttggtgttaagttaaatataagttgtaaacaccctattttagacaaagaaataccagtttttgttgctaattttgtgcttgatacgtatggtgagggcgcaatttttgggtgtccagcacatgatgagagagattatgaatttgctaaaaagtattctttgcccataattaaagttatcgaatgtaaagatgaggaattgccttacacaggtgacggtaaagtaattaactctcccaaattaaatggtctaagtaaagatgaggccatcaaagaaatcatagaatattttaaagaggcaaatataggaaaaaagaaggtaaactataaaattagagattggggtgtttcgagacaaaggtactggggatgcccaatacctgtaatttattacgaggatggaacctatagagttctggataaatctgaattacccgttcttctgccatatgatattaaattagagggtaagggtaacgcattactaaataaggaaagtggagaaaaatagt

SEQ ID NO: 304133 - DNA, 766 bp, Unknown
  Bacterial polypeptide expressing nucleotide sequence isolated from the Sargasso Sea
aggcctgatactttatttggtatgtcttttcttgcagtatcaattgaccacccattgtcaaaattttatgaaaataaaagtgactttataaaatttaaagaagaatgtgcaaaaactggaacaactgaagaagctattgctcaagctgaaaaaattggatttaaaactagtttaaaagcgataaatcctttggataattctaaaacagtaccggtttattttgccaattttgttttaatggattatggatttggagcggtattcggctgcccagctcatgatcaaagagaccttgatttcgctaataaatatggattaaaagttttaccagtagtagaaccattgaataataatgataaaagttttttaataacaaaagaagcatatggcggtccaggaaaaataattaactctaattttttaaatggacttaatgtgcctgaagaatcaataataaaaacgatcgaatatttagaaaaaaataaccttgggaagaaaaaaattaacttcagacttaaagactggggtgtatctagacaaagatattggggatgtccaatacctattgtctacgatgaaaataataaaataaaaaaaataccaatagaaaatttacctgttgaacttcctgaaaatatagatctaaatacgaatggaaacccattagataatcaaaataattggaaaaatattactatagaaggtaaaaaatatacaagagaaacagatactttagatacattcgtagattcatcttggtattttt

SEQ ID NO: 304134 - DNA, 855 bp, Unknown
  Bacterial polypeptide expressing nucleotide sequence isolated from the Sargasso Sea
tgaaaaatttaaagagtttaaaaaacaatgttcgacaaccggaacaactgaggagtcaattgcaaatgcagaaaagattggatttaaaaccgaactaattgcgattaatcctttagataataatttaaaagttcctgtttattttgcaaattttgttcttatggaatatggattgggtgctgtatttggctgtcctgcacatgatcagagagatttagactttgcattaaaatacaaattaaaagttactccagttgtttctcctgaattaaataacgaaaaatttaaaatacaagataaggcttatacagggcctggttacatttgtaattcatcttttttaaatggattaaaatgcccagatgagtctattattaaaacaatagaatatcttgaaaatgaaaaattagggacaaaaaaaatcaattttagattaaaagactggggtgtctcgagacaacgatactggggctgtccaattccaattatgtatgatgccgagggtaaagctcacaaggttccaaaagaaatgctgcccgttgaacttcctaatattaatagattggaaccaacaggaaatccattggacaaagagattaaatggaaaaaggtaagccttaatggaaaaaattatgttagagaaacagatacattagacacatttgttgattcatcttggtattttttaagattttgttctccccataacaaaaattatgggtttgattttgaagaagctaaatattggatgcctgtagatcaatacataggaggtgttgaacatgcaatattacacttgctgtactcaagattttttatgcaagcgttatcttacaaaaataataatttaaaatt

SEQ ID NO: 304135 - DNA, 646 bp, Unknown
  Bacterial polypeptide expressing nucleotide sequence isolated from the Sargasso Sea
gcaaaaaaattggattggtaaatcatttggtgccgaagttaagtttaaaattgaaaattcgaaaaccatagattctataagctgttttactacgagacctgatactttatttgggatgtcatttttagctgtttcagtagatcaccctttatcaaaattttatgaaaatgatgaaaagtttaaagattttaaaaaaaaatgctcaacaactggaactactgaagagtccatcgctaatgcagaaaaaattggatttaagactgatcttattgcagttaatcctttagatgaaaatttaaaagttccagtttattttgcaaattttgttctaatggaatatggactgggtgctgtatttggttgtcctgcacatgatcaaagagatttagattttgccctaaaatataaattgaaagtcactcctgttgttacccctgaattgaataatctgaattttgaaataaaaaaaaaagctttcactggacctggatatatctttaattcatcctttttaaatggattaaaatgtccagatgactctattatcaaaactattgaatatctcgaaaaagaaaagttggggacaaaaaaaattaattttagattaaaggactggggagtatctagacaaaggtattggggttgc

SEQ ID NO: 304136 - DNA, 821 bp, Unknown
  Bacterial polypeptide expressing nucleotide sequence isolated from the Sargasso Sea
cctttggaccacgtgacagattggaaatttattgaatacaaaggagaaaaattcactagggaaacggatactttagatacattcgtggactcatcatggtacttcctaagattttgttctccccatgaaaaagattacggttacaatgaagatgaaataaattattggatgccagttgatcagtatataggaggtgttgaacatgcaatacttcatttactttattcaagattttttatgagagccataggttataaaaaagatgattttaaatttaatgagccgtttgagggattatttactcagggaatggtttgtcacgaaacatataaagatgaaaaaggaaattggctaagacctgatgaagttgaaactaaagatggtaaaaaatattttgtcaaaaataaattagaaaatgttgtgactgtaggaccctctgaatccatgtcaaagtcaaagaaaaatacaatagatccagaacaaataattcaaaactatggagctgatgcggtaagattatttattttatctgatagtccaccggaaaaagatatacaatggtctgagcaaggtatggtagcttcttataagtttatacagaagttatggatgcttcacgaaaaaattaaagataaaataaataacaattcaaataatttagacttagaaaataactttgaaagatttgtaaacgaaacaataaataagtttgactacaatttagagaagtttaattataatgttttaattgctactatctacgaaacatataattttattaataatattttggaaagtaaaattaatggagaaattttatt

SEQ ID NO: 304137 - DNA, 592 bp, Unknown
  Bacterial polypeptide expressing nucleotide sequence isolated from the Sargasso Sea
gctgacgacgtcgacgaacgtgaaccggttccgcgagcagctccagtcgctcggcttctcgtacgactgggaccgcgaggtggcgacgtgcgacccgtcgtactacaagtggacgcagtggattttcacgaaactgctcgagcgcggtctggcgtaccaggcggaggtgcccgtgaactggtgccccgcgctcgggacggttctcgcgaacgaggaggtcatcgacggtctgagcgagcgcgggaatcacccggtgatccgcaagccgatgaagcagtggatgctcaagatcaccgcgtacggagaccggctcctgaacgacctcgacgacctcgactggccggagagcatcaaggagatgcagcgaaactggatcgggaggagcgagggcgcgcagctcgcgttcgacgtgcccggggtggaccacgagacgctcgggaagctcgaggtgtacacgaccaggccggacacgctgttcggggcgacgtacctcgtcgtcgccccggagcacccgctcgtggacgcgctcgcctcggcggagcggagagacgccgtcgacgagtacgtcgcgcgcgcgtcgcgaaaagtcgga

SEQ ID NO: 304138 - DNA, 807 bp, Unknown
  Bacterial polypeptide expressing nucleotide sequence isolated from the Sargasso Sea
ttagtctcgagaaaggaaacttatgtaaattgggatcctgttgaaaattctgttcttgctaacgaacaagttatagatggaaaaggatggagatcaggagcaattgttgaaagaaaaaaattatcacaatggttttttaatattacaaaattttcagacgatctgcttaatgaattaaataaactacctggttggccgtcaaaagtaaaaacaatgcaagaaaattggattggcaagtcgacaggttgcgaaatattatttaatatagataataaaaaagattctattaaagtatttactacaagacctgatactatttttggagcatcctttttggccctctctgttgatcatcctttaaataagttattttcaaatgacgcggaattcttaaattttaaatccgaatgtaataaatcagggactacagaagaagcaattgctaatgctgaaaaaattggttttgatactaaattatttgttaaccatccttttttacaaaagaaaataccaatatattttgcaaattttgttttaatggattacggtactggagccgtctttgggtgtccggctcatgatcaaagagattacgactttgcttcaaaatataaattagaaataatcaatgtcatttctaataactctcctaaaaagaagataactgaggcttacacgggagatggaaaattaattaattctgaatttttgaacggcttatcaattatttctgcaaaaaagagagttatagaagagatagaaaagagaaaattaggcacaaaaaaaactttcttcagattaaaagat

SEQ ID NO: 304139 - DNA, 679 bp, Unknown
  Bacterial polypeptide expressing nucleotide sequence isolated from the Sargasso Sea
tataaagatgaacaaaaatttttaaattttaaaaaagaatgttcgacaactggaacgacagaagagtcaattgcacaggctccaaaaataggatttaaaacaaatttattcgctattaatcccttaaatgctaatattaaagtcccagtttatttcgcaaattttgtattaatggattacggactaggagctgtttttgggtgtcctgctcacgaccagagagattttgattttgcaaaaaaatatgatttagaaattaaaactgttgttagacctaaaaatgaaaatgaaaattttaaagtagatactgagccttatacaggagagggttttatcattaattcagaatttttaaatggggccaaagttccagaagagtcaattaataaaacaatagatttattagaaaagaaaagtttaggaaaaagaaaaacaaattatagacttaaagactggggaatttcaaggcaaagatattggggatgtccaataccaattgcctatgatgaaaacgatgaaattataaaaatccctgaaaaagatttacctgttcaacttcctgaaaatattaattttaatacaaacggaattccttttgatgctgacgaagattggaaaaatataattattaatggaaaaaaatgtaaaagagaaacagatactctagacacatttgttg

SEQ ID NO: 304140 - DNA, 292 bp, Unknown
  Bacterial polypeptide expressing nucleotide sequence isolated from the Sargasso Sea
atgagtagatataattttaaatcagtagaaacaaaatggcaaaattattgggaaaaaaataaaagttttaaagtaaaaacagacccttccaaaaaaaaattctattgtcttgaaatgtttccttacccatcaggaaaaattcatatgggacatgtgagaaattataccataggagatgtgcttgctcgttacaaatctcttcaaggatataatgttttacacccaatggggtgggattcatttggtatgccagctgaaaatgcagccaaacaaaataatctagatccaaaaa

SEQ ID NO: 304141 - DNA, 904 bp, Unknown
  Bacterial polypeptide expressing nucleotide sequence isolated from the Sargasso Sea
tgggtgaacgtcccctgcccgtcctgcggtgaaccggccagacgtgagaccgacacgatggacaccttcatgtgctcctcctggtatttcctgcgcttcgcggacccgcacaacagcgaaacacccttcagcagggaagcggtgaaccgctggttgcccgttcagcagtacgtgggcggcatcgagcacgcgattcttcacctgctctattcccggttcttcaccaaggccctcagggaccgaggcctgatcgatgtcggtgagccctttcagcgtctgctgacccagggcatggtgcagggcaccacctaccgcaatccggtcacgggcaaatacgtggcaccggccgacgtcgtcgatcccgcagatcccagggatcccgtgacgggtgatgcccttgaggtgctgttcgagaagatgtcgaaatcgaagtacaacggggtcgatcctgcggctgtcatcgaccgttacggcgccgacaccgcccgaatgttcatcctgttcaaagctcctccagagaaggatctcgaatgggatgacgccgacgttgagggccagtaccgcttcctgcaacggctctggcgcctgatcgacagctcacgtcccctgctggatcagcaggacggcggtgaggggcgtcccgctgagctcacgccggaggaagcggatctgcgacgggccgttcacaccgccatcgaggccgtcacggaggacctcagcgatgacatccagctcaacacggccatttccgagctgatgaagctgtccaatgccatcaatgccacagatctcccaggcctgcgtgtcgccgtgctgcgtgaagccctttcggtgctcgtgcgtctgctggccccgttcgcgcctcatctcgcggaggagttctggcagaaactcgggggagcga

SEQ ID NO: 304142 - DNA, 808 bp, Unknown
  Bacterial polypeptide expressing nucleotide sequence isolated from the Sargasso Sea
acattggtgtttaagaataagtaaatattcagatcgacttttagaggatttaaataaaattgattggccagagccattaaaagaaatgcaaagaaactggattggaaaatcaaaaggggtatcattaacttttgaggttgaaaattctaaaaataaaattgaagtttttacaactagaccagacacaatatttggtgtttcttttttaactgttgcacctgaatattctgatcttcatgatatatgtaatgctgataacagagtatctattgaaagttatattaagaaagtgtctattaaatcagaaagggataggctagcagattttaaaacaatgtctggtgtattttcaggatcatatgcaattcatcctttctcaggaaaaaaaattcctatttggatttctgactatgttcttgcaagttatggaactggagctgtaatgggagttcctgctggtgaccaaagagactttgaatttgcaaaaaaatttaatttggaaatccccaatatttttgataaaataaatattactgagtcagccttttcagacaaaacagggtttaaattaataaactcagaatttttagatgggtatgattttaacagtgcactaaataaaataattactaaaattgaagaaaataaaattggtaaatctaaaattcaatataagcttagagatgcaatttttagcagacaaagatattggggagaaccaatacctatttattataaaaatgatttaccagttgatattgacgaaaaatatcttccattaaaattacctaaagtagataactttttg

SEQ ID NO: 304143 - DNA, 763 bp, Unknown
  Bacterial polypeptide expressing nucleotide sequence isolated from the Sargasso Sea
aaacaagtcgaaaataaatggcagaaattttgggaagaaaaaaaaatattttctacaaaaataaataagaataaaaaaaaattctactgcttagaaatgtttccttatccttcgggtaaaatccatatgggacatgtcagaaattatactattggggatgttttatcccggtataaaattattaagggatttaatgttttacatccgatgggatgggactcatttggactaccggctgagaatgccgcaaaagaaaataatttgaatccaaaagaatggactgaaaaaaatatttcggtaatgaaaggtcaattaaaaaaactaggattatcaattgattgggatcgggaaatatctacgtgctcagaagattactataaacatcagcagctcttttttctagaactttatgaaaaaggattggtttatcggaaagaaaattttgttaattgggatccaatagatgaaactgttttggcaaatgaacaggtaattgatggaaaaggctggaggtcaggagcaactgtcgaaagaaaaaaattaaatcaatggttttttaatatttctaaatttgcagatgaacttttacaaggtttagatcaattagagaaatggccaaataaagttaaagttatgcaaaaaaactggataggaaaatcttttggatgtgaagtagattttaaaattgagggcagtccatctgtagaagtgattaagtgctttactacaagaccggatactttgtttggtttttcttttcttg

SEQ ID NO: 304144 - DNA, 880 bp, Unknown
  Bacterial polypeptide expressing nucleotide sequence isolated from the Sargasso Sea
tatagaagaggcaaaaaaaattgttttaaataaattaatggaaaaaaaaattggaaatgaaaaaattaattaccgattaagggattggggtctttcaagacaaaggtactggggatgtccaatacctgttttatacagggaggatggtgaaattgttcctgtatcaaaaaaagatttaccaattaaattacctaacataaatgaatttggacaatctggtaatccattagattcgatagaggattggaaaaatacaaaatgccccttaactggaatgaaggcggttagagaaacagatacttttgataccttttttgaatcttcttggtattatttaagatactgcaatccaagaagtaaggccgcatttgaaaaagaggatataaattattggttgcctgttgatcaatatattggtggcattgaacatgcaatattacatttattgtactcaagattttttgtaaaagctttaagggacactaatcatattgagttagacgaaccttttcagggcttgtttactcaaggaatggttactcacaaaacctataaaaatataaaaaatgaatgggttagtcctgcagacatttattatgatgaagggtctggaaaaaattttgatgcaaataataatgaaataaatattggaaaaatagaaaagatgagcaagtccaaaaaaaatgttgtagacccatctcaaataattgagacgtatggtgcagatactgctcgatggtttatgctttctgacagtcctccagatagagatttggagtggacagattctggaattagtggttcttttaagtttgtaaataaagtgtgggcgctgcttatagaaacaaaatctttagatgaatcaataaccacagacaaa

SEQ ID NO: 304145 - DNA, 748 bp, Unknown
  Bacterial polypeptide expressing nucleotide sequence isolated from the Sargasso Sea
atagcaagcgcagaaaaaattggttttaaaacggacttggtcgcaattaacccgcttgataaaaaaataaaagtgcctgtgtattttgcaaatttcgtattaatggattatggtttaggtgcagtatttgggtgcccagctcatgatcagagagatttagattttgctataaaatataatttaccagtaaatgcagttgtaactccagagaaaaaccaaaaaaattttgaagttcaaaatgaagcctacaccggcccaggatacttatttaattcatcttttttagatggtttaaaagttcccgaggattctattattaaaactattgaacatcttgaaaaaaaaaaattgggagtaaaaaaaataaattttagactcaaagattggggtgtgtctagacaaagatattggggatgcccaatacccattatatatgatgaaaatcataatcctcacaaagttcctaaggagttattacctgtcaaacttcccaccattgataaattagatcactcaggaaatcccttagataatatttctgattggaaaaatgtatcaattgatggaaaaaaattttacagagaaacagatactttagacacttttgtagattcatcttggtattttcttagattttgttcacccaaaaataatgagtatggtttcaatttagatgaagttaaatattggatgcctgtagatcaatatatcggaggtgttgaacatgctattttacatttattgtatt

SEQ ID NO: 304146 - DNA, 753 bp, Unknown
  Bacterial polypeptide expressing nucleotide sequence isolated from the Sargasso Sea
tactgtcttgaaatgtttccatatccatctggaaaaatacatatgggtcatgtcaggaattatactattggtgatgtacttgcacgttataaaaaattacaaggatttaatgtacttcacccaatgggatgggattcgtttggaatgccagctgaaaatgctgctaaagaaaataatcttgacccaaaagagtggacccagaaaaatatttcaaatatgaagaaacagttaatgagaatgggattatcaattgattgggataaagaaatttctacatgctctgaagattattacaaacaccaacaaaagtttttccttgaattatttgataaaggtttagtttatagaaaagagaattatgtgaactgggatccagtagaacaaacagtcttggcaaatgagcaagtgatagaaggaaaaggttggaggtctggtgctattgtcgaaagaaagaaattaaatcaatggttttttaatatttcgaagttttcagaaaatttattaagtgatttagaaaaacttcctgattggccaaataaagttaaaattatgcaaaagaattggataggtaaatcatttggatgtgaaatagaatttaagatacttggaaatgaaaaaattaagtccattcattgttataccacaagaccagacactctttttggatcttcctttttggcgttgtctgtagatcatccactttcaaaatattatgaaaaaaacaatgactttttaaattttaaaaaccaaatg

SEQ ID NO: 304147 - DNA, 786 bp, Unknown
  Bacterial polypeptide expressing nucleotide sequence isolated from the Sargasso Sea
tcaattgattgggatagagaaatttctacttgttctgaagattattataaacatcaacagacttttttccttgaattatttaaaaaagggcttgtttatagaaaagaaaattatgttaactgggatccaatagatgaaacagttttagcaaatgagcaagtaattgatgggagaggttggaggtcaggggcaacagtcgagagaaaaaaattaagtcaatggttttttaatatttctaaattttctcaagatcttttggatggacttgaaacacttgatgcttggccaaataaagtaaaaacaatgcagaagaattggatcggaaaatctttcgggtgtgagattgattttgagataaacggagatttaccagtaaataaaataagatgttttacaacaagaccagatacactttttggtttttcattcttagcactttcagtagaccatgaaatatcaaaatattacgctgaaaatgaggattttttaaagtttaaagaggaatgctcaaagacaggaaccactgaggaagcaattgctgtaggtgaaaaaattggatttaaaactagtctgagagctataaacccactaaatccagaagaagaagtcccagtttattttgcaaattttgttttgatggactatggatttggggcagtatttggttgtccagcacatgatcaaagagattatgattttgcaaaaaaatacaagctaaggatcaaaacagtggttgcccctattggagaagacaaaacttatactgttaatgatgaagcttatcct

SEQ ID NO: 304148 - DNA, 926 bp, Unknown
  Bacterial polypeptide expressing nucleotide sequence isolated from the Sargasso Sea
actgcctgtatatatagctaattttgttttaactgagtacggtttaggggcaatttacggttgtcctgcccatgaccaaagagattatgattttgcaaaaaaatatggtttagaaataataacagtcgtaaaaccaaaagaaaataaagatgaaaatttttctgtaaaaaatgaagcttatgagggtgatggtattattattaactctgattttttaaatgatctatatatagatgaagcaaaggttaaaataatagagtcaattacaaaaaagaaaattggttataaaaaaacaaattataaattaagagattggggcatatcaaggcagcggttttggggctgtccaattcccattatttatagagaagatggggaaattctaactgttgaagaagaacaattaccaataaaactacctaatgaaaaatttagtgaaaaaaacactactttaaaaaatattgaaggatggagtgagacaagatgttcaaaaactggaatgaaggctgtaagagagacggatacctttgatactttttttgagtcttcttggtattattttagatattgtaatgctagactcaacacaccatttgataaagaagatatttcatattggttaccagtagatcaatacataggtggtatagaacacgcaatccttcatttgttgtattcaagattttttacaaaggctttaagagatttgggttattttaaattagatgaaccatttaaaggtttgtttactcaaggaatggtgacccatcagacatttcaaaatgaaaaaaaggaatgggtagagccaaaagaagttaaagaagttgatggtgttttttatgatagaaacaacaataatgttaaggttggtaaaattgaaaaaatgagtaaatcaaaaaaaaatgtaatagaccccaagacataat

SEQ ID NO: 304149 - DNA, 289 bp, Unknown
  Bacterial polypeptide expressing nucleotide sequence isolated from the Sargasso Sea
actgaaagtgaattctcctaatagatataattttaaaaaagttgaagataaatggcaaaaaacttgggaaaaaaataaaacttttttatcaaaagtagataagaataaagaaaaattctactgtcttgaaatgtttccatatccatctggaaaaattcatatgggtcacgtaagaaattatacgattggagatgtattatctaggtacaaaattctcaaaggatttaacgtattgcatcctatgggctgggatgcttttggtatgccagcagaaaatgctgctagagaa

SEQ ID NO: 304150 - DNA, 433 bp, Unknown
  Bacterial polypeptide expressing nucleotide sequence isolated from the Sargasso Sea
tatggcacgctataaccataaaataacggaagctaaatggcagaagatatgggaggaccgcggctgctttcaggtccatgaggacccggaacggccgaaatactacgtccttgaaatgtttccctatccgtccggccgtatccatatggggcatgtcaggaactataccctcggcgatgtcgtcgcccgctacaagaaagcgcgcgggttcaacgttctgcaccccatgggctgggatgcgtttggcctaccggcggaaaacgccgccatcgagaacaaggtccatcccggcaagtggacccgcgagaacattgccgaaatgcggcggcaattaaaatccatgggcctgtcctatgattggacgcgcgaattcgccacgtgtgaacccgaatactaccgtcatgaacaaaagatgtttttagatttcttggaa

SEQ ID NO: 304151 - DNA, 869 bp, Unknown
  Bacterial polypeptide expressing nucleotide sequence isolated from the Sargasso Sea
caggtggtgctggtggacggcgaaacattcaactaccaccagtggcaggactggtacggcgacaagcagcgcggcgtcaccatcaactccgacagcttcagcgggctgtcgtacaaggacgccgtgaacgccgtggcccatgcgctggagcaaaagggcctgggcgagaagaagaccacctggcgcctgcgcgactggggtgtgagccgccagcgctactggggcacgccgatcccgatcatccactgcgacgagcacggtgccgtgcccgtgcccgaaaaagacctgcccgtggtgctgccgcaagactgcatccccgacggctcgggcaacccgctgcacaagcacgaaggcttccacgcgggcgtgacctgccccgtgtgcggcaagcccgcccgccgcgagacagacaccatggacaccttcgtggacagctcgtggtacttcatgcggtactgcgaccccaagaacgccgacgcgatggtggctggcggtgcggattactggatgccgatggatcagtacatcggtggcatcgaacacgccatcctgcacttgctgtacgcccgcttctggaccaaggtcatgcgcgacctggggctggtcaaggtcgatgagcccttcaccaagctgctcacgcagggcatggtgctcaatcacatctacagccgccgcaccgccaagggcggcaaggactacttctggccgcacgacgtggagcatgtgctggacgaaggcggcaagatcatcggcgccaagctcaagaacgaagccaccagcggcgacggcatgctgcccgtgggcacgcccatcgattacgagggcgtgggcaccatgtccaagtccagaacaacggtgtggaccccagg

SEQ ID NO: 304152 - DNA, 787 bp, Unknown
  Bacterial polypeptide expressing nucleotide sequence isolated from the Sargasso Sea
taattgggatccagttgatcaaactgttcttgcaaatgaacaggtgatagacggaaaaggatggaggtcaggcgctcaagtagagagaaaaaaattaaatcaatggttttttaacatttcaaaattttctgaacaattgcttgatggtctagataatttaccagagtggccgaataaagttaaaactatgcaaaaaaactggattggaaagtcatttggttgcgaagttgatttcaaaatagaaggggatttacctataaagaatataaagtgttttacaacaagacctgatacattatttggtttttcctttcttgctctatcagtcgatcatcctttgtctaaatattttgaaaacaatttaaaatttgaaaaatttaaaaaggaatgttcaaaaacaggtacaactgaagagtctattgcccaagctgaaaaaatcggttttaagacaaatttgcaggcaatcaatcctatgagtccaaaaatcaaagttcctgtttattttgcaaattttgtgcttatggattatggttttggagcagtttttggatgcccagctcatgatcaaagagattttgagtttgcaaaaaaatacaatttaaaaataaaaactgttgtaaaaccagaagataaaaccgatgattttcaagtcaaagatgaagcttttgttaagaatggtttaataattaattcatcctttttaaatggccttaaaacaccaggcgaagctattgaaagaagtattgattatttaacaaaaaataaatttagggaaaaagaaaattaa

SEQ ID NO: 304153 - DNA, 880 bp, Unknown
  Bacterial polypeptide expressing nucleotide sequence isolated from the Sargasso Sea
atctggcacaactgaagagtctatagcaaatgcagaaaagctaggatttaaaactgatttagttgcgttaaatcctttagacaaaagtattaaaatgccagtttattttgctaattttgttcttatggattatggatttggagcaatttttggatgtcccgcacacgatcaaagagactttgactttgcaaaaaaatataatttagatatcaaatgggtaattaaaccagagaattctgatgataactttaaatcagaaaaagcatacactggcccaggaatagtttttaattctaaatttctagatggcttaaaagtcccagaagattcaattattaaatcaatcgaacatcttgaaaaagaaaatataggtaaaaaaaaaattaactttagattaaaagattggggagtatctaggcaaagatattggggatgcccaataccaatagcatatgataaaaacaataaagaaataaaggttccaagagaaagtttaccaatattacttccaaacaagatagacctgaatgttaaaggaaatcctttagattcagatttaaaatggaaaagtaccattattgatggaaagaaatgccatagagaaactgatactttggatacttttgtagactcatcttggtattttttaagattttgttctgcaaaaaataaaagtgagggatttaatcaaaaagaaattgactattggatgcctgttgatcaatacattggaggagttgaacatgctattttgcatttgttatattctcgttttttcatgcaagcactttcatataataacaatcagtttaaattaacagaacccttccaaggtctttttacacaaggtatggtttgccatgaaacatataaagataaa

SEQ ID NO: 304154 - DNA, 841 bp, Unknown
  Bacterial polypeptide expressing nucleotide sequence isolated from the Sargasso Sea
aacttatataatacagatgagcaaccaagtaataaagaaaaattttatgccttatccatgtttccctacccttcagggaatcttcatatgggtcatgttcgcaattatgtaataacagacttaattgcacgatttcaaagatttcagggcaaagtagtgttacatccgatgggctgggacgcatttggtttacctgctgagaacgctgcaatagaaagaggaataaatcctgataagtggactaaacaaaatatcgctcatatgaaatcacaattaaaattattaggtctttcagttgattgggatagagaatttgcgacttgtgatgaaaattattatgtatggactcaatttttatttttggaattacacaaagctggtcttgtttatcaaaaggagtctgaggtaaattgggacccaattgataatactgttttagccaatgagcaagttgattcagaaggaaaatcatggaggtctggagcgatagttgaaaagaaacttttaactcaatggtttttaaaaattactgattatgcagaagagttattgcaagatttagaaaaattaaatgagtggcctgaaagagtaaggataatgcaggaaaattggattggcaaatcaataggtacaaatattaattttaaaataaaagaatttaataaggaaaaaatacaagtattcacaacaagacctgatactttatttggggtaacttatttagcaatatcagttaatcatcctttaaataaaaaaatatcagataataaaattttaagaaaactagaaaatttaaaactatatttacatgaaactaaagataaaaatcaaaagaaaattg

SEQ ID NO: 304155 - DNA, 436 bp, Unknown
  Bacterial polypeptide expressing nucleotide sequence isolated from the Sargasso Sea
tatgaacagatataattttaagtcaattgaaagtaaatggcaaaattattgggaaaaaaataaaagttttaaagtcaacacagaccataataagaaaaaattttactgtcttgaaatgtttccctatccgtcaggaaaaattcatatgggacatgtaagaaattataccataggagatgttctagcacgttacaaatcactccaaggatataatgttttacacccaatgggttgggactcctttggtatgccggctgaaaatgctgcaaaacaaaataatttagacccaaaaaaatggactgaaacaaatatcctcaatatgaaatcacaattaaaaaaactaggattatcaattgactgggatagagaaatttcaacttgcaaaaaagattattataaacatcaacaagcattttttttagacttgtcaaaaaaa

SEQ ID NO: 304156 - DNA, 738 bp, Unknown
  Bacterial polypeptide expressing nucleotide sequence isolated from the Sargasso Sea
tggtgatgtgcttgcccgatataaagctctgaaagggtataacgttttacatccaatggggtgggattcatttggtatgcctgcagaaaatgcagcaagacaaaataatcttgatccaaaaacttggacagaatccaacattaaaaatatgaaagctcagctaaaaaagttaggtttatctattgactgggatagagaaatatcaacctgcatcccagaatattaccgtcatcaacaggaattttttttagaactttacgataaggggctggtttatagaaaagaacaatacgttaattgggatcctgttgatgaaacagttcttgcaaatgaacaagttatagatggtaagggttggagatcaggtgcggttgtcgaaagaaaaaaattaaatcaatggttttttaatatttcaaaattttctcaagaactcctggatggtttagataatttagatttatggccgaaaaaagtaaaaacaatgcaaaaaaactggattggaaaatcatttggatgtgagatcgattttgatgttgagggtgaattgcctgttaaaaatataaaatgctttaccacaaggcctgacaccctttttggattttcatttctagccctgtctgttgaccatgaaatttctaaattctatcaaaagaataaggattttattaaatttaaacaggattgttcgaagactggtactactgaagaagctattgcagtaggggaaaaaattggatt

SEQ ID NO: 304157 - DNA, 832 bp, Unknown
  Bacterial polypeptide expressing nucleotide sequence isolated from the Sargasso Sea
tgaaaaatgcaaagatataaaagcagctgaagcagatatagctaaggcagaaaaattaggaatagatactgaaattaaagtcatacatcctcttacgggagagaaattaccattatggattggcaattttgttctacttgattatggaacaggtgtagttatgggtgttcctggtcacgattcacgggattatgaatttgccactaaatatgaattaaatatcaaacaagtaattaagacaaaagatgatgatcttcctataactgaaaatggtattttaattaattcagataaatatgatgggatgacttctgaagaagcttctaatggaataattaaagaacttgttaagttaaattctggagcgcatttaatccaatttagattaagggattggggtgtaagccgacaacgatactggggttgtccaatacctgtagtctatgaaaatggtgtgcccaaagtaattgaagaaaaagatatgccaataaagcttcctgaacttgataagaattctccaccaatacctttaagccaaaataaagaattcatagatattaaagatggtgtaataagagaaagtgatacttttgatacttttatggattcttcttggtaccatgccagattcacatcttcgaataatgaggatcaaatctttgatgaaaatactgattattggctcccagtggatctttatattggaggaattgaacatgcgattttacatctcttgtactctagattctttcacaaagcattaagagacattggtttagtggaaggagatgaaccttttaaaaaattacttactcaaggcatggttcttaaa

SEQ ID NO: 304158 - DNA, 831 bp, Unknown
  Bacterial polypeptide expressing nucleotide sequence isolated from the Sargasso Sea
aagagttatttattgatttttataacaaaggattagtagtaaggaaagaaacttatgtaaattgggatccggtagaaaaaactgttttagctaatgaacaagttattgacggtaaaggttggcgttcaaatgcattagttgagagaaagaaattacatcaatggttttttaatatttcaaaattttcaaatgaacttcttgaagatttaaatactctaaaggaatggccagaaagagttaaactgatgcagaagaattggataggaaaatctgtcggttgtgaaatagattttaaaatttctgaaaacgataattcagtgagagtttttacgacacgtccagatactatttttggtgcaacttttttagcaatatctgcggaccatccattatgtaaaagctatattaaacaagcaaaatttatagaatttaaaaaaaaatgctcccaagttggaactaccgaagaagccattgctaatgcagaaaagataggcttcaaaacagatttagaggccgaacatcctttcattatcggaaagaaaattcccatctatgtttctaattttattcttatggattatggaacaggtgcgatatttggatgtcctgcacacgatcaaagagactttgattttgcaacaaaatacaaaattgaaataatacaagttgtaaaatcaaaagattttgagaaactaaagacagaaaaaaaggcatttactggtgatggttcaataataaattctgattttttaaatggtcttacaattaccgcggctaaagaaaaaattgtaaaagaaatcgaaaaaaagaaaatggaaaaaagaaagtaac

SEQ ID NO: 304159 - DNA, 850 bp, Unknown
  Bacterial polypeptide expressing nucleotide sequence isolated from the Sargasso Sea
aaagtcagaaaaagtaaagtggttaaatcactttacggatattgatatcgcaacaggacaagaagcaatcgataaaacaattgattttgctgaaaaaaataaatggggaaagagtgtcacaaactataggctaagagactgggggctgagccgccagagatactggggttgccctatacctgtagtgcattgtgaagcctgcggcgttgttcctgaaaaaaaggaaaatttaccaattactttgccagacaatgtgacatttgatgtttcaggtaatcccttagatcgtcacccgacctggcgaaagtgcaaatgtccctcctgtggtcgtcaagcactacgcgaaactgatactatggatactttcgttgatagttcgtggtattttacgcggtttacgtcaccagattcggaaaagccaacttcgaaggaagatgtcagctactggatgaatgtcgaccaatatattgggggagttgagcatgccatcctgcatctattgtattcaaggttctttgcccgtgccatgcaaattacagggcatttgccagatacagccaaggagccattcgatgccctattcacccagggaatggttactcacgccatatataagagtgttggagttgatggaagagatttatttcactatccggaagaagtggaggtgcgcgacggtaaagcttttcttattaaaaataataaggaagtaaccattataccttctgcaaaaatgtcaaaatcgaaaaacaatgttgttgatcctgtaaatatagtagacacattcggagctgacacagctcgttggttcgttccttcagatagcccaccggaacgggatgttgagtga

SEQ ID NO: 304160 - DNA, 663 bp, Unknown
  Bacterial polypeptide expressing nucleotide sequence isolated from the Sargasso Sea
agagagaaaatttaccaatttctctgccagacgatgttacatttgatgttccaggaaatcctttggaccgtcaccctacctggagaaaatgcgtctgtccctcctgtggcagtcaagccctccgggaaactgatactatggatacttttgtagatagttcttggtatttcgcccgttttacttcaccaaagtcggaaaaaccaacttctgaaggagatgttaactactggatgaatgtcgatcagtacataggcggtgttgaacacgcgatcttgcatctgctctattcaagatttttttgccgagcgatgcaaattactggacatctaccgaaaacggcaaaagagccatttgacgccctattcacgcagggcatggtaacccatgctatatacaagagcattggggccgacggtcgagatttgtttcattacccagaggaagtagaattacgcgagggtaaagcttatttgcatacagatggcaaagaggtggacattataccttcggcaaaaatgtcaaaatccaaaaacaatgttgttgacccagtaaatatagtggatgcatttggagctgatactgccagatggtttgtcctatcagatagcccaccagaaagggatgttgagtggacagcctctggcgctgaagccgccgaataag

SEQ ID NO: 304161 - DNA, 713 bp, Unknown
  Bacterial polypeptide expressing nucleotide sequence isolated from the Sargasso Sea
ttattgtctagaaatgttcccctatccatcaggaagaattcatatgggtcatgttcgaaattatgcaataggagatgtgatagctagatacaaaatgatgaatggtcataacgtattgcatccaatgggttgggattcttttggtttgcctgctgaaaatgctgctcgcgaaaacaacttaaatccaagagagtggacacaaaaaaatatttctacaatgaaaaatcaactacaattattagggctatcgattgattgggacttggaaatttctacctgcgatgaagagtattataagcaccaacaagaactttttatcgatttttataataaaggcttagttgtgagaaaggaaacctatgttaattgggatccaattgaaaaaacagttttggctaatgaacaagtaattgacggaaaagggtggcgttcaaatgctttggttgaacgaaaaaaattataccaatggttttttaatatttcaaaattttctgatgaattattaaaagatcttgaaactttgacgaattggcctgaaaaagtaaaattaatgcaaaaaaactggattggaaagtcgttgggttgtgaaattaattttaaaataaaagatacaaaaaataaaataaaaatttttacgactcgtccagatactatatttggagcgtacttttttagcaatttcagtggatcatccggtatgcgagggttttaaa

SEQ ID NO: 304162 - DNA, 799 bp, Unknown
  Bacterial polypeptide expressing nucleotide sequence isolated from the Sargasso Sea
ttggtattttttaagattttgttctcctcaaaacgagaaatatggattttcttacgatgatgtaaattattggatgccggttgatcaatatattggaggcgttgaacacgcaatattacacttattgtattcaagattctttatgcaagccctttctcataaaaacgaaaattttgatataaaagaaccttttaaaggactttttacgcagggaatggtttgtcatgaaacttataaagatgatgaaaataattgggttagtccagaagaaataactttgaaagatggaaaaaaatatttaaaaaataatcttttaaaagaagttaaagttggcccttcggagtcaatgtccaaatcaaaaaaaaatacaattgatccagaaaatataatcaataactacggtgcagattctgttagattatttattttatctgatagtccgccagaaaaagatgtgcagtggtccgaggaagggatttcagcatcatttaaatttatccaaaaattatggaatatgaatactaaaattctgaatgaaataaaaaaaaatcatcctaaagacacaagttcagaactagataaatttacaaataaatttattaaaaaaatcaactcaagcttagaaagttttagttacaacattatcatagcaagtttgcatgaaatgtactcatttctgattaaagaaatagataaaaactatagccaaaaatcattaaaacaaaattatgaaaaaattttaattactatgacgcctataataccacatttttcaaatgagtgcattgaaatgctggaa

SEQ ID NO: 304163 - DNA, 933 bp, Unknown
  Bacterial polypeptide expressing nucleotide sequence isolated from the Sargasso Sea
ttttaatataaaaaagtttgaacaaaatttattggatgaattagataatttaaaaaattggcctgaaaaagttaagctcatgcaaaaaaattggattggaaaatcttacggatgtgaaattaattttaaaactgataaaaatgataataaaattacagtctttacaacaagaccagatactatttttggcgcatcctttttagccttatcgattgatcatccgctggcaaaaaaattcgaaaaggataaaaagtttttagaatttaagtctgaatgctcaaaaatgggaacaacagaagaagctttagctaatgcggaaaaaataggctttaatacaaatttatttgcatttcatcctttaaatgaaaaaattaaattacctgtatatatagcaaattttgtcctgatggattatggaactggagcagtttttggctgtccagctcatgaccaaagagatttggattttgcaaataaatataatttaaaagttttgccagtagtaaaacctaaaaacatcggagaaaaaaacttttcaataaaagacaaagcatttactgatgacggaatattgtttaattctgacttcttaaatgatcttactgttcctgaagctattgaaaaagctatagaagtaatttctcataaaaaattaggagtaaaaaaaattacttttagattaaaagattggggtgtttctagacaaagatactggggatgcccaatacccatagtttataataccaaaggagaagcaatacctgttactaaaaacaacttacccgttatgttaccagaagatataaacctaagttcacaaggcaatcctcttgaaaatcatcccaattggaaacatgtaaagttagataacggcgaaaaagttaccagagaaactgacaccttggatactttttgtgactcttcatggtattt

SEQ ID NO: 304164 - DNA, 811 bp, Unknown
  Bacterial polypeptide expressing nucleotide sequence isolated from the Sargasso Sea
attggttttaaaacaaatctacaagctcttaatcctatggaccctgaaataaaagttcctgtattttttgcgaattttgtgcttatggattatggtttcggggcagtttttggatgccctgcacacgatcaaagggattttgagtttgcaaaaaaatataaattaggcattaaaactgttgttagaccaaaagatagaggcagtgattttcaagtaaaggatgaggcatttattgatgatggtgttatgatgaattcatcttttttggacggtcttgaaacgcctggagaagcaattgaaaaaagtattgaatatttaacaaaaaataatttaggaaataaaaaaataaattttagactcaaagattggggaatatctcgtcagaggtattggggatgtcctatacctattgcgtataatgaaaaaggaaatatcgtaaaggttccaaaagaaatgttacctataaagctcccagaaaagataaacctcaacacgaaaggaaatcctctagatcatcaaaaaaaatggaaagaaattataatcaacggagaaaaatgtaatctagatactgacactttagatacttttgttgattcctcctggtattttcttcgtttttgctcaccagagaataatgaatatggttttgataaagaagatataaaatattggatgcccgttgatcaatatataggtggagtggagcatgcgatattacatttattgtactcaagattttttatgcaagctttgggttttaaaaatcaaaattttatttcgccagaaccatttcaaggtttgtttacacaag

SEQ ID NO: 304165 - DNA, 910 bp, Unknown
  Bacterial polypeptide expressing nucleotide sequence isolated from the Sargasso Sea
aagcacgtagattgtccaagctgtggcaagccagcggaacgggaaacagatacattcgacacattttttgagtcttcatggtattttgcacgttttgcgtcgccccaagcagacgacatcggattcactaagtcggctgccaactactggcttccagtcgaccaatacattggcgggatcgagcatgctgtgctgcaccttctatattccaggttcttcacccgagcccttcgcaaatgtggatacctaaatattaacgagccatttgccggcttattaacgcaggggatggtttgtcatgctacgtatcgggacaatgatggcaattggctgctcccaaacgccgtcgcgatcaacgatcaggatgcattggtccatcacaaatctggcgttggcgtcacccaaggccgctcggagaaaatgagcaagtcgaaaaagaacgtcgtcgacccagaacacataattgggacctacggggccgatacggcgcgcctattcatgttatcagacagcccaccagaacgcgatttagattggaccgattccggcatcgagggggcatggcggtatctcaaccggctttggcgtttggttgaggatttagatgcaagttccagtgaaggggtcgatctggatgccttgaatgtggagactttggatgttcttcgtctagcgcataagacgattggttccgtcactaccgacctggaccgattccacttcaataaagcggtcgcgcgcctacgcgaactcacaaatggtattgacggcctggaccacgcagcacccggttccatgtccgtgcgccaagaggcagtgggtattttagtgcggttgctggcacccgatgttgccgcacttggccgaggagatgtgggctgccctgggacacccaagtccttcttgccga

SEQ ID NO: 304166 - DNA, 761 bp, Unknown
  Bacterial polypeptide expressing nucleotide sequence isolated from the Sargasso Sea
tttggtgtacagaaaagaaagttacgtcaattgggatccaaaagataaaacagttttagcaaacgaacaggtgattgatggtaaaggatggagatcgggtgcaattgtagaacgaaaaaaattaaatcaatggtttttcaaaatttctcaattctctgaagaattactaaatgatctatcatcacttactgaatggccagagaaagttaaaaccatgcagaaaaactggatagggaaatctcatggttgtgaaattgattttaaaattgaaggttcagataaaataaatttaattaaatgttataccacaagacccgatactctctttggatttagttttcttgcactttctgttgatcatcctatatcaaaatattatgaaagtgatgaagattttgaacagtttaaaaaagagtgctcaaaaacaggaacaacagaagagtctattgcaaacgcaacaaaaataggatttaaaacaaatctacttgcaattaatcctctaaatccaaaagataaagttccagtgtattttgcaaattttgtattgatggattatggatttggtgcagttttcggatgtccagctcatgatcaaagagatttcgattttgcaaaaaaatataacttacaaataaagacggttgttaagccattaaatgaagatgaaaatttcaatgttagtaatgaagcttattctggaccaggaactttaataaattcagagtttttaaatggtttaaaagtcccagaacaatcaatta

SEQ ID NO: 304167 - DNA, 841 bp, Unknown
  Bacterial polypeptide expressing nucleotide sequence isolated from the Sargasso Sea
tccagaaaagagacttatgtaaattgggatccagttgaacaaattgttcttgcaaacgaacaagttattgatggaaaaggatggagatctaatgcaattgtagaaagaaagaaattatcccaatggttttttaatatttcaaaattttctgaagagcttcttgaagatttaaataaattagagaattggcccaacaaagtaaaaactatgcaaaaaaattggattggtaaatctttcggttgtgaaattgattttaaaataaaaagtgatttacctgtcagtaaaattaaatgttttacaacaagaccagatactttatttggattttcttttttggctctttcaatagatcatccggtttccaaatatttttctaaagatcctaaattcatcaaatttaaagaggaatgttcgaaaactggaacaactgaggaatccatagcccaaggagaaaaaattggatttaaaacaaacttacttgccctcaacccatttaatgaaaaagaaaagcttccagtatattttgctaattttgttttaatggattacggtttcggtgcagtttttggatgtccagcacatgatcaaagagatttagattttgcaaataaatataatttagaaattaaaacagtagttagaccaacagatgaaaatgatagttttaatgtccaaaaagaagcttatacggggccaggtgttgttattaattctgattttttaaatggcttacaggctccagaagaatcaattattaaaactatagagatcattgaaaaaaaaaaattaggaaaaaaaacaactaattttagactgaaagactggggtatttctagacaaa

SEQ ID NO: 304168 - DNA, 910 bp, Unknown
  Bacterial polypeptide expressing nucleotide sequence isolated from the Sargasso Sea
gttgatcaatatataggtggaattgaacatgcaattcttcacttattgtattcaagattttttacaaaagcattaagggaccttggttactttaagcttaatgaaccgtttaaaggattgttcactcaaggaatggtcactcatcagacatttaaaaatagtgataatgaatggatagagccaaaagatgttgtaaaaaaaaatagtgaactttttgatgaaaaaaacaattctgtaactgttggtaagattgaaaaaatgagtaagtcaaaaaaaaacgttgttgatccaaatgatattattgaaacttatggcgcagacacagctcgttggtttatgttatcagatagcccaccagatagagatcttgagtggactgaaaacggtattcagtcatcacataaatttatcaataaaatatgggattttgtaaatagatatgatgaatacgaaattgaagaaaataaatcaggtgatactgttgaaaaaatgaaaaaaattataaatgatgtaactaataatattgaaaactttcaatttaataaatcagtcgccaaaatttatgaatttgtaaacatattagtagagcaagtttcaaataaatctttaataaaaaaagactataaatggtcattggagaagctggctttattattacagccttttttaccacatataagtgaagaaatttggctaaaaatagggatggaagatttgtgtattaaccaaatttggcctgtggagaaactatcagaaaaaaatgtaaaaactaatattgcaatccaaataaatggtaaaaccagaagtgtgattataattgataacgacacaaaaaaagaaaaagttttagaaatggctagggaagataaaaatgtgcttaagtatttgggtgataaaaaaattataagag

SEQ ID NO: 304169 - DNA, 883 bp, Unknown
  Bacterial polypeptide expressing nucleotide sequence isolated from the Sargasso Sea
cagctattttttattgaattatttgagaagggtttagtttaccgtaagcaaaattacgtaaattgggatccagtagataaaacagtgcttgcaaatgagcaggtaattgatggaaaaggttggcgttcaggagctgttgttgagagaaaaaagttaaatcagtggttttttaacatttcaaagttttctgatgatctcctagaagggttaaaaaaactggatgattggccaaataaagtaaaaataatgcaaaaaaattggataggaaaatcttttggatgcgaaattgattttaaaatccaaggaaacttacctatagaaaaaattaaatgctttacaactcgccctgatactctttttgggttttctttccttgctgtatcagttgatcatccaatatcaaaattttatgaaaatgatgaaaattttaaaaaattcaaagaggaatgttcaaaaaccgggacaacagaagagtctattgcccaaggtgagaaaataggatttaaaactgacttatttgcattaaatcctttcaacgaaaatgacaaagtacctgtctattttgcaaactttgttttaatggattatggatttggagctgtatttggttgtccaggccatgatcaaagagatctggacttcgcaatcaaatataacctgcctataaaaactgtagtaaaacctgacaatgaaaatgatagttttagtgtaacaagtgaagcctacaccggatcaggtgtaataataaactcgaaatttttgaatgggttaaaagttccagatcaatctataatcgaagcaattaaaattattgaagaaaaaaaattaggaaaaaaaacaattaattttagattaaaagattgggggagtatctcgtcaaaga

SEQ ID NO: 304170 - DNA, 733 bp, Unknown
  Bacterial polypeptide expressing nucleotide sequence isolated from the Sargasso Sea
tattataataaattctgattttctaaatggacttagtgcaccagaaaattcagtgattgaaactataaaaattcttgaagaaagaaaattaggaaaaaaacaaattaattatagacttaaagattggggagtttcgcgacaaagatactggggatgcccaataccaataatgtacgatgaagaaggaaacgctcatccagtgcctaaatcgatgctaccagtaaaacttcctgaaaatattgatttgaacacaaaaggtaacccacttgataacaaaaaggattggaaacaaattatagttaatggaaaaaaatatattagggaaaccgatactctagatacatttgtttgttcatcctggtattatttgagattttgttcacctaaagagaaaaattatggatttaatcaaagcgacttagattattggatgcctgttgatcaatacattgggggtgttgaacatgcaatattgcatcttttatattctcgtttttttatgagggctattaattataaaaatgacaattttaaaattaaagaaccttttgaaaatttatttactcaaggtatggtttgtcatgaaacttacaaagatgatgatgataattggataagtcctgacgaaatattttcagatgatggaaaaaatttttttaccattaatgaaaaaaagaaaataaaaattggaccttccgagtcaatgtcaaaatcaaaaaaaaaacacagttga

SEQ ID NO: 304171 - DNA, 949 bp, Unknown
  Bacterial polypeptide expressing nucleotide sequence isolated from the Sargasso Sea
gaataaagttaaagtcatgcaaaaaaattggattggtaaatcatttgggtgtgaaattgattttaaagttgaaggagaattaccaattaataatattaaatgctttactacaagacctgataccctttttgggttttcttttttagctttatcagtagatcacgaagtctcaaaattttacaaaaacgatcctgattttataaagttcaaagagaaatgctcaaaaactggaactactgaagaggcgatcgcagtaggtgaaaaaattggttttaaaactagccttatggcgacaaatcctctagatcccaaaagtaaagtacctgttttttttgctaattttgtattaatggactatggatttggagctgtttttggttgccctgctcatgatcaacgggatttcgatttcgcaaaaaaatataaccttaatataaaaaccgttgtaaaacctaatggtgaagtagataatttccaagttgtggatagagcttatcctgatcctggaattatcataaattcaaattttttaaatggacttgtggccccagaagattctgtaattgaaacaattaaaattttagaggaaaaaaaattaggtaaaaaaaaaattaattttagattaaaagattggggtgtctctaggcaaagatattgggggtgcccaataccaatagcttatgacgaaaaagggaatgttcaccctattcctaaatcaatgttaccagttaaacttccagaaaatattgatttaaatgtaaaaggaaaccccctggatagtcaaaagaattggaaagaaattgtaataaatggaaaaaaacttactagagaaactgacactttggatacttttgtttgttcgtcttggtattacttaagattttgttctccaaaagaaaagggatacggttttaataaagatgatatcaaatatttggatgccagttga

SEQ ID NO: 304172 - DNA, 547 bp, Unknown
  Bacterial polypeptide expressing nucleotide sequence isolated from the Sargasso Sea
atgagtagatataattttaaaaccatagaaacaaaatggcaaaatttctgggaaaaaaataaaagttttcaagtagaagttaatctaaagaagaaaaaattttattgtctagaaatgtttccttacccatcaggaaaaattcatatgggacatgttagaaattataccattggagatgtcttagctagatataaagcacttcaaggttataacgttttacatccaatgggttgggactcctttggtatgccagccgaaaatgctgcaaaacaaaataatcttgatccaaaaatttggactgaaacaaatatcaaaaagatgaaaatccaattaaaaaaacttggtttatcaatagattgggatagagaaatttcaacttgtaatgaagattattataaacaccaacaaaatttttttttagaattacttgaaaaaaaactggtttatagaaaagaaaattatgttaactgggacccagtagatgaaacagttcttgcgaatgaacaagtaataaaaggaaaaggctggcggtcaggggctgctgtag

SEQ ID NO: 304173 - DNA, 745 bp, Unknown
  Bacterial polypeptide expressing nucleotide sequence isolated from the Sargasso Sea
aggtactggggatgtcccatacctatgattcatttaaagaatggagaagtggttcctgtagacaaaagtgaacttccaataaaattacccaaagatgtggatttgagcttgaagggaaatcccttggagaatcatcctacatggaaaaaaactattcataaaaagactggtgagtttgccacaagagaaacggacactcttgatacttttgttgattcttcttggtattttataagattttgttcgcctaaattaaaagataagccctttgacaaagaggcatttagctactggatgcctgtagaccaatatataggaggtatagagcatgcaatattgcatttgctttactctagatttttcatgagagcaataaaactcaatgacaaaaaaattaaaattaaagaaccttttaaaggactttttacacagggaatggtttgtcatgaaacatacaaaaacgaaaaaggtgattggttaagtccagaagatataaaaaaaactgataaatcaaaaatcaatgttggcccccctgaggccatgtcaaagtctaaaaaaaatgttgttgaccctgaaagtatgattaaaatttatggagctgatgcaataagatggtttatgctttcggatagcccgccagatagagatatacaatggtccaacgagggtgtttctagtgctcacaagtttattcaaaaattgtggagtacaaatagaaaaatattggaaagaaaagacaaaaata

SEQ ID NO: 304174 - DNA, 859 bp, Unknown
  Bacterial polypeptide expressing nucleotide sequence isolated from the Sargasso Sea
aggggttggaggtctggtgcattagtagaaaagaaaaaactttctcaatggtttttaaaaattagtaaatactcagaagagcttttaaaggacttggatagcttgactaactggcctaacaaagtcaaagttatgcagtcaaattggattggtaaatcaataggagcagagataaactttaaattatcaaatcaagaaaactttattaaagtatttacaacgagaccagatacaatttttggtgcaacttttttagctctttcaactgaacatgaattatctacagatatttctaaagataataaggatttacaaaaatttattaaagaatgtgaaggcctaaatcctgataaaattaaaaaaggttttgatacaggtttgtttgtaaaccacccatttataaaagataaaaaactcccaatatatatcgctaattttgttttaaaagaatatggtcttggggcaatctttggttgtcctgcacacgatcaaagagatttggattttgcaaaagaatatggtctggatgtaactccagttgttaaaccaaacaacatcatagaaagtgaattcaaaatcaaagacgaggcattcacggaagatggtgttattataaattcagattttttaaatggattagtagttgaaaaagcaaaagataagataattgaacaaattgaaaaaaataaaattgggagaaagaaaataaattataagttaagagactggggaatttccagacaaagattttggggttgtccaatacctattatttatagagaggatggagagataatcgcagtggaagatagtgagcttcctgttaaattgccagacataaaaaagtttaatgaaacat

SEQ ID NO: 304175 - DNA, 892 bp, Unknown
  Bacterial polypeptide expressing nucleotide sequence isolated from the Sargasso Sea
atcatgtacgacgaaaaaggaaccccacatcttattccagacgatcatttaccaatcaaattaccaacagacatctcatttaaaaaaacaggcaatccaattaaaacatctaaagaacatcagtccattacaatcgatggaaaaaattattcaaaagaaacagataccatggatacattttttgattcatcctggtatttcttaagatattgtgatgcaaaaaattcatcattaccatttgaatcaacaaaagcaaatcactttttacctgttgatttttatattggtggtattgaacatgcatgcttacatttactttatgcacggtttttcacaaaagcattacgtgatttaaatttacatgcagttactgaaccattcaaaacattaatttgccaaggaatggtattaaaagatggggcaaaaatgtcaaaatcacttggaaacaccgttgatccagattctattataaataaatatggcgcagatactgcacgaatctttattttatttggagcacctgttgaaaaagatctagaatggtcaagcgacggtgttgaaggatcatttcgatttttaaaacgcttctttaactatactgcaaatcacacccattaccccataaatcccaatgatgtaaatcaattaaataaacactgtaacaaagtaataaaaaaagtgactaatgatatcacaaactttcaatttaataccgccattagtcaactaatggagctcattaataccatatctaaaatcggaacaacattagaagttgcaaaaaaaatggctattttaattgcaccatttgccccatttattgcagaaaatatttggcaagaattaaaccaatcaggcagtgttcatgaacaaaactggccaacatacgacg

SEQ ID NO: 304176 - DNA, 956 bp, Unknown
  Bacterial polypeptide expressing nucleotide sequence isolated from the Sargasso Sea
attgactttagtatattaaagtctgagaatataagttctcaaaaattaaaaatttttacaactaggcctgatacaatttttggagcaacattttgtgcaatttctccaaatcatccacttgcgattgaaattaaaaaaaccaatactgaagtaaaaaactttatttcaagaatagaaaaaaatgatgagaaaataaatattgatgaaaaattgggaattgactcgggtataaaggttaaacacccagtaaaaacgaatagtgaattaccagtttacattgccaactttgttttaatggaatatgggtcaggggcaatttttggctgtccggcgcacgatcaaagggatttggagtttgctaataaatataaattagatgtaataccagttgtaatgccaaaaaatgaaaaggtagatagtttttcaattaaaaaccaggcttttgttgaagatggaattcttattaattctgaatttttaaatggacttagtgtagaacaagcaaaaaaaactattaatgagaaattggttaaagatggctcggccaaatacaagactaattttagactaagggattggggtatatcaaggcaaagatattggggatgtccgattcctataatttacagagaagatggtaaggttttacccgttaaagaaaaagaattaccagttttgcttccccaaaatattagtttgacaggcaaaggaaacccgcttggacaaaataaggattggaaaaaaactatatgccctgaaactggtatggctgctacaagagaaacagatacatttgatactttttttgaatcttcttggtattttttaagatactgttcaccacgttcaaaagaagcatttgagaaaaaaagtttaaattactggatgcctgttgatccatatataggtggtatagaacatgcaatattacacttgctttattctagattttttac

SEQ ID NO: 304177 - DNA, 418 bp, Unknown
  Bacterial polypeptide expressing nucleotide sequence isolated from the Sargasso Sea
atgaaaaaatataatccagatgttgttgaaaaaaaatggcaaaaaatatggaatgaaaaagatatttttgccagtgagatagactacaataaacctaaatactatgttttagaaatgtttccatacccatcgggtgatatacatatgggacatgtccgtaattacacattgggagatcttgttgcaaggtataaacgtgctcagggttataatgtcctccacccaatgggttgggatgcttttggtcttccagctgagaacgcggcaattgaaaatgatatacaccctaatttgtggacgaagtccaatatatcaaaaatgaaagatcaattaaaaaaaatgggcttatcctatgattggaacagagaattatctacttgcgatcctaactattataaacatgaacaaaaaatgtttc

SEQ ID NO: 304178 - DNA, 816 bp, Unknown
  Bacterial polypeptide expressing nucleotide sequence isolated from the Sargasso Sea
aaaaaaattaattttagattaaaagattggggagtttcaagacagagatattggggttgtccaataccaattatatatgatgaaaatggatcatacaaaactgttcccgaagaacaacttccaataaaattacctcaaaatattaatttaaatactaagggtaacccactttcgaacacagaagagtggcgtaaaataaaagtggatggaaaaatttattatagagaaacagataccttagacacttttgtagattcttcttggtactatttaagattttgctctcctaaaaataaggaagaaccatttgataatgaagaagtaaaatattggatgccagttgatcaatatatcggaggtgtagagcatgctattttgcatcttctatattccagatttttcatgagagcaattagttatcaaaataatgaatttaaattaaaagaaccgttcaaaggattatttacacaaggtatggtgtgccatgaaacttataaggatcaagaaaataactggcgaagcccagatgaagtgacaacaaaggatgggaaaaattattttttaaaatctgataattcaaataaaatatttgttggatcttctgaatccatgtcaaaatcaaaaagaaataccatagatccagaaaaaattattaatctctatggagctgacgcagtaagattttttattttgtcggatagtccacctgaaaaagacgttcagtggtctgagcaaggtatgctttcatcttataagtttattcaaaaattatttgtactaaacgaaaaaattaaagaattaaataatcaaaaaaaa

SEQ ID NO: 304179 - DNA, 847 bp, Unknown
  Bacterial polypeptide expressing nucleotide sequence isolated from the Sargasso Sea
tatgggacatgtaagaaactatactattggtgatgttatagctcgatacaaatatttaaatggttttaacgtgctacatccaatgggttgggactcttttggattgccggctgaaaatgcagctaggcttaacaatttaaatcctaagacttggactgaagaaaatattcaagcaatgaaaaaacagttaaaaatgttaggattatctattgattgggacttagaggtatctacctgcaacaaagattattacaaacatcaacaagaactatttattgatttttataatgcaggacttgtttctaggaaagagacctacgtaaattgggatccaattgagaaaacggtattagccaacgagcaagttataaatggtaaagggtggagatcaaacgcaatagtagagagaaaaaagttatctcaatggttttttaatattacaaaattttctgatgaactattaaaagatttagaaaatcttgatggctggccagaaaaagttaaactaatgcaaaaaaactggattggaaaatcaattggatgtgaattagattttaaaattgaaagcctaaaaaaaaatttaagaatatttaccactaggccagatacaatatttggggcaagttttattgcaatctccacagatcacgatatttgcaaaaattttaataaaagctctgaatttaaagaatttcaggacaaatgttctaagattggaactactgaagaagctatggcaaatgctgagaaattaggctttaaaactaatttatttgctgaacatccttttgttaaaaataagaaattgcctatttatgtagcaaattttgttttaatggattatgga

SEQ ID NO: 304180 - DNA, 757 bp, Unknown
  Bacterial polypeptide expressing nucleotide sequence isolated from the Sargasso Sea
ttagcagtttctgttgatcatccaatttcaaagcattttttaaaagatccagaatttattaaatttagagaagaatgttctaaaacaggaacaactgaagaatctattgcccttggtgacaaaataggctttaaaactaatctacttgctatcaacccgttagataaaaaacaaaaagtaccagtatattttgcaaattttgttctaatggattatggttttggagctatttttggatgtcctgcgcacgatcaaagagatttggattttgcaaataaatataaattaagagttaaaacagtagtaaagccaatcgatgaagatgacaattttatagtccaaaaagaggcatatacaggaccaggcgttgtaattaattcagaatttttaaatggttttaaagttccagatgagtcaataataaaaactatagcaattttagaagaaaaaaaaataggtaaaaaaaaaattaattttagattaaaagattggggtgtgtctcgacaaagatattggggatgtccaataccaatggcctatgacaaaaatggtaaagtgtttccaataccaaaaaataatttaccagtaaaattaccagaaaatatagatctgaaatctaaaggtaatccgttggatagtgcaaatgaatggaaaaaaattattattaatggaaaagagttaactagagaaacagatactcttgatacattcgtagactcttcgtggtactttattagattttgttcacccaaataat

SEQ ID NO: 304181 - DNA, 880 bp, Unknown
  Bacterial polypeptide expressing nucleotide sequence isolated from the Sargasso Sea
gataaaacagtgttagccaacgaacaggtaattgatggaaggggttggagatcaggtgcagttatagagaaaaaaaacctatcccagtggtttttgaaaacaagcaattattctgaagagctattatctgatttaaactcattagatatgtggcctcaaaaagtaaagatcatgcaatctaattggattggtaagtctgagggggtagaaatatctttttctataacaggcaacggtgctttaaagcaaaattatataaaggtttacactaccaggcccgatacaatttttggagcaacttttatagcaatctcacctgaacatgagctttcaaaaaagatttttgaagaagatagcgctgcaaaaaagtttagtgatcaaatcaagaaagttgacgctgataaaacaaaggttggatacagtactaacgtttttgttcagcatccctttttagacaaaaaacttccagtatttatcgctaattttgttttaatggattatggtttgggagctatatttgggtgccctgcacacgatcagagagatttagattttgcactaaaatacaatttagatgtaattcaagttgtagaaaataagaattccaaaaagagttttaaattaaaaaatgaggcaatgttagagagtggcacaatgataaattctgactttttaaatggccttgatagtgaactggctaaaaaagaggttttaaataggttagaaaagaaaggaattgggaataaaaaaataaactacaagttgagagattggggtgtttccaggcagcggcactggggatgtccgattcctatgctttatagagaggatggagagattgtgcctgttcaagaaggggacttgcctgttttgcttccag

SEQ ID NO: 304182 - DNA, 695 bp, Unknown
  Bacterial polypeptide expressing nucleotide sequence isolated from the Sargasso Sea
aatgccaaaatacaacccgtctgtcatagaaccgaaatggcaaatttggtgggctgagcagaaaacatttcgttcaccccgtcttccgagcggtaaaaaggcatatattctcgatatgtttccgtatccaagtggcgacggcttgcacgttggtcatccggagggttacaccgcgacagatattgtgagtcgttttgaacgcatgcggggtacaagcgttatacatccaatgggtttcgatgcctttgggttaccggctgaagagcatgcaatacgcacgggcactccgccacgagaaagcacagagcgaaatatcgcgacgttcaggcggcagttacaaatgcttggtttcagctacgactgggagcgtgagacctccactacagacccagagtttgttcgttggacacaatggatttttctgcttttgtacgacacgtggtttgatgctgatcgacaacagggccgaccgatctcagaccttccgattcctgaggatgttcaggaatcaggtgaagaagcagtgaattcctaccgcgatgaccaccgccttgcataccagtcggaagcacctgttaactggtgcccggaacttggaacggtacttgctaatgaagaagttataggtgggctcagtgagcgtggcggtcatccggttgtccggttaccactacggcaatggatgttgcgaatca

SEQ ID NO: 304183 - DNA, 790 bp, Unknown
  Bacterial polypeptide expressing nucleotide sequence isolated from the Sargasso Sea
aaaaccaaaaaaaaattttattgtctagaaatgtttccatacccctctggtaaaattcatatggggcatgttagaaattatacaattggagatgttctagctagatacaaatcactacaaggttataacgtgcttcatccaatgggatgggattcttttggaatgccagcagaaaatgcagcaaaacaaaacaatttagatccaaaaaattggactgaaaccaacattgccaaaatgaaatctcaactaaaaaaactgggtctttcaattgactgggatagagaaatttcaacatgttcagaaaattattataaacatcaacaaaaattttttttagaattattaaaaaaaaaattagtttatagaaaagaaaattacgttaattgggatcctgtagacgaaactgtgttagctaatgagcaggtgattgatggaaaaggatggcgttctggtgccaatgttgaaagaaaaaaattaagtcaatggttttttaatatctctaaattttcacaagatcttcttgatggtttagacaaattggaggaatggcctaacaaagtaaaaactatgcaaaaaaattggatcggaaaatcatttggttgtgaaatagactttaaaattgaaggtgatttaccagtgaaaaatattaaatgttttacaacacggccggatactctatttggtttttcttttttggctctatcaattgatcatgaagtctctaatttttttaaggatgataaaaattttataaagtttagagatgaatgttcaaaaactggaacaacag

SEQ ID NO: 304184 - DNA, 940 bp, Unknown
  Bacterial polypeptide expressing nucleotide sequence isolated from the Sargasso Sea
aaattttatgaaaatgataaagattttatcaattttaaaaaagaatgctcaaaaactggaacaacagaagaggcaatagctgttggtgaaaaaattggctttaaaaccagtttagtagcaattaatccaataaatccctctcagaaagtgcctgtttattttgctaattttgtactaatggactatggatttggtgctgtttttggatgtccagcgcacgatcaaagagattttgattttgcaaaaaaatataacttagaaattaagactgttgtaaggccttttgacaagaatgagaattttaaagtagatacagaggcttattcaggacctgggattttaataaactcggacatgttaaacggattagaagcaccagatacttctgttctagaaacaataaaagtccttgagaaaaaaaatattggaaagaaacaaataaattatcgacttaaagattggggtgtttctcgtcaaagatattggggctgtccaataccagtagcatacgacgatgaaggaaatgttcacccattacctaaatctatgcttccagttaaactacctgaaaatattaatttagatacaaaaggtaatcctcttgataaccaaaatagctggaaggaaattcaaataaatggaaaaaagctcataagagaaactgatacacttgatacatttgtctgctcatcttggtactatttaagattttgttctccaaataataaagaatacgcttttgacaaaaccgaagttgattattggatgcccgttgatcaatatataggtggtgttgagcatgctattttacatttattatattcacgcttttttatgagagcgattaatcacaaaaatgaagactttaaaataactgaaccatttcagagtttatttacacaagggatggtttgtcatgaaacttataaagacgagaata

SEQ ID NO: 304185 - DNA, 839 bp, Unknown
  Bacterial polypeptide expressing nucleotide sequence isolated from the Sargasso Sea
cttggaaaaattaatataaatggtaaagatttaaatagagagactgacacattatatacttttgtggactcttcatggtattttttaagattttgctcaccaggtactaaaggttatggctttgactatgatgatattaaatattggatgccagtggaccaatatattggtggtgtagaacacgcaattttacatttgttatattcaagattttttataaaagcattaaattttaaaaataaaaaatttgatttaaaagaaccatttaaaggattgttcacgcaagggatggtttgtcatgaaacgtataaaagtcaagataatacatggctaaatccagaagaagtagatacaaatgatggaaaaaaattttttttaaaaaaggatcccaaaaaaaaagtaatcgtaggttcttcagaatctatgtcaaaatcaaaaaaaaatacaattgatccagaaatgataataaaaaattacggggctgatgcagttagactatttattttatcagatagcccgccagaaaaagatatacagtggtcagaacagggaatgacagcttcatataaatttgtgcaaaaactttggttgttacatattaaaataaaggaaaaaattaacttaaaaataaattcaaataataaatcaaatgaattatcaaaatttacaaaccaattaatagataaagtaacaaaaaatttagaaaaatttaattacaatgtaataattgcaaatttttacgaaacatacaattttatttacaaaaaattagaccaaatagaaaattccaaagatttattaataaattataaaaaaatattatatttaatgttgccagt

SEQ ID NO: 304186 - DNA, 784 bp, Unknown
  Bacterial polypeptide expressing nucleotide sequence isolated from the Sargasso Sea
gaagatataaatttcagtttaccaggaaatccactagataaccatccaacatggaaatacacaaaatgtccacacacgggaatgaatgcaattcgagaaacggatactcttgatacatttgttgactctgcctggtattttttgagattttgttcaccagcaaatccaaacgcgcctttcaatgatgatgaaataaattattggatgcccgtggatcaatatgttgggggagtagaacacgctattttacacttactttattctcgcttttttacaaaagcacttaaaataaaaaacattgatgaaccattcaaaagtctttttacccaaggtatggtctgtcataatacttatcaaaatgaatcaaaagcttgggtttatcctgaagatttagaaaaaagagatggtgaattttaccaagtatctactggtgaaaaggtacaagaaggaccaattgagtctatgtctaaatcaaaaaagaatgtaatcgacccacaatcaatcattgagtcttacggagcagactcggccagatggtttatgctctctgatagcccccctgaaaaggatattaactggtccgagtccggtattaatggagcttggaaaatatgccaaaaaatatggtcaattgtgaacctttataaagaacttctcaagctgcctaacgaaaatgaggattattctaaaaatggtcatgagttaataaaagtttttcatcaaaatcttcactcaataacaaatagtttagaaaattttcaaatgaacgttgcgatagcaaaag

SEQ ID NO: 304187 - DNA, 679 bp, Unknown
  Bacterial polypeptide expressing nucleotide sequence isolated from the Sargasso Sea
atgaatgagtataaattccaagaaattgaatcaaaatggcaaaagcattggtcagataataattcaataaaatgtgatataacatcagtagataaaaatttttacaatctatgtatgtatccatacccttctggagatttgcatatggggcatatcaggaattacacaattggtgatgtcattactcgatataaaatgatgaatggttttaatgttttatcacctatgggctgggactcttttggacttccagcagagaacgcagcaattcaaactggaattcaccctaaaacttttacagaagaacgtataagtaatatgaaagatcaaataattagacttggttcactttatgagtgggatagagaggtagcggcacatagtaaagattactataaatggacacaatttatttttgttaagctttttaaaaataatttagcttataaaaaagatgcccctgttaattggtgtaattcatgtaaaacggttttagcaaatgaacaagttatagagggaaattgtgatagatgtgatgccatagttgatcaaaaaaacctcaatcaatggtttttaaaaatatctgattattctgatgagctattagacggattgaatgaaataggagattggcctgagaacgtaaaagccatgcagcaaaatggatggaaaatctgag

SEQ ID NO: 304188 - DNA, 832 bp, Unknown
  Bacterial polypeptide expressing nucleotide sequence isolated from the Sargasso Sea
aaggtgagctatcgcctcagggactggttgatctcacgccagcgctattggggttgtccgattcctgtcatccattgcgatgactgcggtgctgtgcctgtaccggaggagcagttaccggtggagctgcccgccgatgctgagttaggtgccagcggcggcagtcctttggaacgtcatcccacctggtccatggtggcttgtccccgttgcggcaaaccggcacggcgcgagaccgacaccatggacaccttcatgtgctccagctggtactacctgcgctacaccgacgcggccaacagcgagcagcccttcagcattgaggccaccaaggcctggatgccggttgaccagtacgtcggtggcgtggagcacgccatcttgcacctgctctattcacgctttttcaccaaggtgttgcaccagcgcggcctggtggaatgctgtgaacccttcgctcgtctcctgacccagggcatggtgcaggggatcacgtatcgcaatccaacgacgcgtcgctatgtcgcccctgcgtcggtcagtgatcctcagcagccgctggatcctgagaccggcgaagcgcttgacgtgttcttcgagaagatgtcgaagtccaagtacaacggcgttgacccaggcacggttgttgatcgctatggcgcggataccgcgcgcatgttcatcctcttcaaggccccgccggagaaagatctcgaatgggatgacgctgatgtggagggtcagtacaggtttttacaacgcatttggcgcctttgcgctgccgctcaggaatcaggcctgtcgatcgctgagccgttgccactgccttcgc

SEQ ID NO: 304189 - DNA, 885 bp, Unknown
  Bacterial polypeptide expressing nucleotide sequence isolated from the Sargasso Sea
tatggggcatctacgctgctatacgctgggtgacgtagtcgcccgttataagcgcgctcagggcttcaacgtcctacacccgatggggtgggacgcgttcgggctgccggcggagaatgcagcaatggagaagggcgtccatcccgcttcttggacccacgaaaacatcgcgaccatgcgcaagcagcttcaggcgatggggctatctatagactggagccgggaattcgccacttgcgatcccgcttattatcgccacgaacaggcattattcatcgacttcctcgataaggacctggtctaccgtcaggacggatgggtcaactgggatcccgtcgacaacacggttctggcaaacgagcaggtgattgacggcaagggttggcgctcaggcgccccgatcgagcgtcgccggctatcccagtggttcgggcgcatcacagcgttcagcgacgaactcctctccgccctcgacaccctcaaccgctggccgtccaaggtgcgcgccatgcaggagaactggatcggccgctcggagggcgcctatatcgaattcgccttcacaaagccgcgcgcgcaagggctgcgggtctatacgacgcgacccgacactattttcggcgccagcttttgcgccatcgccgccgatcacccgctggccgaggagctggcagcaaaggatgccgacgcggcggcgttcatcgagacgtgtcgccagctcggcaccagcgaggaggctatccagacggcggataagcgtggctacgacaccggcctgcgggtcaaacaccccttcgccgagggggtcaagttgccggtctacatcgccaatttcgttctcatgggctatggcaccggcgcaatctttggctgtcccgcgcacga

SEQ ID NO: 304190 - DNA, 715 bp, Unknown
  Bacterial polypeptide expressing nucleotide sequence isolated from the Sargasso Sea
tatggaaagatacaattttaaaaaaatagagatgaaatggcagaatttttggtctaaaaataaatcattcaaaaccaagatagatcccaacttaaaaaaattttattgtttggaaatgtttccatatccatctggaaaaatacatatgggacatgtgagaaattatacaataggtgatgtactatctagatataagtcattgcagggctacaatgtacttcacccaatgggctgggattcgtttggaatgcctgctgaaaatgcagcgagagaaaataatttacatcctaaagattggactgaaaaaaatatttcaattatgaaggatcagctacaaagtttaggtctttcgatagattgggatcgagaaatttctacatgcgatgaaaggtattacaaacaccaacaagaattttttatagagatgtatgagaaaggtttaatttatagaaaagaaaattatgtaaattgggatcctgtagataaaactgttttagccaatgagcaagtaattgatggaaaaggttggagatctggagctttagttgaaagaaaaaaactcaatcagtggttttttaatatttctaaattttctaatgaattattagaaaatttaaacagtttagacaattggccaaaaaaagtaaaaattatgcaagctaactggattggtaaatcatttggatgtgaaataaattttaagattaatggtaat

SEQ ID NO: 304191 - DNA, 845 bp, Unknown
  Bacterial polypeptide expressing nucleotide sequence isolated from the Sargasso Sea
gacacaaaaaaatatcgcaactatgaaaagacaactctattctttaggactttcaattgattgggatttagaaatttcaacgtgtgatccaaattattataaacatcaacaatcactttttatagatttttataacaaaggattagtcgttaaaaaagaaacttacgtaaattgggatcctgttgaacaaacagttctagcaaatgaacaagtaattaatggtaaaggatggagatcaaacgctattgtagtaagaaaaaaattatcccagtggttttttaatatatctaagttctcagaagaattgttagaagatttaaattcgctctcagaatggccagaaaaagtaaagctgatgcaaaaaaattggattggtagatctgttggatgtgagattgatttccaaatcgagggacaagaaaaagtaaaaatttttacaacacgcccagatactatatttggcgctacttttttagcggtttcgattgatcatccaatttgcaaaaattttagtaatgaggataattttcttaaatttaagaataaagcttctcaagtaggaactactgaagaagctatagcaaatgcagaaaagattggttacgacacaggttttaaagctaagcatccttttataaaaaataaaagtattcctgtttatgttgcaaactttattttaatggattacggaactggtgctatttttggatgtcctgctcacgaccagagagactatgacttcgctaagaaatataaaattgaaattataaaagtagttaaaccaagagaaaatcatgaaatcgttcaagctaataaggcttttgatggagatggaagtatgatta

SEQ ID NO: 304192 - DNA, 751 bp, Unknown
  Bacterial polypeptide expressing nucleotide sequence isolated from the Sargasso Sea
aacaagacctgatactatttttggagcaacatttttagcgctgtctccagaacattggttatcaaaagaaatttcaaaaaataatcaaagtttacaaaaatttataaaagaatgtgaagtgtcaaattcagaaaaaaacaaaagaggttttaatactaatttgtttacagatcatccgtttatagaaggtaaaaaaattccaatttacgtagctaattttgttttaacagaatatgggcttggtgcaatttttggatgtcctgcacatgatcagcgagatttagattttgcaaatgaatatggtattgatgtaataccagttgtcaaaccaataaatattgacataaaaaattataaaataacagataatgcgtatacagaagatggaattattataaattcaaaatttttaaatggcttaactgttgaggctgcaaaagaaaagataattaatgaaattgtaaatagtaaaattggaagaaaaaaggttaattttaaattaagagactggggtatttcaagacaaaggttctggggttgccctataccaattatatacagggaagacggtgagattttagcagtagaagatgaaaatcttccagtaagacttcctgatattcaaaatttcaatgaatcttcttcggctttaaataatatacctgagtggaaagaaacagtgtgcccaaagactggcatgaaggctattagagaaacagatacatttgatactttttttgagtcttcttgg

SEQ ID NO: 304193 - DNA, 473 bp, Unknown
  Bacterial polypeptide expressing nucleotide sequence isolated from the Sargasso Sea
tatgaattataaacataaagatatcgaatccaagtggcaaaaatactgggatgataataaaacctttaaggccatcgaagatactgataaagaaaaattctacattcttgatatgtttccctatccatccggatcaggattacatgttgggcatcccctaggctatacagccactgatatatactcccgctataagaggctacaaggatataatgtacttcatccaatggggtgggatgcatttggattaccagcagagcagtacgcattaaaaacaggtactcacccaagagaaaccacagaaaagaacatcgacagatatagacagcaactgaaaatgcttggattttcttatgactgggacagagaaataaacaccactgagcctagttattataaatggacccaatggattttcttacaattgtataaaaagggcctagcttatgaggcagaagtacctgttaattggt

SEQ ID NO: 304194 - DNA, 743 bp, Unknown
  Bacterial polypeptide expressing nucleotide sequence isolated from the Sargasso Sea
gatgcaattttcagtagacaaagatactgggggagaaccaataccaatttattatagaaatagtgaacctgtcgctttaagtatatctgacttgccacttgagcttcctgaggtagataattttctaccaacaaaaaatggtgattctccattaggaaattccaaaaaatgggcatgggacttaaagaataaaaccgtagtagaaaataatttaatcaatgatagggatatttttccattagaacttaatactatgccaggctgggcaggaagttcatggtatttctataggtatatggattcagctaataaagatttttttgcatcaaaagaggcaatagactactggaagggcgtagatatctaccttggagggagtgagcatgcaactggacatcttctatattcaagattttatcaaaaatttttgtttgacctaaatattctcccaattaatgagtacgctagcaaattgattaatcaggggatgattcttggaaactcatcatttatctacagagagagagggactaataagttttattctaaggacttaataaaagataaaaatgtagataagattagaattgatatatcatatgttgatattgataattacctatatgttgataaacttaaaaaaagtgataaatcatttagtgattctgaattttattctgaaaatggaaagtttattgtagaaagagagcacgaaaaaatgtcaaaatctaaatttaatgtag

SEQ ID NO: 304195 - DNA, 871 bp, Unknown
  Bacterial polypeptide expressing nucleotide sequence isolated from the Sargasso Sea
aaaaaaatattatatccttgaaatgtttccatatccatcaggtaagatacatatgggtcacgttcgtaattatactttaggagacgtaattgctcgatataaacgagcaaaaggatttaatgtcatgcatccaatgggttgggatgcttttggcttacctgccgaaaatgctgccaaagaaaataatatttctccaaaaaattggacgtatgaaaatattgcaacaatgaaaaatcaattaaagcagatgggtttatcacttgattggtctcgtgagctagctacatgcgatgagagatattatcatcaacaacaaaaactttttttagaattttataaaaaaaatctaatttataaaaaggagtctctcgtaaattgggatccagttgaaaatacagtgttggcaaatgagcaagtaatagatggaaaaggatggagatccggagctgatgtagaacaaaaaaaattacaacagtggttctttaaaatcacagattatgctgaagagttgcttactagtcttgacctaatgaataagtggcctgaaaaagtcaaaacaatgcaaaaaaattggattggaaaatcagttggatgtgaaataaatttccaactttcatcaaatgaatataacctcaaaacttcaagtttagagatttttacgactagacctgatacgatttttggagctactttctgtgcactttcaccttttcaccctcttgtcgatgaaataattgaagcgaacattcaaattaagagagaggtgatagaactcagagctcggaaaattaatgaagagtcaatttcaaaagatgaaaagattggtgtaaatactggaattttcattgatcatccatttataaaaaaataa

SEQ ID NO: 304196 - DNA, 943 bp, Unknown
  Bacterial polypeptide expressing nucleotide sequence isolated from the Sargasso Sea
cgaacaggtaattgatggaaaaggatggagatcaggtgctgtagttgaaagaaagaaattaaaccaatggttttttaacatatctaaattttctcaagatttactggatggtctatctgatttggatacatggccaaataaagtaaaaataatgcaaaagaattggatcggaaaatcatatgggtgtgaaattgatttcaaaatagagggtgatctaactgttaagaacattagatgttttacaacaagaccggatactctttttggattttcttttttggcactttctgtagatcatgaattatctaaattttataaagatgataaagagtttataaaatttaaagaagaatgttctaaaactggaacaacagaagaagcaatagcaattggcgataaaattggatttaaaacaaatttgatggcaattaatccactaaattcttctcaaaaagtacctgtttattttgcaaattttgtattattggattatggatttggggctgtatttggttgcccggctcatgatcaaagagattttgattttgctaaaaagtatgatttagaaataaaaactgttgtaagaccaaaggataaaaatgaaaattttaaagtagcagatgaagcttattcaggaccaggaattttagttaactcagattttttaaacggattggaagcaccaaataattctgttttagagacaattaaaattcttgaaaaaagaaaattaggtaaagaaaaaataaattttagactaaaagattggggtgtatcaagacaaagatattggggttgtccaataccagttgcgtatgatgaagatggaaatgtacataaaatacccaagtctatgttgccagttaaacttccagaaaatatagatttgagcgttaaaggaaaccctcttgataatcaaaaaaattggaaagaaatattatag

SEQ ID NO: 304197 - DNA, 879 bp, Unknown
  Bacterial polypeptide expressing nucleotide sequence isolated from the Sargasso Sea
catggttttttaatatatccaaattttctcaaaatttattggatggtctagataaattagaggcttggccaaataaagttaaaataatgcaaaaaaattggataggtaaatcttttggttgtgaaattgatttcaaaatagagggagacctacctattaataaagttaaatgttttactacaagacctgacactctttttggtttttcttttttagcattatctgtagatcatgaaatttcaaaattttacaaagacaatattaattttataaaatttaaggaagaatgttcaaaaacaggtacaactgaagaggcaattgcagttggtgaaaaaattggctttaaaacaaatcttatggctattaatcctttaaatccaaaacataaagtaccagtgtactttgctaattttgtattaatggactatggatttggagctgtttttggatgtccagctcatgatcaaagagattttgattttgcaaaaaaatatgatctagagatcaaaacagttgtaagacctcatgataaagaaaaaaatttcaaagttgttaacgaagcctatccaggtccaggtattttaataaattctgattttctaaatggatttgaagcaccagataattcagttatagaaacaattaaaattttagaagaaaaaaaattaggaaaaaaacaaattaattttagattaaaagattggggagtatcacgacaaagatattggggttgtccaattccaatagcatatgatgaagatggtaaagcttatcctattcctaagtcaatgctacctgtaaaacttcctgaaaaaattaacttaaatgttaaaggcaatcccctagataatcaaaaagatggaaggaaattgttataga

SEQ ID NO: 304198 - DNA, 787 bp, Unknown
  Bacterial polypeptide expressing nucleotide sequence isolated from the Sargasso Sea
aatgaataaagactatcaaccagccaatattgaaaaaatcgcacaagctgtttgggaaacaaatacttcttctaaagtagatttttctactagtgtcaacaaatactatgtgcttagcatgtttccatatccaagtggcaaactccacatcggtcatgtcagaaattacacaattggtgatgtgataacaagatctaacaagatgattggcaaaaatgtatttcaacctatgggttgggatgcatttgggctcccagcagaaaatgctgccattaagaataatgttcatccagaagagtggacaaaaaagaatatcgcacatatgaaaggacagttaaaaaatattggtatcttatatgactgggaaaatgaggtatctactgcagatccaaaatattttagatgggagcaatggtttttccttcaactactaaaaaaaggacttgtttatcgaaaattatcagaggttaactgggatccagtagataatactgtacttgcaaatgagcaagttattgatggtagaggttggaggtcaggagctttagttgagcgtaaagaaattccacagtggtttctcaagatcaccgattactcagatgttttattgaaagatctcgataaactttcagattggcctgaatcagtcaagctcatgcaaaaaaactggattggtaaatcaaaaggtctaaatataaattttaaacttgaggggaatgatcagttattaattacatttactaccagacctgatactctattcggggtttcttaccttgcgattaat

SEQ ID NO: 304199 - DNA, 873 bp, Unknown
  Bacterial polypeptide expressing nucleotide sequence isolated from the Sargasso Sea
ttctttgattcatcttggtattatgcaaggtttttatctcaaggtgatacaaagcatttactcaacccagaattaaaaacatcactacctgtagatatttacattggtggaattgagcacgctattctgcacttactttatgctaggttcgtcaatatgtttttacacaacattggattaagtaattcaaaagagcctttcaaggaaatgattacacaaggcatggttctaaaagatggtgccaagatgtcaaaatcaaaaggcaacattgttacaccaagcgagcttcataccaagtacggtgcagatgcaatacgtttatttattttatttgccgctcctccaacacaatcactcgagtggtcagatgctggtatagaaggaatgcaacgctttttgaaaaaagtacatcattattttaccaatccatctaaagcactgaataccgaaaaccctactgcttggactgaatcacaaaagattctaaaacaaattacagcagattatgagaaaaggcagctaaacacaactgttgctggcgcgatgaagctattcaatatcttaacagagcagaaagatagaacacgcacacatgaaaaaatcgaaaagatatttctcacagtaatgaaaccaattgcgccacatatggctatttactgttcagatgcgattggctttgagattacaagctggccgagcgttgatcaaaaggcacttgaccaagctcaaattgaaattagcatccaaatcaatgggaaaatgcgtggtaaagttaaagcaaactcacaatcgactgaaaatgatatacttgagattgcgagaaaaaacccaacaatctcaaaatatctttatgagaaagaaatcaagaaagta

SEQ ID NO: 304200 - DNA, 342 bp, Unknown
  Bacterial polypeptide expressing nucleotide sequence isolated from the Sargasso Sea
ggattgccagctgaaaacgccgcaataacagaaaaaaaacaccctaaagaatggacatacaaaaacatagaaacaatgaaaaaacagttgttgagaatggggttgtctttagattgggatagggaaattgcaacatgccaccctgattactacaaacatgaacaaaaattttttatagatttatttaacgctggcttggcttataaaaaagaatctgaggttaattgggatccggttgacaaaaccgtattagcaaatgaacaggttatagatggtaaaggttggaggtcgggagcgcttgttgagaaaaagaaactatctcaatggtttttaaaaatttct

SEQ ID NO: 304201 - DNA, 871 bp, Unknown
  Bacterial polypeptide expressing nucleotide sequence isolated from the Sargasso Sea
ctggcactttcaattgatcatgagatctccaaattttataaagaaaacaatgattttataaaatttaaagatgaatgttcaaaaactggaacaacagaagaggcaatagctgtaggagaaaaaataggttttaaaacgaatttaaaggcggttaatccattcaacccagatcaaaaagttccagtatactttgcaaattttgtgcttatggattatggttttggtgcagtatttggatgccctgcacatgaccaaagagattttgattttgcaaaaaaatataatctggatatcaaaacagtagttaggccatctgataagagtgatgattataaagttgctgatcaagcatatcctggggaaggagttttaataaactcagattttttaaacggcttagaggcaccaaatcaatctgtaatcaaaacaatagaaattttagagaaaaaaaaattaggatcaaaaactataaattttagattaaaagattggggagtttccaggcaaagatattggggttgtccaataccagtggcatatgatgaaaatggagagattcataaaattccagattccatgttgccagttaaattgccacaaaatataaatttaaatgtcaaaggcaatcctcttgatcatcaagaagattggaaagagataataattgatggaaaaaaattaataagagaaacagatactcttgatacgtttgtttgttcctcttggtattttttaaggttttgctcacctaccgaaagtcaatatgggtttaaagaagaagatataaaatattggatgccagtagaccaatatataggtggcgtagaacacgctattttacatttactttattcaagattttttatgagag

SEQ ID NO: 304202 - DNA, 802 bp, Unknown
  Bacterial polypeptide expressing nucleotide sequence isolated from the Sargasso Sea
atgtcttttctagcagtttctattgatcatccagtttcagaatttttttctaataatgaagattttattaaatttaaaaaagaatgttctaaaacagggaccacagaagagtctatcgcagctgctgaaaaattaggatttaaaactgatcttttagcaatcaatcctttggatgaaacgaaaaaagttccagtttattttgcaaattttgttttaatggattatggtttaggggctgtatttggatgtcctgcacatgaccaaagggatttagaatttgcattgaaatataatttggaagttattccagttgttacaccagaaaaaaataaaaatattacaattaaaaataaagcttttaccgattcgggatatctttttaattctaaatttttaaataatttaaaagtaccagaggaatcaattccgcaaacaattgattacctagaaaaagaaaatataggtcaaaaaaaaactaattttagattaaaggattggggtatttcaaggcagagatactggggttgtcctataccaatagcatacgacgaaaataataatccaattaaaattccaaaaaacatgcttccagtaaagttaccagaagtaaataacttaaacacaaaaggaaatcctttagatgagattgaagattggaaaaacataaaaattgatggaaaaaaatataaaagagaaacagatactctcgatacttttgttgactcttcatggtatttcctaagattttgctctccgaagaatgatagctatggttttaaagaagaagaaattaaatattgga

SEQ ID NO: 304203 - DNA, 937 bp, Unknown
  Bacterial polypeptide expressing nucleotide sequence isolated from the Sargasso Sea
caatacgatgccacagtgggccggatcctgttggtattatcttagatatttggatccatctaccgatgaaaaagcatgggattcagagaaagaaaaatactggatgcctgtagatctctatatagggggagcggagcatgcggtactccatcttttatattcacgattttggcatcatgtactatttgatcttgggttggtatcaaccaaggagccatttaaaaaattattcaatcaaggtatgatacttggacaagatggctcaaagatgagcaagtctaggggtaacgtgattaatcccgatgaaactgttgaaacgtatggttccgattctatgaggatttatgaaatgtttatgggtcctttagataaagcaaaaccatggagcaccaccggtcttcaaggctgctctcgatttataaaaaagttatggtcgatcttagtagatgatgaaggtgtgttatcgtcaaatgttacagataaaaaagacggcaaagaaacacttcaagccctaaatatgatgattaagaagatttcagataatttagatcaaatgcaattcaatacttgcgtttcagaattcatgatatttacaaatcatattcaaaaacttgattcgataaatattgatacaataagatcgtttattattattatgaatccatttatgcctcatttagcgcaagaattgtgggagttaattggtgaaaccaatgagcttacctatcaagcgtggccagattacgataaagatcttgctatctctgatgaaattgtaattccaattcaaattaatggaaaaagacgttcagaaattcttatttctgcaaatgaatctgaatctgaagttatatcaaaagctaaatctgatgataaaatagcttcttacttaataaatacaacgatcattaaagaaatttatataaaagggaaaata

SEQ ID NO: 304204 - DNA, 715 bp, Unknown
  Bacterial polypeptide expressing nucleotide sequence isolated from the Sargasso Sea
gatgtcagaaaaatataatccaagagttattgagaagaaatggcaatcattttggactgataataatctattcgcaagcaaagtaattaaaggtcaaaaaaaatattatatacttgaaatgtttccttacccatctggaaaaatacatatgggtcatgtaaggaattatactttaggtgatgtaattgcaagatttaaaagagctcaaggatttaatgtgatgcatccgatgggttgggatgcttttggacttcctgctgaaaatgccgctttagaaaataatatttctccaaaaagctggacgtatgaaaatatttcaacaatgaaaaatcagctgaaacaaatgggcctttcacttgattggtcaagagagctagcaacttgtgatgaaatatattatcaccagcaacaaaaactttttttaaatttctataaaaataaattaatttataaaaaagaatctctggtcaattgggatccagccgaaaatactgtacttgctaatgagcaagtaatagatggaaaaggttggagatcaggcgctgaaatagagcaaaaaaaattatcccaatggtttttcaaaattacagattatgctgagagtctccttaaaagtcttgataatatgagagattggcctgaaaaagtcaaaatcatgcaaaagaactggataggaaaatctacaggatgcgaaatagattttgaaattgtatca

SEQ ID NO: 304205 - DNA, 842 bp, Unknown
  Bacterial polypeptide expressing nucleotide sequence isolated from the Sargasso Sea
tatgaaaaaccggataccttataatccttcacttattgagccaaagtggcaaaaaaaatggaaggattcaaaaatttatactgttgacttagattcaaaagataagaaaaattatttttctctaacaatgtttccatacccatcaggagatttacatattgggcattggtacgcttttactcctgcagacagctattctcgttttaaaaaaatgaaaggtttcaatgttcttcatactcaaggttttgatgcttttggtttacctgcagaaaatgctgcaatttcaagaaacataaacccaatgaaatggacattcgacaatattgacaatatgagaggacagtttaatttaatgggtaattcgtatgactggactagagagttaattacctgcacaccggaatattacaagtggaatcaatttttctttttaaaaatgtatgaaaaagggattgcatatagaaaaaatggagctgtctggtgggaccctattgaccaaacaacattagcaaacgagcaggttgttgaaggtaaatctgaaagatctggagcagatgttgttagaaaaatgatgccccaatggtatttcaagatcacagattatgcagaagaattactagaaatggatgatttaggttggccagaaaaaattaaacatatgcaaagaaattggattggtaaatcattaggaacagatgtagattttaaacttcaaaaaggcaataaaattatttcaacttttacaactcgtgtcgacacaatatttggcgtaacctttatagttcttgctccggaacatgatttgataaatgaagtaacaacagaagagtacaaggaaaagg

SEQ ID NO: 304206 - DNA, 929 bp, Unknown
  Bacterial polypeptide expressing nucleotide sequence isolated from the Sargasso Sea
gttatattctagatttattataaaagctttaaatagtattaatgagatcaatattaaagagcctttcaaaggattgttttgtcaaggcatggtttgtcataaaacttataaagatcaaagtggcagatgggtttttcctgaagatgttataaaaaaaaacaatcaattaatacataagactacgggcaaaaaagtttttgaaataaagtctgaaaaaatgtccaaatctaagaaaaatatagtcgaccctgtttctattatagaaaattatggagctgacactgctagaatctttatgctctctgacagtcctcccgaaaggaatctagattggagcactagtggaatagaaggctctagaaaatttatagtaaaagtatggattttttttaaaagactcaagtttaacgaaaaagatatagataaaaatacttcatttgaaaatgatcagccttcagatttaacaagacaactacatttgtgcattgaaaaagtaacaaagagcttagataactttcaatacaacgttgcagttgcctcactaagagagtttgcaaattattttttctctattaaaaatgaagataatattaagggcttacacaaagccttatccaattgggtcatcatgataagtcctttagcgcctcatttggctgaagagctttggcgaacattaggatataaaagtcttgttgcggaacaaatgtggccaaaatatgaaaataaattttttatagaagataatataaatctaattatacaaattaatggcaagaagaaattagtaatgaacgtaaaaaagggattaacaaaagaacaaactcagcgagctgctttaaataacagtactataaaaaaaatcataggaggtaaaacttataaaaaaatcattacaattccagatagaatagttaacttagtttttt

SEQ ID NO: 304207 - DNA, 913 bp, Unknown
  Bacterial polypeptide expressing nucleotide sequence isolated from the Sargasso Sea
tttgcatttgttatatgcaagatttttcacaaaagctttgcgagataatgatttgtttgaaattgatgaaccattcaagaagttattaactcaaggaatggtgcaggccgcagcatataaaaacaataaaactggtaaatatgtttctccttccgatattactgacctatcaaatcctaaagatccaatcgacaattcaaaactagaagttcttttcgagaagatgtccaagtcaaaatataacggaatagatcctgaatcagtaataaaaaaatatggagcagatacagcaagaatgtttatattatttaaagcaccaccagaaaaagatttggaatggggagatacagatgttgaaggacaatttagatttttaagcaggatttggaagctttatataaattgtgcaaaagatataaatagtaaaagtaagtcctatccagataaagaaaaaactttaataaagtcaatgaacattgctataaaagaaatttcaaatgacatattaaataaccaatttaacactgcaatttcagaactaatgaaattttataattcattatcaaattccattaatgatgtaaataataatttgaaaaaagatgctttaaaaacattttgtattttgttagctccatttgcacctcatatttctgaagagatatggtatcttataggatttaaaaattctgttcatttagaaaactggccttcatttaatgcagaagcattaaaagaagattcatatgaactagttatacaagtgaatggaaaagttagagataaaataaatattaataatgaaatgaatgaagatcaaattaaggaattgactcttaaaagacctaatattttaaaatggaccaatgataaggaaataagaaaaataattattgttaaaggaaaattatga

SEQ ID NO: 304208 - DNA, 610 bp, Unknown
  Bacterial polypeptide expressing nucleotide sequence isolated from the Sargasso Sea
atggaaagagtaaattttcaatctctagaaaaaaaatggtctaattactttttaaaacaaaagctttatcaagaaaataaaaccgcaaaaaagttttattgtttagaaatgtttccatatccatcaggaaaaatacatatgggacatgttagaaattatactataggagatgttattgcacgctacaaatttcttaacgggtatagtgtattacatccaatgggatgggactcatttggcttacctgcagaaaatgctgcaaaacagaataatttaaatccaaaagattggactaaaaaaaatatttctcaaatgaaggctcagctaatgatgttgggtctatcaatagattgggatcttgaagtttcaacttgtgatgaaaattactataaacagcagcaggaattatttattgatttatataataatggttttgtctctagaaaagaaaattatgttaattgggatccagttgaaaaaactgttttagcgaacgaacaggtgattaatggaagaggttggagatctaacgctttagtagaacgaaaaaaactttcacaatggttttttaatattactaaattttcagaagaagttaatctcagatcta

SEQ ID NO: 304209 - DNA, 880 bp, Unknown
  Bacterial polypeptide expressing nucleotide sequence isolated from the Sargasso Sea
aatggaaagatataatataaaaaacgtagaaaaaaaatggcaagattattggtctaaaaaaaaaacacacaccagtaaaatagataaaaataagaagaaattttattgtttagaaatgtttccttatccttctggtaaaattcacatgggccatgttcgaaattatacaattggagatgttttagctagatataaaaaacttcaaggttttaatgttttgcatccaatgggttgggattcttttggtttaccagcagaaaatgcagcacgcgagaataacctacacccaaaagcttggaccgagaaaaatattgaaactatgaaaaaacaattaaaacttttgggcctctctttggattgggatcgtgaaatatcaacttgtgatccagaatattataagcaccaacaagaattttttatagaattatttgaaaaaaaattagtttataaaaaagatacctacgtaaattgggatccagctgaacaaactgtattggctaatgaacaagttattgatggaaaaggttggcgttcaggtgttgctgtagaaagaaaaaaactttcacaatggttttttaatattaaaaaattttctcaaaatttgttagatgagttggaaaaattggaaaattggccagataaagtaaaattaatgcaaaaaaactggataggaaaatcttttggttgtgaaataaatttccaaatggaaaaaattgtaaaagataaatatggagaacttacaaaacaaataaaagtttttacaactagaccagatactatatttggagcttcatttattgctctttctatagaccacccaattgcgaaaaattttgaaggaaataaagattttattaaatttaagtcagaatgttcaaaa

SEQ ID NO: 304210 - DNA, 427 bp, Unknown
  Bacterial polypeptide expressing nucleotide sequence isolated from the Sargasso Sea
acacagtttcacaccgctggtggcagcctgtatggaaagctttaatgcactcgaccgatttgagcatgggaacgatcccggccggattggggtcatgcgcgaggtcctcgggatcctgatccgggtgttggcccccatcaccccgcacgtcagtcatgtgctttggggcgaactcaagatgcttggcgatcttctggatgcgccctggcccgaggtggatcaggaggcgctgacttcagctacgcagatgctggcagttcagatcaacggcaaactccgcagccaggtggagatcgatgcagaggctgacgaagatcgcatacgcgatgcggtgttggcggatgaaaaagtggcgcgtcacgtcggcgacaagcctgtgcgaaaagtcatcgtggtacccggcaaactggttaacgtggtcgtttga

SEQ ID NO: 304211 - DNA, 373 bp, Unknown
  Bacterial polypeptide expressing nucleotide sequence isolated from the Sargasso Sea
aatgaacaaggttgatgtaaaagaaatagacaaaaaatggcagaatttttggcttaaaaataaaggttcgtttaatagcactgaaaagaaaaaaaagttttattgtcttgaaatgtttccatatccctcagggaaaattcacatgggacatgtgagaaattatacaatcggcgatgttttggcaagatacaaatcaatgtgcggatttaatgttcttcatcccatggggtgggactcgtttggaatgcccgctgaaaatgctgcgcgggaaaataaattagatccaaaagactggacaaaaaaaaatattgcaacaatgaaaaagcaactacaatcactcggtctttcaattgattgggatttagaaatttca

SEQ ID NO: 304212 - DNA, 597 bp, Unknown
  Bacterial polypeptide expressing nucleotide sequence isolated from the Sargasso Sea
gtttttaacaagatagaaaaaaagtggcaaaatatttggtccgaaaagaaagttaaaaaaaagaaaaatcaaaaaaaattttattgccttgaaatgtttccctatccatctggaaaaatacacatgggacatgtaagaaattatacaataggtgatgtaatagctagacataaaatcatgaaaggttttgatgtcatgcatccaatgggatgggatgcttttggattaccagcagaaaatgctgcaaaagaaaataatttaaatccaaaagaatggacatttcaaaatattgagacaatgaaaaaacagttgcaaatgctgggtttttcaattgattgggatagggaaatttcaacttgtaaagaagattattataaacagcaacaatctttatttatagatttatacaaaaacgacttagttggtagaaaagaaacttatgtaaattgggacccggttgaaaagacagttttagcaaatgaacaagtaattgatggcaagggatggagatcaaatcaaccagttgaacgaaaaaaattaaatcaatggttttttaaaatcactaaattttctgaagaattattaaatgacctaaaa

SEQ ID NO: 304213 - DNA, 949 bp, Unknown
  Bacterial polypeptide expressing nucleotide sequence isolated from the Sargasso Sea
aatacagataaggaaaagaaattttattgtttagaaatgtttccatacccgtcaggaaaaattcatatgggacacgtaagaaactatactataggtgatgtgttagcgagatataaagcaatgtgtggtttcaatgttttacatcccatgggttgggattctttcggaatgccagcagaaaatgccgcaagggaaaataaattagatccaaaagaatggactaaaaaaaatattgcaacaatgaaaagacaattgcaatcattaggtttgtctattaattgggaattagaaatatctacttgtgatgaagaatattataaacatcaacaatcactttttatagatttatataataaaggtctagtaattaggaaagaaacatatgttaattgggatccaatcgacaaaacggttttggcaaatgaacaggttattaatggtaggggttggagatcaaatgctgttgtcgaaagaaaaaaattatcacagtggttttttaatatttctagattttctgatgagctcttagaggatctcaaaacacttgatcagtggcctgataaagttaaacttatgcaaaaaaattggattggtaaatcaattggatgtgaaatagatttcgaagtagaaggaaaagaaaaaattaagatttttacaacacgaccagatactatatttggcgctacttttttagcggtatcagttgaccaccccctttgcaaaaattttgaagataaaagggattttgtgaagtttaagaaagaggcttctcaagtgggaactacggaggaagcaattgctaatgcagataaaattggttttgatactggttttagagctaaacatccttttattaaaaataaaacgatacctgtttatgtagctaattttattcttatggattacgggacgggtgctatttttggttgccctgcacatgatcaacgag

SEQ ID NO: 304214 - DNA, 856 bp, Unknown
  Bacterial polypeptide expressing nucleotide sequence isolated from the Sargasso Sea
tcctatgggctgggattcttttggtttgcctgcagaaaatgctgctaaagaaaataatttaaatccgaaagattggacaaaaaaaaatattgctacaatgaaacatcagctacaattgctaggtttatctattgattggagtcttgaaatctctacttgtgatgaagaatattataaacatcagcaagagttatttattgatttttttaataaaggtctggttattagaaaagagacatatgttaattgggacccggtagaaaaaaccgtattagcaaatgagcaggttattgagggacgaggttggcgatctaatgccttggttgaaagaaagaaattacatcaatggttttttaatatttcaaaattttctgaggagttacttgaggatctaaaaaccttaaaagagtggcctgaaagagtaaagttgatgcaaaagaactggattggaaagtctgtgggatgtgagattgattttaaagtagaaaatgaaaaaaaatttatcaaagttttcacaactcgtccagacactatatttggtgccacttttttagcaatatcagtagaccaccctatttgtgaaaaattcaaaaattcccaagattttagcgaattcagaaaaaaatgttcagaggttggaacaactgaagaggcaattgcaaatgcagagaagcttggatttaaaaccggtttattcgccgaacatccttttataaaagaaaaaaaaataccaatttatgtagcaaattttattttaatggattatggaactggtgcaatttttggttgtccagcacatgatcaaagggatttcgattttgctaaaaaatataaattggagataattgaggttgta

SEQ ID NO: 304215 - DNA, 766 bp, Unknown
  Bacterial polypeptide expressing nucleotide sequence isolated from the Sargasso Sea
tgaaaatgcggcaagggaaaatcaattagatcctaaagattggactgaaaaaaatatagaaaatatgaaatctcaacttaagaaacttggcttgtcaattgattgggatagagaaatatcaacatgtagatctgaatattacaaacatcaacaaatgttttttttagagctttatgataaaggccttgtatacagaaaagaaaattatgttaattgggatccagtggatcaaactgtgctagctaatgaacaagtgattgatggtaaaggttggcgatctggagctattgttgaaagaaagaagttaaatcaatggttttttaaaatatcaaatttttcagatgatttacttaaaggactagagaaactagatgattggccaaataaggttaaaattatgcaaaaaaattggattggaaaatcatttggttgtgaaattgattttaaaattgaaggtgacccctcaattgaaaatattaaatgttttacaacaagacctgataccttatttgggttttcatttttggcattatcagttgatcatccaattgccgaactttataaaaatcaatcagaatttaaaaaatttaaagatgcatgctccaaaactggaacaactgaagaatcaatagctcaagctgaaaaaatcggtttcaaaacaaatttgatggctcttaatcctttagataaaaataaaaaagttcctgtgtattttgctaattttgttttaatggactatggttttggtgccgtgtttggttgtcca

SEQ ID NO: 304216 - DNA, 778 bp, Unknown
  Bacterial polypeptide expressing nucleotide sequence isolated from the Sargasso Sea
gcagaaatagactttagaatatataataatgataaaaaaattactgtttttacaacgcggccggacactatatttggagctacatttattgcattgtcaacagagcatgagttagtaattaatatttcaaaaaaaaataatgatcttaaaaaatttattaaagattgtgaaaatcttaatcatgaaaaagaaaaaaaaggttttaatactggtttattagttgagcacccatttattgacggaaaaaaaatacctgtttttgtagcaaattttgttttaaaagaatatggacttggttcaatttttggttgcccagcccatgatcaacgagatttagattttgcaaacgaatataatcttgaagtaatcactgttgtaaaaccaaataatgttaaagaggattcatttaatgtaagtgttgaagcttacactgatgatggcacgattataaattcaaaatttttgaatggatttaatgtagaagaagctaaaattagaattattaatgaaatagaaagtaaaaaaataggaaggaagaaaataaatttcaaattaagagattggggtatttcaagacaaagattttggggctgtccaatacctattatttatagagaagatggaaaaatacttcctgttgaagaaaaagagcttcctgtaaaactgcctgagattgagaaatttaatgagtcatcaagtgctttaaataatatttctggttggaaagaaaccaagtgtccgaaaactggtatgaaagcttttagagaaacggatacat

SEQ ID NO: 304217 - DNA, 328 bp, Unknown
  Bacterial polypeptide expressing nucleotide sequence isolated from the Sargasso Sea
atgcaggagtacgttccaaaggaaatcgaatcaaagtggcaaaaatactgggaagatcataatttgcttgattttgattttgattctgaaaatccaaaatattacatgctgaccatgttgccctacccttcaggagatttgcatattggacactggtatgccatggcaccttctgactgttatgcccgtttcatgaaaatgaaaggttacgaagtttttttcccaataggattcgatgcttttggacttcctgctgaaaatgctgccattaaaaacaatattcatccaaaatcatggacgtatgccaacatcaagcgcatgcagaagc

SEQ ID NO: 304218 - DNA, 763 bp, Unknown
  Bacterial polypeptide expressing nucleotide sequence isolated from the Sargasso Sea
tatgggactggtgcaatcatggccgtaccaggacatgatgaaagagattatgagtttgcaagaaaatttgaccttccaattgtcgaggtagtttccggcggcgatattgaaaaagaagctcatattgacaccaaagatggagcaatgatcaattcatctaatgattttggtcttaatctaaatggcatgaaagtatccgaagcaatatcaactactattgaatggctagagtccaataaaaagggagaaaaagccattcaatacaaactaagagactggctattttcaagacaaagatattggggtgagcctatgcctatcatccatggtgataatggtgagattattcctcttaatgattctgatttaccgctaacactacctgaggtagataaatatgagcctacaggcaccggtgaatcaccacttgctggaattgatgattgggtcaatacaaatagcggtaaaagagaaaccaacacaatgcctcaatgggcagggtcatgttggtattatttacgttttatcgatccattaaatgatagagctgcatgggataaagataaagaaaaatactggatgccagtcgacctttatgtcggtggagttgaacatgcagtgttgcacctattatactctagattctggcatcatgttctttatgaccttgatctagtttctacaaaggaaccgtttaagaaattatacaatcaaggtatgataggcggtgaagatggtcaaaaaatgagtaagtctagaggaa

SEQ ID NO: 304219 - DNA, 778 bp, Unknown
  Bacterial polypeptide expressing nucleotide sequence isolated from the Sargasso Sea
ggttacaacacaaacatttttgttgaacacccttttttagataaaaaaattccactatttatcgcaaattttgttctaatggattatggtttgggggctatttttggttgtccagctcacgatcaaagagatttagattttgcattaaaatataagttggatgtaattcaggttgtagaaccttcaaaatcagagaaaaaattttctaaaataaaaagtgatgcgattttggataatggcctaatgattaattctggctttttagacgggctagataatgaaaaagcgaaaacagaagttgtaaaaaagttagaaaacgaaggtattggcaataagaaaataaactataagttacgagattggggtatttcaagacagcgttattggggttgcccaattccaataatttatagagaagatggttctgttgtgcccgttcaaaagaaagacttgcctgttcttctccctgttttaagtcaaaataacccaagcccaacaaaagagcaagttgaagaatggaaaagcactacttgtcccacgacaggaatgaaagcgattagagaaacagatacttttgacacattttttgagtcttcttggtattttttacgttattgtaatccccgttcagacaaaccatttgtgaaagaggatgttaattattggcttcctgttgatcaatatattggtggtattgagcatgcaattcttcatcttttgtattcaagattttttacaaaagcgttaagagacttgggctttgttgatataaatgagc

SEQ ID NO: 304220 - DNA, 898 bp, Unknown
  Bacterial polypeptide expressing nucleotide sequence isolated from the Sargasso Sea
atagctcctgatcaccctattgcaaaatcactagcaaataataataaggaattgcaaaattttatatctgaatgcaatcaaataggcacatcagaagaagctttagaaaaagctgaaaagaaaggttttgatacttcaattaaagtatttcacccatttgaagaagggcaaaagcttccagtatttgttgctaattttgtacttatgagctacggcactggggctattttcggagtaccagctcatgaccaaagagatttagattttgctaataaacttaagctgcctgtaaaaatagttgtgaaagataaaaaaaataatacagacaagatagatactatcgcatatacgggagatggagaaattataaattctggcatgcttaatggcatgaatgttcataaagcaaaatctcaagttatagaacttgctgaaagtaagaaaataggtaaaaaatcaaaacagtttaggcttcatgattggtgtgcatctaggcaaagatattggggttgtccagttcctatagttctgtgtgatgattgtggtatagttcctgtgcccaagtctgatcttcctgttttgcttccagatgatgtaacatttgataaaataggaaaccctttagaccatcataaaaaatggcaaactgttaattgtcctgaatgtaataaacccgcaaaacgagaaactcaaacttttgacacttttgttgattcctcatggtacgctttaaggtatcctgcacctaaatcaaaagagcctattgataaaaaagaaatgctcaaatggagcccgccagaccaatatgtaggaggtattgagcacgcaatattacatttattatattcaaggttttttaatagaggattaaaaaaaacaaaatacgtaaattttgatg

SEQ ID NO: 304221 - DNA, 979 bp, Unknown
  Bacterial polypeptide expressing nucleotide sequence isolated from the Sargasso Sea
aacatcaaaagatttaaataaaaaaaaatattatgttttggaaatgtttccatatccctcaggtaaaattcacatgggacatgttagaaattatacgcttggagacgttatagcaagatataaaaaaatgagaggttttaatgtgctacatcctatgggatgggatgcgtttggtcttcctgctgagaacgcagcgattactgaaagaaaacacccagagaattggacttatcaaaatataaaaactatgaaaaatcaattgttgaagatgggactatctttagattgggagagggaaatagcaacttgtcatcctgaatattacaaacatgaacaaaaattttttatagatatgtttaaagcaggtcttgcctacaaaaaagaggctgaagttaattgggatccagtagataaaactgttttagccaatgaacaagtaattgatggtaggggttggagatctggtgcgattgttgaaaaaaaaatactgtctcagtggtttttaaaaatcagcaaatactctgatgaacttttaaatgatttagataaattagaaaattggccaaataaagtaaaaataatgcaatcaaattggattggtaaatctataggtgtagaaataaattttaaaatttctaatgaaaaatcagatataactatttttactaccaggccggacactatttttggcgcaacttttctcgcgatatctattgatcatgatttggctattagaaattcaagtgtaaatagtaatttaaaaaaattcattgatgaatgtaaaggtcttaaccatgaaaaaattaagagaggttttaatcttggtttaactgccgaccatccttttattcaagggaaaaaaatacctgtttttgtagctaattttgttttgaaggaatacggacttggggcaatatttgggtgtccagcacatgatcaaagggatttggattttgcaaatcaatataagcttgatgtt

SEQ ID NO: 304222 - DNA, 859 bp, Unknown
  Bacterial polypeptide expressing nucleotide sequence isolated from the Sargasso Sea
gggcttggggcagtttttggatgccctgcacacgatcaacgagatcttgattttgctaataagtttaatttagatataaaaatggttgtagagccagaagataaaaatttaagaaaaataaccgatagggcttatgttggtagtggcaaaattataaattctgattttttaaatggactaagcgttgactctgcaaaaaataaaattgtagaatatttggaaaaaaaccaacttggttcaaaaaaaattaactataagcttagagattggggtgtgtctagacaaagatactggggctgtcctattcctgtaatttacagagaagacggacaaataatacctgttcctaaaaaagatcttccagtttgcttgcctgaaagtaataataatgggggtttaattacatcattaaaaaatttgaatgactggaaaacaactaaatgcccggacacaggtatgcttgctataagagaaactgatacctttgatactttttttgagtcttcttggtatttcttaagattttgtaacccaagacttaatgctcctattgataaagatgaaattaattactggctaccagtagaccaatatattggggggatagaacacgcaattttacatttattatattctcgtttttttacaaaggcattaagggatatgggttatataaaattaagtgagccctttgatggtctttttactcaaggaatggttacgcacagaacttttaaaaatgaaaagggtgactggatagagcccagcaaagtggtttataaaaacgatactttctttgatgatataggagaattaataaaaggtggaaatactgaaaaaatgagcaaatcaaaaaaaa

SEQ ID NO: 304223 - DNA, 934 bp, Unknown
  Bacterial polypeptide expressing nucleotide sequence isolated from the Sargasso Sea
ttgcaatgaacaggttatagatggtaaaggttggagatcaggtgctttagtcgaaaagaagaaattatcacaatggtttttaaaaattagtaaatattctgatgagcttttaaaagatctagaaaaactaaaaaattggccaaataaagtaaaaataatgcaatccaattggattgggaggtctgttggtgcagagattaattttgagttaactgaaaattctaaaaaaattaaaatcttcaccacaagaccagatactatttatggtgcaacttttatagcgctttcacctgaacatgaaatctcagttaatctttcaaaaaaaaacaaatcagtaaataattttattaatgaatgtaaaaaaacgaacccggataaaataaaaaagggttttgatactagtttatttgttcatcatccatttataaaagggaaaaaaattccagtatttatagccaattttgttctagttgagtatggattaggagctatatttggctgcccagctcatgatcaaagagatttggactttgcaaatgaatataatttagaagttcttcctgttgttaaaccgttagatttaaaagatgctaaatttaagattaagaatttagcatttgttgacgagggagaggttattaattctgatttattaaacggattaactactaaagaggcaaaagaaaaaataattaatttattagaagagaaaaaaattggtattaaaaaaataaattataaacttagagattggggtatttccagacaacgattttggggctgtcctattccaataatttatagagaagatggtacaatcatacctgaaagcgaagataacctacctgttaaattaccggtagtagaaaattttactgaatcttcaagtactcttaaaaatattgatagctggaaagaaacaacgtgtaaagaa

SEQ ID NO: 304224 - DNA, 793 bp, Unknown
  Bacterial polypeptide expressing nucleotide sequence isolated from the Sargasso Sea
agaaattaagactgttgttaaaccaattgatgaagaagatagttttgttgtgaaagatgaggcttatacaggaccaggtataacaattaattcaggctttttaaatggtttgaaagctcccaatgattcaattattgaaacaatcaaagttttagaagaaaaaaatatcggtactaaaaaaattaattttagattaaaagactggggtatttcaagacagaggtactggggttgtcctatcccaattgtgtacaacgataaaggggaacatttcacagttccaaaagatcatttgccagtaaaattaccagataatattaatttatctgtgaaagggaatccactttctcaccaaaaagattgggtcaatataaaaattaatggagagatgtttaaaagagaaactgacacccttgatacattcgtggactcttcatggtattttttaagattttgttctccagataaaaaaaattatggatttgacaatgaagaagttaattattggatgcctgtagatcaatatattggtggggttgaacatgctatcttacacctattgtactctaggttttttatgcgagctataggttacaaaaatagcgaatttaagtttaaagaacccttctttggattgtttactcaaggaatggtttgccatgaaacttataaggacgaaaataataagtggtatagtcccgacgaggtagatagtaaaaatgggaaagatttctacctaaaaatagataacagtaaaaaaatcaaagtggaccatctgagtctatgtcaaaat

SEQ ID NO: 304225 - DNA, 729 bp, Unknown
  Bacterial polypeptide expressing nucleotide sequence isolated from the Sargasso Sea
aatttaagaaaagatgaagcatatacgggagacggtactataattaattctgattttttaaacaatcttacagtatctgaggcaaaagaaaaaattgtaaatataattgagaaaaagaaaattggtaaaaagaaaattacctttagactaaaagattggggtgtgtctagacaaagatattggggctgtccaataccaatgatatatttaaaaaatggggatgttgtcccggtagataaaagtgaactaccaattcgattacctgaggatgtggatgttaattttaaaggcaatcctcttaataatcacccaacttggaagaatacaaagtataaaaaaactggtgaagaggctattagagagacagatactttagatacttttgtggattcatcatggtactttttaagattttgttccccaaaactagtttctaaaccattcgatgagaaatcttttaaatactggatgccagtagatcagtatattggaggaattgagcacgctattttgcacttgctttattcaagatttttcatgagagcaataaagttttgcaaaaaagacataaatattaaagaaccctttaaaggattatttacacaaggaatggtgtgtcatgaaacatataaggatgaaaagggtaaatggctgagaccagaccaaattgagagtacaaaacttggagtaaaatccaaaattgatggatctaaagttaaaattggacca

SEQ ID NO: 304226 - DNA, 457 bp, Unknown
  Bacterial polypeptide expressing nucleotide sequence isolated from the Sargasso Sea
catagccaaagttagcgatgatattggacgaagatacacgtttaatactgccattgctgctgttatggagttggtgaatgagttgaatgcttttgaaattaatgacgatgtcgataaacaagtggtcaaggaagcgattaaagctattattttgctgttatcacccatagtgcctcatatttgcaatagactctggcttgatcttggttatgactcctcaattattgacgaaagatggccaacgcatgatcctgaattgatggttcaggaaactgtggagattgtcattcaggtgaatggaaaactaagatcaaaaataacggtggatcaatccattgatgataaagcactcgaggaattggtcatgatcgatgaaaaaattaaaaaacacacagacggccagacagttaaaaaaattatcatcgttccaaaaaagttagttaatatcgttatttaa

SEQ ID NO: 304227 - DNA, 886 bp, Unknown
  Bacterial polypeptide expressing nucleotide sequence isolated from the Sargasso Sea
attttgccaaaagtacaatcttgaaattagaactgttgtaagaccaaatgatgaaaatgatagttttgaagttaaggataaagcatataatggaacgggcataattataaattcaaattttttgaatggtctaaaagttcctgaggaatctataattaaaaccattgaaattttggaagaaaaaaaatctggtaaaaaacaagttaattttcgtttaaaagactggggagtttcaagacaaagatattggggctgcccaatacctatagcctatgatgaaaatgaaaacccactacctattccaaaaaaagatttaccagttaaacttccagaaaatatagatttaagtgtaaaaggaaaccctctcaattcaaaacaagattggaaaaatattaaaattaatggtaaaaaatttgttagggaaacagatactttagatacatttgtttgttcttcttggtattatctacgattttgctctcccaaaaatgctaaatatggatttaatcaggatgagattgattattggatgcctgttgatcagtatattggtggaattgaacatgcaattttacatctactttattcgcgttttttcatgaaagcattagaatttaaaaacaatagttttaaaataaaggaaccttttacaggtttatttactcaaggaatggtttgtcatgaaacttataaagatcaaaataataattggttaagtccagatgaaattgaaatgaaagaaaatgctttttataaaaaaaaagatccttcctctaaagttatagttggtccctcggagtcaatgtctaaatcaaaaaaaaatgttatcgatcctgaaattattatggataattatggagcagactctgtaagattatttatgctt

SEQ ID NO: 304228 - DNA, 301 bp, Unknown
  Bacterial polypeptide expressing nucleotide sequence isolated from the Sargasso Sea
tatgaacagtcaatttgaatataaaaaaatagaaaagaaatggcaggatcactgggaaaatagtgaaactgttaagtgtgatttaaaatctgacaaaccaaaattttataacctttgtatgtacccatatccctctggagatctgcatatgggacatataagaaattatacgattggtgatgttatcactagatataaacaaatgaatggtttcaatgttttatctcctatgggctgggattcatttggccttcctgccgaaaatgcagcaattaaaactggtattcatccaagagaattt

SEQ ID NO: 304229 - DNA, 913 bp, Unknown
  Bacterial polypeptide expressing nucleotide sequence isolated from the Sargasso Sea
tcatttggtttgccagctgaaaatgctgcaaaagaaaataatattcatcctggtgaatggacaaataaaaacattagtacaatgaaagagcaactaaagagcatggggctatcttacgattggtctcgagaagtatctacctgtgaccctaagtactataagtttgaacaaaaaatgtttattgatttttttcaaaaaggtttggcctataaaaaagaaagctgggtaaattgggatcctgttgaaaaaactgttttagcaaatgaacaagttattgatggaaagggttggagatctaatgcagttgtagaaaaaaaattattaaatcaatggtttctcaagatgacacattatgctgaagaccttttaggaacaattgcaaatttaacaaattggcctgatagagtaaagcttatgcaaaataactggataggtaaatcattaggggcaaacatcaattttaaaattattgaaaaagatgaaaaaattgaagtttttacaacaagaccagatactttatttggtgcatcatttattgctctcgctccttcgcatcctatctcgttaaatttatcaaagaacaattcaacaatcaaaaatttcattgatgaatgtaatataaactcaacatcggaagctataattgaaaagaatgagaaaaagggtatttacacaaatttaaatgtagtacacccttttgataaaagtattaaaatacctgtttatattgcaaattttgtattaatggagtacggcacaggcgcgatttttggttgccctgcacatgatcaaagagatttagattttgcaataaattataagttaccagttcttccagttgtaaaaccaaaaagttatgaaaaaggtgattataaaattactgatacagcgtttactgatgatggaattataa

SEQ ID NO: 304230 - DNA, 731 bp, Unknown
  Bacterial polypeptide expressing nucleotide sequence isolated from the Sargasso Sea
gatgcaagagcaatataacccgcaagatatagagtcaaaagtacaaagctactgggaagaaaaccaggtatttaaagtcaccgaagatgagagcaaagaaaagtattactgtctttctatgttcccatacccaagtggccgactgcatatgggtcatgtgcgtaattacaccattggtgatgttgtttctcgtttccagcgtctgcaaggcaaaaacgttatgcaaccaatgggttgggatgcgtttggcttacctgcagaaaacgccgctatcaaaaacaaaacagcgccagctaagtggacgtacgaaaacattgattacatgcgtaaccaacttaagcaattaggctttggttacgactgggatcgtgaaatagccacgtgtcacccagaatactacaaatgggaacaatggtttttcactaagctgtacgaaaaaggcttagtgtacaaaaaaatgtcaacggttaactgggatccagttgatcaaactgtacttgctaacgagcaagttatagatggccgcggatggcgctctggcgctgtggttgagcaaaaagaaattccacagtggtttattaagattaccgactacgcacaagagcttttagacgatttagacaaattagacgactggcctgagcaagttaaaaccatgcagcgcaattggattggccgctctgaaggtttagacattgagtttacgcgtaccgataacaatgaaaagttta

SEQ ID NO: 304231 - DNA, 340 bp, Unknown
  Bacterial polypeptide expressing nucleotide sequence isolated from the Sargasso Sea
atgggtgatacagaaattccttatgacccagccaagatagaaaaaaaaatacaatcatactggaacgaaaatgataccttttcagttactgaagatccaaataaagaaaagtttttctgcttaagcatgtttccataccccagtggatctattcacatgggtcacgttagaaactacacaattggagatgtaattagtagatttcagcgcatgctaggaaaaaatgttttacagccaatgggctgggatgcatttggtttaccagccgaaaatgctgctatcaagaatgaaattcaacctgcggaatggacacaagagaatataaaaaaaatgaaaggtc

SEQ ID NO: 304232 - DNA, 843 bp, Unknown
  Bacterial polypeptide expressing nucleotide sequence isolated from the Sargasso Sea
cagctacgcagatgaactgcttgatttcgaacaattggactggccagaaagagtgcggtcgatgcagggaaactggattggacgcagtgaaggagttgagttttccctaaaactagatggttcagaagacctgagtttcagggtttttactacaagacctgacactgttttcggtatgactttctgtgtgctagcacccgagcatgaattggtaaatattattacaaaagctgaaaagaaagaaagtgttgaagcatatatttatgctgctcagcacaaagacgaaattgaacgtacctcagatgggaaggaaaaagacggtgttttcactggggcatatgcggtaaatcccatgaacggtgagttggtgccagtctggattgctgactacgtactggaatcgtatggaacgggagcaataatgggtgttccaggacatgatgaaagggattttaattttgcaagaaaatatggactggacacaccggttgtggttgtttcgagggagaagcttgattctgttccgcatggaaatgaattagcagagcctattttgcagaaagaagattcggtaatggtaaacagttcaggatttgatggattagtctggccagacagcttcaaccgtgttgcagatcatatgcaaaaggaaggctttggtgagcgacatgttaattaccgtttgcgtgactggctaatcagccgtcagagaatgtgggggacccctattcctgttgtttactgtgaaagctgcggaatgcagcctgtaccttataatgagctgcccgtgctacttccggatgatgctgaatttaagcctacaggggagagcccgttaaaata

SEQ ID NO: 304233 - DNA, 799 bp, Unknown
  Bacterial polypeptide expressing nucleotide sequence isolated from the Sargasso Sea
cttcgaggtattgaacaccaatgaaggcatttctccaatatcagtttacacaactcgacccgacactttgatgggagtgacatatttagctgttgcgccaaaacatcctctggcagagatggttgcaactaaaaatagtaagcttgccaaattcattgaagagcaaagtagattgaaagttgctgaggcggaactcgcaacgcttgaaaaaatggggctagatactggattaaaagcagttcatccgatcacgaaagaagaggtacccatatttgtcgctaattttgttctgatgacctacggatcaggtgctgttatggccgtaccagcgcatgaccaaagagattgggaattcgcaaaaaaatatgatcttcctatcaaatcggtaatcgaacctattgactctaataaagaagctaatttagaaaatggcgctttcgttgataaaggtagattgattaattctggagaatttgatggtctcgactttgaaggggcgtttgaagctatctctacttttttgaacgatagaggcataggtgagaaaaccgtaaactttcgcctacgggattggggcgtgtctcgccaaaggtactggggagctccaatccccatgataaattgtcaaacatgtggttcaaatcccgtatcagaggaagatttacctgtgctgttacccgaaaacgtgcagatagatgaaactggatcaccactaagaaaaatggaagaatttttaaatgttaattgtccgatttgcgataatccagcaaatcgagaaacagatacatttgataccttt

SEQ ID NO: 304234 - DNA, 754 bp, Unknown
  Bacterial polypeptide expressing nucleotide sequence isolated from the Sargasso Sea
acaagaccagatactttatttggtttttcttttctagctgtttctatcgatcatcctatttcagaacattttttaaaagatccaaattttattaaatttaaagaagaatgttcaaaaactggcacaaccgaagagtcaattgcaattggcgaaaaaattggattcaaaaccaatttacttgctattaacccattaaatgaaaaacaaaaagttcctgtatattttgcaaattttgtcttaatggattatggctttggggcagtttttggatgtccagcacatgatcaaagagatttagactttgcaaacaaatataacctaaaagttacaactgtagtaaaacccataaacgaagatgataattataaagttcttaaggaagcttatacaggaccaggagttgttattaattctgattttttaaatggttttaaagttccagatgagtcaatttctaaaactatagaaatacttgaaaaaaaaaagttaggggaaaaaaaaattaactttagacttaaagattggggcgtgtctagacaaagatattggggatgcccaatacctatagcttatgataagcatggaaaagttttccccatagccaaagaaaaactgccagtaaaattaccagaaaatatagatcttaattgtaaaggtaatccgctagataataacaaagaatggaaaaaaataaaaatagatggaaaagaactaactagagaaacagatactctggatacatttgttgattcat

SEQ ID NO: 304235 - DNA, 967 bp, Unknown
  Bacterial polypeptide expressing nucleotide sequence isolated from the Sargasso Sea
cccgaggcggtgcgcaccatgcagcgcaactggattgaaaaaagccgcggcgtggagctggcctttgggctagatgaaccggtggccaacctcgatcgcatcgaggtctataccacccggcccgacacgctttacggtgtgacctacgtaagtctggccgcggaacatcctatctcgctggcgctggcagaaaacaacactgagctcgctgaattcatcgccgcctgtaagcaggcatcggtcgctgaagccgacatggcgcaggccgagaagctcggcatggatacgggcttgcgtgctacgcacccgctgaccggcgaggccattcccgtgtgggtcgccaactacgtgctgatggactatggctcgggcgcagtcatggcagtgccggcgcacgatgagcgggactgggaatttgcccgcaagtacgcgctgcccatgaaaacggtggtgtgtgataccgagggtcagccaacggaggccacggaaagcgcctacacggagcacggcgtgcttaccgggtctgcagagttcaatgggtgcgactttgacgaggcctttgagggcatcgccgcgcggctcgaagccatggggatgggtcagaccaccacccagttccgcttgagagactggggcgtctcgcgccaacgttactggggaacgccgattcccatgctcaacccggaagacggacaagacatacccattccggccgatcgcctgccctcattgctaccggaagacgtcgtcatggacggcgtgacgtcacccatcaaggccgatgctgagtggcgccggtttgagcatgaggggcaaccctgcgaacgcgacaccgatactttcgacacctttgtgcagtcctcgtggtactacgcgcgcttcacctgtccacactacaccgacggtatgatcgacagcgaccaagccaattattggctaccggtcgatcagtatgtgggcggcatga

SEQ ID NO: 304236 - DNA, 898 bp, Unknown
  Bacterial polypeptide expressing nucleotide sequence isolated from the Sargasso Sea
aaaaaaactggtcttggcggaagaaaaacgaattacaagctcagagattggggtatatcacgacagagatactggggttgtccaatacctgttatgtatagagaggatggtaagattgttccggttcctaaagagagtcttcctgttgagcttccagagataaagcaccttgatggaagattgggctccttgaaggatcaaaaagattggagagaaacaacctgtccagaaacgggccttaaagcgcttagggaaacagatacttttgatactttttttgaatcttcttggtattttttaagatattgtaaccccagacttgatcagccctttaacaaaaaagatgtaaaatattggctaccagtagatcaatatataggtggaattgaacacgcaattcttcaccttttgtattcaaggttttttactaaagccctaagagatatgggtcatttagatatagacgaaccttttaagggtctgtttacccaaggaatggtaacacacaaaacatttaaaaacgataaaaatgagtggattagtcctgatgaagtattaaaaaataacaacaagcttttagacaaaaacaacaatgaagtttctgaggggaaaatagaaaagatgagtaagtctaaaaagaatgttgtggacccagctaatattatagacttgtatggcgctgatacagctaggtggtttatgttgtctgacagccctccagaaagagatcttgagtggaccgaaaatggaatttctggagcttataaatttattaataaaatatgggatcttgcaaataaaatactatctcttgacgaatatacatgtgaagccggtttagaaaagtcaattaagaacgatctgagtataacaattgaaaaagttacaacaaatattg

SEQ ID NO: 304237 - DNA, 842 bp, Unknown
  Bacterial polypeptide expressing nucleotide sequence isolated from the Sargasso Sea
aaaaaagacgcattagtaaattgggatccggttgatcaaacagtacttgcaaatgaacaagttattgatgggaggggatggagaactggagctcaagttgaaaagaagaacctatctcagtggttttttaaaatcacgcactacgctgaagagcttttaaacgacttagataaattagaactatggccagaaaaggtaaaaactatgcaacgaaactggataggtaagtcatatggggcagaaataaaatttaaaatttcaggtgaaaatgagtatttaaatatatttacaacaagacctgatacaatttatggggcaacattcatagctgtatcagtaaatcatccaatagttaaaaaaagcttatcaaattttgaaattgaaaatataaaaaaagaatttgaaagaatggatggtgataaagaaaagctaggatacaaaattaagttaagttgtgatcatccaattctaagtaaaaaaatccctatttatattgctaattttgtcttagatacatacggggaaggtgcaatatttgggtgccctgcacacgatgaaagagactttgattttgcaaaaaaatattcattaccaataattaaagttatagactgtgatgataatcaacttccttttactgaagacggtcttttagtaaattcacctcttttaaacggcctcaataagaatgaggcaataaaaaaaataattctttttttaaaaaaagaaaaaattggagatgaaaaaataaactacaaaataagagactggggtgtttcaagacagagatattggggatgtccaatacctgtcatatactataatgatgggtcataccgggt

SEQ ID NO: 304238 - DNA, 924 bp, Unknown
  Bacterial polypeptide expressing nucleotide sequence isolated from the Sargasso Sea
attattggatgaaacgtggatcaatatatttggaggtatagaacacgcgatattgcatttactatattctcgtttttttgcgagagccatgcatttaacggggcatcttccagaaaaagctattgaacctttttcagcactattcacacaaggaatggtctgtcatgaaacttataaagacataaaaggtaattggctatctccagttgaagtagagacatactctgataattatggaaaaaagttttttagaaaaatggctgataaaaccgaagttgccgttgggccatcagttaaaatgtctaaatcaaaaaagaatgttattgacccaattgagataattgaacaatttggagccgatacagccagatggtttgtaatgtccgatagccctccagaaagagatattgcttggtctactgaaggtgttgaaggatcctggaggcatctcaatagagtttggcggttactggaagatcaattaaaggaaagtagtgataatattgtttcggacgactcatttgaaaaacaagtaaatttaatcattgaagatgtatctaattttatcgaaactttttcttttaacaaagcaattgcaaagctttatgaattaacaaattttttgacaagagccaaaggctcacaaaaacaaaaacgggaaggtttaagggttctcgcaataatgatggagccatttactcctcacttggctcaggaaatttgggaaactcttggggaaaaggggtttatagctgaggttgattggccaaaaacaaatcaagacttaattcaagaaaaaaattacgtcattcccattcaaataaatggcaaaagaaaagcagaaatttctgttttgcttggcacagatgaaaaacaaataaaagaattagtttttaatcaaaattcaataaaaaaatctttggg

SEQ ID NO: 304239 - DNA, 409 bp, Unknown
  Bacterial polypeptide expressing nucleotide sequence isolated from the Sargasso Sea
atggaaagatacaattttaaaatagtcgaggaaaaatggcaaaatcagtggtctaaatcaggtgtttttcgatctagagtagatcattccaaaaagaaattctattgtctagaaatgtttccttacccttcaggaaaaatacatatggggcacgttagaaactacacaattggagatgttttatcacgttataaatccttacaaggttataacgtaatgcatccgatgggttgggacgcatttggtatgccagctgaaaatgctgcaagagaaaacaatttagatcctaaagattggaccaataaaaatatctcaaagatgaaggaacaattaaaacgccttgggctttcaattgattgggatagaaaaatttcaacgtgttcagaggaatattataaacaccagcaat

SEQ ID NO: 304240 - DNA, 876 bp, Unknown
  Bacterial polypeptide expressing nucleotide sequence isolated from the Sargasso Sea
caagatatttccagttattaggtcgggtggagaggagtttatcctcgataactggaaagattcgtataaaactaagggtgtttgcataaactcaggaaaatacaatgggttaaatttcgtcgatgcgattgaatccattgctcaagacttaaaaaaattaaacctaggccataaggaagtacaatggcgattgagagattggggaatttcgaggcagaggtattggggaacacctataccaattgttcattgccctaactgtggtgatgttccagtgcccatagaagaattgcccgttgtgttgcccaaggactgtattcctgacgggtccggaaaccccctcaagaaaaatgaaaattttttaaatacgacctgtccatcgtgtggaggtcccgcgatacgtgagactgatacgatggatactttcgttgattcctcgtggtactttctccgctttgcaagtgcggataatttaatcgagatggtggatgaaagagttgcctattggttgccagtggatcaatatattggtgggatagagcatgctattcttcatttactttactccagattttggactaaggttatgcgtgatttggagctcattaagattgaagagccttttggtaatttgctaacacagggaatggttttgaacgaagttttttctcggaaagaaaccgatggacgaaaagtatattttaatccggatgatgtaattgttgatcatagctcctctggcgctcggacaggcttcgtctcgcgctcagacgggcaagcagttttttccgaaggcattcgcacaatgtccaagtccaaaaacaatggtgttgatccccaagagcttattgatgaatatggagctgatacggcaag

SEQ ID NO: 304241 - DNA, 903 bp, Unknown
  Bacterial polypeptide expressing nucleotide sequence isolated from the Sargasso Sea
ttttgaggaaagtaaatttaaaatcaacaataaggcctacactgaaaatgggataataatcaattcagaatttttaaatggattaaacatcgatgaagcaaaagaaaaaataattaatgaaatagaaaaaaggggtttaggaaaaaagaaaataaattttaaattaagagattggggaatttctagacagagattttggggttgtccaatacctattatttatagagaggacggggaagtacttgcggttgaagaggaagatcttccggttaaacttcctgaaattgagaattttagtgagtcatctagtgctttaagcaatatttctggttggaaggatactgtctgtccaaaaactgggatgaaagctttcagagagactgatacttttgatactttttttgaatcttcttggtattattttcgatattgcaatgctaggctgaataagccgtttgataaaaaagatatagaatattggctacctgttgatcaatacataggcggcatagaacacgctattttacatctcttatactcaaggttctttactaaagctttaagagaccttggttattttaatttagatgagccgtttaaaggattatttacgcaagggatggttactcatataacttataaaaatataaataatgaatggatagagccaaaagatgtagaaaaacataatggcatcttaaaagataaagatggttttgaggttattggtggaaaaattgaaaaaatgagcaaatcaaaaaaaaatgttgttgatccaaatgatattattgattcatatggcgctgataccgctagatggtttatgctatcagatagtccaccagaaagagatttgcaatggacagaaactgggatagcttcttcattcaagtttataaataa

SEQ ID NO: 304242 - DNA, 824 bp, Unknown
  Bacterial polypeptide expressing nucleotide sequence isolated from the Sargasso Sea
gcgaatcgcgacgtgcaagcccgactactacaagtggaaccagtggctgttcctgaagatgtttgagaagggcatcgcgtacaagaagacgggcaccgtgaactgggacccggtcgaccagaccgtgctcgcgaacgagcaggtgatcgacggccgcggctggcgttcgggcgcgctcgtcgagaagcgcgagatcccgatgtactacctgcgtatcacgcagtacgcggatgagctgctgaacgacctcgacggcctcggctggcccgagcgcgtgaagatcatgcagcagaactggatcggcaagagcttcggcgtgaacttcggcttcccgtatgaactcgacggcgagaagaagctgctgcgcgtgttcacgacgcgtgccgacacgatcatgggcgtcacgttctgcgcgatcgcggccgagcatccgctcgccacgcgccttgcccaggacaagcccgagctgctcgcgttcatcgacgaatgcaagcgcggcggcgtcgccgaggccgacgtcgcgacgatggagaagaagggcgtcgcgacgggcttctcggtcacgcacccgctcaccggcgagccggtcgaggtgtggatcggcaactacgtgctgatgagctatggcgaaggcgcggtgatgggcgtgccgggccacgacgagcgcgatttcgcgttcgcgaagaaatacggcctgccgatcaagcaggtgatctcggccgaaggccagcagtactcgctcgacgcatggcaggagtggtacggcgacaaggaaacggccgtctgcgtgaacagcggcaagtacgacggcctgcgctatacgg

SEQ ID NO: 304243 - DNA, 155 bp, Unknown
  Bacterial polypeptide expressing nucleotide sequence isolated from the Sargasso Sea
gaacaacgcgttcagcaatactgggaagaaaaccaatcgtttaaagcaaatgactacgtagaaaaagaaaagttctactgcctgtctatgttcccataccctagtggccgacttcacatgggccacgtgcgcaactacaccattggtgacgtgat

SEQ ID NO: 304244 - DNA, 931 bp, Unknown
  Bacterial polypeptide expressing nucleotide sequence isolated from the Sargasso Sea
gtggcgatctggagctattgtcgagagaaaaaaattaagtcaatggttttttaatatatcaaagttttcacaacaattattagatggcttagaaaaattaaatagttggccaaataaagttaagataatgcaaaaaaattggattgggaaatcttttggatgtgaaataaattttaaaattgagggagatttaccggtaaagagtgttaaatgtttcaccacacgaccagataccctgtttggcttttcttttttagcactatctgtagatcatgaaatttcaaaattttatcaaaatgataaagattttttgaatttcaaaaaagaatgttctaaaactggaacaaccgaggaagcaatagccgttggtgaaaaaattggtttcaagacaaaacttacagcggtgaatcctcttaatccaaaacaaaaagtcccggtttattttgcaaactttgttttaatggattatggatttggagctgtgtttggttgtccggcacatgaccaaagagattttgattttgcaaaaaaatataatcttgaaataaaaactgtggttagaccaaataatgaagatgaaacattcaaagtaagtcatgaggcttatccagggccaggaattttgataaactctgattttttgaatggacttaaagctccagaaaattctattcttgaaacaattaagatcttagaggagagaaaattgggaaaaaaacagattaactttagattgaaagactggggtgtctcaagacaaagatattggggatgtccaatcccaattgcatacgatgaaaatggcacaatttttcctattccccattcaatgttaccagtaactcttccccgagaaatagatttaaatgtaaaaggtaatccactcgatagtcaaaataaaatggaaagaataattatagatggaaaaaag

SEQ ID NO: 304245 - DNA, 789 bp, Unknown
  Bacterial polypeptide expressing nucleotide sequence isolated from the Sargasso Sea
gacttatagcaatatcaaatatatgcgaagtcaacttaaatcgatgggtctgtcaatagactgggaaagagaattggcgacatgtcatccaggatattacaagcatgagcaacttttttttatagaaatgtataaacaaggattggcatataaaaaattatcacaagttaactgggaccctgttgacaaaacagtgttggctaatgaacaggtaattgatggtaggggttggcgatcaggagcaattgttgagaaaaaaaatttatctcaatggtttttaaaaacgagcaattactctgaggagttgttggcagacttaaactcattaaatatgtggccacaaaaggtaaaaatgatgcagtctaattggattggaaaatcagaaggggcagaaatagttttttctatagttgacaataacattttaaatgacaaatttataaaggtttatactacgagacctgatactatctttggagcaacttttgttgccatatctccagatcatgaattgtctaaaaaaatattacaaaaagactttaatgcaaaggcgtttaatgatgagataaaaaatattgactcagaaaaaactaaagtagggtacaacaccaacattaagatacagcacccatttttaaataaaaaaatccccctgtttatagcaaattttgttttaatggattatggtttaggggctatctttggttgtcccgcccatgaccaaagagacttggattttgctattaaatataacttagatgtaattaaggttgtagaacagaaagataa

SEQ ID NO: 304246 - DNA, 682 bp, Unknown
  Bacterial polypeptide expressing nucleotide sequence isolated from the Sargasso Sea
aatgggttgggactcatttggtatgccagctgaaaatgctgcaaaacaaaacaaacttgatccaaaagagtggaccgaaaaaaatatttctacaatgaagcagcaattaaagagattaggactttctattgattgggatagagaaatttcaacatgttctcctgaatattataaacatcagcaaatttttttcttagagctttatgaaaagggtctagtttataaaaaagaaaactatgtcaattgggatcctatagatgaaacggtcttagcaaatgaacaagttatcgatggtaagggatggagatctggtgcactggtggaaagaaaaaaactaaatcagtggttttttaatatatccaaattttcagatgaacttttagaaggcttagatttacttaacgaatggcctaataaagtaaaaataatgcaaaagaactggattggcaaatcattaggttgtgaagtcaattttgaagtgcagggaaaccttcctattaaggaaatcagttgttttacaacaagaccagatactttgtttggcttatctttttttgctgtttcagttgaccatcctctatctaaattttatgaaaatgatccaaaatttaagaagtttagagatgactgttcaaaaactggaacaactgaagagtcgatagctcaggcagaaaaaattgga

SEQ ID NO: 304247 - DNA, 828 bp, Unknown
  Bacterial polypeptide expressing nucleotide sequence isolated from the Sargasso Sea
gggggcaatcaaaacattaatgtattcactactcgtccagacacgatatttggggcatcttttttagcggtttcagtcgatcatcctatctgtaaaaattttgtaaatgatgaaagttataataaatttaaaaatgaatgtcttaaagttggaactacagaagaagctttggcaaatgccgaaaaaatcggttttaatacgaaattattcgcaaaacacccattcataaaaggaaaaaaattacctgtttttgttgctaattttatcttaatggactacggcactggggctatatttggttgtcccgctcatgatcaaagagatttagactttgcaataaaatataacttggaaataaaagaagttgtttctgacaacccgtcaaaacttaagaactttgataaattatcagaagcttatgttggtgatggcaaaatgattaattctgatttcttaaataatctaagtgtagaacaagcaaaatcgaaaattataaaagagattgagaagttgaaacttggagagaaaaaaattacttttagattaaaagactggggaatatcaagacaaagatactggggttgtcctataccaatgatacatttagaagatggttctatagtcccagtagataaaagcgaattacctgtaaaactaccagaggatatcgatttaaatcaaagcgggaacccactcgaaagtcacaaaagttggaaaaatacttttcataagaaaacagggaaacctgcgattagagaaacagataccttagacactttcgtagactcatcttggtattttttaagattttgttccccagagattaag

SEQ ID NO: 304248 - DNA, 583 bp, Unknown
  Bacterial polypeptide expressing nucleotide sequence isolated from the Sargasso Sea
aatggcgcaatataacccaaagtctattgagaaaaagtggcaaaacgcttgggaagacgcaaaagttttcgaggctaagacagaccaaaaaaaacccaaatactatgttctcgaaatgtttccttatccttcgggcaggcttcatatgggacatgttagaaattacacaatgggagatgtgatagcccgctataaaatgggcacaggacataatgttttgcacccaatgggttgggacgctttcggtatgccagctgaaaacgcggctatggcatcgggtggtcaccctaaggaatggacgtatagcaatatagagatcatgaaatcacaaatgcgacctatgggttggacattggattggacccgcgagtttgcaacatgtgatcctgattattatggcaagcagcaagaattatttctcgattttctgaatgcaggtcttgtttaccgtaaaaacgcagttgttaactgggatcccgtggatatgactgttttggctaatgagcaagttgaaaatggacgggggtggcgttctggagcaattgttgagcgaaaagaacttacgcaatggttttttaaaatt

SEQ ID NO: 304249 - DNA, 877 bp, Unknown
  Bacterial polypeptide expressing nucleotide sequence isolated from the Sargasso Sea
gatgattaattctggttttctagatggtgctgataatgaaaaagcaaaaaaagaagttgtaaaaagattagaaaaagaaggcattggtaataaaaaaataaattataaattaagagattggggtatttcaagacagcgttattgggggtgcccaatcccaatactgtatagggaagatggctcagttattcctgttctggaaagagatctgcctgttttattgcctatatcgggacaaaacaatccaagcccaacaaaagaagaggttgatgattggaaaaaaaccacctgccctataacaggcatgaatgcggttagggaaacagatacttttgatactttctttgagtcatcttggtattttttacgttattgtaatccacgcctgaacaccaaaccctttttaaaagaagatgttaattattggcttcctgttgatcaatatataggcggtgttgaacatgcaattcttcatctattatattctagattttttataaaagctctaagagacctaaactttatagatatcaacgaaccctttagtggtctttttacacaaggcatggttacccataaaacatttagagacaagagcggcagctgggttgagccaaataaaattatcgaaaccaaagagggttattttgatagtaacaatgaaaaggttgaggttggtaaaattgaaaaaatgagtaagtcaaaaaaaaatgtagttaacccctcatcaataattgataattatggtgcagacacagcaaggtggtttatgttgtcagactctccaccagagagagatctggaatggacagatattggtgtggcctcctcacacaagtttattaataaaatttgggaaacatgcataagggcaaaa

SEQ ID NO: 304250 - DNA, 847 bp, Unknown
  Bacterial polypeptide expressing nucleotide sequence isolated from the Sargasso Sea
aaagcatttaaatactggatgcctgtagatcagtatataggtggtatagagcatgctattttgcatttgctttattcaagattttttatgagagcaataaagttttgcaaaaaagacattaaaatcaaagaaccattcaaggggttatttacgcaaggtatggtttgtcacgaaacatacaagagcgagaagggtacatggttaagtccagatcaagttgaaaatacaaaacttggtatgagatcaaaaattgatgggtctaaaataaaagtaggcccttcagaagcaatgtcaaaatcaaaaaaaaatatagttgatcctgaaagtatgatcaaaatttttggggctgatgcagtaagatggtttattctttcggatagccctccagaaagggatgtgcaatggtcaactgctggggtttctgcatctcataaatttattcaaagaatatggagcctaaatcaaaaggttttgaatagaaaacaaggggagataagttctgctgacgaaaaaaaacttcaattaaaatttaatgagtacattttcaaaattacagatttaattgaaaatttccaactgaacgtagctgttgccaaaatttatgaaataacgtcactgatggaaactaatttagaaaaaaaaataaaaaatgaaaatctatttattttgcaaaataaatttatgaaaatattactgccttttgctccacatttgtcatgtgaatgtttgtctaaacttgaaggaaaaaatttctatgaagaaattcagtggcccaaagctgaccaatcattgttaggaaagcaagaagttacattagttgttcaaattaatggtaagaaaagaggct

SEQ ID NO: 304251 - DNA, 952 bp, Unknown
  Bacterial polypeptide expressing nucleotide sequence isolated from the Sargasso Sea
gaggaggggcaccctgtaattcgtaaaccaatgaaacagtgggtttttcgtattactgaatatgcagaatctcttcttaaagggttagaagatgttgattggcctgataatgtaaaagaattgcaaaaaaattggataggaagatctgaaggttccaatgtaaaatttgaaataccatccataaataaaacaataagtgtatttacaacaagaccagatactttatttggtgcgacatatatggtattagctcctgaacacccgctggtaaatgaattaactgataaagtaaatagagaagctgtttctaaatatatagaattaacctcccgcaaatcagatcttgatagaggagacctaaataaagaaaaaacaggagtttttattggttcttatgccataaatcctgttaataaaaatgaaataccaatatggatatctgattatgttcttatgtcatatggaacaggagctataatggcagttccaggtcatgatcagcgggattatgaattcgctaaaaagtttgatttaccaatagtagaagttgtatctggtggagatatatcaagtagcgcatataccgatattgacaaaggggttatgataaactcatccacatctgatggagtatttagcttgaatgatttgaaagttaaagatgctatagaaaatactatatcctatttggaaaagatccaaaaaggaaaaagggcagttgagtataaactgcgagattggcttttttctcgtcaaagatattggggagagccttttccaattattcacctggaaaaaggatataagccagtatctgaagaagaattaccagttttattgccagatgttgaaaaatatcaacctactggaacaggagaatcacctttagccgctatagatgaatgggtgaatactatagatacagaaacaaatacaccagccaccagagaaa

SEQ ID NO: 304252 - DNA, 618 bp, Unknown
  Bacterial polypeptide expressing nucleotide sequence isolated from the Sargasso Sea
taaggacggcgcaaaaatgtcaaaatccaaaggaaatgttgttgacccagatgaaattattaaaacttatggtgcggatacggcaagaatttttatcctctttgccgcacctcccataaaagatctggaatggagtgatcaaggtgtggaaggttgttcgcgatttctcaaacgcgtttggcgaatattttgcgagtttgttgatgaagtaaaatccatatcacccgctgatgaaaacttatccacctctataaaagaattaaaagaattgcgcagaattactcatataaccatcaggcgtgtcaccgaagatattgaaaaacgaatgcaattcaatacagctattgctgcgatcatggaattggtcaatcatctctatctttttaaggaatggaaagaaaaacaaagtaaagtagatgaaaatctttatagcgtgattagagaatcgatggaggccatgatcttaaccctgtctccatttgctccccatattactgcagaaatggcggtgttaatgaatttctcaagaacgttggatgaagaaaaatggcctacctacaatgagaaattaacgcaaaccgatgaaatattgatcgtgatacaggtcaatggtaaagt

SEQ ID NO: 304253 - DNA, 879 bp, Unknown
  Bacterial polypeptide expressing nucleotide sequence isolated from the Sargasso Sea
tgataaaagtaaaaagaaattttactgcctagaaatgttcccttatccctctggaaaaattcatatgggacatgtgcgtaattatacaatcggtgatgtgctggcacggtataaaaaattaagaggctttaatgttcttcacccaatgggctgggattcttttggaatgcctgcagaaaatgcagctcgagaaaataatttacatccaaaagaatggactaaaaaaaacatcactactatgaaaaaacaacttcagttgttaggattctctttagattgggatcgtgaaatatcaacttgtgatcccgaatattacaaacatcaacaagaattttttttagaattgtttaaaaaaggattggtatataagcaagatacctacgttaactgggatccagttgataaaactgtactagcaaatgaacaagtaattaatggaaaaggttggcggtctggagcaatcgtagaaagaaaaaaactttcgcaatggttttttaatataaaaaaatttgctcaaaatctattggacgaattagaaaatttaaaaaattggccagaaaaagtaaaattgatgcaaaaaaattggataggaaaatcttttggttgtgaaattaattttgaactagaaaaaaataaaattttttctgaaaaaattaaagtttttactaccagacctgatactatatttggagcatcttttttagctatttcaattgatcaccctttagcaaaaaaatttgaaaaagaaagtaattttgtatcttttaaagataaatgttcaaaaataggaactacggaagaagcaatggcaaatgcagaaaagattggctttgatactaagttatttgcaattcaccctttagataaaaataataaact

SEQ ID NO: 304254 - DNA, 412 bp, Unknown
  Bacterial polypeptide expressing nucleotide sequence isolated from the Sargasso Sea
aatgagtaactataaaaaaacaaaaagagattcagagtttattccttataatccctcagttattgagcctaagtggcaaaagaaatggaatgaatctgaaatctacaaaactaactttagtgaagacaaaaaggataacttcttttcattaacaatgtttccttatccttcaggagatcttcacattggccattggtatgcttttacacctgcagatacctattctagatttaaaaggatgaaagggtttaatgtcctgcatactcaaggctttgatgcatttggattaccagcagaaaatgctgccatatctagaaatgtaaatcctatgaaatggaccttcgaaaacatagaaaatatgagaaggcaatttagattaatgggtaactgctatgactggagcagagaatag

SEQ ID NO: 304255 - DNA, 812 bp, Unknown
  Bacterial polypeptide expressing nucleotide sequence isolated from the Sargasso Sea
tccagcggaacaatatgccataaaaactggaactcatccatcaaaaactacaaaggataatgtagctaattttaaaaggcaaattaaaatgctcggtttttcctatgattggtcgcgtgaaattaatactacagatccagaatatgtaaaatggactcaatggatattcgttcagctctacaaaaaggggttagcctatgaggcagaggttccagttaattggtgccctgaattaaaagcagtattagccaatgaagaagttgtcgatggtaaatctgatattggtggataccctgtctttcgtgttccaatgagacaatggatgctcaaaataacaaaatatgcagattctttgctctccggcttagatgatctggattggccaaacagtataaaagaacttcaaaaaaactggatcggtaaatctgaaggagcaaagatttactttgatttaccgagtataaatcaaactcttgaagtttttactacccgccatgatactctttatggagctacctatatggtactagctcctgagcacccacttgttaataagttaacagatgatgctcaacgagatttagttaaaaaatatgtgaaggaatcttcaaaaaaatcagatcttgacagaacagaactaaataaagataaaacgggtgtttggttgggaacctatgcaataaatcctgtcaataataaggaaattcctatttggatatctgattacgtaatcatgagctatggaacaggtgcaattatggctgtacccggagaagatgagagagattgggattttgcaaaaaaaatataat

SEQ ID NO: 304256 - DNA, 898 bp, Unknown
  Bacterial polypeptide expressing nucleotide sequence isolated from the Sargasso Sea
gagtggcaaacttattaattctcaatttttaaatgatctttcgattgaagaagctaagaaagaaattatcaaaagagtagaagaacttcatataggaaagaagaccaccaactttagacttcgcgattggggtgtctccagacaaagatattggggatgtccaattcctattatgtatagagaagacggtaaggtaattgaagtccctgaagaccaactgccattggaattgccagatgatattgacttaagtgttcccggcaaccctcttgacaatcatccaaagtggaaattcacaaaatgtcctgaaacaggaatgaatgctataagagaaacagacacgcttgatactttcgtcgactcagcatggtattttttaagattttgttcgccgctcgaaacaaaagaaccttttaacttagatgaaattgattattggatgccagttgatcaatacgttggtggtgtggagcatgccatattacatttattgtactccagattttttactaaagcgcttaacatcaagggaatggatgagccttttgatagcttatttacccaaggcatggtttgtcatcacacatttcaaaataagtctaatgcctgggtttatcccgacgatgtagaaaagaaagaatcaaagtattttcaaatatccactggtgaaccggtcactatgggagaaattgagtcgatgtcgaaatcaaaaaaaaacgtaattgaccctgaatcaataatcagtacatacggagccgactcggcaaggtggtttatgttatctgacagtccacctgaaaaagacatcaattggacagactcgggtattaatggggcgtggaaaatatgtcagaaaatttggatgattgttcaaaataataaggaaaaccttaaacaa

SEQ ID NO: 304257 - DNA, 623 bp, Unknown
  Bacterial polypeptide expressing nucleotide sequence isolated from the Sargasso Sea
aatggatcgatataatttcaaaaaagttgaaactaaatggcaaaaaaaatggactgaaaatgaactttacaaatctgaaatagatcgatctaaacctaaatactatgtccttgaaatgtttccatatccttctgggagaattcacatggggcatgtaagaaattataccatgggtgatgttgtggctcgctacaagaaagctagtggatacaatattttacatccaatgggctgggatgcctttggaatgcctgcagaaaacgctgctatggaaaataatattcatccaggggaatggacctatcaaaatataaaagatatgagaaatcaattaaaacctcttggtttatcaattgactggaaaagagaatttgcaacttgtgatcctgaatattacggtcaccaacaatcaatgtttattgatatgcttaatgcagggcttgcctacagaaaaagtgcaactgttaattgggatccagttgatcaaactgtacttgcaaatgaacaagttgaaaatggtttaggttggcgttcaggagcaatagttgaaagaaaagaacttactcaatggttttttaaaatatcgaaatattcagaggaacttttaaactctcttgaagata

SEQ ID NO: 304258 - DNA, 979 bp, Unknown
  Bacterial polypeptide expressing nucleotide sequence isolated from the Sargasso Sea
acaattggattggtaagtcaattgggtacaaatattaatttcaatatcaataccagtctaaaagagaaattaactgtattcacaacaagaccagatactttatttggagttacctatttagcaatttctgttaatcattcattaattaaaaatatttctgatcagacagtcttacaagatatagaaaaactaaaacaatatctgaaaaaaaacaaaaacaatgaacttgaaaaaataggaataaaaactagcttaatagctgtaaaccctgtaaattctgaacctatacctatttgggtagcaagttatgttcttgatgaatacgggacaggagctgttatgggagtacctgctcatgatctaagggattttgaatttgcaaagaaaaacaatattgatattaaacaagtaataataaaggataaaagagaaataaatgacgagcttgataatgcttatgtagaaaatggatatctaattaattcaaatcaatatgatggtatagcaaatactattgctaaattaaaaatttcagaggatggagtaaataatggatgggccgaaaataaaattcaatatcggttaagagattggttaatatctagacaaagatattgggggtgtccgatacccatagttaattgcaaaaaatgtggttctgttcctttaaaccaatcggaattgcctgtttccttaccaaaagatatagaaatctcggataacaagattaatgctttaggtgaaaataataattggataaatacaacatgtccgaaatgtggaatagctgcaataaaagaaactgatactatggatactttcatgtgttcatcttggtattttttaagatatccatcttcaaaatgtgcaactaagccatttgaaaagaatgaaataaacaagtggctgcctgtagatcaatatgttggaggagtagagcacgcaatattacatttgttatatgccagatttttcacta

SEQ ID NO: 304259 - DNA, 1021 bp, Unknown
  Bacterial polypeptide expressing nucleotide sequence isolated from the Sargasso Sea
atgggacatgtaagaaattatacgattggtgatgtcttctccagatataaaagtttaaagggaaataatgtactccatccgatgggctgggattcttttggaatgcctgcagaaaatgctgcgaaacaaaataatttaaatccaaaaaattggacagaggataatattaaaataatgaaatctcaacttatgatgttgggtctatctatagactgggatagggaagtttcaacatgttcacctgattactataaacatcaacaaaaaatatttttagacctttttgataaaggtcttgtttatagaaaagaaagttacgtaaattgggacccagttgataaaacagttttagctaatgagcaagtaatagacggaaaaggttggagatctggtgctttagttgaaagaaaaaaacttaatcaatggttttttaaaatttcacatttttcagaagaacttttaagcgatctcaatgaactaaatgaatggccggataaagtgaaaataatgcaaaaaaattggattggtaagtcatttggttgtgaaatagattttaaaattgagggttctgaaaatatcaaatcaataaaatgctacactaccagaccagatactttatttggattttcttttttagccctttctgttgatcatcctctatctaaatattatgataataataaagacttcattaaatttaaaaaagaatgttctaaaaccggtactacagaagagtcaattgctcaagcaactaaaattggttttaaaactgaacttttagccataaatcctttagataacaaaaataaagtcccagtctattttgctaattttgttttaatggattatggatttggagcagtttttggttgtcctgctcatgaccaaagagattttgattttgcaaagaaatataatctcgaaattaaaacggttgtaagacctaaaaatgaagatgcaaattatcaagttgagaatgaagcttacacgggaccaggaaaaataattaattctaaatttt

SEQ ID NO: 304260 - DNA, 950 bp, Unknown
  Bacterial polypeptide expressing nucleotide sequence isolated from the Sargasso Sea
gatggcgaacggcgtgccgcccgcgaagtggacctacgacaacatcgactacatgaagggccagatgcagtcgatgggcctcgcgatcgactggtcgcgcgaaatcgcgacgtgcaagcccgactactacaagtggaaccagtggctgttcctgaagatgctcgagaagggcatcgcgtacaagaagacgggcaccgtgaactgggacccggtcgaccagaccgtgctcgcgaacgagcaggtgatcgacggccgcggctggcgttcgggcgcgctcgtcgagaagcgcgagatcccgatgtactacctgcgtatcacgcagtacgcggatgagctgctgaacgacctcgacggcctcggctggcccgagcgcgtgaagatcatgcagcagaactggatcggcaagagcttcggcgtgaacttcggcttcccgtatgaactcgacggcgagaagaagctgctgcgcgtgttcacgacgcgtgccgacacgatcatgggcgtcacgttctgcgcgatcgcggccgagcatccgctcgccacgcgccttgcccaggacaagcccgagctgctcgcgttcatcgacgaatgcaagcgcggcggcgtcgccgaggccgacgtcgcgacgatggagaagaagggcgtcgcgacgggcttctcggtcacgcacccgctcaccggcgagccggtcgaggtgtggatcggcaactacgtgctgatgagctatggcgaaggcgcggtgatgggcgtgccgggccacgacgagcgcgatttcgcgttcgcgaagaaatacggcctgccgatcaagcaggtgatctcggccgaaggccagcagtactcgctcgacgcatggcaggagtggtacggcgacaaggaaacggccgtctgcgtgaacagcggcaagtacgacggcctgcgctatacggatgcggtcgacgcggtcgcggccgact

SEQ ID NO: 304261 - DNA, 903 bp, Unknown
  Bacterial polypeptide expressing nucleotide sequence isolated from the Sargasso Sea
tgccgtgctgcatccaatgggctgggatgctttcggactgcccgctgaaaacgcggcgatcgaacgcaatgtggaccccggcgagtggaccgaccgcaacatcgatcagatgcgggcgcagcttgatcgccttggcctttcgatcgattggacccgcgaacaggcgacctgccacagcgactactaccgctggacccagtggctgtttcttgaactgctcgaaggggggctggcctatcgcaagaacgcaaccgtcaactgggatcccgtcgaccagaccgtgctggccaatgagcaggtggatggtgacggccgctcctggcgctccggagctcttgtggaacaacgccagctgaaccagtggttcctgcgcatcaccgactacgccgagccgctgctcaacgacctggatgccctcaagggctggccggaacgggtgcgcactatgcaggctaactggatcggtcgctccgaaggagcggagatcagcttcagcattgatggggcaaaggatcagacgatcaccgtgttcaccacccgccccgacaccctcgctggggcgagctacgtagtgctggcaccagaaaacgagctggtggacagcctcaccagcacagaacagaagtgcaaggttgaggacttccgcaaggaggtggctcgtctcagcacgatccaacgcaccagtgatgacaggcccaaacggggggtgcccatcggcagtcacgtgatcaacccgttgacgggggcggtgctgccggtgtggatcgccgactacgtgctggccgagtacggcacaggtgccgtgatgggtgtgccggcccacgaccaacgcgacatcgcctttgcccagtcgcatggactgccgatccagcaggtgatcgacgccgagggagctgctgaagg

SEQ ID NO: 304262 - DNA, 814 bp, Unknown
  Bacterial polypeptide expressing nucleotide sequence isolated from the Sargasso Sea
aaataaaaataaaaaaaaattttattgtttagaaatgtttccatacccctctggtaaaattcacatgggtcatgtaagaaattataccattggtgatgttttagctcgatataaagcactgcaagggtttaatgtacttcatccaatgggatgggactcatttggtatgccagcagaaaatgctgcaaagcaaaataatttaaatccaagaaattggactgaaactaatattgcaaacatgaaatcccagttaaaaaagctgggtctttcaattgattgggatagagaaatttcaacatgttctgaagactattataaacatcaacaaaaattttttttagagttgcttgataaaaaattggtttataaaaaagaaaattacgtcaattgggatcctgtagatgaaaccgtacttgcaaatgaacaagttattgatggaaaaggttggcggtcaggggcacatgttgaaaggaaaaaactcagtcagtggttttttaatatttcaaaattttctcaagatcttttagatggattagatactttagatacatggccaaataaagtaaaagtaatgcaaaaaaactggataggcaaatcttttgggtgtgaagttaattttgaaatagaaggaaatccagaaataaataatatcaaatgttttacaacaagaccagacaccctttttggtttttcatttttagctttatcagttgatcatgaaatttcaaaattctatgcaaatgatcccaacttcataaattttaaaaatgagtgttctaaaactggaacaactgaaaaagcattagcgatagga

SEQ ID NO: 304263 - DNA, 886 bp, Unknown
  Bacterial polypeptide expressing nucleotide sequence isolated from the Sargasso Sea
aataaattttaaaattaaaaataataatttaaattctaatttcataaaaatatttactacaagacctgacactttgtttggggcaacttttgtagcgatatctcctgaacaccctttagtaaaagaaataagtgtgcaaaattctaatatagaaatttttttaaaaaagtgtgaaaagtcaaattcagaaaaagagaagttaggcttagatacacagcttaaagtcgaacacccagttactaaaaatttacttcctgtatttatagcaaattttgtattaatggattatgggcttggggctatttttggctgccctgcacatgatcaaagagatttagaatttgcacaaaaatttaaattacagataattaaagtggtagagccaagtgaaaaacaaataagccctacttttaaagaagcttatactggcgatggtttgattgttaattctgattttttgaatggactgagcattgatcttgctaaaacaaaaatgatagaatttttagaatcaaatgggatcggtagtagcaaaataaattataaacttagagattggggaatttcaagacaaaggtattgggggtgtcctataccaattttatatagagaagatggtgagattgttccagttgaagatgaaaatttacctgtaacccttccaaaaataaaaaaaaatgaaaatgttacgtctctcaacaatataggtgattggaaaaatacaacctgcccaaagactggtatgaaggcattacgtgaaactgatacatttgacactttttttgaatcttcttggtattattttaggttttgtaatccgcgactggacaaggcttttgaatatgaagatgtaaactactggttaccagttgatcaatatattggt

SEQ ID NO: 304264 - DNA, 739 bp, Unknown
  Bacterial polypeptide expressing nucleotide sequence isolated from the Sargasso Sea
ggggaaagtcccttgaagtatcatcctgcatttctcaataccgaatgtcctaaatgcggaggaagcgctgaacgggaaacggataccatggatacttttatttgctcttcatggtattactacggctatgtttctccatattggaaaaaaggggaaaagctgaaaaaggaagaccacccctgggatccagaggcgattcaaaaatggtgtcctgtaaaccagtacaccggagggatagaacacgcgacgatgcaccttctttattttcgatttttcaccaaggtgcttgcagacatgaatctttttgatttcagagaacctgcaacgcgtctttttaaccagggcatgatccttggcgaagatcacgaaaagatgtcgaaaagtcgcggaaatgtggttaatcccgatgatctggtcaaaaaatacggtgccgatacagttcgatgctacctcatgtttcttggtccctgggatgctggtgctccctggaatccgcatggcatcgaaggactttcccgtttttttaaaggaatttggaatctttgccatcaacctcagaaaccagaaagtattgaccacgagtctgaaaagaagttgaggaaggctcaacataggaccctcaaaaaagtaacagaggatctcaggcgcttccgttttaatacggccatcgccgccttgatgagctttcgtaacgacctcaaagaccatgttcatcgctgccgggaagaaacacgtaccg

SEQ ID NO: 304265 - DNA, 796 bp, Unknown
  Bacterial polypeptide expressing nucleotide sequence isolated from the Sargasso Sea
gaatccgaacttccgctcgtgttgccggagacggacaacttcaagccgagcggcggcggcgaaggaccgctcgcaaattgcgacgattgggtgcgcacggttgatccgcgcacgggtaaacccgcgcttcgcgagacgaacacgatgccacagtgggctgggtcgtgctggtactacctgcgattcatagatccgtccaacgaggacgcgctcatcgacgggtcgttggaaaagtattggcttccggtggatttatacgtcggcggcgccgaacacgcggtgctacacttgctctacgcgcggttctggcacaaagtgctgtacgatatcggcgtcgtgagcacaaaggaaccgttccagcgtttggtgtcgcaagggatgattttgggagaggttgagtactcggcgcgcgtcgacgacgcgggcgccttcgtcgagggtaacaagacgagcggcgcgcaaaccgtcaaggtgaacgcggacgaggtgacgaaaaagggcgatgggttcgtgctcaccgccaatccgaaagtgaaaatctctgcgcgcgcgcacaagatgagcaagtctcgcggaaacgtggtcaatccggacgacatcgtcggagcctacggcgcggattcgcttcgtctgtacgaaatgttcatgggtccgcttcgcgagaccaaggtgtggcagaccaagggcgtggaggggtgcttcagattcctcgcccgcacgtaccgtttgctcgataaggtgacggacgagaaaccggacgaggagggtcttcgcgcgttgcacaagtgcatcgcca

SEQ ID NO: 304266 - DNA, 781 bp, Unknown
  Bacterial polypeptide expressing nucleotide sequence isolated from the Sargasso Sea
ggctaaacaaaacaatcaagatccaaaattatggacagaagataatatcaagactatgaaaaatcaattgaaacaattaggtctttctattgattggagtagagaaatttcaacttgttccgaagagtattataagcaccaacaaaaattttttattgaaatgtttaacaagggtttagtttataaaaaagaaaattatgtaaattgggacccaatagatgagactgttctagcaaacgaacaagtcattgacggaaaagggtggcgatctggggctatagttgaaaggaaaaaattaagtcaatggttttttaatatatcaaagtttgcagatgatcttcaaaatgaattggagacacttaaggaatggccaaaaaaagttaaaataatgcagcaaaattggataggaaagtcgtttggttgcgaaattgattttgagataataggcgatgaaaatattaaaaatattaaatgttttacaacaaggcctgacactctttttggtttttcatttttagctctatctgttgatcaccctttatcagaattttataaagataatgaagagtttaaaaaattcaaagaaaattgttctaaaactgggacaactgaagaatcaattgcaaatgctgaaaaaattggttttaaaactaaactacttgcaaaaaatccattggatggtgacaaaacagttccagtttattttgcaaattttgttttaatggattacggatttggagcagtatttgggtgcccaggacatgatcagagggactttgac

SEQ ID NO: 304267 - DNA, 400 bp, Unknown
  Bacterial polypeptide expressing nucleotide sequence isolated from the Sargasso Sea
atgaaagaacatattccttacaacccgtcagttattgagcctaaatggcaaaaaagatggaaagagtcaaaaatatatgatgtagatttagattcgaataatgacaagaattttttctccctaactatgtttccttatccttctggagatttacatattgggcattggtatgccttcacaccagctgatagctattcaaggtttaaaaaaatgaaaggttttaatgttcttcatactcaaggttttgatgcatttggattgccagcagagaatgctgcaatttcaaggaatataaacccaatgaaatggaccttcgacaatattgataacatgagaaatcaatttaatttgatgggcaattcatatgactggtccagagagctaataacttgcaaaccca

SEQ ID NO: 304268 - DNA, 856 bp, Unknown
  Bacterial polypeptide expressing nucleotide sequence isolated from the Sargasso Sea
cgatcacccgagtctcgcccgggaggatggcgacgaggagaaggtcaagctcccctactcgggcccaggcatcatggtcaattcggaagaatacgacggcatggatacggacgcctgcaaggctaagatcattgccgatctggaagcaaaggggtgcggaaaaggagccgtcaactacaagctccgggactggattttctcccgccaacgctactggggagagccgatcccgctggtttgggtttcactggaggactacggcaaggcgggacgggaagaagggcccgttaccgaactcatgcccgaagaatccgtaactacggtgagggatggaaaaacgctttacgctctccccctgcccgtctccgagctaccccttcggctgcccgaggtcgagaattaccagccgtcagggacgggcgagagtcccctagccacgatccccgagtggctggaagtctggttcgacgttgagtcgggacgcacggaagccaggtccgggcccaagccgcagggagagaactgggtccccgccacccgcgagaccaacaccatgccccagtgggcgggctcctgctggtaccatctgcgctacctcgaccccgacaactccgaccgtctggtcgactccgaaaaggaagcctattggcaaggccccgatttctacatcgggggtgccgagcatgccgtactccaccttctttacgcccgcttctggcaccgtttccttcacgacgagggagtcctcgccaaccccgagccatacggcaagcttttccaccagggcctcattctgggggaagatggaaacaagatgtccaagagcgtgggcaacgtggtaagccccgacgttgtg

SEQ ID NO: 304269 - DNA, 658 bp, Unknown
  Bacterial polypeptide expressing nucleotide sequence isolated from the Sargasso Sea
aatgtctgaaaagtataatcctcgcgtcatagaacccaagtggcaattgtattggaagaataatgactctttcataagtgaaatcaaaaatgataaaaagaaatattatattcttgaaatgtttccttatccttcaggtaggattcatatgggccatgttcgcaattatgcattgggtgatgtaattgcgcgttttaaaagagcgcaaggttttaatgtgatgcatccaatgggttgggatgcgtttggattgcctgcagaaaacgcagcgattgagaataatatttcaccaaagaagtggacttatcaaaatattgaaacaatgaaggaccaattaaaaaaaatgggactctcaattgattggtctagagagctcgcgacttgtgatgaaatatattataaacagcaacaaaaattattccttaatttttttagaaaaaagttaatttataaaaaagagtctttggttaattgggaccctgtagaaggtaccgtcttagccaatgagcaagtcattgaaggcaaaggttggagatctggagctgaagttgaacaaaaaaaattatctcaatggttttttaaaattacagaatttgcagatagtcttttaaaaagcttagaaactatgcacagttggccagataaagtgcgaacaatg

SEQ ID NO: 304270 - DNA, 913 bp, Unknown
  Bacterial polypeptide expressing nucleotide sequence isolated from the Sargasso Sea
tctacatgttctgaagattattataagcatcaacaaaatttttttttagaattactggaaaaaggtttagtttatagaaaagaaaattacgtaaactgggatcctattgatgagactgttttagcaaatgagcaggtaattgacggaaaaggatggagatcaggagccacagttgaaagaaaaaagttaagtcaatggttttttaatatttctaagttttcacaagatttacttgatggtctagatgagctgagcacatggccaaacaaagtaaaaataatgcaaaaaaattggataggaaaatcttacggttgtgaaattgattttaaaatagatagtaacttacccgttaataatattaaatgttttacaacaagacctgatacactttttggtttttctttcttagccgtttctgtagatcacgaaatatctaaattttatcaagaagataaagaatttattaaatttaaagaagaatgctccaaaactggaactactgaagaagcaattgcagtaggcgaaaaaattggttttaaaacagatttaatggcaataaatccattaaaccccactcagaaagtgccagtttacttcgcaaattttgttttaatggactatgggtttggagcagtttttgggtgtcctgcgcacgaccaaagagattttgattttgcaaaaaaatatggtttagatattaaaactgttgtaaggccaaatgatcaagatgaaaattttaaagtaattgacgaatcttatcctggacctggaattttaatcaattcagattttttgaatgggttagaagtacctaataattctgtattagaaacaattaaaattcttgagaaaaaaaaattaggaaaggaaaaaataaactttagattaaaagattggggtgtatcaagacaaa

SEQ ID NO: 304271 - DNA, 813 bp, Unknown
  Bacterial polypeptide expressing nucleotide sequence isolated from the Sargasso Sea
cctgttgaaagaaaaaaattaaatcaatggttttttaatatatctaaattttctgatgatcttttagaaggtctaagcaaattaaaaaattggccagataaagttaaaactatgcaaaaaaattggattggaaaatcttttggatgtgaaattgactttaaaattgaaggaaatttgccaataaaaacaattaaatgttttaccactagacctgacactttgtatggtttttcttttttagcagtctcagttgatcatccaatttcgaaacattttatagaaaataaagactttataaaatttagagatgaatgttcaaaaacaggtactaccgaagagtctatagcccaaggtgaaaaaataggatttaaaacaaacttacttgctattaacccgttagatcctaatcaaaaagttcctgtatactttgcaaattttgttttaatggattatggctttggagcagtttttgggtgcccagcacacgaccaaagagatttggattttgcaaacaaatataatcttaatgttaaaacagtagtaaaaccattagataaagataataattttagtgttacaaatgaagcttatacaggacctggaataattattaactcaaagaaattggatggtttaaaagttccagatgaatcaattattaaaacaattgatatacttgaaaaagaaaaattaggtaaaaaaaaaattaactttagattgaaagattggggtgtatccagacaaagatattggggttgtccaatacaaatagcttatgataaagatggaaacgtttttactattcctaaaaaa

SEQ ID NO: 304272 - DNA, 887 bp, Unknown
  Bacterial polypeptide expressing nucleotide sequence isolated from the Sargasso Sea
attgaggataagtggcaaaaatttttgggaaaaaaataacttttttaaaactaaaatagataaaaataaaaaaaaattttattgccttgagatgtttccttacccttctggtaaaatacatatgggtcatgttagaaactatacaatcggggatgttctatctagatacaaaaagttaaaaggcttcaatgtacttcatccaatgggatgggattcttttggtatgcccgctgaaaatgcagcaaaacaaaataatcaagatccaaaagattggacagaaaaaaatataattacaatgaaaactcaattaaagcagctaggtctctctatagattggaacagagaaatttcaacttgctcagaagagtattataaacatcagcaaaaattttttattgatatgtacaacaaaggtttagtttacaagaaagaaaattacgtaaattgggacccagttgatgagacagtgctagccaatgagcaagttattgatggcaaagggtggagatctggggctgtagtagaaagaaaaaaattaaatcaatggttttttaatatatctaaattttcagatgatctacaggaagagttgaggaaacttgacgaatggccaaataaggtaaagattatgcaacaaaattggataggaaaatcttttggttgtgaaattgattttgaaattataggggataaaaaaattaagagtgtaaaatgttttacaactagacctgacacattatttggcttttcttttttagctttatcagtagatcatccaatttctgatctttacaagaatgactcggaatttaaatctttcaaagagaagtgttctaagtctggtacaacagaggagtcaatagctaatgcagaaaaaataggtttta

SEQ ID NO: 304273 - DNA, 286 bp, Unknown
  Bacterial polypeptide expressing nucleotide sequence isolated from the Sargasso Sea
atgtctgaaaagtataacccgagagcaatagagtcaaaatggcagtcttattggcttaacaataaaactttcaaaagtgaattggatacaaaaaaagagaaatattatgttttagaaatgtttccctatccctcaggaaaaattcatatgggacatgtaaggaattatacacttggtgatgtgattgcgaggtataaacgagcaaaaggttttaatgttatgcatcctatggggtgggacgcttttggtttacccgctgaaaatgcagctatagaaaataatatct

SEQ ID NO: 304274 - DNA, 790 bp, Unknown
  Bacterial polypeptide expressing nucleotide sequence isolated from the Sargasso Sea
aatgggatgggatttgtttggaatgccagctgaaaatgcggccagacaaaataatttggatcctaaaacttggacagagtcaaatatacttaacatgaaatctcagctcaagagacttggtttatctattgattgggatagagagatatcaacgtgtactcctgagtattataagcatcagcaagaattttttttagaactttatgataaaggattagtctatagaaaagaacaatatgtaaattgggatcctattgataaaactgttttagctaacgagcaagttattgacggaaaaggttggagatctggagcacctgttaaaagaaaaaaacttaatcaatggttttttaatattacaaagttttccaatgaactattagagaatttaaattctttaaaagagtggccaaataaagttaaagttatgcaaaaaaattggataggaaaatcttttgggtgtgaggtaaattttaaaataaataactctaaagagatagaagaaattaaatgttttactacaagaccagatacattatttggtatgtcattcttagctttgtctgcagatcatcctgtatcaaaactttacgaacatgataaaaaatttttagaatttaaaaaacaatgttcatctacaggcactaccgaggaagcaattgcaagtgcagaaaaattgggtttcaaaacaaatctgttagctgtaaatccactaaatgaaagtattaaagttcctgtttattttgcaaactttgtactaatggattatggatttggagcagtttttggt

SEQ ID NO: 304275 - DNA, 792 bp, Unknown
  Bacterial polypeptide expressing nucleotide sequence isolated from the Sargasso Sea
tatgggacatgtaagaaattatacacttggcgatgttatcgcacgctacaaaaaaatgatggggttcaatgttttccatcctatgggttgggatgcttttgggctgcctgcggaaaatgccgctatgacagaaaaaaaagatcctgcagactggacctacacaaatataagctacatgcgaaatcaacttaagtccatgggcttttctattgattgggatagggagttggcaacttgtcaccccggctattacaaacatgagcagctcttttttttagaaatgtacaaaaatggtttagcttataaaaaaatgtcagaagttaattgggatcctgtagacaaaacagttttggcaaacgaacaagttattgatggaaggggttggcgctcaggtgccttggtcgagaaaaaaaacctttcacaatggtttttaaaaacaagtagttactctgaagagctgttgctagatttggactcattagacatgtggccaaataaagttaagttgatgcagtctaactggattggtaaatcagaaggagcagaaatagttttttcaatagttaaaaatgattttttagaggacgggcatcttagagtttataccacaagacctgacacaatttttggggcaacatttattgctatttcatctgatcatgatcttgcaaaaaaaatattgaaaaaggacaacaaggctaaaaagtttaacgaagagattaaagtaatagattctgaaaaaacaaaggagggatacaacacaggcatttttattaaacacccttttttaga

SEQ ID NO: 304276 - DNA, 757 bp, Unknown
  Bacterial polypeptide expressing nucleotide sequence isolated from the Sargasso Sea
ctcacccaaggaatggttttaaaagatggagcaaaaatgtcaaaatctaaaggtaatactgtagatccgcaatcatacatagaaaaatatggtgcagatacagttcgactatatatgatgtttacatctcctccagaacaaagtcttgagtggagtgaatcatccgtagagggagcctcaagatttttaaaaaaaatatggaaccttgtagatggaagaaaatttgaaatttatgatattgatcataatttttctaaagaagaattaaatcttcgaagaaaatcacacgcaactcttaaaaaagtagaaaatgactttgatgttagattctcatttaatactgcaattgcagcaattatggagttgataaattttattcctgaggattttaagagtgagaatgctagtgacactcaaaaattttgtttaaatgagacaatagttttcaccttaaaaatgctatttccaattgctcctcatataagtgaatatttatggaatactttcaaagtagaaggatcaaatattgaatcctcatggcctagttttgatgcaaaccttatagaggcagaagagtttgaacttatcatccaagtaaatggaaaagtaagaggaaaaataaatctagataaaaataccttacaagacaaaatagaacaaactgcattgacagtagaaaatgtcaaaaacttcattggttcctctgaaattaaaaaaactatatatgtaaaagaaaaaataattaattttgttatta

SEQ ID NO: 304277 - DNA, 828 bp, Unknown
  Bacterial polypeptide expressing nucleotide sequence isolated from the Sargasso Sea
actgggaaaagctacaatacaatatcgtttgagagattggggagtaagtaggcaacgttattgggggtgcccaatacctataaaatacaaaaatggtaaatcattcacagaaggtctaaaagaacttccaataaggcttcctgtagatgaaaataatcctttaccaatacttaaaaatgaagagaattttgtaaatgctaccaatggctttattagggaaactgatacatttgatactttcatggaatcctcttggtactacgccagatttccatctgcaaatgaaaaaagtacgccatttaacaaagaaactgattattggcttccagtagatctttacatcggtggaattgaacacgcaattttacatttactttattctagattttttcataaagtactaagggatttaggttatttaagtggagatgagccatttaaaaagcttcttacccaaggcatggttttaaaagatggttcaaaaatgtcaaagtcaaagggtaacacagttgatcctgagcaatatattaaggtttttggtgctgatgctattaggacttttatgatatttgcaagcccgcctgagcaatctttggagtggtctgatgcaggactagaaggttgttataaatttttaaaaagattatggtcattctcttttcaaatatattcattagacgatgccaattttaaagctacagaattatctgttcatgaggaaaatattaaattaatgataaaaataaatgatgattataaaaagagatttaactttaatacagttgtgtcatcatgcatggaaattctcaataatatgagcgcaagatt

SEQ ID NO: 304278 - DNA, 560 bp, Unknown
  Bacterial polypeptide expressing nucleotide sequence isolated from the Sargasso Sea
tatgaacagatacaactttaaatccattgaaaaaaaatggcaaagtttttgggaaaaaaataaaagttttcgagtaaaaactgatccttcaaaaaagaaattttattgtcttgaaatgttcccttatccctcaggcaaaattcacatgggtcatgtaagaaattatactataggtgatgtattagcacgctataaatctcttcaaggctataatgtcttacatccaatgggatgggattcttttggaatgccggccgaaaacgctgctagacaaaataatcttgacccaaaaacttggacagagacgaacatcaaaaatatgaaattacaattaaaaaaacttggtctttcaattgattgggatagagaaatatctacctgcgataagaattattacaaacatcaacaagaattctttttagaattatttaaaaaaggacttgtttatcgaaaagaaaattacgtgaattgggaccctgtagatgaaacggttcttgcaaacgagcaagtaattgatggtaagggttggcgatcaggcgctcctgtagaaagaaaaaaat

SEQ ID NO: 304279 - DNA, 742 bp, Unknown
  Bacterial polypeptide expressing nucleotide sequence isolated from the Sargasso Sea
aatccaatggatcctaaaattaaagtgccagtatactttgcaaattttgtactaatggattatggatttggagctgttttcggctgcccggctcatgatcaaagagattttgagttcgcaaaaaaatataatcttaatataaaaactgttgtaagacccaaagatcaaaatgataattttaaagtaaaaaccgaggcttttatagaagacggtataatgattaattcttcttttttagatggtcttaagacaccaagtgaggcaattgaaaaaagtattgagcatttaactaaaaacaaattaggtaaaaaaaaaattaatttcagattaaaagattggggcatatctcgtcaaaggtactggggatgtcctattccgattgcatacgataaaaatggaaatattgttaaagttccaaaagaaatgttgcctataaaacttccggaaaaaataaatctaaatactaaaggaaatcctctagatcatcaaaaagaatggaaagagataaaaatcaatggagaaaattgtactctagacactgatactcttgatacctttgtggattcttcttggtattttttgcgattttgttcacccaaaaatagtgaatatggttttagcgaggaagaaataaaatactggatgccagttgatcaatatataggtggagtagaacatgcaattctgcatttattatattcgagattttttatgcaagctttgagttttgagaaaaagaatt

SEQ ID NO: 304280 - DNA, 292 bp, Unknown
  Bacterial polypeptide expressing nucleotide sequence isolated from the Sargasso Sea
atggaaagatataattttaagactgttgaagaaaaatggcaagataaatggctaaaatcaggaatttttcaatgtgaaatagatctcaacaaagaaaaattttattgtttagaaatgtttccgtatccgtctggtaaaatacatatgggtcacgttagaaactatacaataggggatgttttatcacgttataagtctttacaaggttataatgtaatgcatccaatgggctgggatgcatttggtatgccagcagaaaatgcagctagagaaaataatttagatcctaaag

SEQ ID NO: 304281 - DNA, 903 bp, Unknown
  Bacterial polypeptide expressing nucleotide sequence isolated from the Sargasso Sea
gttgatcagtatatttggaggaattgaacacgctatattacatcttttgtattctagattttttactaaggcattaagagatctgcagtatttcaatttagatgaaccgtttaaaggactttttacgcagggaatggtaacgcatgttacttataaaaataaagatggtgaatgggtagagccaaaaaatgtggaaataattaatggcaaactaaaagataaaaaccatcaagaagttgaaactggaaaaattgaaaaaatgagtaagtcaaaaaaaaacgttgttgatccaaatgatataattaacttatatggcgcagatacagctaggtggtttatgttgtcagacagtcccccagagagagatttacaatggaccgaaactggaatttcatcttcatataaattcattaacaaattatacgaattggttgataaatttaagaattataaatccgatagttctgaaaattttgaaattatggaaaaattaaaaattataattaacgatgtatctaccaacatagaatcttttcagtttaataaatcagttgcaaaaatatatgaatttgtaaatattcttaatgaatcgttgttaaaaaataaaatatctaaaaaaaactttgagtgggctcttgaaaaattatccatgatactacaaccgtttgttccacatataagtgaagaaatttggtcaagcattggtaatgatggtttatgtattaatgaaaattggaacatagaagatgttaaaaagaaaactaaattaaatattgctatacaaataaatggcaaaacaaaagaagtgattgaatttgaagataatgtttcaaaagaaaaaatattagaaactatcaaaaataccaataagattaaaaatagtttgttgggtaaaaatatcat

SEQ ID NO: 304282 - DNA, 751 bp, Unknown
  Bacterial polypeptide expressing nucleotide sequence isolated from the Sargasso Sea
gtaatagatgggagaggatggcgatctggagcagaagttgaaaaaaagaaactaaaacagtggtttttgaaaataactgattattcagaggaactcctagaaggaatagaaactctcaaaggttggcctgagcaagtaagaatccaacagaaaaactggataggcaagtctgagggtatgaacttcagcttcaaagtaaaagacagtgatgaaattataaatgttttcactacaagaccggacacgattatgggggtttctttcatagctatttctgcctcacataagttaagtattgatgtgtctgaaaaggatgataagttcaagtcattcatcgaaaaacaaaaaaaagtaaaacaatctgaagcagagtttgctaaacaagaaaaagaaggtctttttactgaactttatgccatacatcccttcacaggagatcaaataccaatttggatagctaactttgtacttagtgactacgggtccggagctttaatggctgttcctgctcatgatcaaagagacttcgagtttgcgaataaatatgacctgcctatcttgccagtaattgagaacagatctgatgcctctgacacccttgaagaagcttatcttgaaaaaaatactttaatcaattcaaaggagtttaatggtttaaatttcggtgaagcttttaaagctattgagaaaaaagcagaagaattgggttgtgggtatagagagaccaatttcagattaagagattggggag

SEQ ID NO: 304283 - DNA, 547 bp, Unknown
  Bacterial polypeptide expressing nucleotide sequence isolated from the Sargasso Sea
ttagctaattttgttttaatggattatggttcaggtgcaatatttgggtgtccagcccacgaccaaagagatttggattttgctaataaatataatttagaagttgttcctgtagttcttccgaatgataaaaaagaaaatgattttaaaataacaaatgaggcgttcacaggagaaggaagattaataaattcctcttttttgaatggattagaaatcgagcaagcaaaaaaagagattatcaaaaatttaaaaaatattaattgtggtaaagataaaacaacctatagattaagggattgggggctttctagacaaagatactggggttgtcctatacctatgttatatagagaggatggaaaaattatacctgtttcaaaaaaagatcttcctataacattgccaccaaacagtgggataggagaaattaccaacaagcttgacaatatagattcttggaaaaatactgtatgtcctgaaactggtatgaaggccataagagaaacggacacttttgatactttttttgaatcttcttggtatt

SEQ ID NO: 304284 - DNA, 868 bp, Unknown
  Bacterial polypeptide expressing nucleotide sequence isolated from the Sargasso Sea
gaaaaaacaggtgtagatacaggattaaaagtcttaaaccccataaacaataaaagcgttccattatggattgctgactatgtcttaattaattatgggactggtgcaatcatggctgtaccaggacatgatgaaagagattatgaatttgctaaaaaatataatattgaaattattcaggtaataattgacaaagatcaaaaaattgatatttctagcaaaccctttattgaaaagggagtgcttattaattcaggggattatgatgggctaaactcacacgatgatgcctcagaatctatacttaattatctatcagaccaagatttaggtgaaagaaaagtaacttatagattaagagattggttaattagtcgtcaaagatactggggatgtccaatacctttgattaattgtacaaaatgtggcttagtgcctgaaagcctagataacttaccagttctcttacctgaaattgatgattataaaaattctgaagattctccattagcgaaaagtgaagattttataaatatcaaatgtcctgattgtgggtctgatggtagaagagaaacagacacaatggatacatttgttgattcatcttggtattttttaagatacctagactcacaaaaccaaaattccccattcgataaaaatattattaactcttggttgccaatagatcaatacattggaggagtagaacatgcaattttacatcttttgtactcaagattttttgtaaaagcattaagagatattaatttactagatgtaaatgaaccgtttcataatctatttagtcagggaatgattaattttggaggaacaaaaatgtcaaaatccaaaggtaatgtagttg

SEQ ID NO: 304285 - DNA, 832 bp, Unknown
  Bacterial polypeptide expressing nucleotide sequence isolated from the Sargasso Sea
gttcttgaaaaatctgaattgcctgtgattttgccatatgacgtaaatcttgaggataagggtaatgcattacttgggttgaatagttggagaaaaatagtttgtccaaaaactaaaaaaattgcttttagagaaacagatacgttagacacatttgttgactcctcatggtattacatacgtttcttaaataacaaattactgaaaccctttgatattcaacaagtgaatgagttattgcctgtagataaatatataggtggaattgaacatgcaatattacaccttttgtactcaaggttttttatgaaagcgttgagggatatttacaatttaaaagtcgatgagccttttaaacagctctttacgcaaggcatgataacacacaaaacttacaaaactagtaataacgaatgggttatgccaaaagaggttttaattaataatggtaaacttatcagagaaaaaactaaagagtctcttattgagggtccatgcgaaaaaatgtcaaaatcaaaaaaaaatgttatagagcccaatgaaatattagatagttatggcattgatgctacaaggatttttatgatatctgactcgcccccagatagagagctagagtggacggacgaggggatacaaagttctaaaaatttagttcatagactagaaaaatattttacacaaaaaaaaagtcctattaatcatgagatagaaaaaaaggtagaaaagttcataagtaatattgaacaaaatatattaaatttttcattaaataaatgtgttgctgacatttatactctttttaactattggaaaaaaataaaatttattt

SEQ ID NO: 304286 - DNA, 793 bp, Unknown
  Bacterial polypeptide expressing nucleotide sequence isolated from the Sargasso Sea
tccttatccttctggaaaaatccatatggggcatgtaagaaactatacacttggtgatgttgttgctcgttacaaaaaaatgaaaggttttaatgttttccaccctatgggctgggatgcttttggactacctgcagaaaatgctgctaagacagaaaaaaagaatcctgcagattggacctatacaaatataagttacatgcgaaaccaacttaaatctatgggtttttctattgattgggacagggaattagcaacttgtcaccctggttattacaaacacgagcaactcttttttttagaaatgtataaaagtggtttggcttataaaaaaatgtccgaggttaattgggacccagtagataaaacagttttagcaaacgaacaagttattgatggtaggggttggcgctcaggcgcattagttgagaaaaaaaatctttcacaatggtttttaaaaacaagcaattactcagaagagctgttgaacgatttagactcattggatatgtggccaaataaagttaaggtgatgcagtctaattggataggaaggtcagaaggagcagaaatagtcttttctttagttaaaaataatttttcagatgacaaacaccttaaggtttataccacgagacctgatacaatttttggcgcaacatttgttgctatttcagctgatcatgctcttgcaaaaaaaatattgaaaaaagatattaatgctcagaaatttaaagaggagattaagataatagattctgagaaaacaaaggtaggatacaacacaaacatt

SEQ ID NO: 304287 - DNA, 781 bp, Unknown
  Bacterial polypeptide expressing nucleotide sequence isolated from the Sargasso Sea
aatggatactttcatatgttcttcatggtactattatgcctatgtgtcaccttactggaaaaaagggcaaacgctagtccgtgatgattatccttggaatgcggacagaataaattatttttgtccagttgaccagtatacagggggtatcgagcacgcaaccatgcatcttctgtattttcgatttttcactaaggcactcgcagatttagggcttttgaattttcgtgaacctacaaaacgtctatttaatcagggtatgatactaggagaggatcacgaaaaaatgtcaaagagtcgtggtaatgttgttaatcctgatgttctggtaaagcagtacggggcagatacagtcagggcatatctgatgtttctagggccttgggatgctggtgcagcatggaattctaaggggatagaaggacttgctcgtttttttaaatctgtatggatactttgcaattcagatgcaaaaaatacagctaatgttcctatggatacagaaaaaaaactacgaaaatctcttcatcaaactataaaaaaagtaacagttgatctacataattttcgtttcaatacagcaattgctgctgtgatgtctttccgaaatgtgttgaaggcaaatgctgacgcaattgggagtgaagtctggaacgaatgccttgaaggaatgttgttaatgctggctccaatagcacctcacatcacagaagaattgtggcaaaaaatgaagcctgataatggcagtatccacaggcaacagtggcctgtatatgatgaa

SEQ ID NO: 304288 - DNA, 834 bp, Unknown
  Bacterial polypeptide expressing nucleotide sequence isolated from the Sargasso Sea
tgacaagtttgaagttcaaaaagaagcattcacaggacctgggattataataaattcaaactttttaaatggcttaaaagcaccagatgcgtcaattttaaaaacaataaatattattgaggataaaaaaattggtaagaaaaaaataaacttcagattaaaagattggggtgtttcgcggcaaagatattggggctgcccaataccaatagcttatgaccaaaatggaaatattaaaactatcccaaaagaggacctgccggttaaacttcccgaaaatgttgaccttaattcaaaaggtaatccacttgattcacagacggaatggaaaaatatttctataaatggagagaaatatactagagaaacagatactcttgatacatttgtttgttcatcctggtattatataagattttgctctccaaaaaatactgaatatgggtttaaaaaagaagatattgattattggatgcctgttgaccaatacatagggggagttgaacatgcaattcttcacttactttactcacgtttttttacaaaagctttaggttataaaaatacaactataaaatttagtgagccatttgagggtttgtttacacaaggaatggtttgccacgaaacttacaaggataaaaataataattgggtaagtcctgatgaaatagagttggttaaaaatgaataccaaaaaaaaggtgaaccaaataataagataaaagttggcccctctgagtcaatgtcaaaatcaaaaaaaaatgttatagatcctgagaatattatgaatagctatggtgctgacgctgtgaggttatttattttatctga

SEQ ID NO: 304289 - DNA, 397 bp, Unknown
  Bacterial polypeptide expressing nucleotide sequence isolated from the Sargasso Sea
gctgtggcacgatcgcagccttgccgtcgaccggtcgcccgtgaacagccgctacgagccctccgaactggagcagcgctggcagtcgagttggcgtgaccttgggacggacagaacccccgaggatccgacaagaccggttttctacgcgctgtcgatgttcccgtatccctcgggaactctgcacatgggtcacgtgcgcaactacgtgatcacggatgtgatcgcgagggtgcaacggatgcggggccatgccgttcttcatccgatgggatgggatgccttcggccttcctgcagagaacgcagcgatcgaacggaatgtcgaccccggcgaatggacggaccgaaacatcgaacagatgcgcggccagctcgaccgtctcggactgtccatc

SEQ ID NO: 304290 - DNA, 643 bp, Unknown
  Bacterial polypeptide expressing nucleotide sequence isolated from the Sargasso Sea
ttcagaaattgaagccttagtgcaaaagcactggcacgacaacaaaacctttgaagttactgaagatgcgaacaaagaaaagttttattgcctttcgatgttcccctatccttcaggtcgactccacatgggacacgttcgcaactataccataggcgatgtggttgcccgcttccagcgtcttcaaggcaaaaacgtgctacaacctatcggttgggactctttcggtttgcctgcagaaaacgccgcaatcaacaacaaaaccgctccagcaccatggacttatcaaaacattgagtacatgaaaaaccagctaaaactgctgggttttggctacgactggagccgtgaaatcgccacttgtaccccagaatattaccgctgggaacaatggttcttcactaaactgtacgaaaaaggcttagtttacaagaagaccgcttctgttaactggtgccctaacgatgaaaccgtactggctaacgagcaagtacaagacggttgctgctggcgttgtgatacccctgtagaacaaaaagaaattccacagtggttcattaagatcaccgcctatgccgaagaactgctaaacgatatcgacaccttagacggctggcctgagcaagttaagaccatgcagcgc

SEQ ID NO: 304291 - DNA, 843 bp, Unknown
  Bacterial polypeptide expressing nucleotide sequence isolated from the Sargasso Sea
ttttttaatatttcaaagttttcacaagaattacttgatggattaaatgaattaaaaaattggccaaataaagttaaagtcatgcaaaaaaattggattggtaaatcatttggatgtgaaattgcttttaagactgaaggagatctacctgtaaaagaaataaaatgtttcaccacaagaccagatactttatttggattttcatttttagctctttcagttgatcacgaaatttcaaaatattttgcgaaagataaaaaattccaagaatttaaaaaagaatgttccaaaactggtactactgaggaagctattgctatcggagaaaaaattggctttaaaacaaatatgacggcaacaaatccaataaatccaagccaaaaagtacctgttttctttgctaattttgtcttaatggattatggatttggtgcagtatttggttgccctgctcatgatcaaagagatttcgattttgcaaagaaatatagtttagatattaaaactgttgttaaaccagagaatgaaggcgatgaatacgaggtcaaagatgaagcatactcaggtcctggtatattaataaattctggattcctaaacaatcttaaagcgccagaagagtctatcatcaaaacaattgatattttagaagaaagaaatattggaaaaaaacagattaattttagattaaaagattggggtgtttcaagacaaagatattggggatgtccgataccaatggcttatgatgaaaatggaaacgtaaccaaagttccaaagaaagacttaccagtaaaacttccagagaatgtagatttgaattttaagggtaatccacttaat

SEQ ID NO: 304292 - DNA, 838 bp, Unknown
  Bacterial polypeptide expressing nucleotide sequence isolated from the Sargasso Sea
aaattacactattggagatgttttggcgagatacaaaagcctccagggttataacgttcttcatccaatgggctgggattcttttggaatgcccgctgaaaatgctgccaaacaaaataatttagaccctaaaacttggacagaatcaaacattgctaaaatgaagtcacaattaaaaaagcttggcttatctctagattgggatagagaaatttcaacatgctcagaagaatattataaacatcagcaaaaatttttcttagagttgtatgaaaagaaattagtctacagaaaagaaaattatgtaaattgggatccagttgatgaaactgtgcttgcaaatgaacaggtaattgatggaaaaggatggagatctggtgcaattgttgaaagaaaaaaattaaaccaatggttttttaatatttcaaaattttctcaagacttacttgatggcttggaaaaactagataattggccaaataaagtaaaagtaatgcaaaaaaactggattggtaagtcttttggatgtgaaattaatttcaaaatagagggtgatttgccaatagaaacaataaaatgttttactactaggcctgatactctttttggtttttcttttattgcaatttcagtagaccatgagatttcaaacttttataaaaataatgaagaattttcaaaattcaaaaatatgtgttctaaaactggaactactgaagaagctatcgcagtcagtgaaaaaataggttttaaaacaaatttaaaagccattaatccattaaatcctaaccaaaaagtaccagtatattttgcaaattttgtgttgatggattatgga

SEQ ID NO: 304293 - DNA, 362 bp, Unknown
  Bacterial polypeptide expressing nucleotide sequence isolated from the Sargasso Sea
gatggataattatgattttaaaaaaatagaaaaaaattggcagtcaatttgggaaaataacaaacttgctagttgcgatgtaactcttggtaaaaataatttctataacctttgcatgtatccatatccatcaggggatttacatatgggacacattagaaattacactattggagatgtaattaccagatataaacagaaacaaggatacaatgttttatctccaatgggatgggactcttttgggttacctgcagaaaatgctgcaattaaaactggaattcacccaaagaaatttactgaagatcgaataattaatatgagggatcaaataaagagattagggtctctttatgactggg

SEQ ID NO: 304294 - DNA, 914 bp, Unknown
  Bacterial polypeptide expressing nucleotide sequence isolated from the Sargasso Sea
aaaagttccagtttattttgcaaacttcgttctaatggactacgggtttggagcagtttttggatgccctgctcacgaccaaagagactttgaatttgctaaaaaatatgatttgccaattaaaactgttgttaaaccgaaggatattaatggtaatttcgaggtaaaagatgaagcttatataggggacggtactatgataaactcctcctttttggatggtttaaaaacaccagatgatgcaatttcaaaagctattgaaactattgaaaaaaagaattctggaaagaaaaaaatcaattttagactgaaagattggggaatttcaagacaaagatattggggctgcccaattccaattgcttatgatgataaaggaaattatataacaattcctgaagaacaacttccaattaaattaccagaaaatataaatcttaaaacaaaaggaaatcctttagaccatcagcatgattggaaaaaaataaaaattaaaggaaaacaatatgtacttgagacagatactcttgatacttttgtagactcatcatggtattacctgcgcttctgttcaccaaaaaatagtacctacggatataaccaagacgaaataaagtattggatgccagttgatcaatatataggtggagttgagcatgcaatattacatctactttattcaagattttttatgttagccctgggttataaaaataaagattttatttcaagggagccttttgacggcttgtttactcaaggcatggtctgccatgaaacctacaaagataaaaataataattggttaagtccaaatgaagtattttcgaaagatgggaaaaattttttcaaaattggtgatgcaaatgaaagaattattgttgggtcttcagagtctatgtcaaaatcaaaaa

SEQ ID NO: 304295 - DNA, 505 bp, Unknown
  Bacterial polypeptide expressing nucleotide sequence isolated from the Sargasso Sea
catggataaagaatataatccaaacaatatagaggccaatattcaaaaatattgggatgataataattcgtttgtctgtaaactagataatccctcagaaaaattttattgcttgtcaatgtttccttatccaagtggaaaattacatattgggcatgtaaggaattatacgattggggatgttatagcaagatcaaaccgtatgcttgggaagaatgttttccagccaatgggatgggactcttttgggctacctgcagaaaatgctgctattgctaatgatatacacccatcagaatggaccagaaataacatcattcacatgaagtctcagttgaagagattaggctatgcctatgattggagtaaagaaatatcaacttcagatccggactattataaatgggaacaatggttttttttaaaactacttaaaaagaaacttgtctataaaaagttatctgaggtgaattgggatcctgtagataaaacagttttgggctaa

SEQ ID NO: 304296 - DNA, 797 bp, Unknown
  Bacterial polypeptide expressing nucleotide sequence isolated from the Sargasso Sea
tcttcgagatatgggcatggtaaagaatgacgagccatttaagaaacttttgacacagggtatggtgcttaaagatggtgccaaaatgtctaaatctaaaggaaatacggttgatcctaaagaatatattgaaaactatggtgctgattcaattagaacatttatgatcttcgcaagtccacctgaacaatcgctagaatggtctgataacggtcttgaagggtgtcataaattcttaaaaagattatgggctttatcattcaaaattagctccttagggagtgatgcattcgtaggttcagaaaaaacactaaatgacgaatgtaaagatttattcatcaaaattaatgatgattatgaaaaaaggctaaacctaaatactgttgtttcctcttgcatggaaatacttaataacatcaataagagattcaatgatgaaaaagtgttgtgtgataaaaatgatttatacacttgctatgattttttactattagctttatctccaatagcaccgcatattagtgaaaatttatataaaaatatcctaaataaagatattgaagatgctagctggcctcaagcaaactttttccatagaaatgaaacagaaattaaatatctagttcaagtaaatgggaaagtaagagcaaccattcttattgatagtgagaagtctgaggacgatgttaaagaaatagctaaagagcatgaaaatgtttcaagacatcttgaaaacaaagatataatcaaagtcatatttataaaaaataggctaataaattttgttcactcgtaat

SEQ ID NO: 304297 - DNA, 865 bp, Unknown
  Bacterial polypeptide expressing nucleotide sequence isolated from the Sargasso Sea
aaaattggtaaaaaaaaaattaactttagattaaaagattggggagtttcaaggcaaagatactggggctgcccaataccaatcgcatatgatcctgatggaaatgtattaactataccaaaagatcaacttccagttaaattacctgacgaaatagagcttaagtccaagggcaatccattagacaaaaaaaaagaatggaaatcagttacaattaatggaaaaaaatgtgttagagaaacggatacacttgatacttttgtagactcctcttggtattttttaagattttgttcacctaaaaatcatgattatggttttgatcttgaatcaataaaatattggatgcccgtagatcaatatattggtggtgttgaacacgcaattcttcatctactatattcacgtttttttatgagagccataaatcataaaaatgaaaaattttctattactgaaccatttgaaaatctatttactcaaggaatggtttgtcatgaaacttacaaagatgaaaataataactggttaaaccctgaagaggtagatacaaatgatggtaaaaaattttttattaaaaatcaaccagagaaaaatgttttggttggttcttccgagtccatgtcaaaatccaaaaaaaatacgatagaccctgaaaaaatgattgaaaattttggagctgatgctgttagactttttatattatctgatagtccaccagaaaaagatattcaatggtcagagcaaggcatggtagcttcgtacaaatttatccaaaaattttggttactacacacaaaagttttaaataaaattaatgaaagtacaaattcaaaaaatcaagaaaatgatttagagttaacaa

SEQ ID NO: 304298 - DNA, 799 bp, Unknown
  Bacterial polypeptide expressing nucleotide sequence isolated from the Sargasso Sea
tacgcaagatttacttctgcagataatgatgaaaaagctcttgacgatgattcaaaatattggctacctgttgacctgtacataggtggaattgaacacgcaattttacatctcttgtattcaagatttttccataaagcaatgagagatattggtcttgtggagggtgacgagccttttaaaaaacttcttacacaaggcatggtattgaaggatggatttaaaatgtctaagtcaaaaggaaatactgtagatccacaaaagttcattgataaatatggagcagataccattaggctttatatgatgtttacatctccgcccgaacagtctctagagtggtcagatactgcaattgaaggctcatatagatttctaaaacgactttgggctctgatatcagatagaaaaatatttttagaaaaaccaccaaccgatttttcaaaacttgagcttaaacttcgtcaaaaaagtcatcaaactttaaaaaaagtaactaatgattatggagagcgaaactcatttaatacagcaatagcttcaattatggagttattgaatgcaatacctgattcatttaaatcagatgatgcaagttcagcagaggcattttgtttggatgaagttattcaatttacactcaaaatgctgtcgccaattactccccatataagtctttatttatggaaaaaatatacggactctgacggatataattttgagcattcctggccaaaatatagtgaagattttctaaaagtcgaagatttccaattaataatacaagtaaatggcaagg

SEQ ID NO: 304299 - DNA, 759 bp, Unknown
  Bacterial polypeptide expressing nucleotide sequence isolated from the Sargasso Sea
tggtaatcctctcgagtcgcatcatagctttgtacaaaccatttgtcctaaatgcggaagtgaggcaaggcgagagaccgatacaatggacacattctacgactcatcatggtatttcatgagattttgcgatgcaaacaacgacgaatctccattcaatcgctcttctgtagattattggatggatggcggagttgacctgtacataggggggatagaacacgctgtcatgcatctactctacgctagattcttcacaaaattcaccagagatgctgggatgaatgaggtcggggaaccattcggaaggttggtctgtcaggggatgctcaatgctcctgccccgtactgctccgattgtaattctgagtaccacgttgactacttcgaatccgcttgcccatcctgcggtaaagaactatccagcagatcggcaaaaatgagcaaatctctcggaaacaccgttagccccgaagagatgatttccagattcggagcggatacggtaaggctgttcattctattcggtgctaatcctgaggcaggaatggactggtctgatagcgccttggaagccaaccatcgccagatcaactctcttttcgacgccatcgatgaagcgatggcactatcggacgctccttcgaaaattgatggatggctgttatcgagaatgagggcgagtcagaatagatggatcgaagcgatgtccgatgtcagtctaagggagggggtgatgataagccacttcgaaatgct

SEQ ID NO: 304300 - DNA, 585 bp, Unknown
  Bacterial polypeptide expressing nucleotide sequence isolated from the Sargasso Sea
aatgaatacagaattaaatattaaagcaattgaagaaaagtggcaaaagaagtgggagaagttagggcttcattcttcagataaaaaaaacacaaaaaataaaaagtattgtcttacgatgtttagttatccatctggagataagttgcatgttgggcattggtacaattatggccccgtagatacgtttgctcgttttttaaaaatgaatggatataatgtttttcagcctcaaggatttgattcattcggacttcccgcagaaaattatgcgataaagcacgggatacatcccaagaaaagcacgcatgataacattgcaaaaatgaagtcacagctaaagaagatagggggtatgtttgattggagcagcgaggttcaaacaagtaatgaagattattatagatggactcaatggctgtttattcagctttataataagaatttagcttatcagaaagaagctttagttaactgggatcctatagatcaaacagttttagcaaatgagcaagtcttgtcagatggcacttctgagcgttcagggggtattgttatacaaaagcctttaaaacagtggttttt

SEQ ID NO: 304301 - DNA, 232 bp, Unknown
  Bacterial polypeptide expressing nucleotide sequence isolated from the Sargasso Sea
atgaatgattcttatgtccccgttgaagtggagcaggaggcgcaacagcgctgggaggaagagcaaagctttatcgcaaacgatgaacataatggggacaaatttttctgcctctctatgtttccctatccaagtggacagcttcatatggggcatgtcaggaactataccctaggagacgtgattagccgctatcaacgtatgaagggctataatgtgttgcacccccatg

SEQ ID NO: 304302 - DNA, 889 bp, Unknown
  Bacterial polypeptide expressing nucleotide sequence isolated from the Sargasso Sea
gacgataaaggtcaacctaaacctgtgccagacgatcagttaccagtaaaattacccgagaaggtagatttaaattctaaaggaaatcctttaaactctttagaggattggaaaaatgtcgttataaatggaaaatctttcactagagaaactgataccttagatacttttgtagactcatcttggtattttttaagattttgttcacctgaggaaagtaattatggctttaactacgatttaattaattattggatgccagttgatcaatatattggcggtgttgaacatgcaattttacacttattatactcaagattttttatgagagccattagtgacaaaaacgaaaaatttaagtttaatgaaccttttaaaggcctttttacacaaggtatggtttgccatgaaacttacaaagatgaaacaggtaaatggtttaatcctggagaagttgagaccaacgatggcaaaagctactatttgaaatctgacagaaataaaaaaattgtagttggtccctcagagtcaatgtcaaaatcaaaaaaaaataccatagacccagaaaatataatcgagaattatggtgctgacgcagtcagattatttatattatcagatagtccgccagaaaaagatattcaatggtctgaacagggtatggttgcgtcttacaaattcttacaaaaattgtggaatttaaaccaattggtattaaataaaattcagctaaatattcaaaataaagaaaatgaattaattttagaaaagtttgtgaataatacaattgaaaaatataattataatttatctaaatttaactataatgttttaattgcaagtttatacgagacctacaattttttttcagaaattttaaaaaaagaaa

SEQ ID NO: 304303 - DNA, 691 bp, Unknown
  Bacterial polypeptide expressing nucleotide sequence isolated from the Sargasso Sea
accagttcctgatgacatgttacctgtaaaacttcctgaaaatattgacttaaaggtaaagggaaatccattagactcacaaaaaagttggaaggaagttgaaattaatggaaaaaagttaactagagaaactgatacattagacacttttgtttgttcttcttggtactatttaagattttgttctccaaaaaactcagattatggatttaaaaaagaggacattgattactggatgcctgtagaccaatatattggtggtgttgaacatgcaattttacaccttttatattctagattttttatgagagcattatcttatgaaaatactaattttgatatatctgaaccattcagtggattatttacacaaggcatggtttgtcatgaaacttataaagactcagatgataattgggttagtccagatgaaatcgagacaataaatggaaagaaatatcttaaagaggatcactccaaaaagattaaagttggtccctcagaatcaatgtcaaaatcaaagaaaaatactattgatcctgaaaatattataactaactatggagccgactctgcaaggttatttatactatcagatagtccacctgaaaaagatgttcagtggtctgaggaaggtattgcctcatcatataaattcatacaaaaattatggattttaaatttaaaaatt

SEQ ID NO: 304304 - DNA, 238 bp, Unknown
  Bacterial polypeptide expressing nucleotide sequence isolated from the Sargasso Sea
aatgttatacgatttcaaatccatcgaaaataagtggcagagttactggtcaaaaaataagactttcaaaactgagattgacccaagcaagcctaaatattatgttttagatatgtttccttatccaagtggttccggccttcacgtaggccatcccttaggatatattgcatctgatataatttcaagatttaaaagaaataaagggtttaatgtattacacccgatgggtttcgat

SEQ ID NO: 304305 - DNA, 925 bp, Unknown
  Bacterial polypeptide expressing nucleotide sequence isolated from the Sargasso Sea
ttttattgatctgtataatgcgggacttgcatataaaaaagatgcgttagttaattgggaccctgttgaccaaaccgtcttggccaatgaacaagtaattgatggaaaaggttggagaactggtgctcaagtagagaagaaaaatctatctcaatggtttttcaaaattacttattatgctgaagagcttttaaatggtttagatagtttaaaattatggcctgataaagttaaaactatgcaaagaaactggataggaaaatcatctggtgcagaaattaaatttgagataaaggatggtgatggttttttaaatatttttaccactaggccagatactatttatggagctacctttatagctgtatcaattaatcatccaatagtagccaaaaccctaagtattgatgaaattaaaaaaataagaaatgaatttgaatcagtagatgatgaaaaagataaggttggggtttatctcaaaataaaatgttcacacccgatattaaataaagaaatacctgtttacgttgcgaattttgttcttgataactatggagaaggggcaatttttggttgccctgctcatgatgaacgtgattacgaatttgctaaaaaatactctttaccaattttaaaagtaattgattgcaaagatgaagatttaccttactcaggagatggtaaagtaattaactctgaaattttaaatgggcttaataaaaatgaggcaattaaaaagataatttcctattttacaaataataaaataggtaaagagaaaataaattacaaaataagagactggggggtatctagacaaagatactgggggtgtcctatcccagttatatattatgaagatggcagttatagagttttagaaaatcagagttaccagtcttattaccttatgatgttaatttaa

SEQ ID NO: 304306 - DNA, 971 bp, Unknown
  Bacterial polypeptide expressing nucleotide sequence isolated from the Sargasso Sea
catgggtgtcagctttattgcactttcatcagaacatgaaatcacgaagagaaaactatccgagaataaagatttacaactctggatagaagaaatgagtaaagttaaaagcgcagaaaaagatcaagcactacaagaaaaaaaaggtttttttcttaacgaattttcctatcacccagtcacaaaagaaaagatacccatttgggtagcaaacttcgtgatttcagattatggatcaggtgcattgatgggagtacctggtcatgatcaaagagattttgaatttgccacaaaatattcactgcctatcctgaaagtaatttcttccgagaaagaagattctgatcaagcatctacagataaagggaaattgattaattcgggtcaattcgatggtttaagttttgaagatgcattcacaaaaatacaaaaatttgcagagcaaaataattttggaagatttgaagaaaatttcaggctcagaaattggggtgtttccagacagagatcttggggtgctcctattccgatgatgatctctgagaatgaagatgacaacgatgccattcctttttcagatctatccgatgatgagctaaaggcagattcaatagagagaaatggaaaaaaatatgttaaagaaaaagatacgcttgatactttttttgaatcctcctggtattacgcaaggtatgcatcttttaaatcagatgcagatattttagatgatgaagcaaattattggttgccagtcgatcagtacataggaggaattgaacatgcaatacttcatcttctctactcaagatttttctgcaaagttcttaacgaattagggtatttggatacaagagagccgtttacgaatcttctctgtcagggaatggttcttatggacggtgcaaaaatgtctaagtcaaaaggtaatgtagtgaatccagatgatttgattggaagaatacggtgctgac

SEQ ID NO: 304307 - DNA, 682 bp, Unknown
  Bacterial polypeptide expressing nucleotide sequence isolated from the Sargasso Sea
caaagagatttagattttgctaataaatataatctagatgttattccagttattcttccaaataataaaaaagaaaataattttataatcactaatgaggcatttgtgggagaaggaaggttaattaattcttcttttttaaacggtttaaaaatcgaagaggcaaaaaaaataattattaaaaatttaaaaattacaaattctggcaaagataaaataacttatagattaagagattgggggctttctagacaaagatattggggttgtccaattcctatgttgtatagagaagatggaaaaatagttcctgtttctaaaaaagatcttcctattactttgccaccaataaaaggtttgggaggaataaataatgagcttggcaatatagactcttggaaaaatactgtgtgccctgaaacagggatgaaggcaaccagagaaacggatactttcgatacattttttgaatcttcttggtattatttaagatattgtaaccctagaagcagtgaaccatttcttaaagaagatattaattattggttacctgttgatcaatatataggcggaattgaacatgctatacttcacttattgtattctagattttttgttaaagccctaagggatttaggatatattaatattaatgaaccatttcaaggtttgtttaccctaa

SEQ ID NO: 304308 - DNA, 748 bp, Unknown
  Bacterial polypeptide expressing nucleotide sequence isolated from the Sargasso Sea
ttatatatgatgaaaatggtaaaacaaatatggtaccaaaaaaggattttacctgttcttctaccagaaaatgtaaatttaagttcaaaaggtaatccccttgataacgaaagtgattggaaaaatataactattgaaggaaaaaaatttataagagaaactgatactttagacacatttgtatgttcgtcatggtattaccttagattctgctctcctaaaaataaagactatggttttaatcaggaagaaattgattactggatgcctgttgatcaatatattggaggcgtagaacatgctatactacacttactttattcacgtttttttatgaaagcacttagttataataataaaaaatttaattttaatgaaccttttaaaggattatttactcaaggaatggtatgccatgagacttacaaagacaaagacaataattgggttagtccagatgagatagaattagtaggtaaacaatatcaaaaaaaaaatgaacctgaaaataaaattaaagttggtccatcagaatcaatgtcgaaatcgaaaaaaaatgttgttgaccctgagaatataattaggaattacggtgcagatgcagtgagattatttatattgtcagatagtcctcctgaaaaagatgttcagtggtcagaacaaggaatgatagcctcttataaatttttacaaaaattatggacattacaccaaaagattaaaaaaaaaatattagaaaataataaaa

SEQ ID NO: 304309 - DNA, 643 bp, Unknown
  Bacterial polypeptide expressing nucleotide sequence isolated from the Sargasso Sea
tatggagagatttaattttcaattaattgaaaaaaaatggcaatcctcttgggataagaagaatatcaataataataaaaataaaaaaaaattttactgcctagaaatgtttccttatccatcaggtaagatacatatggggcatgtaagaaattacacaattggagatgtaatagctcgatacaaatcaatgagtggttataacgtcatgcatccaatgggatgggattcgtttggacttcctgcagaaaatgcttctagagaaaataatttaaagccaaaggattggaccaatcaaaatatcaaagaaatgaaaagacaactaaaattgttaggcttatcaatcgattgggatttagaaatatctacatgcgatcctgaatattataaacatcaacaagaattatttatagatttctacaaaaaaggtttggtttacaaaaaagaaaactacgtaaactgggacccagttgaacaaaccgttttagcaaacgagcaggtcattaatggtcgaggctggagatctaatgctgtggttgaaagaaaaaaattatcgcagtggttttttaaaatttctaaatactctgaggaactattaagtgatttagaacattacaaggatgggcagatagagtgcgcttaa

SEQ ID NO: 304310 - DNA, 813 bp, Unknown
  Bacterial polypeptide expressing nucleotide sequence isolated from the Sargasso Sea
gattgggggatttcacgtcaaaggttttggggctgtccaattcctataatttatagagaggatggagaggtattagctgttgaagactctgaattaccagtaaaacttccagaaataaaaaattttacagaatcatccagcgcactaaataatatctctgattggaaagaaactatttgtcctaaaacaggattaaaggctataagagagacggatacatttgatactttttttgaatcttcgtggtattattttcgctattgtaatgcaagattagaaaagccctttgacaaaaaagatatagattattggttgccagttgatcagtatattggtggtatagagcatgctatattacatcttctttattcaagattttttacaaaagcgctaagagatctgaagtattttaatttagatgaaccgtttaaggggttgtttactcaaggaatggtaactcacattacttacaagaacaaaagtggtgattggctagaaccaaaggatgttgaaatggtaaatgggactcttaaagataacagtggtcaagaagttataactggaaaaattgaaaaaatgagcaaatctaaaaaaaatgttgttgatccaaatgatattattaattcatatggggcagatacagctagatggtttatgttatctgatagtccgccagaaagagatttgcaatggactgatactggtatagctgcatcttttaagtttataaataaattatatgagttggttgaaaaatataaaaaccatcaatcaaataatgatgaaaattctacagacataaatgaattaaaa

SEQ ID NO: 304311 - DNA, 877 bp, Unknown
  Bacterial polypeptide expressing nucleotide sequence isolated from the Sargasso Sea
tgatgtgatcgctagatataaatctatgaatggttttgatgttcttcatcctatgggttgggactcttttggtatgccagcagaaaatgctgctagagaaaataatttaaatccaaaagaatggaccaaaaataatataacaataatgaaaaggcagcttaaatctttaggtttatctatagactgggatttagaaatttcgacctgtgatgaagaatattataaacatcaacaagagctttttattgatttttataataaagggttggttgttagaaaagaaacttatgttaattgggatcctgttgatcaaacggttttagcaaatgaacaagttataaatggtagagggtggagatcaaatgccgttgtggaaagaaaaaaactttctcagtggttttttaatatttcgaaattttctaacgagttgttacaagacctagacactttaacagactggcctgaaaaagttaaacttatgcaaaaaaactggattggtaagtcagtaggatgtgaaatagattttgagattgaggagatcaataaaaagataaaggtatttactactcgtccagatactatatttggagccacttttttagctgtgtcagtagaccatcctatttgtaaaaaatttgaaaaaaaaccagaatttattgaatttaagaaaatagcttctaaagtgggtacaacggaagaagcaatagcaaatgcagaaaagattggttttgaaacaggtttaagtgccaaacacccttttataaaaaataaaaaaattcctgtattcgtggcaaattttattttgatggattacggtactggtgctatttttggatgtccggcccatgatcagagagatttcgacttgcgaaaaaat

SEQ ID NO: 304312 - DNA, 830 bp, Unknown
  Bacterial polypeptide expressing nucleotide sequence isolated from the Sargasso Sea
acctatagacaaaataagatgctttacaacaagacctgatacgttgtttggtttttcttttttagctgtttctgtagatcacccactttcagaacatttttcaaataaccctgaatttatcaagtttagagaagaatgttcaaaaactggaacaacagaagaatctattgcgcttggagaaaaaattggatttaaaactaatttgtttgcaattaatcctctagataaaaaacaaaaagtcccagtttactttgcaaacttcgtattaatggactatggttttggagctgtgtttggttgtccggcgcatgaccaacgagacttagattttgctaataagtatgatttaaaagtaaaaactgttgtaaaacccatagatcaagatgataactttaaagtaaaaaaagaagcttatactgggccaggaattattattaattctgattttttaaatggatttaaggttccagaagattctattattaaaactatagatatattagaaaaaaaaaaattaggaaaaaaaaaaataaattttagattaaaagattggggtgtatcaaggcaaagatattggggttgcccaattcctatggcttatgatgatggtggaaatgttcaccctattccaaaaaataaattaccagtgatattacctgaagatattaatcttaacaataagggtaatccacttgataacgtaaaagagtggaaagaaataaaaataaatggaaaaaaattaacaagagaaactgacaccttggacacatttgttgattcctcgtggtattttataagattttgctcaccaaaaaatgaaaaatatggtt

SEQ ID NO: 304313 - DNA, 832 bp, Unknown
  Bacterial polypeptide expressing nucleotide sequence isolated from the Sargasso Sea
tgtacctcttaatgaaagtgaattgccgttggaacttcctgaagttgataagtacgaacctagtggaaccggcgaatcacctttagcaaatattaaatcgtgggttgaagttaaagattcagagtctaatattgttggacttagagaaactaatacaatgcctcaatgggcaggatcctgttggtattacttaagatttattgatccaaataatttagaaaaagggtggaatccagaaaaagaaaagtactggatgcctgttgatctgtacataggtggcgcagagcatgctgttcttcatttattatattctcgcttttggcatcatgtcttatatgatttgggattggtatctacaaaagaacctttcaagaagctatttaatcaaggaatgatattgggttcagatggttcaaaaatgagtaaatccagaggaaatgttgtgaatcctgatgaaactgttgatatttatggatctgatgcattacgtatttatgaaatgttcatgggacctttggaaaagggaaagccatggagtacgagcggtttgcagggttgttctagatttataaaaaaactatggagtatcttagtagataatgaaggagatctttcaaagcatataaatgatactgaatctgacaaacaaacaaatcaaatgcttcatcagatgattaaaaaagtttcagataatcttgaacaattacatttcaatacttgtgtatctgaattcatgatttttacaaatcatatacaaaagctagatgagataaatagagaattaattcgatcatttatagtgctattaaatccttttatgccgcatttctct

SEQ ID NO: 304314 - DNA, 744 bp, Unknown
  Bacterial polypeptide expressing nucleotide sequence isolated from the Sargasso Sea
gggactcttttgggatgcctgcagaaaacgctgctagacaaaataatttaagtcccaaaaagtggactgaagaaaatattgaaacaatgaaatcacagctaaagaaacttggtttgtcaattgattgggacagagaaatttctacatgttcaccaaaatactataaacatcaacaaaaattatttttagatctttatgacaaagggttagtttataggaaagaaagttatgtaaattgggatccaatagacaaaacagttttagcaaatgaacaagtggtagatggaaaaggctggagatctggtgctgtagtagaaagaaaaaaattaaatcaatggttttttaaaatttctcatttctctgaagatctattaaatgaattagaaaatcttaaagaatggccagagaaagtaaagaccatgcagaagaattggattggtaaatcctacggctgtgaaattgattttgaaatagaaggatctgaaaaaatcaattctattagatgttatacaacaagaccggataccctttttggattttcatttttagcactctcagttgatcatccgtttgcaaaatattatgaaaaagatcctgattttattaagttcaagaatgattgttcaaaaacaggaacaacggaagaatctatagctcaagcagaaaaaataggttttaaaacaaacctccttgcgctcaaccctttagataaaagtattaaagttccagtgtattttgcctaat

SEQ ID NO: 304315 - DNA, 193 bp, Unknown
  Bacterial polypeptide expressing nucleotide sequence isolated from the Sargasso Sea
taaagaacttatcaataataataatgttgaagtcaaaacaaattttagacttagggattggggaatttctaggcaaagatattggggttgccctattccgataattcattgcgatgattgtggccctgtgaaggttccagaaattgatcttccagttgaactacctgaaattgataatatttcttcaaaaggt

SEQ ID NO: 304316 - DNA, 949 bp, Unknown
  Bacterial polypeptide expressing nucleotide sequence isolated from the Sargasso Sea
tttaaatggattaaacatcgatgaagcaaaagaaaaaataattaatgaaatagaaaaaaaaggaataggaaaaaagaaaataaattttaaattaagagattggggaatttccaggcagagattttggggttgtccaatacctattatttatagagaggatggggaaatacttgcggttgaagatgaagatcttccagttaaacttcctgacattgagaattttagtgagacatctagtgctttaagcaatatttctggctggaaggatactgtctgtccaaaaactggtttgaaagcttacagagagactgatacttttgatactttttttgaatcctcttggtattattttcgatattgtaatgctaggctaaataagccgtttgataaaaaagatatagaatattggttacctgtcgaccaatatattggtggtatagaacatgctattttacatcttttatactcaaggttctttactaaagctttgagagatcttggttattttaatttagatgagccgtttaaaggattgtttacacaagggatggttactcataaaacctataaaaatataaacaatgaatggattgagcccaaagatatagaaaaatatagtggtgggttaaaagataaagatggacttaaggttgtaagtggaaaaattgaaaaaatgagtaaatcaaaaaaaaatgttgtagatccaaacgatattattaattcatatggcgctgatactgctagatggtttatgctatcagatagtccgccagaaagagacttgcagtggacagaaactgggatagcttcttcattcaaatttataaataagttatacgaaactgcaggcaagcttaataaatataaatcaaataactctgaaaatattgatttgatagattctttaaaaagtataattaatgaggtgtcagaaaatatagaaaatttc

SEQ ID NO: 304317 - DNA, 940 bp, Unknown
  Bacterial polypeptide expressing nucleotide sequence isolated from the Sargasso Sea
aaaaaaatggcaattaacttttgaaaaagaaaagctttacaatagtaaaggctctaaaaaattttattgccttgaaatgttcccctatccatcaggtaaaattcatatgggacacgtgagaaattatactattggcgatgttatcgctcgttttaaatttatgaatggatataacgtgttgcatccaatgggctgggatgcttttggtttgccagcagaaaacgctgctaaagaaaacaaattacatccaaaaaattggaccgaaaaaaatattgccgaaatgaggagacaactcaaactcatgggcctttctatagattgggatttggaagtatctacctgtgatgaaaaatattacaaacatcaacaggaaatatttatagatttttataataaaggatttgtaaaaagaaaggaaaactatgttaattgggatccagtggagcaaacggttttagctaatgagcaagttgtgaacggcaaaggttggagatccggtgcggttgtcgagagaaaaaaactttcacaatggttttttgacatcacaaagttttcagaagacctattaaaaggattagatgatttaaactattggcccgataaagttaaaattatgcaaaggaattggatcggtaaatcaattgggtgcgagataaaatttgatattgaaggggagaataataagattaatgtttttacaacacgtccagatactatatttggcgcctcttttttagctgtctcggttgatcatcctatttgctctaattttttaaaggatgaaaaatatattaaatttaaaaatgaatgtctaaaagttggaaccacagaagaggctttagctaatgctgaaaaaattggatttgatacaaagctatttgccgctcacccttttataaaaggtaaaaaattacctatttttgttgctaattttattcta

SEQ ID NO: 304318 - DNA, 946 bp, Unknown
  Bacterial polypeptide expressing nucleotide sequence isolated from the Sargasso Sea
agatcgggtgctttggtcgagagaaaaaaattaagtcaatggttctttaatatttcaaaattttctcaagatcttttagatggcttagatagtttagacacatggccaaataaagtaaaaactatgcaaaaaaactggataggaaagtcactcggttgtgaaatagattttagtgtagaaggcgatccaaccgtaaaaaaaatcaagtgttttacaacaagaccagacacattatttggtttttcttttcttgcagtttctgtagatcatgaaatttcaagactttacaaaaataataatgaatttttaaaattcaaagaagagtgctcaaaaactggtactacagaggaggctattgctgtaggtgaaaaaattggttttaaaactaaacttgaggcaataaatccatttaatcccaatcaaagggttcctgtctatttcgctaattttgttcttatggattatggatttggagcagtatttggatgtccggcccatgatcaaagagatttcgattttgcaaaaaaatataatctagatattaaaacagttgttaagcccctgaacgaagatgtcagttttaaggtagaaaccgaagcttatgcaggtccggggacattaattaattcagaatttctaaatggactgcaagtaccagattcatcaattaatgaggctataaaaattttggaagcgagaaaattagggagaaaaaaaataaattatagattaaaagattggggagtatcaagacaaagatactggggatgtccaatacctatcgtttacgatcaaaacggtaacgcacatccagtccctaaaacaatgttaccagtaaaattaccagaaaatattgaattaaatgtaaaaggtaatcctttagatagtcaagaaaagtggaaaaaagtgattatagatggaaaagaatttattagagagacagata

SEQ ID NO: 304319 - DNA, 910 bp, Unknown
  Bacterial polypeptide expressing nucleotide sequence isolated from the Sargasso Sea
aagatagatgatagagaaaaattttattgtttatctatgttcccctatccttctggaaagcttcatatgggtcatgtaagaaactacacaattggtgatgtaatctcaagatacaaaagaatgaatgattttaatgtttttcaaccaatgggttgggatgcttttgggttaccagcagaaaatgcagcaatagaaaataaagtaagtccaaaagattggacaaatgcaaatattgataatatgaaaaaacaacttaaatcattaggtttaagctatgactggtcgaaagaattaagaacatgtgacccaaaatactataaatgggaacagctaatatttaaaaagttctatgatgctggattagtgtatagaaaaaaatcaatagtaaattgggacccagttgatgaaacagttttagcaaatgagcaagtaatagatggaaagggatggcgatctggagcacaaattgagattaaagagattgatcaatggtttatcaaaataactgagtatgctgaagagcttcttgattcgctggatggtttggactggcctgaaaatgtaaagttaatgcaaaaaaattggattggaaaatctaatggggctgaaatcaaatataagattgatgaatcagatgaatatctaacaactttttcaacaaggccggatactatttttggagtatcttttctcgctatttcaccaaatcaccaactagcaattgacctatcaaaaaaagataaaaatattcttaaatttcttgaaagatgtaaagatataaaagcagctgaagcagatatagctaaggcagaaaaattaggaatagatactaatattaaagtcatacatcctcttacgggagagaaattaccattatggattggcaattttgttctacttgattatggaa

SEQ ID NO: 304320 - DNA, 334 bp, Unknown
  Bacterial polypeptide expressing nucleotide sequence isolated from the Sargasso Sea
atgagtcgctataattttaaagctacagaaaaaaagtggcaaaaaacttgggaagaaaaaaggtgttttcacgcagaacccgacccagaaaaagaaaaatattacgttttggaaatgtttccctacccatcaggtagaattcatatgggccatgttcgcaattacaccctcggcgacgtagtgtcgagatacaaaaaagctattggtttcaatgttttacatcccatgggctgggacgcttttgggttgccggcggaaaatgctgccctggctaataatgtcgcaccggctaaatggacaaatgaaaacataaaaacaatgaaacaacaactta

SEQ ID NO: 304321 - DNA, 859 bp, Unknown
  Bacterial polypeptide expressing nucleotide sequence isolated from the Sargasso Sea
gatcaacgagattttgattttgcaaaaaaatataatttaaaaataaaaactgtagttaaacctactgataaaaataatgaatatgaagtaaaagatgaagcttattcagaagaaggtatcatgataaattctgaatttttaaatggttttaaagcaccaaatgagtcagttatagaggcaataaaatttttagaaaaaaaaaaacttggaaggaaaaaaataaactttagacttaaagattggggagtttcaaggcaaagatattggggttgtcctattccagtcgcttataatagggatggaaaaatattaactatttctaaagatgatcttcctgtaaaactacctgaaaaagtaaacttaggctcaaaaggaaatcctcttgataaagaaaatgattggaaaaaagtgtttatagatggagaggagtgcgtaagagaaacagacactttagatacttttgtagactcttcatggtattttttgaggttttgttcaccaaaaaatgaaatttatggatttgattatgatgaaattaaatattggatgccagtggatcaatatattggaggagttgagcacgcaatattacatttattgtattcaagatttttcatgagggcaatatctttccaaaataaccaatttaattttgatgagccttttaaaggactattcacacagggtatggtttgtcatgaaacatataaatcagaagataataaatggttaagcccagatgaagttagtactaaagatggtaaaaatttttatgaaaaaaataacttaaataaaaaagttattgtcggtccattggagtcgatgtctaaatcaaaaaaaaatactatagatcctgaag

SEQ ID NO: 304322 - DNA, 717 bp, Unknown
  Bacterial polypeptide expressing nucleotide sequence isolated from the Sargasso Sea
agatgagtaaatcaaaaaaaaatgtagttgacccacaacaaataattgatgattttggtgcagacactgctcgtttttttatgttatctgattcaccccctaatagagatatggaatggtcagattcaggagtagaaggttcttggcgttttttaaataaactttggaaatttgtaaaagctttacctaataaaaatactaaagatggattgccaacaaatatttctattcaaaacaaagaactattaacatttatgaatacaacaattaaagatgttacaaaagcaattgatgaatttcactttaacattgccgttgctcaaatcagaagtttatttaacttagtttcttcttataaagttcaaaatgataatgatgcaaaagttgttctttttgttacaagtaaacttcttattttaataaatcctatggtgccccatttagccgaagaactatggtttactctaggaaataaagactcaatttcaaatgaatgttggcccaaagttgatttaggctatattcaaaaggataatataaaaatacctatacaagttaatggcaaagtacgtgcagttattgaagttccaatagatttggataaaagtgatataaaggaaattgctttaaaggaaaaaaatgttttaaaatttttgaacaaaaacccaaaaaaagttattatcattcctaatcgtgttgttaattttgtgatttaaa

SEQ ID NO: 304323 - DNA, 907 bp, Unknown
  Bacterial polypeptide expressing nucleotide sequence isolated from the Sargasso Sea
ttaagattttgttcccccactaataaaatgtatggttttgataaaaatgaaattgattattggatgcctgtagatcaatatataggtggagttgaacatgcaatattacacttactttattcaagattttttatgagagcaataaactacaaaaatgataaatttaaaattaaagagccatttgagggcttgtttactcaaggaatggtttgccatgagacatacaaagacgaaaataataaatggttaagccctgaggaagtagaaagtaaaaatgggaaagagtattatgtaaaaaataatccaaacaagaaagtaaaggttggtccttccgagtcaatgtcaaagtcaaaaagaaatacaattgatccagaaaatataataaataattatggtgctgatgctgttagattgtttatactttccgatagtccgccagaaaaagatgtacaatggtctgaacaaggcatgatagcatcatataaatttattcaaaaactttggacacttcatgaaaaatttaaagaaaaaattaataaaaattacaaagatggtgatgaagaaatttcaatctttacaaatcaaatgattgagaaaataaattacaacttagaaaaattcaattataacgttataattgcgaatttatacgaggcctataatttttttacccaaaaactaaataaaaatataaatcagaaagtacttttagataattattcaaaatttttatctattatatctcctataattccacatttttcatcagaatgtttgactgatttaaaattaagaccattacaaaaatggcctatagcaaacaaaaatttccttaaagttaataatattgaatatgtaattcagattaacagtaaaaaaagagcgtctcttaagcttatggcagata

SEQ ID NO: 304324 - DNA, 745 bp, Unknown
  Bacterial polypeptide expressing nucleotide sequence isolated from the Sargasso Sea
atgaagacaacggatgaagttgcttggcaacaagcatggagcgatgcgaatgttttcgcttcaaacgatgatgcttccaaacccaaattctactgtttggaaatgtatccttatccttctggtaaaatgcacatgggccacgttcgaaactattcaatcggtgatgcagtcgctcggtacaagcgaatgagaggattcaatgtcctctatccaatgggctttgattcctttggaatgcctgcagaaaacgctgcaatcgctgaggggggccatcctcacgacattactgagaagaacatggcatccattactgaacagatcaagcgaatggggttttcgtacgattggagtcgtttgctcaagagtcatgatccgaattactacaagtggaatcaattgttcttcactcgattcttcaaatctggacttgcttatcgagagtttgcaccggttaactggtgtgaatcatgttcgaccgttcttgccaatgaacaagtcaaggctggacgctgctggcgttgtaatggcccggtccgacaaaaggatatgagtcaatggttcatcgatatcaccaagtatgctcaacaattgctcgatggactggaaaccatcgaattcccagaaagtgttcgattgatgcaagaagattggcttggtcgttccgaaggagctgaaatcgaattcggaatcgaaggaagtgatgaaaccattcgcgtgtttacaacccgtccagataccttgtttg

SEQ ID NO: 304325 - DNA, 865 bp, Unknown
  Bacterial polypeptide expressing nucleotide sequence isolated from the Sargasso Sea
cctaaatattacgtgttagatatgttcccatatccatcgggttctggacttcatgttggtcatcctctaggttatatagcatctgatatagtttctagattcaaaagaagtaaaggctttaatgttctccatcctatgggttttgattcatttgggttacctgctgagcaatatgctgtcaaaacaggacagcaccctaaaaaaacaacagaagaaaatgttattagatttaaagatcaattggatagattaggtttatcatttgattgggatagagaaattaaaacaagcgatagtagttattatcgttggactcagtggatttttttaaaattatacaacagttattatgatcataaacttaataaagctcaatctatagaaaaattaaaaattccaaaaaacctgaatgaagaagaaatagagtcttttatagattctaaaaggttagcatatgttgacacaatagatgttaattggtgtgaggaactgggaactgtacttgcaaatgaagaggttattggtggtttaagtgaaagagggggattcccagtcattaaaagaccaatgaaacaatgggttatgagaataacagattatgcagatagattacttgatgatttatctgaattggactggcctgaatctataaaattatctcaaaaaaactggattggaaagtctgagggagctgaaataaagttttcaatagataataattttattgaggtatttacaactaggccagatacaatttttggagcaacatatttagtattagcacctgaacatcctttgataaatcacattaccacagatgaatataaaaaatcaataagtgaatatgttgagcaggctcaaaaaa

SEQ ID NO: 304326 - DNA, 942 bp, Unknown
  Bacterial polypeptide expressing nucleotide sequence isolated from the Sargasso Sea
attatgtatagggaagacggtaaggtaattgaagtccctgaagaccaactgccattggaattgccagatgatattgacttaagcatacccggcaatcctcttgacaatcatccagagtggaaatttacaaagtgtcctgaaacaggaatgaatgctgtaagagaaacagacacgcttgatactttcgtcgattcagcatggtattttctaagattttgttcaccgcttgagacaaaagagccttttaacttagatgaaattaattattggatgccagttgatcaatacgttggtggagtcgagcatgccatcctacatttattgtactctagattttttactaaagcgcttgatatcaaaggaatggatgagccttttgatagcctatttacacaaggcatggtttgtcatcacacgtttcaaaatgaatctaatgcctgggtttatccagacgatgtagacaagaaaggctcgaagtattttcaaatatccactggtgaaccggttacaatgggagaaattgaatcgatgtcgaaatcaaaaaaaaacgtaattgatcctgaatctataataagtacatacggagctgactcagcaagatggtttatgttatctgatagtccacctgaaaaagacattaattggacggactcaggtatcaatggagcgtggaagatttgtcagaaaatttgggcaattgttcaaaataataaggaaaaccttaaacaaacaacgaataataatgacaaaacatataaggggaaatctctagattttataaaaattattcatcaaaaccttcatgccatcactcaaagcattgagaaatttcaaatgaatgtctcaattgcaaaagtatttgagatggttaacgcaatttctaaatttcaaatagaagatgaggaaggcaaagaggcaatcaatgaggcattgcacatccta

SEQ ID NO: 304327 - DNA, 835 bp, Unknown
  Bacterial polypeptide expressing nucleotide sequence isolated from the Sargasso Sea
cttcgttttaatggattatggatttggagcagtttttggttgcccagcgcatgatcaaagagattttgattttgcaaaaaaatatgaattggaaattaatactgttgtaaggccaaaaaacgaaaaagaaaattttaaagtagataaagaagcctatcctggaccaggggttattattaattctgattttttaaatggtttagaggcacctgaaaattccgtaatagaaacaataaatattttagagaaaagaaaaatgggaaaaaaacaaataaattatagactaaaagactggggagtatcgagacaaagatactggggctgtccaatacctattgcttacgatgaaaaaggaaacagtgttcctattcctaaatcgatgttgccagtaaaattaccacaaaatatcgatcttgaggtaaaaggaaaccctttagatgctcaaaaagattggaaaataataacaatcgatggaaaaaaacttgttagagaaactgacaccttagacacatttgtttgttcatcttggtattatttaaggttttgttctcctaatgaaaataaatatggttttacaaaagatgaaatcgactattggatgccagtggatcaatatataggtggggtagaacatgcaattttacatcttttatattcacgtttttttatgagggctattagttttaagaatagtgaattcaatataaatgagccatttcagagtttatttacccaaggtatggtttgccacgaaacatataaagatcaaaacaataattggttaagtcctgaagaagtagatagtaaggatggaaaaaatttttatttaaaatct

SEQ ID NO: 304328 - DNA, 808 bp, Unknown
  Bacterial polypeptide expressing nucleotide sequence isolated from the Sargasso Sea
gaagtggaagagaagtggcagcggctctgggaggagcgaggcactaacacgcatacacgtgaggagctaaagagcgcgaaggacccattctacaatctaatgatgttcccgtacccctctgctgaggggttgcatgtaggcaacatttatgcattcacgggagccgacgtgcatgggcgatatcagcgccttcgcggtaagagtgtgttcgaacctatgggctttgacgcgttcggtatccactctgagaacttcgcgctaaaagtcggtacgcatccgatggatctgattccctcgaacgtgaagaacttcacgaggcaactaagacgaatcggaggcatgttcgactgggagcattcggtcgatacgacggatccgacgtactataagtggacgcaatggatctttctgcagtttttcaaggcagggctcgctgagcgaaaagaggcaccggttaactggtgcccgtcatgcatgacggttctagctaatgagcaggtcgtaggtggggaatgcgagcgctgtgcaacaccggtagaacaaagacgtattgcgcagtggttctttcggatcacggactatgcgcagcgtcttctggacaatctagaccatatagactggtcggaaacgacactaaaggcccagagaaattggattggtcgcagcaccggtgcccaattgcgcttcccagtggttgacgaggctggagatgagacagggacacgcatcgaggtgtacacgactcgtcccgataccgtattcggagcgacctatgtcgtgctatctcctgagcacccactcgtccaga

SEQ ID NO: 304329 - DNA, 743 bp, Unknown
  Bacterial polypeptide expressing nucleotide sequence isolated from the Sargasso Sea
ataaatacaatgaaagatcaattaaaaaaacttggactttcaattgattgggatagggaaatttcaacatgctcagaagaatattataaacatcagcaattgttttttttagaactttacgagaaaggactagtttacagaaaagaaaattatgtaaactgggatcctgttgatcaaactgtacttgcaaacgaacaggttattgatggtaaaggatggagatcaggagcagatgtagaacgcaaaaaattaaatcaatggtttttaaatatttcaaagttttcacaagaattactagatggtttggatgatttaaaacaatggcctgataaagtaaaaataatgcaaaaaaattggattggaaaatcctttggttgtgaaatttcatttaaaacagaaggtgatttaccagtaaaggaaataaaatgttttactacaagacctgatactttatttggattttcatttttagctctttctgtagatcatgaaatttcaaagttttatttaaatgataaagaatttcaaaaatttaaagcagagtgctcaaaaacaggaacaacagaagaagcgatagcaattggtgagaaaataggatttaaaacaagtcttgtagctattaacccattaaatccagaccaaaaagtaccggttttctttgctaattttgtattaatggattatggatttggagcagtttttggatgccctgcgcatgatcaaagagattttgattttgctaa

SEQ ID NO: 304330 - DNA, 805 bp, Unknown
  Bacterial polypeptide expressing nucleotide sequence isolated from the Sargasso Sea
aaaaattgaagtctttacaacccgacatgatactttgtttggagcttcgttttgtgctatttccattaaccatccattagcaataaaaataatagctgaaaacaaagaggcagcaaattttgcaaaaagctgtgatggcgttgatcaagaaaaagttaaaaagggctttaaaacaaacttagaagtttttcaccctctaataaaaaacaaaacactacctgtttttattgctaattttgtattaatggaatacggcactggcgcaatttttggctgtccagctcatgatcaaagagatttagattttgctatcaaatatagtttggaagtaacccctgttgtgactccagacataaatgaaggtgactttaaaataacaacaacagcttatactggtcagggtcatataataaactcttcctttttaaatggcttaacaataaaattagcaaagcaaaaagtttttgaagaattatcaaagatcgggattgcgaaaaaacaaacaaattataaacttagagactggggcttgtctcgtcaaagatactggggatgcccaataccagttctttatcgagaagacggagaaataattcctgttccaaaagaaatgctacctgtaaagctacctgatgttaaaaaggttggaagtgaaggaaatcttcttaataatttaaaggaatggaaaaatactgtttgtccccatactggaaaaaaggcaataagggagactgatacttttgatacattttttgaatcttcctggtattttcttagatattgcagcccaagagaaaattcaaaa

SEQ ID NO: 304331 - DNA, 901 bp, Unknown
  Bacterial polypeptide expressing nucleotide sequence isolated from the Sargasso Sea
aaagaatgctccaaaactggtacaactgaagagtcaattgcacaaggagaaaaaattgggttcaatacaaatctaatggcagttaatccacttaatacaaaagagaaggttcctgtatactttgcaaattttgtattaatggactacggatttggtgcagtcttcggctgccctgctcacgatcaaagagatttagactttgctttaaaatataatttaccagtaaaaacagtggtaaaaccttacgataaagataaaaaatataaagtaaaaaaaaaagcatatactggtcctggagagattataaattctgattttctaaatggacttaaagcaccagaggaatcaataattaaaactattgaaatacttgaaaaaaagaaattaggaaataaaaaaattaattttagattaaaggactggggtgtatctagacaaagatattggggttgtccaattccaatagcttatgatgaaaatggaaatgtagtaaaaattcctagtgaacaacttccagtcaaacttccagaaaacattaatttaaatgaaaaaggaaatccacttgataatgtaaaatcctggaaaaacattaaaattaatggaactgattgttcaagggaaactgacacgctggatacatttgtggactcatcttggtattttttaagattttgttctcctaaaaattctaaatatggatttgataaagatgaaataaattattggatgccagttgatcaatatatcggaggagtagaacacgctatattacatttgttgtattcaagattttttatgagagcattaaattataaaaacagtaaatttaaaattactgaaccatttgaaggtttatttacacaaggaatggtttgtcacgaaacatataaagacgaatata

SEQ ID NO: 304332 - DNA, 819 bp, Unknown
  Bacterial polypeptide expressing nucleotide sequence isolated from the Sargasso Sea
ggcgatgttctagcacggtataaaaaacttcaaggtttcaatgtcctacatcctatgggatgggactccttcggtttgccagcagagaacgctgcgcgagaaaataaccttcatcctaaagaatggacaaaagaaaatataaaaaatatgaaagtacaattaaagcagctcggattttctttagattgggatcgtgaaatatccacttgtgaaccagaatattacaaacaccaacaagaattttttttagaactgtttaaaaaagacttagtttataaaaaagataattatgtcaattgggacccagaggagcaaacagttttagcaaacgagcaggtaattaatggaaaaggatggcgttctggtgttcctgtagaaagaaaaaaactttctcaatggttttttaacattaaaaaattttcccaagatttattagatgaactcgataatttgaaaaattggccagaaaaagttaaattaatgcaaaaaaactggataggtaaatcttttggttgtgagattaattttgaaatagataataaaaatatattaaataaaataaaagtttttacaaccagacctgacacaatatttggagcttcctttattgcaatttctgtagaccatcctattgcaaaacaatttgaaaaagataaaaattttatttcttttaaatctgaatgttcaaaaataggaaccacagaagaagctcttgccaatgcagaaaagcttggcttcaatacagatttatttgctttacatccctttaaaaaaagtaaaaaacttccaatttatatcgctaattttgtgttaatggat

SEQ ID NO: 304333 - DNA, 844 bp, Unknown
  Bacterial polypeptide expressing nucleotide sequence isolated from the Sargasso Sea
cgcgccagtggagcgccgcctgctttcacagtggtttctcaaaattaccgagtatgcggacgacttgttggaaacgctcgcagagctcgatcgatggccggatcaagtacgcttgatgcaggcgaattggattaatcgctcggaaggtgcgaccgtcgggttttctcttgccggaaggacggattcactggacgtgtttacaacccgtcccgatacgctttttggcgctagtttctgcgccatcgcggccaatcatcccctcgcgcttgaattggcggagaaggatccggagttggcgtcgtttatcgaggggtgcaatcgcatggggacgagcgaagcagcgattgaaacggctgaaaaggagggatatttgacagagattcgagcctgtcatccgttctccgaggattgggagctaccggtctacgtcgcgaatttcgttttaatggaatacgggacgggagccatattcggatgcccggcgcacgatcagcgcgaccttgattttgcccggaaatatgggctcgacgtggtgcctgttgtcgcacccgcagacggcagcggggtcgaaatcgggaatgaagcctttgtcggcgacggcaatattatcaattccgagtttatgaacggtctcgatgtcgaagccgccaaacggcgggcgatcgaggagttggagcggctgaattccgggcaatcgaagatcacctaccggttgcgggactggggcgtttcccggcagcggtattgggggtgtcctgtccccgtcatccactgcgagacctgcgggaccgttcccgtcccagaggccgacctccccgtcaccctgccggatgatgttgacttt

SEQ ID NO: 304334 - DNA, 742 bp, Unknown
  Bacterial polypeptide expressing nucleotide sequence isolated from the Sargasso Sea
aatggcagagtcttcaagatataactttaaggacgtcgagaataagtggcaatcttattgggataaaaaaaagatatttaaagctgaagtttcttcaaaaaaaccaaaattttattgtctagagatgttcccctatccatcaggtaaaatccatatgggtcatgttcgtaattatacaattggtgatgttttagcacggtttaaattattgcaaggttttaatgttttacatcctatgggttgggactcttttggtatgccagctgaaaatgcagcaaaacaaaataacttaaatccaaaaaagtggaccgaagacaatataaaaataatgaagtcgcaactcaaaaaattaggactttctattgattggaatagagaaatttcaacatgttcagaagagtattataaacatcagcaaaaactttttttggaattatacgataaaggtttggtttatcgaaaagaaagttatgtaaattgggatccaattgataaaactgttttagcaaatgaacaagttattgatggtaaaggttggagatctggagcaatagtagaaagaaaaaaattaaatcaatggttttttaaaatatcaaatttttcagaagaactgttatcagacctagacaatctaaatgaatggccagaaaaagttaaaacaatgcaaaaaaattggattggaaaatcttttgggtgtgagattgattttgaaattgaggggtcaaaagaggttaacaatata

SEQ ID NO: 304335 - DNA, 859 bp, Unknown
  Bacterial polypeptide expressing nucleotide sequence isolated from the Sargasso Sea
aagaatatctcaaccatgaaaactcaacttaaaagattaggtctttcaattgactgggacagagaaatttccacttgttcaccaaactattacaaacatcaacaaatcttttttcttgaattgtacgataaaggattagtttatagaaaagaaaactatgttaattgggatccaatagaccaaacagtgcttgcaaacgaacaagtcatagatggtaaagggtggagatctggtgctcaggttgaaagaaaaaaattaaaccaatggttctttaatatttctaaattttcagaagaattgcttgatggtttaaaagatttatcgggatggcctaataaagtaaaaactatgcaaactaattggataggtaaatcatacggttgtgaaattgattttaagattgaaggtgacttgccagttaaaagtataaaatgttttacgacacggcctgacacattatttggtttttcttttcttgccttatctgttgaccatcctttatccaaacatttcgaaaacgatccagaatataaaaagtttaaagaggaatgttcaaaaacaggaaccacggaggagtctattgcccaagctgaaaagattggttttaaaacaaatttaaaggctcttaacccactggatcctaaaattaaagtgccagtttactttgcaaattttgtactaatggattatggttttggagctgtttttggttgtccagctcatgaccaaagagattttgagtttgcaaaaaaatataatcttaacattaaaactgtcgtaagacccaaagatccagatgataattttacagtaaaaaatgaggcttttatagaagacggtattatgattaattcctctt

SEQ ID NO: 304336 - DNA, 630 bp, Unknown
  Bacterial polypeptide expressing nucleotide sequence isolated from the Sargasso Sea
aatgaatcaggaatataatccccaaaaaattgaaaaaactgttcaaaagttctgggaagataataattgttatagagctataaaaaacgatcaaaagaaattttattgtttatctatgtttccttatccctctggtaaattacacatggggcatgtaagaaactataccattggtgatgtaatttctcggtataaaagaatgagaggatttaatgttttacaacccatggggtgggatgcttttggcttaccagcagaaaatgcagcaattcaaaataaggttgatcctcaaacttggactgaaaaaaatatcgctaatatgaaattacagctcaagcaattaggttttagctatgattggacaaaagaattaaaaacatgtgatccaaattattatagatgggaacaggaaatgtttactttgcttcaggataatggacttgtttataagaaaaaatctttagtaaattgggatccagttgataaaacggttctagcaaatgaacaagtaattgatggtaaaggatggagatctggagctactgttgagttgaaggaaattgaccaatggtttttgaaaattactgactacgctgatgaacttctgcagtctattgataacttagactg

SEQ ID NO: 304337 - DNA, 752 bp, Unknown
  Bacterial polypeptide expressing nucleotide sequence isolated from the Sargasso Sea
actcgataatcttaattcatggccaaacaaggtaaaaatcatgcaaaaaaattggattggaaaatcatttggtagcgaaatcgattttaaaatcgaaggagatttaccagtaaaaaatatcaaatgttttaccacaagaccagatactctttttggtttttcctttttagctttatcaattgatcatgagatttctaaatatttcagtgacaacaaagattttttaaggtttaaagaagagtgttcaaaaactggtacaacagaggaagctgtagctgttgcagaaaaaattggtttcaaaactaatttaattgcgtcaaatcctttaaacccaacacataaagttccagtatattttgctaattttgtattaatggattatggatttggagcagtattcggatgtccagctcatgatcaaagagattttgattttgctaaaaaatataatttagaaattaaaacagttgtaaaaccttttaatgaaaaagaaaactttcaagttaaagatgaagcttatccaggccccggagttattataaactcagattttttaaatggtcttgaggcaccagataattcggtaattgagacaataaaaattttagaagaaaaaaaattaggaaaaaagcaaattaattataggttaaaagattggggggtctctagacagagatattggggatgtcctattcctgttgcttatgatgaaaatggaaatgttcatccaattccaaaatcgatgctacctg

SEQ ID NO: 304338 - DNA, 802 bp, Unknown
  Bacterial polypeptide expressing nucleotide sequence isolated from the Sargasso Sea
gttgaagataaatggcaaaaatttttgggaagataataattcatttaagtctgaagtagataaatcaaaaaagaaattttactgcttggaaatgtttccatatccatctggaaaagttcatatgggacatgtgagaaactatacaattggtgacatcttatccagatataagacaatggaaggtttcaatgttttacatcctatgggatgggattcttttggaatgccagctgaaaacgcagctaaagaaaataatcttgatccaaaagtttggacagaaaaaaatatttctactatgaaaaatcaacttaaaaaacttggattatcaatagactgggatagagaaatttcaacttgttcaaatgactactataagcatcagcaacttttttttctggaactatatgaaaaaggactagtttataaaaaagagaactatgtaaattgggatcctattgatgaaactgttttagcgaatgaacaagtgattgatggcaaaggttggagatctggagctatggttgaaagaaagaagttaagtcaatggtttttcaatatttcaaaattttctgaagatttattaaaaggtcttgatgagctagaaaattggccaaataaagtgaaagtgatgcaaaaaaactggattggaaaatcttttggatgtgaaatcgatttcaaaattgaaggagatttaccagttaataatattaagtgttttaccaccaggcctgatactttatttggtttttcatttttagctgtgtcagttgatcatccaatatctaagtttttcaaagaccaa

SEQ ID NO: 304339 - DNA, 859 bp, Unknown
  Bacterial polypeptide expressing nucleotide sequence isolated from the Sargasso Sea
gcagataaaatagaagtttttacaaccagacccgataccatctttggaatgtccttttgtgcaatatctcctaaccaccctttgactaaaacacttgcaaaagataacgaacaaatcgctctatttgttgagcaatgcaattcaacgtcgaccggcctagcaaacttggaaaagcaggaaaaagaaggccttgataccggcataaaagttaaaaacccatttaaaaagggaagcgttcctctttatatcgcaaattttgttcttatggagtatggttctggggctatctttggttgtccagctcatgatcaaagggatctagagtttgctctaaagtataatttggatgtaattccagttgtttgtcctgatgatcgggatgctgctacttttatgatcgaaaaggaagcattttcgggagatggcaaaatcataaactcagattttttaaatgggctgactatagaggatgctaaggagaagattatctcgcttctgtccaaaaaaaatataggtgaaaataaagtgacctttaggcttaaggactggggtatttctcgacaacggtattggggttgtccaataccagttatatattgcgaaaaatgtggggtaataccagaaaaaaaggaaaatctgccggttaaacttccagaaaacgtttcttttaaagatcctggaaatcctttgttatcggcctccgattggctcattacagattgtccagtttgcggaaacccagctaaacgcgaaacggacacaatggatactttcgtggacagttcatggtactttataagatttactagccctaaaaatagtaaaccgactgaagagaatgatttgaagtattggatga

SEQ ID NO: 304340 - DNA, 843 bp, Unknown
  Bacterial polypeptide expressing nucleotide sequence isolated from the Sargasso Sea
gatgggcctcgcgatcgactggtcgcgcgaaatcgcgacgtgcaagcccgactactacaagtggaaccagtggctgttcctgaagatgctcgagaagggcatcgcgtacaagaagacgggcaccgtgaactgggacccggtcgaccagaccgtgctcgcgaacgagcaggtgatcgacggccgcggctggcgttcgggcgcgctcgtcgagaagcgcgagatcccgatgtactacctgcgtatcacgcagtacgcggatgagctgctgaacgacctcgacggcctcggctggcccgagcgcgtgaagatcatgcagcagaactggatcggcaagagcttcggcgtgaacttcggcttcccgtatgaactcgacggcgagaagaagctgctgcgcgtgttcacgacgcgtgccgacacgatcatgggcgtcacgttctgcgcgatcgcggccgagcatccgctcgccacgcgccttgcccaggacaagcccgagctgctcgcgttcatcgacgaatgcaagcgcggcggcgtcgccgaggccgacgtcgcgacgatggagaagaagggcgtcgcgacgggcttctcggtcacgcacccgctcaccggcgagccggtcgaggtgtggatcggcaactacgtgctgatgagctatggcgaaggcgcggtgatgggcgtgccgggccacgacgagcgcgatttcgcgttcgcgaagaaatacggcctgccgatcaagcaggtgatctcggccgaaggccagcagtactcgctcgacgcatggcaggagtggtacggcgacaaggaaacggccgtctgcgtgaacagcggcaagtacgacggcctgcg

SEQ ID NO: 304341 - DNA, 896 bp, Unknown
  Bacterial polypeptide expressing nucleotide sequence isolated from the Sargasso Sea
ggcatttactgatgaagcatttaaatattggatgcccgttgaccaatatataggcggcgttgaacatgctgtgatgcatcttctttactcaagattttttatgcgggctttaaaatttgtaaaaacagttgacttaaaagagccctttaattctcttcaaactcagggtatggtttgccatcaaacttttaaaactcaaaaagaaaaatggctttttcccaaacaagtaacaaaagaaaataatacattctttcatataaatacaaaagaagaagttatcgccggaagaattgaaaaaatgagtaaatctaaaaaaaatgttgttgatcctcaacaaataattcaaacttatggggcagatactgcaagattttttatgctttctgattctccacctaatagagatatggaatggtcagattcaggcatagaaggggcgtggcgctttttaaacaaattatggaattttgttttcaatttagaaataaaaaatatagacaataatcttcctacaaacttatcaaaatcacataaaaagttattagcaacgttaaacacaactatagaagaagtcacaaaatctattgatgattttcatttcaatattgctgtagcctcaataagaagcttatttaatgccatttcatcatataaaatattaaataatgatgacaagagtgttattttacataatgtgaaaaagttgttagttctaattaaccctatggtgcctcatattgctgaagcattgtgggaaaatttaaatgaaaaagttttaattgctaatgaaagttggcctatagctgataaatcctttgaggaaaaagatattataaaaataccagttcaagttaatggaaagatgagagcaattattgaagttcaaaaagattgaa

SEQ ID NO: 304342 - DNA, 578 bp, Unknown
  Bacterial polypeptide expressing nucleotide sequence isolated from the Sargasso Sea
attaaaagacatgcagaaaaattggataggaaaatctaaaggtgctattatcaggtttaaagtttacaataaaaacgaacagattgaagcctttacaactagaccagacacaatttttggggtaacttttataacacttgcacctgaaaatgaaataatttctagaatagttaataaagatcaaaaagatgaagtggataaatatattaagcaggtagttaataaatcagatttggaacgtcagtctgatataaaaaatattagtggtgttttttcaggggcatacgcaacacacccttttactcgtaataaaattcctatttggatcggagaatatgtgttgtctggttatggaacaggtgctgtaatgggagttccttgtggtgatcagagagattatgactttgctaatttttttagaataccgataaaaaatatttttcataaaattgatatttcgaaatcagcatttgttgaaaaatctaattttaaaattactaattccgattttctgaatggtctttcattcaaagatgcatttgccagaacaattgatgaattagaaaaaagagattctg

SEQ ID NO: 304343 - DNA, 939 bp, Unknown
  Bacterial polypeptide expressing nucleotide sequence isolated from the Sargasso Sea
gtattggtaccgctatatggatgcgcacaacacaggggcatttattgataaagaggttcaagagtactgggggaatgtggacctatacattggcggctctgaacatgctactggtcacttactctactctcgtttctggaataagatcttattcgatttaggccatgtaaaccaagaagagccctttaagaagttgattaaccaagggatgatccaagggagatctaattttgtttatcgtgtaaaaggcgagaataaattcgtttctaaaggactaaagaaagactatgacactacaccaatgcatgtagatgtgagcctttgccgaaatgacgaattgaacattgaaggctttaagagctggcgacctgatttagccgatgctgaattcatcttagaagatgggaagtatatgtgcggctgggaagttgagaagatgtccaagtctaagtacaatgtggtaaacccagatgacatcattgagcgttatggagcagacactttgagactctatgagatgttcttgggtcctttggagcaattcaagccatggaatacgaatggaattgatggcgtaaagaaattcttaggcaagctttggagactcttccacaacggacagggagaatttgaagtttccgctgacgcaccgactaaagaggagcttaaagcattacacaaaacgattaagaaagcgggagaagatatcgaccgatattcattcaatacatcggtttctacctttatgatttgtgtgaatgagctatctgcactcaagtcgaataaccgtgcggtccttcaagacttgttggtggtgatttctccatatgccccacatattacggaggagctttggtcattacttggacatgagaccagtattattgatgccgcctatccggaatttaatgaagtgtatttgaaagaagacgacattga

SEQ ID NO: 304344 - DNA, 709 bp, Unknown
  Bacterial polypeptide expressing nucleotide sequence isolated from the Sargasso Sea
aatggaaagtgaatataaccacattgttatagagagtgagatccaagataaatggcaatcagaagatttgtattcaataaatgtagattcaaaaaaacctaaatattattgtctttctatgttcccttatccctcgggcaagcttcacatgggacatgtgagaaactatacaattggagatgttgtttcaaggtttaaaagaactcaaggcttcaatgtctttcaacctatggggtgggatgcctttggtctgccagctgaaaatgctgcaatagaaaataaaacacatccaatgaaatggactgaaaaaaatattgaaacaatgaaacagcagcttaaatcacttggatatagctatgcatgggaaaaagaattaaaaacatgtgagccagaatactataaacatgagcaagagatttttataaaaatgtttgagcagggattggtatacaagaaaaagtctatggtcaattgggatccaatcgataagacagttcttgctaatgaacaagtcatagatggaaagggatggagatctggtgcaaaaattgaacttaaggaaatagatcaatggtttcttaaaattactaattatgctgatgagcttgagaaatctttagagcaacttgattggccagaaaatgtcaaaacaatgcaaaaaaactggattggaaaatcatatggcgcagaaatttcatttcaaattgaa

SEQ ID NO: 304345 - DNA, 897 bp, Unknown
  Bacterial polypeptide expressing nucleotide sequence isolated from the Sargasso Sea
tttaggttatattgcttctgatatctattcaagatataaaaaaatggaaggtttcaatgtgttacatccaatggggtacgattcatttggtctaccagcagaacaatatgcgattcaaacgggtaagcatccagctttaaccaccaaagaaaacatttccaggtatcgagatcagttagataaacttggtttttgttttgattgggatagggaagtaagaacttcatcgccttcttattataaatggactcaatggatttttaaacagttatacaattcttattttgatttaaaagaaaataaggcagttaatattgagcaattaagaattaagttatcaaaaaatggcaccactaatttacatgcatactctgaaagtaaacagagtgtctctgccaaagagtggaatttaatgagtgaagaagaaaaggaggtttttttattgaattatagattaacttatttggcggattctttggttaattggtgtcccaaattaggaactgtacttgctaatgacgaagtagttaatggactatctgtaagaggaggttttccagtggtgcaaaaaaccatgaggcaatggtctatgcgaattaaagcctattccgaaagacttttgtctgggctagatgaaattgattggtctgattctttaaaagaacaacaaaggtattggattggcaaatcctttggttgttctgttgaatttaaattagaaaaagaaaacacaaaatctatagaggtttttacaacccgaccagatacaatttttggggtaagctttttggttttggctcctgaacatcctttggttaataaaattacgactgaagattatataaaaaatgtaactgaatatgttaaacttgcttctaacaaaagtgatttagatag

SEQ ID NO: 304346 - DNA, 188 bp, Unknown
  Bacterial polypeptide expressing nucleotide sequence isolated from the Sargasso Sea
cgacccgaataatgatgagtcctcctgggataaggaaagtgagtcatattggatgccagttgatctttatattgggggagtagagcacgccgtattgcaccttctttattcaagaatttggtgtcatgtgttgcatgatcttggtctagtttctcaaagagaaccttttcaaaaactatacaaccagg

SEQ ID NO: 304347 - DNA, 751 bp, Unknown
  Bacterial polypeptide expressing nucleotide sequence isolated from the Sargasso Sea
aaaactgtagtcaaaccagaaggtgaaaaagataaatttgaagtaaaagatgaagcttactcaggtccaggatttttaataaactctgaattccttaacaatcttaaagtaccagaagaatctattattaaaacaattgacattttagaagagagaaaaataggaaaaaaacagatcaattttaggttaaaagattggggcgtttcgagacaaagatattggggatgtcctatcccaatggcttacgatgaaaatggaaaagttatacctattccaaaaaatgaattacctgtaaagcttcctgaaaatataaatttaaattctaaaggtaacccccttgactctgagaaagactggaaaaacatttcaattaatggaaaaaattacataagggagacagatacattagatacatttgtttgttcttcttggtattaccttagattttgctcaccaaaaaattcagattatggttacaaacaagatgaaatagattattggatgccagtcgatcaatatataggtggagtagagcatgcaatacttcacttgctatactcaaggtttttcacaagagcattaggatacaagaataaaaattttaagataaatgagccctttaaaggtttatttacacagggtatggtctgccacgaaacgtacaaagatcaaaataataattggctaagtcctgatgagattgaatatataaataatcaactttataaaaaaggtgatccaaaaaataagg

SEQ ID NO: 304348 - DNA, 562 bp, Unknown
  Bacterial polypeptide expressing nucleotide sequence isolated from the Sargasso Sea
aatggatacttttgttgattcctcatggtactatttaagatttttagattctaataatgatgaagaacctttcaaatctgaatatataaatgattggcttcctgtagatcaatatataggaggtgttgaacatgcaatactacacttactttattctagattttttgttaaagccttaagagatttaggaattattgaaatagatgaaccatttaataatttattctcccaaggaatgataaattttgagggagcaaaaatgtcaaaatcaaaagggaatattgtagatcctgaatcgtattttaaatctcatggagcagatgctctaaggttatatatcttatttatggctccacctagtgatggagttgactggaacgatgggggaattgaaggaactaaaagatttttaaataaattatgggaaaatttagatcagattattgatatgaagattgatgaaaacaataataatgaatttggaaatgaaattgaaagaaaacttaaccaaacaattgaatctgtaaccaatcaccttgaaaagtttgaattcatacagtag

SEQ ID NO: 304349 - DNA, 797 bp, Unknown
  Bacterial polypeptide expressing nucleotide sequence isolated from the Sargasso Sea
tatggctgttcctggtcatgacgaaagagattgggagtttgcatcaaaatataatctccctatagtagaagttgttgagggcggagatgtgtctaaagctgcatttactacaaaaggtgacgcaaaaattataaattcttcaaacgataaaactttatctatggatggtttgactgtagatagagctattaaggaagcgatttcatttatagaaaaaaattcaataggaagagccacagttaattacaaattaagagattggttattttctagacaaagatattggggagagccttttccattaattcacaaagatgattcagtggagttaatacaagaaaaagatttaccagtaatgcttcctgaagtagaaaattataagccatcagatgatggtaaatctccattatcattagttaaaaattgggttgaagtaaaagatgaaagtggtaatattattggacttagagaaacaaatactatgccccaatgggctggatcttgttggtattttctaagatttacagaccctaaaaatgaaaatgaagcatggtcaaaagaaaaagaaaactattggatgccagtagatttatatattggtggacaagagcatgcagtgcttcatttattatactcgagattttggaatcatgttttatatgatttaggtctagtatcaacaaaagaaccatttaaaaaactctataatcaaggaatgattttaggtgatgatggtacaaaaatgagtaaatctcgaggaaatgtaataaatccctcagagattatggatgagtatg

SEQ ID NO: 304350 - DNA, 547 bp, Unknown
  Bacterial polypeptide expressing nucleotide sequence isolated from the Sargasso Sea
tatggaaagacttaattttcaagtgattgaaaagaaatggcaagatagatttgcaaatgagaatctttataggaaagatggaaagaaattttattgcttagagatgtttccatacccatctggaaaaatacatatgggacatgttagaaactataccatcggagacgttgttgcacgttacaaatatcttaatgggtttaatgttttgcacccaatggggtgggatgcttttggcctgcctgcagaaaatgcttccaaattaaataaccttcatccaaaagaatggacaaagcaaaatataaatacaatgaaaaaacagctcaaattgttaggactatcaattgattggaatttagaaatttcaacttgtgataaagaatactataaacatcagcaatcattgtttatagatttttttaaaaagggattggtttctaggagagaaacttacgtgaattgggacccagtggaaaaaacagtcttggcaaatgagcaggttattaatggcaggggatggagatcaaatgcgccagtagaaagaaaaaaa

SEQ ID NO: 304351 - DNA, 748 bp, Unknown
  Bacterial polypeptide expressing nucleotide sequence isolated from the Sargasso Sea
gcaacttttaactatggtttgtcaatagattgggaccgtgaaattgcaacttgccatccagaatattacaaacacgaacaaaaattttttatagacatgtttaatgctggtttagcttataaaaaagaagcggaagtaaattgggaccctgttgatcaaactgttttagctaatgaacaagttatagatggaaggggttggagatcaggagctatagttgaaaaaaagaagctatctcagtggttcttaaaaattagcaaatattctgaagaactattaaatgatttgaataaactagataagtggccacataaagttaaaattatgcagtctaattggattggtaagtctgttggtgcagaaatagattttaaaattcaaaactcagaagataaaattaaaatttttactacaagacctgacacgttgtttggagctacatttatagcaatttcacccgaccaccccatttctttacaactttcagagcataatgaaaaaataaaggattttattttaagttgcaaaaaagaagatgcggataaaaacaagatgggtattttattagattctaaagcagaacatccattgattaaaaaaaagggtctaccaatatttatagcaaattttgttcttatggaatatgggttaggggcgatatttgggtgcccagctcatgatcaaagggatttggattttgctaataaatacaaacttgaagtaatccctgttgttaaacctcactaat

SEQ ID NO: 304352 - DNA, 533 bp, Unknown
  Bacterial polypeptide expressing nucleotide sequence isolated from the Sargasso Sea
tttgaaacaatggccaaacaaagtcaaagtgatgcaaaaaaactggataggaaaatcatttggttgcgaaatcagtttcaaaattgagggaaatttaccggtaaaagagataaaatgttttacaactaggccagatactttatttggattttcatttttagcactttcagttgaccacgagatttcgaaatattattcagatgatgaaaaatttcaggaatttaagaaagaatgttcaagaacaggtacgacggaagaagctattgcaataggtgaaaagattggatttaagactaacttgatggcaataaatcctttagatccaagccagaaagtaccagttttttttgcaaactttgtattaatggattacggttttggtgcagttttcggttgtccggcgcatgatcaaagagattttgattttgcaaaaaaatataaacttaacattaaaactgttgtaaggccaattgatgaagctgagacatttgtagttaaagaagaagcttacactggacctggagtaataataa

SEQ ID NO: 304353 - DNA, 643 bp, Unknown
  Bacterial polypeptide expressing nucleotide sequence isolated from the Sargasso Sea
ataggtggtattgaacacgcaattttacacttattgtactcacgttttttccataaactattgcgtgactttggtttagtaaattcagacgagccatttgaccgcttactatgtcaaggcatggtattggctgaaacgttctatcgtaaagatgagaaaggtggtgatatttggatttcaccaagcgatgtagaaacagaaactgacgaaaaaggtcgagttactaaagcatggcacaaggaagatggcgaaccagtattttcttcaggcatgagcaaaatgtctaagtctaaaaataacggtatagacccacaacaagtaattgcacaatacggtgctgatacagtgcgtttattcatgatgtttactgcaccaccagaacaaacacttgaatggtcagattctggcgttgaaggcgcacaccgattcttaaaacgtgtatggaaatacgcagtagacgtgaaagcggcaggttaccaagcacttgaaaagtctgcgcttactaacccacaaaaagtacttcgtcgcgaattacacaaagccattgcaaaagtaagtgatgatgttgaacgccgtcaaacgtttaacacggcaattgctgccatcatggagctgtctaataagttaattaaagcgccgctta

SEQ ID NO: 304354 - DNA, 118 bp, Unknown
  Bacterial polypeptide expressing nucleotide sequence isolated from the Sargasso Sea
aatgtcacaatataacgctaaatctatcgaaaaaaaatggcaaaaggcttgggagcaagcgggtgtatttcagtccaaaactgataaaacaaagccaaaatattatgtcctcgaaatg

SEQ ID NO: 304355 - DNA, 843 bp, Unknown
  Bacterial polypeptide expressing nucleotide sequence isolated from the Sargasso Sea
gcagcaatcaaaactggaatacacccaaaaaaatttactgaagaaagaattagtaatatgagggatcaaattcaacgcctaggatctttgtacgattgggataaagaagttgcagctcatgataaaaattattacagatggacacaatatctttttatacaattattcaacaatggactggcttataaagaggatgctcctgtaaattggtgcacatcatgtaatactgttttagcaaatgagcaggttgttgaaggtaattgtgaaagatgtgattcagaagtaatcaagaaaaatttaaaccagtggttttttaagatatctaactattcagatgaattgctagatgggcttgaaaagattggtaattggcctgaaaatgtaaaatcaatgcaggaaaattggattggtaaatcatctggagttcaatttaatttaaaaatagatgaaagtgatttaaattttgatgtttttacaacgagaccagatactttgtttggaatgacttttgcggtcatttcaccagagcatgatttgatgaatgagattttatcgatatcatcaaattcaaaagaaatcaataagtatattgataaggctaaatcaaagtctgaattcgagagaatgtccataacaaaagaaaaaacgggggttgatactgggttaaaagtattaaatcctgtcaacaacaaaagtgtgccattgtgggttgcagattacgttttaattaattatggaaccggagcaattatggctgttccaggccatgatgaaagagattatgagtttgctaaaaagtatgatcttgaaattattcaagtgataattgataaagaccactct

SEQ ID NO: 304356 - DNA, 694 bp, Unknown
  Bacterial polypeptide expressing nucleotide sequence isolated from the Sargasso Sea
cgcgaacaagaaaagatgtcaaaatcaaaatttaatgttgttaatcctgatgaaatatgtaatcaatatggagctgacacattaaggatgtatgaaatgttccttggtcctattgaacaatcaaagccttgggatactcgaggaatttcaggagtacattctttcttaaaaaaattttggaacttgttctttcaggatggtaatatatatttatcagatgaagagccatcaaaagaatcattgaaatcccttcataaaacaataaaaaaggtatctgaggatattgagaagttgagcttaaacacctgtataagctcatttatgatttgcataaatgaactaagttctatgaaatgtaacaatagattaattttggagaatttattgatacttatttctccatttgcacctcattttgctgaagaactatggaatcaaattggtaattctaaatctattgttgatgaaaaatatcctgaatttcaagaaagatatttagtagagtccgaaaaggtttatcctgtctcttttaatggaaagactaagtttacaataaacctttcactagatttaaatcatcaagaaattgaagaagcagttttatctaatgaaaaaactaaatcaatattaaataataatactccaaagaaaattatagtagtccctggtaaaattatcaatatcgtaatatgat

SEQ ID NO: 304357 - DNA, 725 bp, Unknown
  Bacterial polypeptide expressing nucleotide sequence isolated from the Sargasso Sea
tttgcttaatgtgagatataattttctagaaatagaaaagaaatggcaggaattttggaagaataatgagacttataaagttggtttttcttcaaaacccaaattttatgttctagatatgttcccctatccatctggagcaggtcttcatgtcggtcatcctctcggatatatagcaagtgacatatattctagatttaaaagacataaaggatataatgttttacatcctcaaggatatgactcatttggactccctgcagaacaatacgcaattagaactggtcaacatcctagaaagactacgtccgaaaatataaatatgtatagaagacaattagatagaataggtttttcttttgattggtctagagaaatcagaacatctgacccaaagtattataaatggactcaatggatatttattctaatgttcaactcatactattgtccaaaggatgataaagcaaagagtatagaaagcttaatatgtaagtttgaaaaagatggtgataaaagtttgaaagaagatcttttagaacttggttattcttttacaagctctcagtggaaaagatttgatgataaaattaagtcggacatacttatgaactttagattagcgtacttaacagatggtgatgtaaattggtgtgaagaacttgggaccgtacttgcaaatgatgaaattataaatggagtaagtgaaagaggaggttatccag

SEQ ID NO: 304358 - DNA, 869 bp, Unknown
  Bacterial polypeptide expressing nucleotide sequence isolated from the Sargasso Sea
catggataccggcctgaccgtggcgcacccgctggaccccgactggcacctgccggtctggatcgcgaatttcgtgctgatggattacggcaccggcgcgatcttcggctgcccggcgcatgaccagcgcgatctggacttcgcgcggaaatacgaattgccggtgcatgacgtgtttctgcccgccgaagggggcgaaccggtggagaacaccgccttcgtcccgttcaagacggatgccgtccgctatgtccgtcctctgggcgcggccggaaccatgaccggcgaggacgcgatcgtgcaggccatagatttttgcgaggcgaagggcgtgggccacggcgtcacgaaattccgcctgcgcgactgggggttgagccgccagcgatactggggctgcccgatcccggtggtgcattgcgacacctgcggcgtggtgcccgaggcgaaggaaaacctgcctgtcgaactgcccaaggatgtgaccttcgaccgtccgggcaatccgctggactggcacccgacctggcgcgatacggcttgcccgaaatgcggtgccgcggcgaagcgtgagacggacacgatggacaccttcgtcgattcgtcctggtattatgcccgcttcacctctccgaacgccgatacgccgacggatgtggatgccgcaaaatactggatgaacgtggatcagtatatcggcggggtggaacacgcgatcctgcatctgctgtattcgcgcttcttcgcccgcgcgatggaaaagacggggcacctgcctgcctcggccaacgaaccgttcgatgcgctgttcacgcagggcatggtcacgcatgaaacctatgcaaccaagggcaaggacgggcgcaccg

SEQ ID NO: 304359 - DNA, 643 bp, Unknown
  Bacterial polypeptide expressing nucleotide sequence isolated from the Sargasso Sea
atgaacagatacaattttaatacaatagaagctaagtggcaaaaatactgggaagacaacaatacatttcaatgtaaaacagataaaataaaaaaaaaattttattgtttagaaatgtttccttatccgtcaggaaaaattcacatgggccatgtaagaaattacacaattggagatgttctagcgagatacaaacttcttaaaggttttaatgttttacatccgatgggatgggattcatttggaatgccagcggaaaatgcagctagattaaataatttagatcctaaaaaatggaccgaagaaaatatttctgtaatgaaatctcaattgaaaaaattaggactttcaattgattggaatagagaaatttctacttgttcaccagattactataaacatcagcaaaaatttttcttagaactttatgataaagggttagtttatagaaaagaaaattatgtaaattgggatccaattgatcagactgtacttgcaaatgagcaagtaattgatggaaagggatggcgctctggagcaatcgtggaaagaaaaaaacttaatcaatggttttttaacatcacaaagttttctgaagttcttttagaaggtttaaatcaattagataactggcctaaataaa

SEQ ID NO: 304360 - DNA, 580 bp, Unknown
  Bacterial polypeptide expressing nucleotide sequence isolated from the Sargasso Sea
atgtcacgatataatttcactgcagttgaaaaaaaatggcaagaaaaatggaaaaaaaactcaaatttcaaatcaaaattagatagatctaaaaagaaattttattgtctagaaatgtttccttacccatcaggaagaattcatatggggcatgttagaaattacacaattggagatgttcttgctcgatacaaaaaactaaatggatttaatgttttgcatcctatgggttgggactcctttggtatgccagcagaaaatgcagcaaaacaaaataagttagatcctaaaacctggacagaaaaaaatatctctacaatgaaaacacaacttcagcaacttggattttctatagattgggatagagagatttctacttgttcccccaattactataagcaccaacaaactttttttctagaacttttagataaaggtcttgtatatcgtaaagaaaactatgttaattgggatcctgtggatcaaactgttttggccaatgaacaagtaattgatggaaataggatggagatctggagcttctgtcgaaagaaaaaaattaaatcaatggttttttaat

SEQ ID NO: 304361 - DNA, 914 bp, Unknown
  Bacterial polypeptide expressing nucleotide sequence isolated from the Sargasso Sea
tggcagaatacatatgggtcacgttagaaattatactcttggagacgttgtcgccagatacaaaagatctcaaggatacaatgtacttcaccctatgggctgggatgcatttggtttgcccgctgaaaatgctgcgagagataaaaacatacatcctgcaaagtggacctacgataatatatctaatatgcgtgaagaattaaaacgcatgggtctttctattgattggaatagagaactggctacatgtcatcctggttattattcacatcaacaaaatatttttctagatatgctagaacatggattagtttaccgaagcagctctcttgtcaattgggaccctgttgataatactgtacttgcaaatgaacaagtaattgatggaagaggatggagatctggagctcctgttgaaaagcgcgaacttcctcaatggttttttaaaattactgaatttgaagaggaattactatcaagcattggtggcttggaacgatggcctgagagggttagattaatgcaagaaaattggataggtcgttctgaagggttatcaattaatttcagtatagaaaattctgacgaaaaattagaagtttacacaacacgtcacgatacacttttcggcgcaaccttttgcgcaatttctgttgaccatccattagctaagtctatttcattaataaacaacgacgctaaattgtttattgcagattgcaacaaactaggaaccagtgaagtaactattgaaaaagcggaaaaaaaaggttttgatactggacttaaagctatacacccattttccaaaaacaggcttcccatttttatatctaacttcgttctaatgcattatggcacaggtgcaatttttggttgcccagcacatgaccaaagagaccttgagtttgctt

SEQ ID NO: 304362 - DNA, 179 bp, Unknown
  Bacterial polypeptide expressing nucleotide sequence isolated from the Sargasso Sea
tttggaaatgtttccctacccctcgggaaaaatacacatgggacatgttcgaaattatacaataggagatgttcttgcacgttataagtctcttaaaggatttaatgttcttcatccaatgggttgggattcttttggaatgcctgcagaaaatgctgccaaacaaaataatttagatc

SEQ ID NO: 304363 - DNA, 799 bp, Unknown
  Bacterial polypeptide expressing nucleotide sequence isolated from the Sargasso Sea
tgggacgcttttggattaccagctgaaaatgcagccatagagaataaaactcatccatcaacttggacttattcaaatattgaaactatgaaaattcaattaaaacaaatggggttgtcttatgactgggaaagagaattaacaacctgtgatcctagctattataaatttgaacagaaaatgtttttagatttttataaagctggcattgcttataaaaaagagacattagtgaattgggatccaatagagcaaactgttttagcaaatgaacaagtggttgatgggcgaggttggcgttcaggtgctgaagtagaaaagaaaaaaatggagggatggttcctaaaaatttcaaattttgcagacgaattattgaatgaattagataatttaaaagattggccagataaagttaaaataatgcaaaaaaattggattggtaaaagctatggagctcatattaatttttcaataaaaaactcttcagataaattggaagttttcactacgagaccagatacaatttttggtgctacttttattgccatctcacctcaacatcctttagcaaaaaaaattgctgcaaaagatcctaaagcttccgactttattaatttttgtgaacgacaatcttctaaagaaattgatgttgaaaaagcagaaaaacatggatatgaaacaaatgtttttgtttatcatccttttaataaaaaaatcagtttaaagatttttatagctaattttattttaatggattatgggacaggtgcaatttttggttgtccagctcatgatcaaa

SEQ ID NO: 304364 - DNA, 809 bp, Unknown
  Bacterial polypeptide expressing nucleotide sequence isolated from the Sargasso Sea
acttattacgctgatgagctactctcatcattaagtgaagttgattggccagaaaatgtgaaaacaatgcaggaaaactggattggtaaatctcatggagcagaaattaaatatcaaattgaaggctcagaagaatgcctaactgctttctcaacaaggcctgatacaatttttggcgtctcttttgtagctatttctccaaatcatgaaattgcattaagcctttcaaaaaaagataaggaaattgaatctttcttaatcaaatgcaaagaaacatcatctgctgaagcagatatggctaaagcagaaaagttgggaattgatactggaattaaagttatacaccctcttacaaataaacgaataccagtatggattgggaattttgtacttcttgattatggcacaggagttgttatgggtgttcctggacatgatcagagagactttgaatttgcttctaaatatgatcttgatataaaacaagttatttcaattggcaaagatgataaattacctgttctcaataaaggtattttgattaactcggataaatatgatgacttgaactcagattcagcatcaaaaaaaatcattgaagaactaagtgaaaaaaaccttggtgaagggcttatacaatttagattaagagattggggagttagtagacaaagatattggggatgtccaatacctgtaatatatgaaaacggtgatgctaaattggttgaggaaaatgaacttcctgtaattcttccagatttaccaaaaaattctccaccgatccctttaaatcaaaatgaaaattt

SEQ ID NO: 304365 - DNA, 947 bp, Unknown
  Bacterial polypeptide expressing nucleotide sequence isolated from the Sargasso Sea
attggggattaaaaaaattaattatcgtttaagagattggggtatttcaagacagcgatattggggatgtcctattccagttattcattgtgaaaaatgtggtgtagttcctgagaaaaaagagaatttaccaattgaattaccaaaaagtgtaacatttgatttaccaggtaaccctttaaataggcataaagaatggcttattactaaatgtcctaattgtaataagcaagctaaaagagagacagatacaatggatacatttgtagatagttcttggtattttgctagatttacctctccaaaatcagcaaaccctactgatgcaaattctttagattactggatgaatgtagaccaatatattggtggtgttgagcatgctatattacatcttctttattctaggtttttttgtagagcaatgtttgaaactggccatatcccccaaaaatctaaagagccattttcttctttatttacacaaggtatggtatgtcatgaaacctacagagatgaagatgggaaatggctatccccaaatgaagttaaagagattaaaaaggtaaataataaaaggaattttattaacataaaaacaggatcatatattgaattaggtccatccattaaaatgtcaaaatctaaaaaaaatgttgtcgatcccgaagatattatagatcaatttggagcagacaccgcaagatggtttatgatgtctgatagccctccagaaagagatgttgaatggactactgcaggtgttgaagcagcttggcgtcatcttcaaaaagtatggagaatttctcttcaaatttataatgaaggaaaaaaattaaatagtgtggcagaatttatattagatttaacggagaataaagaagaatataatttgttacaagcaactcacaattctattaatgatgttacacattgcctaacaaatt

SEQ ID NO: 304366 - DNA, 868 bp, Unknown
  Bacterial polypeptide expressing nucleotide sequence isolated from the Sargasso Sea
agatattggggatgtcctattccgatagcatatgacgaaaatgaaaaagtttatccaatccctaaatcgatgttaccagttgaattgcctgaaaatatagacttaaatgtaaaaggcaatccgctcgatagtcagaacaattggagggaaataaatataaatgggaaaaaattgtttagagaaactgataccttagatacttttgtttgctcttcttggtattacctgagattttgctcgccaagagaaactgaatatgggtttaaaaaagaagatatagattattggatgcctgtggatcaatatattggtggtgtagaacatgcaattttacatttactttattctagattttttatgcaagctctgtcacatgataatgttaattttaatatattggaaccatttagtggtctttttactcaaggaatggtctgtcatgaaacttataaagaccctgataataattgggtaagtcctgacgaaattgaaaatattggtggtaaaagatatctaaaaaaagataaatctagaataatttctgttgggccgtcagaatcaatgtccaagtcaaaaaaaaacacaattgacccagaaaatattattgctaattatggtgcagactctgcgagactatttatattatctgatagtcctcctgaaaaagatgttcaatggtcagaggaaggtatagtctcatcttttaaattcattcaaaaactttggaaattaaatgaaaaagttgtcgatgaaattaacaaaaaccataatgcagactacgataatgagattttgaagtatactaacaaatatttaaaaagaagttcacggataatcttgaaagttttagttacaataaaattatagc

SEQ ID NO: 304367 - DNA, 886 bp, Unknown
  Bacterial polypeptide expressing nucleotide sequence isolated from the Sargasso Sea
catttatggatgtcccgctcatgatcaaagagaccttgattttgccaataaatacaatctagaaatcatccaagtaattagtccaacgtctaaagaagagtttgatcataaaaacgcaattacagatgatggtactttgataaattcagattttatcaacggtcttaatgttattgatgcaaaaaaagcaattattgataagttggttgaattaaaaattggagaacaaaaaattaattatcgtttaagagattggggaatctctagacaaagatattggggctgccctatacctataatgtacagagaggacggcgaaatcattgaagtaccagaaaatgaacttccaataaagctgcctgaggatatagatttaagtgtaccaggaaaccctctagataatcatccgacatggaaatacacaaaatgtccaaagactgggatgaacgcaattcgtgaaactgatacgcttgatactttcgtagactcagcttggtattttttgagattctgctcaccagactcaaatagcccttttgatgagttggaaagtaaatattggatgcctgtcgatcaatatgttgggggagttgaacatgcaatattacatttactgtacgcaagattttttacaaaagctctaggaaaagaaaatttcagagagccttttgaaagcctatttacgcaagggatggtttgtcatcacacatataaaagtgagtcaggaaattgggtttttccagaggatgtcataagagaaggaaatagtttaaaacagatatcaactggagaaactgtcatagagggaccaatagaatcgatgtcaaagtctaaaaagaatgtcattgaccccgaaactataattcattcatttggtgctgatgct

SEQ ID NO: 304368 - DNA, 448 bp, Unknown
  Bacterial polypeptide expressing nucleotide sequence isolated from the Sargasso Sea
attgcatcttctttattcaagattctttcataaggcaatgagagatatgggtcttgttgaaggcgatgagccttttaaaaaacttcttacacaaggtatggttctgaaagatggttacaaaatgtcaaagtctaaaggtaataccgtagacccacaaaagtttattgatcaatatggagctgacacaattagactttatatgatgtttacctctccgccagaacaatcgctagaatggtctgataaagcaattgagggctcgtacagattcttaaagcgcgtttggagtcttttatcagaaagaaaacaatttactgaaaagctaccaaataaatttacaaaatatgagcttcagctccgtcaaaaaagtcataaaactctccagaaagttactcatgattatgcggaacaaaattcatttaatacagcaatagcttcgataatggag

SEQ ID NO: 304369 - DNA, 943 bp, Unknown
  Bacterial polypeptide expressing nucleotide sequence isolated from the Sargasso Sea
tttctggtttccggttacactgataagctccgagtgtacactactcgcccggatactatttttggagcaacgtacatggtgttgtccccagaacatcatttggtggaaaaaatcacaaccgatgaccaaatagcagcagttaaggaataccaagaagaagcttcaaagaaatcagatcttgatcgtcaagaactgaataaggaaaagtcgggagtttttacaggggctcatgccatcaacccagtaaatggaaaagaaatccccatttggattgccgattatgtattggtgagttacggaacgggagccatcatggcggtacccggacaggatgaacgagattgggaatttgctgagaaatttgatttaccgatcatcagaacagtggaaccaactgtgggttttgaaggaaaagcgttcactggtcaaggcccggctattaatagtgagtttttgaatggattacctattcagaaagcgaaggataaaatcatcgattggttagaagaaaaaggtgctggtaataaagccgttaactttaagcttcgagattggttgttttctcgtcaacgttattggggagagccttttccgattatccacacagatggaaagccaaaagctattggttatgatgaacttccattggaacttccggaagtggaaaaatatcaaccaacaggagatggggaaccacctcttgcaaatgctacagaatggttgaaaacggtggatgctgaaacaggaaatcttgcaatcagagaaacgaatacgatgccacaatgggcgggatcttgctggtactatttacgctatatttcacctgattgggatggtggacccgttgatcccgaatacgaaaaatattggatgcctgtagatttatatgttggtggagcagaacatgctgttcttcatttgttgtatgcgcgatttggcataa

SEQ ID NO: 304370 - DNA, 736 bp, Unknown
  Bacterial polypeptide expressing nucleotide sequence isolated from the Sargasso Sea
aaatggcaatcttattgggatagagaaaaaaaatttaaagcagaggtttcttctaaaaagccaaagttttattgtctagaaatgtttccttacccgtcgggtaaaatccacatgggccatgttcgaaattacacaattggagatgttttagcacgatttaaattgttacaaggttttaatgttttgcatccaatgggctgggattctttcggtatgccagctgaaaatgctgcaaaacaaaataatctgaatccaaaaaaatggactgaagaaaatattaaagtaatgaaatcgcagcttaaaaaacttgggctttctattgattgggatagagagatttcaacttgttcagaagaatattataaacatcaacaaaaactttttttagaattgtacgataaagggttagtttatagaaaagagagctatgtcaattgggatcccatcgataaaactgttttagcaaatgaacaagttattgatggtaaaggttggagatcaggagcaatagtagaaagaaaaaagttaaatcaatggttttttaaaatatcaaatttctcagaagaattacttgcagatcttgacgatcttaatgaatggccagaaaaagttaaaacaatgcaaaaaaattggattggaaaatcttttggctgtgaaattgattttgaaattgaaggttcaaacaaagtaaaaaatataaagtgctacacaacacgtcctgatactctttttggtt

SEQ ID NO: 304371 - DNA, 775 bp, Unknown
  Bacterial polypeptide expressing nucleotide sequence isolated from the Sargasso Sea
tttaatttagatgagccttttaaaggattgtttacacaaggaatggtgactcatgttacatacaaaaacaaaaatggtgattggatagagccaaaggatgttgaaatagtaaatgggggctttaaagataataagggccaagaagttacaactgggaaaattgaaaaaatgagtaaatcaaaaaaaaatgtagtagatccaaatgatattattagttcttatggagcagatacagctaggtggtttatgttatctgatagtccaccagaaagagacttgcaatggaccgatactggtatagtagcgtcatttaagtttataaacaaattatatgatttggttgagaaatataaacattatcagtcagaaaataataaagacagcagagatataaataaattaaaaaatattattaatgaagtagcagaaaatatagaagcattccagtttaataaatcagttgcaaaaatttatgaatttgtaaatattcttagtaatgcgttattaaaaaataaattatcactaaaaaactttaagtggtctctagaaaaactatcaattatattacaaccatttgtgcctcatattagtgaggaaatatggtcaaaccttggaaataaatcattgtgtattaatcaatcctggcgcctagaaagtgtagtaaaaaaatcagaaataaaaattgccgtacaaataaacggcaagacaaaagaaataattgaaattgaagataaaatttcaaaagaaaaagttttagaaaccgttaagcttagtg

SEQ ID NO: 304372 - DNA, 898 bp, Unknown
  Bacterial polypeptide expressing nucleotide sequence isolated from the Sargasso Sea
gggatgttttatcaagattaaatctatgcagggttttaatgttttacatccaatgggttgggactcttttggtatgcctgctgaaaatgccgcaaaagaaaataatcttcacccaaaaagttggactgaaaaaaatatatctgtgatgaaaaatcagttaaaaaaaattggtctttcaatagattgggatagagaaatatcaacatgttctgaagaatattataaacatcaacaactcttctttatagaattattcaaaaagggcctggtatatagaaaagaaaattatgtaaactgggacccagtagatgaaactgttttagcaaatgaacaagtaattgatggtaagggctggagatctggcgcagttgttgagagaaaaaaattaagccagtggttttttaatatatcaaaattttctgatgatcttttaaatggtcttgatgaacttaaaaactggccaaataaagttaaaactatgcaaaaaaactggataggaaaatcttttgggtgtgaaatagattttaaaattgaaggagaattacccataaaagaaattaagtgttttacaactcgacctgatacactttttggcttttcttttctggcagtttctgtggaccacccaatttcaaaatatttcgaaaaagatccaaaatttggtgaatttaaaaaagaatgttctaaaactggtactactgaagaatcgattgctcaaggagaaaaagttggttttaaaactaaactgttggcaattaatcctcttgatcccagccaaaaagttcctgtttattttgctaactttgttttaatggattatggatttggcgctgtttttggatgtcctgctcatgaccaaagagatttggactttgctacaaaatatatcttccatcaa

SEQ ID NO: 304373 - DNA, 841 bp, Unknown
  Bacterial polypeptide expressing nucleotide sequence isolated from the Sargasso Sea
tgagcaagtaatagatggaaaaggatggagatctggagccacagtagaaagaaaaaaacttaatcaatggttttttaatatatcaaaattttctgaagaattactaaaaggtcttgaaaatttaaaagattggccgaataaagtaaaaataatgcaaagaaattggataggtaagtcttttgggtgcgagattgactttaagttacaaaaaaatgaacaaattaattcaattaagtgctttacaacacgaccagacactctatttggaatgtcttttttagcagtatcaattgaccacccattatcaaaattttacgaaaagaaaagtgaatttataaaatttaaagacgagtgtgcaaaaactggaacaactgaagaggcaatagcacaagctgaaaaaattggttttaaaactaatttacgagcaatcaatcctttgaataattctaaaacagtaccagtttattttgcaaactttgttttaatggactatggttttggtgcagtttttggttgcccggctcatgaccaaagagatttggattttgccaataaatatggtttggaagttttgccagtagtcaaacctatgaatgatgataaattttcaataaccaatgaagcttacactggtccaggaaaaataattaattccgattttttaaataaccttaaagttccagaggaatcaataataaaagctatagaatatttagaagaaaataaaattggaaagaaaaaaattaactttcgactaaaagactggggagtatctagacaaagatattggggatgtcctataccaattgtctatgatgaaaataataatataaaaaaagta

SEQ ID NO: 304374 - DNA, 817 bp, Unknown
  Bacterial polypeptide expressing nucleotide sequence isolated from the Sargasso Sea
atggattatggatttggtgcagtttttggatgccccgcacatgaccaaagagatttagatttcgcattaaagtataatttaccagtaaagactgtagtaaaacctttagacaaagataaaaattataaggtaaaaaaagaagcatatactggtcctggagaaataattaattcaaattttctaaacggacttagagttcctgatcaatcaataattaaaacaattgaaatacttgaagaaaagaaactaggaaaaaagaaaattaattttagattaaaagattggggtgtttctagacaaagatattggggatgtccaataccaatagcttacaatgaaaatgggaatgttgttaagattccgattgatgaactaccagttaaacttcctgaaaatattaatttgaaagaaaaaggaaaccctcttgataaagtagagtcttggaaaaatattaagataaatggaataaattgccatagagaaactgatactttagatacatttgtagattcatcatggtattttttaagattttgctctccaaaaaataaagattatggttacgatctagaagaaataaattactggatgcctgttgatcagtatattggcggtgtagaacatgccatattacatttgttgtattcaaggttttttatgagagctataaactttaaaaataacaactttaaaataactgaaccattcgagggtttatttacacaaggaatggtttgtcatgagacatataaagatgaaaataaaaattggcttagccctgaggaagtagaaagtaaagatggaaaaaatttttaaa

SEQ ID NO: 304375 - DNA, 847 bp, Unknown
  Bacterial polypeptide expressing nucleotide sequence isolated from the Sargasso Sea
tttacaaaaaggagtctcttgtaattgggatcctgttgaaaatacagtactagcaaatgaacaagtaattgacggtaaaggttggcgatcaggtgcagacgtagagcaaaaaaaattgtcgcaatggttttttaaaattacgtcccacgcaaatagtctcttagagagtttagaaaatatgcctggctggccagaaaaagtaaaaacaatgcaaaaaaattggattggacggtctgtaggctgcgaaattcattttgagatagagtctggctataaagaatataagcctgaaaaactagaaattttcactaccagacctgatacaatttttggtgcgactttcattgctgtttcaccttttcatccaattgtggacgatatacttaaaagtgatccagatgttgttgaggaaatcaatggtcttagatctcaaaaattaaacgaagaaactatctccaaaaatgaaaagattggaatttcaacagcactgaaaataaaacatccttttatagaaggaaaaaaactacctttgtttattgcaaactttattttgatggattatggaacaggagctatttacggttgcccagcccatgatcaaagagattttgattttgcaaaaaaatataatcttgagataattaaagttatcaaacctgatgatacggttgccccgtctgataatgaagcctacactggtgaaggttctttaatcaactcgtcctttttaaacggacttaatattactgaagctaaagataagataattagtgaattagaaaaaatcaaaataggaaaaaaaacaattaattaccgattgagagattggggcatttcaagacaacgt

SEQ ID NO: 304376 - DNA, 883 bp, Unknown
  Bacterial polypeptide expressing nucleotide sequence isolated from the Sargasso Sea
atagattattggatgcctgttgaccagtatattggaggtgtagagcacgctatattacatctattatactcaagattttttatgagagctataaattataaaaatgagaattttaaaattactgaaccatttcaaagcttatttacacaaggtatggtttgtcatgaaacatataaagataaacaaaataattggttaagccctgatcaagttgaaagaataggtgacaaatattttttaaaagggaataaaaatgaaattgtcaaagttggaccatcggagtctatgtctaaatcaaaaaaaaatgtaattgatcctgagcatataattgaaaattatggtgccgactcagttagattatttattttatcggatagcccacctgaaaaagatgttcaatggtcagagcaaggtatggtatcttcgtataaatttattcaaaaattatgggttttacataaaataattaaatcaaaattattagatgaaaacaaagataaatttgatgaaaatattgaaaaatttactaaccaaacaatttcaaaaatcacgagcaatttagaaaagtttaattacaatgtgattatagcaaatatgtatgaaacatataattatttaattaattatttaaaagataataaaaacatgagtaatttagaaaataattataaaaaaattttaatatgcttttctccagtcatcccccacttttcaagtgaatgtcttgatgaaattggtgttacaaactacaaatggcctgaatacgatgaaaagtttattcaagatgacaatattaatattgtgatccaaataaatgggaaaaaaaggactttgttagaaacggagaaaggaatgaaaaatcaaaactttggaaatcgttaaa

SEQ ID NO: 304377 - DNA, 325 bp, Unknown
  Bacterial polypeptide expressing nucleotide sequence isolated from the Sargasso Sea
atgaattttgtggacagatataattttaagatagtagaggagaaatggcaaaattattggcataaaaataaaagctttaaaactgatttagacaccaataaaaaaaaattttattgtcttgaaatgtttccttatccctctggtaaaatacacatgggacatgtaagaaactatacaattggcgatgttctagcaagatacaaaacacttcaaaatttcaatgttttacacccaatgggatgggattcttttggtatgccagcagaaaatgcagcaaaagaaaataatttggatcctaaagattggacagaaaagaatatatcgg

SEQ ID NO: 304378 - DNA, 799 bp, Unknown
  Bacterial polypeptide expressing nucleotide sequence isolated from the Sargasso Sea
aagcgaactgccaattactctcccggaagatgttgatcttaattcatcaggaaatccattagagaatcatcccagatggaagaaaacaattcataaaaaaactggaaaacctgctattagagaaacagatactttggatacatttgtagactcctcttggtactttttaagattttgctcaccaaaaaatgaaaaatatccatttgaaagcaaagaaacaaattattggatgcctgttgatcaatatattggaggaatagagcatgctattcttcatttgctttattctcgattttttatgaaagcagttaaacaaactaataacaaaatcaaatgctctgagccctttaaaaatttatttactcaaggaatggtgtgccatgaaacctataaagatcttgagggaaattggttagatcctcttgaaatagaaaaaacatcagaaaaaaaagccataaagaaatctgataaaactaaagttacagttggtccttcagagtctatgtccaaatctaaaaaaaacacagtagaccctgagactatgattaaacaatatggcgctgactcagtaagatggttcatgctctctgatagtcctccagaaaaagatgttcaatggtctgatgcaggagtggtttcatcaagtaaatttctacaaaaaatctggaatttaaatcaatcagttttagatagaaataaaacaaaaatcaaagaagatgaaaaaatacaaaaatcttttgaaaacaaaatagaccttagtgtttacaaaattgatagtgctattaataattttcaattt

SEQ ID NO: 304379 - DNA, 786 bp, Unknown
  Bacterial polypeptide expressing nucleotide sequence isolated from the Sargasso Sea
gaagggcatcgcgtacaagaagacgggcaccgtgaactgggacccggtcgaccagaccgtgctcgcgaacgagcaggtgatcgacggccgcggctggcgttcgggcgcgctcgtcgagaagcgcgagatcccgatgtactacctgcgtatcacgcagtacgcggatgagctgctgaacgacctcgacggcctcggctggcccgagcgcgtgaagatcatgcagcagaactggatcggcaagagcttcggcgtgaacttcggcttcccgtatgaactcgacggcgagaagaagctgctgcgcgtgttcacgacgcgtgccgacacgatcatgggcgtcacgttctgcgcgatcgcggccgagcatccgctcgccacgcgccttgcccaggacaagcccgagctgctcgcgttcatcgacgaatgcaagcgcggcggcgtcgccgaggccgacgtcgcgacgatggagaagaagggcgtcgcgacgggcttctcggtcacgcacccgctcaccggcgagccggtcgaggtgtggatcggcaactacgtgctgatgagctatggcgaaggcgcggtgatgggcgtgccgggccacgacgagcgcgatttcgcgttcgcgaagaaatacggcctgccgatcaagcaggtgatctcggccgaaggccagcagtactcgctcgacgcatggcaggagtggtacggcgacaaggaaacggccgtctgcgtgaacagcggcaagtacgacggcctgcgctatacggatgcggtcgacgcggtcgcggccgaact

SEQ ID NO: 304380 - DNA, 931 bp, Unknown
  Bacterial polypeptide expressing nucleotide sequence isolated from the Sargasso Sea
caacttccagtaaaattacctgaaaaaatcaatttaaaatcaaagggaaatccgctggaccaagaaaaagaatggagaaaaataaatataaacggaatagattgtttaaaagagaccgatacactcgacacatttgtcgattcatcttggtatttcttaagattttgttcgccaaataatgaacattatggatttgattatgatgctgtaaagtactggatgccagtagatcaatacattggaggtgtggaacatgcaatattacatctactttattcaagattttttatgagagctataacttataaaaataataatttttcactttcagagccttttgaaagtttatttactcagggaatggtttgccatgaaacttacaaagataaaaataacaattggttgagtccagatcaaatagatacgaaagatggaaaaaagttttatgtaaaaaatcagccagataacatagttttagtaggaccgcctgagtcaatgtctaaatctaaaaaaaatacaattgatcctgctaaaatgatagaaaattatggcgccgatgcagttagactttttatactgtcagatagtccgcctgaaaaagacgttcaatggtctgaacaaggcatgttagcctcctttaaatttatccaaaaattttggttaatgaataatcgaataaaaaaaataattgaaaaatgctcaaatgaagaaaatcaagaaggagactttgaattaacaaaatttacaaatctactgataaataaaattaacatcaatcttgaaagatttaattataacgtgattattgcaaacatgcatgaaacttataattttttaaataaaattttagataaaaagtttaataaaaaagttttatgcgaaaattataaaaatatcttaacgataatgtctccctgtcataccacaatat

SEQ ID NO: 304381 - DNA, 793 bp, Unknown
  Bacterial polypeptide expressing nucleotide sequence isolated from the Sargasso Sea
aagaatggtgattggttagaaccaaaggatgttgaaatggtaaatggaaactttaaagataataatggtcaagaagttataactggaaaaattgaaaaaatgagtaaatcaaaaaaaaatgttgttgatccaaatgatattattaattcatacggagcagatacggctagatggtttatgttatctgatagtcccccagaaagagatttacaatggactgataccggtatagctgcatcttttaggtttattaataaattgtatgacttggttgagaaatataaacatcatcaatcaaatgatgatgaaaactcaaaagatataaatgaattaaaaattattattaatgaggtagctgaaaatatagaagcgtttcaatttaataaatcggttgcaaaaatttatgagtttgtaaatattcttaatgatgcattattgaaaaataaattatctcaaaacaactttaagtggtctctagaaaaattatcaattattttacaaccatttgtacctcatataagtgaggaaatatggtcaagtcttggaaatcaaacattatgtattaacgaaacctggccattagaagatgtgataaaaaaatcagaaataaaaattgcagtacaaataaatggtaaaacaaaagaaataattgaggttgatgatcagttttctaaagaaaaagttttagaaaccgttaagcttaacgataaaattaaaaaaaatttattaggtaaaaatattatgcgagaaatctatgttcctgggaaaattgtaaatttggttgtcaaatgaa

SEQ ID NO: 304382 - DNA, 856 bp, Unknown
  Bacterial polypeptide expressing nucleotide sequence isolated from the Sargasso Sea
tggcctaataaagttaaaactatgcaaaaaaattggattggaaaatcttttggttgcgaaatagattttaaagtagagggagatttaccagttaaaaatataaaatgtttcactacaagaccagatacgttatttggattttcttttttggctctctcgatagatcatgaaatttcaaaattttatagagaaaacgagaaatttcttaaatttaaagaagagtgttcaaaaacaggcacgaccgaagaggcaattgccgtgggagaaaaaattggttttaaaactaatttatttgcaattaatccattaaatcctaaacaaaaagtaccggtatattttgcaaattttgttttaatggattatggatttggtgctgtttttggatgtccagctcatgaccaaagagattttgattttgccaaaaaatataatcttaacattaaaacggtggttagaccaaaggatgaagatgatgactatcaagtaactgatgaagcttatccaggagaaggtgtgatgattaattcagaatttctaaatggtctagatgcaccaaataaatcagttatagaaaccataaaaatacttgaagataaaaaacttggattaaaaaaaattaattttcgattgaaagattggggagtgtctagacagaggtactggggttgcccaataccggtagcgtatgatgaaaatggtgaagtttatgaaatcccagattcaatgctaccagtaaaattacctcagaaaattaatttaaatgttaaaggtaatccacttgatcatattagtgagtggaaagaaattgaaattgatggaaagaaattagtaagggaaacagatacactagatactt

SEQ ID NO: 304383 - DNA, 774 bp, Unknown
  Bacterial polypeptide expressing nucleotide sequence isolated from the Sargasso Sea
tatgggatgggactcttttggccttcctgctgaaaatgcagctaaagaaaaatctattcaccctgaaacttggacaaaagaaaatattaattctatgagaactcaacttaaaggaatgggtttatcatatgattggaatagagaaatatcaacttgcgataaagaatattataaatttgaacaaaaaatgtttattgattttttgaaattggggttggcatatagaaaagaaagctgggttaattgggatccaattgaaaaaactgttctggcaaatgaacaggttattgatggttgtggatggcgttctggggcaaaagttgagaaaaggctgttaagccagtggtttttaaaaatgactgcttttgctaatgatcttttagaaactttagatgagttaaaaaattggcctgataaagttagattgatgcagagcaattggattggaaaatcaattggagcaaacattgattttaaaattgtaaataatgaaaaaaagataaaagtttttaccacacgccctgatacgttatttggagcatcatttatagctttatctccttcacatccattatcactaaacctatccaaaacaaatccttctataaaagactttataagtttttgcaatcaacaaacaacctcagaagcctcaattgaaaaagctgaaaaattgggttttaaaacccatttgcacgtaagtcatccatttgacaaaaagaaaactttaccagtatatattgctaattttgttttaatggaatatggtacagg

SEQ ID NO: 304384 - DNA, 838 bp, Unknown
  Bacterial polypeptide expressing nucleotide sequence isolated from the Sargasso Sea
cctgtttttttgctactttgttttaatggattacggctctggtgctatttttggatgtcctgcacacgatcaaagagatttggattttgcaataaaatacaaccttgatgttttgccggttatactacccacaaaccaaaaagagtcttcttttagaattacagatgaggcttatgttggtgagggcaaattaattaattctagttttttgaatggaaaaaaaatagaggatgctaaaaaaatgattattgatgaactagaaaaatctaggactggaagaaaaaaaataaattataaattacgtgattggggaatatcaagacaaaggtattggggctgtcccataccagttatgtatagggaagatggagaaataatccctgttccaaaaaatgaacttcctgtaacgctccctgaattaaaaagttttgatggtaaattaggatctttaaaaaatcataatgattggagagaaacattttgccccaaaacaggtttaaaggcacttagagaaacagatacttttgatactttttttgagtcctcttggtattttttacgttattgtaacccaagactaaaagatccttttattaaaaatgacataaagtattggttaccagttgatcaatatattggaggtattgagcatgctatacttcatcttttatattcgagattttttacaaaagcgcttagagacatgggtcatattgaaatagacgagccatttaaaggtctttttacccaaggaatggttactcataaaacttttagaaatattaaaaatgagtggataagcccagatgaggttgctcaaaatagtaagggttttgta

SEQ ID NO: 304385 - DNA, 723 bp, Unknown
  Bacterial polypeptide expressing nucleotide sequence isolated from the Sargasso Sea
gggtcatcctcacagcgtcactgagagaaatatcgagatgattagagccgatcaggaaagaatgggatattcatacgactggaggcgaatgtttgcaacttccacaccggaatattatcgctggaatcaagaattattccttcgattcaacgaagccggtttggtagaaaggagattcgcaccagtcaattggtgcgatgattgcgatacagtacttgcaaatgagcaagtcaagaataatcgttgttggcgttgtggtcttgaggtagttcagaaggatatggcgcagtggttcttgcgtatgacagaatatgctgacgaattattggacgaattagaccacattgaatttccagagaacgtcaaagcgatgcagcgaaactggattggccgttcacatggtgcccacatagaattccctgtggtcggtgaggtagaaggcgcatccgctagcattggtgcatttacaacccgtccagatacaatttttggagtcactttcgttactctatctcccgaacatcccctatgtgagccactagtaagcagaaccgaatacgaacaggcttggagagatttagcagaggagtgcgctcgaatgaccgaatttgagcgaatcaatatgctgaaagaaaagaaaggagttcctcttggtagatttgctactaatccaatcaccggagaagaagtgccgatttttgctggtaattttgttgttgcaag

SEQ ID NO: 304386 - DNA, 811 bp, Unknown
  Bacterial polypeptide expressing nucleotide sequence isolated from the Sargasso Sea
aattttagaaaagaatgttctagaacaggaactacagaggaggcgatagcaataggagaaaaaattggatttaaaactgatttaattgcagtaaatcctctcaatgctgaccataaagttccagtgtattttgcaaattttgtattaatggattatggatttggtgcagtttttggttgtccaggtcatgatcaaagagattttgattttgccaaaaaatataaacttgaaattttaacagttgtaagacctaaagatcaaaatgaaaatttcagagttaaggacgaggcttatcctggtccaggagtaataattaattcagattttcttaacggactagaagctccagaaaattcagtattagaaactatcaaaattcttgaaagtaaaaagttagggaaaaaaaaaattaattttagacttaaagactggggcatatcaagacaaagatactggggctgccctatacctatagcttatgatgagtcaggaaatattcatacaataccaaacacaatgttacccgtaaaacttccacaaaatattaacctaaatgtcaaaggtaatcctttggatagccaggcagattggaaaaaaattaatttaaatggaaaaaatttaattcgtgagactgatacattagatacctttgtttgttcatcttggtattttttaagattttgttcacctaaagagacagaatatggtttcaggaaagaagaaattgattattggatgccagttgatcaatacatcggtggagttgaacatgcaatattacatttgctgtattcaagattcttcatgcaag

SEQ ID NO: 304387 - DNA, 379 bp, Unknown
  Bacterial polypeptide expressing nucleotide sequence isolated from the Sargasso Sea
atggatcgctacaattttaaagagtcggagccaaagtggcaggaacgttggcagaaagccggatgttttaacgcagaggctgatccggaacaaaaaaaatattatgttttagagatgtttccatacccctcaggaagaattcatatggggcatgtgaggtgttatacgatcggcgacgtcgtcgcccggtataagcgggcacaaggttttaacgtactgcatccaatgggttgggacgcttttggcctgcctgccgagaacgccgcgtttgataataacgttcatccggctgtttggacccgcgagaatatcgcggcaatgcgagatcaattaaaattaatgggtttgtcttacgattggcgccgtgaattggcgacct

SEQ ID NO: 304388 - DNA, 747 bp, Unknown
  Bacterial polypeptide expressing nucleotide sequence isolated from the Sargasso Sea
tttagatgaacttgaagattggccaaataaagtaaaaacaatgcaaaaaaattggatcggtaagtcatttggatgtgaaatttcttttcaaactgaaggtgaacttcctgtaaaagaaattaaatgttttacaacaagacctgatactttatttggattttctttcttagctctctcagtagatcatgaaatttcaaaatatttttctaaggatgaagaatttttaaaattcaaagacgcatgttctaaaacaggtactacagaagaagcaattgctataggtgaaaaaataggttttaagactaaactattagctataaatcctttgaatccaaaccagaaagtcccagttttttttgctaattttgttttaatggattatggttttggggctgtgtttggatgtcctgcgcatgatcaaagagattttgattttgccaaaaagtataatcttgaaattaaaactgtagtaaaacctgacaatgaagatgataattttgaggttaaagatgaagcttattcaggaccaggggtattaataaactcagaatttttaaatggtcttaaagttccaaacgattcaattttaaacacaatagatattttagagaaaagaaaaataggtaaaaaaaaagtaaatttcagattaaaagattggggtgtctctaggcaaagatattggggttgtcccataccaatggcatataatgaaaatggacaagtagtaccaataccaaaaaatcaact

SEQ ID NO: 304389 - DNA, 766 bp, Unknown
  Bacterial polypeptide expressing nucleotide sequence isolated from the Sargasso Sea
aatgaagtataatccatctttaattgaaaaaaaatggcaagaaaaatggtctaagttaaacgtttttaaagctagcattgataagactaaacctaagtattatgttctcgaaatgttcccttatccttctggtgctattcacatgggtcatgtaagaaattacactttaggtgacctagtagcgagatataaaaaggcccaaggttttaatgtgttgcatccaatgggatgggatgcattcggtctgcctgcagaaaatgctgccattgagaataaaacacatcctgctaattggacttatgcaaatattgaaagcatgaagacacagttgatacgaatgggattgtcttacgactgggatagagaattagcaacatgcaatcctgattattacaagtttgaacaaaaaatgtttctagattttttcaatgcaggcatcgcttacaagaaagaaactctcgtcaattgggatccaattgaacagactgtacttgcaaatgaacaagtaattgatggtcgtggttggcgttctggagcgaaagttgaaaagaaaaaaatgaaaggctggtttctaaaaatttctgattttgcagatgaattgcttgatgaaattgataatttaagcaattggcctgaaaaagtaaaaataatgcaaaaaaattggattggcagaagcaatggagctataattaaattttcaatagaaaactctcctaataatttgaaaatttttacaactagacctgatacgattttggagccactt

SEQ ID NO: 304390 - DNA, 333 bp, Unknown
  Bacterial polypeptide expressing nucleotide sequence isolated from the Sargasso Sea
aatggaaagatacaatattaaaaatgttgaaaaaaaatggcaagagttttggtccaaaaaaaaatcatacgctgctaacttagataagagtaaaaaaaaattttattgtcttgaaatgttcccctatccttctgggaaaatccatatgggtcatgtacgtaattatactattggtgatgtgttggctcgttataaaaaaatgcgtggatttaatgtcttgcatccaatgggatgggattcttttggtttaccagcagagaatgccgctcgtgaaaacaatctgcatcctaaagattggacaaaaaaaaatattgaaacgatgaaaaaacaatt

SEQ ID NO: 304391 - DNA, 826 bp, Unknown
  Bacterial polypeptide expressing nucleotide sequence isolated from the Sargasso Sea
ggcatcgaacacgcgatcctgcatctgctctattcccgttttttcacccgcgccatgtcgcgtacggatcacaccgcgctggacgagccattcgccggattgtttacgcagggcatggtgtgccacgaaacctatcagaccggatcgggcgactgggtcgagccgaccagcgttgtcgaacaggccggcggcgcccgggtgcatgcggatacgggagaggcgattacggtcggccgctccgaaaaaatgtcaaaatccaagaaaaacgttgttgatccggaagacataatcaattcctacggcgcggatacggcgcgctggttcatgctgtcggacagcccgcccgcccgagacttggattggactgaggctggtatttctggtgcctggcgctttaacaaccggctatggcggctggtggcggcccatgcgggcgacttgccgccgccgggcgggggcattcccgccggccgcgcccccgagacacggcgcgtcatccatgccaccgtcgccggcgtgaccgaagatctggaagccttccacttcaaccgcgcggtcgcccgtatctacgagctggtgaacgcgctgtccggcgacgaggctatcgaacacaaggccgtcctgcgcgaagggctggaaaccatgaccctgctgatcggcccgatgatgccccatctggcggaagagctttggcaggcgctggggcatggcaccctagtggcggacagcgcctggccggaagcggacgaatccctgctggtgcaagagacagtcgaaatcgcggtgcaggtccgcggcaaaatgcggggcaccgtggcaatccgcg

SEQ ID NO: 304392 - DNA, 866 bp, Unknown
  Bacterial polypeptide expressing nucleotide sequence isolated from the Sargasso Sea
catggaacgctacaatattaaaaacattgaaaaaaaatggcaagatatttggtccaataataaaacttactctgctttattagataaaaataaacaaaaattttattgcttagaaatgttcccttacccatctggaaaaatacacatgggtcatgtgagaaactatacaattggtgatgttttagccagatacaaaaaattacagggatataatgttttgcatccaatgggttgggattcttttggtttaccagcagaaaacgcagctagagaaaataaattacatcccaaagtatggacaaaaaaaaatattgaaacgatgaaaaaacaattaaaacttctaggtctttctcttgattgggatcgtgaaatttcaacgtgtgaccctgaatactataaacatcaacaagaattttttttggaattatatgaaaagggcctagtttacaaaaaagatacttatgtaaattgggatcctgcagaacaaacagttttagcaaatgaacaagtaattgatggcaaaggttggcgttcaggtgttactgttgaaagaaaaaaactttcccaatggttttttaatattaataaattttcacaagatttgctggacgaactagtaaaattaaaaaattggcctgaaaaagtaaaattaatgcaaaaaaattggattggtaaatcttttggatgtgaaattaattttcaaattgataaaaaaaaagaaactgaaaaaataaaagtttttacaacaagacctgatactatattcggtgcatcatttattgcactgtctattgatcatccaatttccaaaaatttcgaaaatgataaaaattttaaaacttttaaaatagagtgttctaaaactg

SEQ ID NO: 304393 - DNA, 838 bp, Unknown
  Bacterial polypeptide expressing nucleotide sequence isolated from the Sargasso Sea
tagtaaatattcagaagaattattaaatgatctagataagcttactaactggccaaataaagtaaagataatgcaatcaaattggataggtaaatcaataggtgctgaaattgattttaaatctccagaatttgattctacaattaccattttcacaactaggcctgacacaatatttggagcaacttttatagctctttcaagcgagcatgaattagcaataagaatttcaaaaagtaataaagccttacaaaattttattaaagaatgtgaaagtttaaatcctgataaaaataaaaggggttatgacactggattatttgtagaacatccatttataaaagggaaaaaacttccaatatatatagctaattttgttttaaaagaatatgggcttggagcaatatttgggtgcccagctcatgatcaaagagatttagattttgctcgtcaatatggtattgatgttattccggttgtaaagcccagtgatattaaagaaaataattttaaaataggaagtgatgccttcacagatgatggcattattataaattcaagttttttaaacggattgagtgtcgtagaagcaaaatcaaaaataattactgaaattgaaaaaaaaagtattggaagaaaaaaaattaattacaagttgagagactggggagtttcaagacaaagattttggggttgtcctatacctgtcatttatagagaagatggcgaagttttagcagttaaagaagaagagcttccagtaaggcttccggatattaaaaattttggtgagacgtccactaccttaaatgatattccggattggaaagagactgtt

SEQ ID NO: 304394 - DNA, 766 bp, Unknown
  Bacterial polypeptide expressing nucleotide sequence isolated from the Sargasso Sea
aatgaaggcgatatccaaagcaattgaggaagttgaaaaaagaaagtcaggtaaaaaaaggataaattttaggcttaaagattggggtatatctagacaaagatattggggctgtccaataccaatagcttatgatgaacaggaaaattttattacagttccaaaagacaaacttccaattaaattgccagaaaatatcaatcttaaaactaaaggaaatcctttagagcaccatgatgagtggcgaaatataaaaatcaatggaaaaaattataaacttgaaactgatacacttgatacatttgtagactcatcttggtatttccttcggttttgctctccaaaaaacgagtcatatggatacgattttgatgaaattagatattggatgcctgtagatcaatatattggtggggtcgaacatgcaatattgcatttattatattcaagattttttatgttagctcttggatatgaaagtaaaaaattcatatctaacgaaccatttgaaggattatttactcaaggaatggtttgtcacgaaacttataaagataaaaaaaataattggttaagtccaaccgaagtattttcaaatgacggtaaaaattattttaaaattaaaaacagagatgaaaaagtaatcgttggagcttcagagtcgatgtccaaatctaaaaaaaatgttattgaccctgaaaaaattattgaaagctatggagcggatgcagtaagactttttattctatcagatatcctccagaaa

SEQ ID NO: 304395 - DNA, 902 bp, Unknown
  Bacterial polypeptide expressing nucleotide sequence isolated from the Sargasso Sea
agaaactacgcaattggtggatgtgctggctagatacaaaatgataaacggatttaatgttctacatccaatgggatgggacgctttcggtcttccagctgagaatgctgcgaaagagaataatttaaatccaaaggattggacaaaaaaaaatatatctacaatgaagcatcaacttcaattattaggtctttctatagactgggatttagaaatatccacttgtgatgaggattattacaagcatcaacaagagttgtttattgatttttataataagggcttagtggtaagaaaagaaacatatgtgaactgggatccagtagaaaaaactgttttagcaaatgaacaagttattgatggtaaaggttggcgttcaaatgcagtagttgaaagaaaaaaattgtttcaatggttttttaatatttctaaattttcagatgaattacttgaggatttgagttccttaaaagaatggccagaaagagtaaaactaatgcaaaaaaattggataggtaaatctgtggggtgtgaaatagattttaaaataaataaaaatgataaatcagttaaagtttttaccactcgtcctgatacaatatttggcgcaacctttttagctatatcagttgaccatcctttgtgtaaagattacctaaaaaattcggacttcttggatttcaaaaaaaagtgctctcaggtcggaaccactgaggaggcgattgctaatgctgaaaagattggttttaaaacagatttagaggccgagcatccgtttttaaaaggaaaaaaaattccaatttatgtttcaaattttatacttatggactatggaaccggcgcaatatttggatgtcctgctcacgaccaaagagatcttgattttgcaactaaatacaaaa

SEQ ID NO: 304396 - DNA, 942 bp, Unknown
  Bacterial polypeptide expressing nucleotide sequence isolated from the Sargasso Sea
ccagaaaaatccattgtaaaaacaatagaatatttagaaagtaaagatttaggtaagaaaaaaataaatttcagacttaaagattggggtatttctaggcaaagatattggggttgtccaattccaatagtttatgacgaaaataataagccacaaaaaataccagaaaacatgctgcctgttaaactaccagaaattcaaaaattggaacccacaggaaaccctctcgataaagcaaatgattggaaaaatattattatagatggaaaaaaatttgtccgtgaaacagatacacttgacacatttgttgactcatcttggtattttttaagattttgctctccaaataatgaaatttatggtttttcagatgaagaagtaaattattggatgcctgttgatcaatatattggaggagttgagcatgctattttacacttactatactctagattttttatgcaagctttgtcttttcaaaacccaaaatttaatatcaaagaaccttttaaaggattatttactcaaggtatggtgtgtcacgaaacatataaagataaaaataataattgggtaagcccagatgaaatcattaccttgaatggaaaaaaatttttaaaaaaagataaaactgaagaaattaaagttggaccttcagaatctatgtcaaaatcaaaaaaaaatactattgatcctgagagtataataaataattttggtgctgactcagttagattatttattttatcagacagtccacctgaaaaagatgtgcagtggtctgaggaaggtatgtcagcatcttttaaatttattcaaaaattatggaatttacatttaaaaatttcaggagaaatagataaaaataattctgaaaataattctgagaatttaattaagtttactaataagtttataaaaaaaatgagccaaaattggaaa

SEQ ID NO: 304397 - DNA, 944 bp, Unknown
  Bacterial polypeptide expressing nucleotide sequence isolated from the Sargasso Sea
ctagatacgttcgttgattcctcttggtactttttaagattttgttcgcctaaaaataaaaataaaccatttgacattgaagatatcaaatattggatgccagtagatcaatacataggtggagttgaacatgctattttacatcttttatattcaagattttttatgagggctattggatttcaaaacaataattttaaaattaaagaaccttttcaaggtttatttactcaaggcatggtttgtcatgaaacttacaaagatcaaaaaaatagctggaaaagcccagacgaagtttctacgaaggatggaaaaaattattatttaaaatcggatcattctaaaaaaataattgtcggaccttcagaatctatgtctaagtccaaaaaaaatacaattgatcctgaaaaaataattaatttatatggggcagactcagtaagattatttattttatcggacagtcctcccgaaaaagatgttcagtggtctgaacagggaatgttagctgcttataaatttattcaaaaattatttgttttgaatgaaaaaattaaaattataaagaataaagataaaaaagaggcttccaatcaactttctaaatttattaatcaatatttaaataaaatcgaaaaaaatttatccaattttcactataatgtaataattgcaaatattcacgaagcccatgggtttttatctcaaattattaaaaaagaagaaaacttttcaaatttaataagtgagtattcaaaatttttaatatcaatttctcctgtcttgccgcacctatccaatgagtgtttgggacaattaaatatcaataattatacatggccaattatagataaaaaattcttaattgaagaaaatataagtattgtagtacaatttaatggtaaaaagagaggaattgtcaataccaagaaagatattttaga

SEQ ID NO: 304398 - DNA, 943 bp, Unknown
  Bacterial polypeptide expressing nucleotide sequence isolated from the Sargasso Sea
caagttattgatggtaaaggctggagatcgggagctattgtacaaagaaaaaaactaaatcagtggttttttaatatttcaaaattttctgaagatttattagccgatcttgatgaactcaaaaattggcctaacaaagtaaaagttatgcagcgaaattggattggaaaatcatttggctgtgaattaaattttaaaatagaaggtgatttaccaattaaaaatataaagtgttttacaacaagacctgatacattatttggattttcttttttggctatttcaccagaccatccaatatctaaacattacgaaaatgatcctgaatttataaagtttaaagaagaatgttctaagactggtactacagaggagtctttagccttagctgaaaagataggttttaaaaccaatttaaaggcaataaatccttttaaagagaatgaaaaggtcccagtttacttcgctaattttgtgctaatggactatggcttcggtgcagtttttggttgtcctggacatgaccagagagattttgattttgctaagaaatataatctttcaattaaaacagtagttaaaccaaaaaatgtagaaaattttgaggtagttactgaggcattttctggagaaggtatcattattaattcagaatttttggatggtttggaagcaccaggagaatcagtattaaaagctatagaaattttacaaaatagaaagcttggaaaacaaaaaattaattttagattaaaagattggggtgtatcaagacaaagatactggggatgcccaataccaattgcttacgatgagaacggaaaaattaaacctattccaatagataatctgcctgtaaaacttccagaaaacataaatctaaactgcaaaggaaatcctctagataacgataaaaattggaagaccagttactatagatgaa

SEQ ID NO: 304399 - DNA, 786 bp, Unknown
  Bacterial polypeptide expressing nucleotide sequence isolated from the Sargasso Sea
actgatttctcccgataaacaatatgaggctgataccaatttatataatccatctgaaatagaaaaaaaatggcagtcaatatggacagaaaacaatttatacaaaaccgataaattaactgagaatagcgataaattttatgccttatcaatgtttccctacccttcaggtaatcttcatatgggacatgttaggaattatgtaattacagacttaatagctcgattccaaaggtttaagggcaaatctgttttacatccaatgggttgggacgcttttggtttgcctgctgagaatgcagcgattgaaagaggaattagtccaagtgtctggactaaaaaaaatatttctcatatgaagtcacaattaaagcttttgggactatcagttgattgggatagggaatttgcaacatgtgatgaaaattattatatttggactcaatatctatttttagagttatacaaggcaggtcttgtatatcaaaaggaatcagaagttaattgggatcctatagataatacagtcctagcgaatgaacaagttgattcagatggtaaatcttggagatctggggcactagttgaaaaaaaattattaaagcaatggtttttaagaattactaattatgcggatgagttattgaaggatttagaaaaattagataactggccagaaagagtaaaaataatgcaagataattggattggaaagtcaattggtacaaatattaatttcaatatcaataccaatccagaagagaaaattactgtatttacaacaag

SEQ ID NO: 304400 - DNA, 748 bp, Unknown
  Bacterial polypeptide expressing nucleotide sequence isolated from the Sargasso Sea
actttcgataatattcaaaacatgcaaaaacaatttgagatgatgggaaattcttatgattggaatagaaaattagtaacctgtacccctgaatattacaaatggaaccaaaagttctttatagatatgtataaaaatggtctagcttacagaaaaaacggacctgtttggtgggatccaatagatcaaacaactttagcaaatgaacaggtagttgatggaaaatcagaaagatcaggagcagaagttgaaaaaaagatgatgcctcaatggtacttcaagattacagattatgctgaagaattgcttaacatgagtgatttagaatggccagaaaaaatcaaacaaatgcaaaaaaattggataggtaaatcagaaggtgtgactataaattttgatatagaaaactccacagaaaaaattagtacttttaccacaagaattgataccgtatttggagtaacttttgtggttttagctcccgagcatccaattataaaaaaattaaatattgataaaaataaagatattagtcaatatatttcaaactctcaaaaattatctgaaatagacaggacatcgacagtacgagaaaaaacaggagttaagactaatatattatgtattaatcctatgaataatgagaagattcctgtgtttattggagactatgtattatcttcttatggtacaggagcagtaatgggagtcccagctcatgatgaaagagattttatttttgcaaaaa

SEQ ID NO: 304401 - DNA, 290 bp, Unknown
  Bacterial polypeptide expressing nucleotide sequence isolated from the Sargasso Sea
gatgaatgaatatagtcataaagaaattgagttagcggcgcaaaccgaatgggaaaaaagaaatcttttctctacggttgaggatggtccaaaatactactgcctatcaatgtttccatatccatctggaaaactacatatggggcatgttcgaaattatacaattggtgatgtcatatcaagatttaaacgtcttgagggatttaatgtgcttcagccaatggggtgggactcctttggtcttcctgcagaaaatgctgcgattcaaaataaaacccatcctttgaaat

SEQ ID NO: 304402 - DNA, 724 bp, Unknown
  Bacterial polypeptide expressing nucleotide sequence isolated from the Sargasso Sea
gattttataaaattcaaaaaagaatgttcgtccactggcacaactgaagagtctatagcacaagctccaaaaatcggttttaagacaaatttaatggcaattaatccgttaaatccagataataaagtgcctgttttttttgcaaattttgttttaatggattatggattaggggctgtttttggttgtcctgcccatgatcaaagagattttgactttgcaaaaaaatattctttggaaataaaaactgttgtcaaaccaaaggatgaaaatgataattatagagttttaaaagaagcatacgtaggaccaggggtaataataaattctgaatttttaaatggtgcaaaagttcctgaggagtcaataattaaaacaattgatattcttgagaaaaaaaaaataggtaaaagaaaaaccaattaccgacttaaagactggggtgtatctagacaaagatattggggatgtccaattcctatagcttatgatgagaacaataatattattaagataccagtcaaagatttaccagttaaactcccaaaagatataaatatcaatgttcaaggaaacccattagacgctcaaaaagagtggaaaaatattactctgaatggaaaaaagtatactagagaaacagacacactcgatacttttgttgactcctcttggtattatttaagattttgttccgctaatgataaacttaatccatttaaca

SEQ ID NO: 304403 - DNA, 658 bp, Unknown
  Bacterial polypeptide expressing nucleotide sequence isolated from the Sargasso Sea
atgaacaatcagtttgaatataaaaaaatagaaaagaaatggcaggatcattgggaaaacagtgaaactgttaagtgtgacttagaatctgataaaccaaaattttataacctttgtatgtacccatatccctctggtgatctgcatatgggacatataaggaattatacgatcggtgatgttattactagatataaacaaatgaatggcttcaatgttttgtctcctatgggctgggattcatttggtcttcctgccgaaaatgcagcaatcaaaactggtattcatccaagagaatttacggaagaaagaatagctaatatgaaatctcaaattatcagattaggttctttatatgattgggatagggaagttgcagcccactctattgattattacaaatggactcaatatctttttataaaactatttgaaaataatttggcttataaagaggacgctccagtaaattggtgtaattcatgcagaacagttctagctaatgaacaagttatagaaggctcttgtgagagatgtgatacagctgtcgaaccaaaaaatttaaaccaatggtttcttaaaatatccgaatattctgaagaattattagaaggccttgaggaaattggtgattggccagaaaatgtgaagacgatgc

SEQ ID NO: 304404 - DNA, 919 bp, Unknown
  Bacterial polypeptide expressing nucleotide sequence isolated from the Sargasso Sea
accatccataaataaaacaataagtgtatttacaacaagaccagatactttatttggtgcaacatatatggttttagctcctgagcacccactggtaaatgatttaactaataaagtaaatagaaaagctgtttccaaatatatagaattaacctcccgtaaatcagatcttgatagaggagacttaaataaagaaaaaacaggtgtttttattggttcttatgccataaatcctgttaataaaaatgaaataccaatatggatatcagattatgttcttatgtcatacgggacaggagctataatggcagtcccaggtcatgatcagcgggattatgaattcgctaaaaagtttgatttaccaatagtagaagttgtatctggtggtgatatatcaagtaacgcttataccgatattgagaatggggttatgataaattcatccacatctgatggagtatttagcttgaatgatttgaaagttaaagatgctatagaaaatacaatatcctatttggaaaagatccaaaaaggaaaaagggcagttgagtataaactgcgagattggcttttttctcgtcaaagatattggggagagccttttccaattattcatctggaaaaaggatataagccagtatcagaagaagaattaccagttttattgccagatgttgaaaaatatcaacctactggaacaggagaatcgcctttagccgctatagatgaatgggtgaatactattgatacagaaacaaatacaccagccaccagagaaacacatacaatgcctcaatgggcaggatcatgctggtattatttacggtttctcgatccaaataacgataacaaaccttgggataaagacgttgaaaagtactggatgccagttgatttatatataggaaggtatagaacc

SEQ ID NO: 304405 - DNA, 738 bp, Unknown
  Bacterial polypeptide expressing nucleotide sequence isolated from the Sargasso Sea
tgatgaacttctagacgagcttgacaatatttcgttccccgaaaacgtcaagacaatgcagagaaactggattggtaggtcaaacggagcccatattgattttccagtagacggtaccgactcagtgataggagtcttcaccaccaggcccgatactatttttggagtcacattcgtcacagtctctcctgaacatgaattgtgtgagcaattgtgtgctgggactaagtgggaaggaggatggagaaatctaaaggaagagtgcgcgaagatttcagagttcgagagaattaacatgctcaaggacaagaaaggagtttttctcggaaaaaatgcaataaacccgatcagcggagagaaagtcccaatctatgcaggaaacttcgtagtctcctcatacggaacaggtgcagttatgggtgttcctgggcatgatcaaagagattttgattttgccaaggaatatgaattggaaatcaaaagagtgctaatcgaggacaatggagacatccccgactctccccaacatagggcattcgaggggtatgggcagatggtcaattcatcaattgctggtttcgacggactatctggggagcaagccaagcaagccgtaatttcaactctggaagaatcaggctcaggaagggggaaagtggagtatcgtctgaaagactggttgctgagcaggcagagattttgggggacaccaattccaatgatccattgtgaatcatg

SEQ ID NO: 304406 - DNA, 919 bp, Unknown
  Bacterial polypeptide expressing nucleotide sequence isolated from the Sargasso Sea
aaaaacaattctttaaaaaaatattatgtattagaaatgtttccctacccttcgggaaaaattcatatgggtcatgtaagaaactatactcttggagatgttttggcgcgttacaaaaaaatgtgtggtttcaatgtaatgcatccaatgggctgggatgcttttggtttgccagctgaaaacgcagctatagtagaaaaaaaacctccatcagaatggacatatcaaaatattaaaacaatgcgaaggcagcttaagtcgatggggctttctatagattggacaagagaaatagcaacttgtcatcctgaatattataaacatgaacagtctttttttttagatttattaaaaagtgggcttgcttataaaaaagaatctttagttaattgggatccaatagaccagaccgtattagcaaatgaacaggtaattgatggtaggggttggagatcgggtgcggtagtggagcaaaaaaacctatcgcaatggtttttaaaaactagcaaatactctgaagagttacttagtgatttaaataatttagaaggttggcccaacaaggttaagataatgcaatctaattggataggtaaatcaagtggtgttgaaataaattttaaaatttcaaaccctggaaatctttctgataattttttaaatatttttacaacaagggctgatactatttttggggcttctttctgcgcaatttcttttgaccacaaaatatctaaagaattggctaacgagaataatcaggttaaaaagtttataaaagataattctaaaaaaaaccctgaaaaagaaaaaattggttttgaaactggtttgtatgttgagcacccttttattgaaaacaaaaaaattcctatttttatagctaactttgttttgatggaatatggttcgggggcga

SEQ ID NO: 304407 - DNA, 855 bp, Unknown
  Bacterial polypeptide expressing nucleotide sequence isolated from the Sargasso Sea
aatttacaccccaaaacttgggaccgaatccaatatttcaataatgaaaaaacaactaaaaaaaatgggattatccttagattgggatagagaaatatcaacatgttctgaggaatattataagcatcaacaactttttttcctagaattgtatgaaaaaggcctagtttatagaaaagaaaactacgttaattgggacccaatggaaaaaacagttttagcaaatgaacaagtaattgatggtaaaggttggagatctggtgtcccagttgaaagaaaaaagttaaaccaatggtttttcaatatttcaaaattttctgaagaacttttaaagggtttagatactttaaaaaattggcccgataaagtaaaaaccatgcaaaaaaattggattggaaaatcatttggttgcgaaatagattttaaaatagaaggtaatttacctgtaaatgaaattaaatgttttacaacaagaccggacacattgttcgggttttcctttttagcagtttctgtagaccatccaatttcaaaacattttttaaaaaacccagaatttgttaagtttagagaagagtgttcaaaaacaggaacaacagaagaatctatagctttaggagaaaaaattggttttaaaactaatttatttgcaattaaccctttagatgagaaccaaaaagtcccagtatattttgcaaattttgtattgatggattatggttttggtgcagtttttggatgtcccgcacatgaccaaagagatttagattttgcaaataagtacaaattagaaattaaaactgtagttaaaccggtaaatgagaaagataattttaaaattaaaaaagatgcata

SEQ ID NO: 304408 - DNA, 821 bp, Unknown
  Bacterial polypeptide expressing nucleotide sequence isolated from the Sargasso Sea
acatttttcagcttggacgatagctccaccggttaaaaatgaagcatttgtcccgtcaaagtcagaaaaagtgaaatggctaaaccactttacagatattgatgttgccacagggcaggaagcaatcgataaaacaattgattttgctgaaaaaaataaatggggaaagaatgttacaaactttaggctgagagactgggggctgagccgccagagatactggggttgccccatacccgtggtgcactgtgaaacctgcggcgttgttcctgaaaaaaaagaaaatttacccgtcactctgccagatgatgtgatatttgatgtcccaggtaatcctttagatcgtcacccaacctggcgaaaatgcaaatgtccttcatgtggctctgaagccctccgtgaaactgatactatggacacttttgtggatagttcatggtattttgctcgttttacttcccccaaatccaaaacaccaacttcaaaggaagatgttagctactggatgaatgtcgaccaatacataggcggcgttgagcatgcaatcttacatctactgtattcaagattttttgcgcgtgccatgcaaattactggacatctaccaaagacggccaaggagccattcgacgccttattcacccagggaatggtaacacacgccatatataaaagcattggagctgatggtagagatttgtttcactatccggaagaggtggaggtacgcgagggtaaagcttttttaattaaagataacaaggaagttaccattataccttctgcaaaaatgtcaaaatcaaaaaataatgttgttgacc

SEQ ID NO: 304409 - DNA, 893 bp, Unknown
  Bacterial polypeptide expressing nucleotide sequence isolated from the Sargasso Sea
tttacttgcaaggtacaaaaaggcgtgcggctttaacgtgatgcaccctatgggttgggatgcctttgggctgcctgcggaaaatgccgcctttgagaggaatatacatcccgcaaagtggacagatcaaaatattagcaccatgcgtgagcaacttaaagcaatgggtctctcgtatgactgggaccgggaactatcaacgtgcgatccagaatattataagcatgaacagaagatgttcttggattttgttaaaaataatcttgcttaccgaaaagaaagttgggtgaactgggaccctgtagagaatacggttcttgccaacgaacaagtcatagacggtaaaggatggcgttcgggagcgcctgtcgaaaagcgccttttgtcacagtggttcttaaaaatcactgaatatagtgacgatttactcaaatcaattgaaactcttgagcggtggccagacaaggtcaaactaatgcaacacaattggataggacgttccgaaggagcaacggtcttctttaacattaacgggcatgacgaccgccttgaagtattcacaaccaggcccgacacgatatttggcgcttcgttctgcgccattgcagcaaaccaccctatagcttcaagccttgggaagaccgatactaaactccaagacttcatatcagagtgcaacaagctcagcaccagtgaagctgacattgaaacggcagagaaacgaggctatgacacaggattaaaagtggctcatccctttctagatggctgtgaactgcccatttacgtcgcaaactttgtgctgatggactatggaactggagccatttttggctgccctgcacatgatcaacgtgatttagatttcgcactaacttataatctacccgtgc

SEQ ID NO: 304410 - DNA, 814 bp, Unknown
  Bacterial polypeptide expressing nucleotide sequence isolated from the Sargasso Sea
gctgttcccggaacaggtgacacgcggtgaaggtggtaaattaattcacgttgacaatggtcggccggttatttcaggacggtcggagaagatgagcaagtcgcggaagaatgttgtggatccggaagccattatcgcgacctatggtgctgataccgcccggttgttcatgttgtcggacagtcccgcggcgcgggacctccaatggactgacgctggaatcgaaggggcgtggcgatataccaaccgtgtctggcgtatgattgctgagccagaatttccctttgccgctgtgaccgacgaggcgccagagacgttggatgattcgtcggaagaggttctccgcaaaattcaccgcacgatctccgatgtgagcgccgattttgacgcctttcgcttcaatcgggcggtggcccgaattcgagagttaactaacgcactcgcgaacctcgatggcgacagcgcagaccgggcctggactcgacggttcggatttgagacgacggcccaacttatagcgccgatcatgccgcaccttgccgaggaactgtggtccatccttggccacaaatccttactgagcgacacttcctggccgagcgctgacgacgcctatctttccgatgaaacggtaactattgcagtccagattaatggtaagttgcgcggcacgattgatctgccctttgatgtcgataaacaaattgcagaggactccgcactggcgctcgagtatgtcgcgcgggcaaccgatggcacctcgccccggaaggtgatcgtggtaccgaacaaggtgataaatgtcgttctttag

SEQ ID NO: 304411 - DNA, 132 bp, Unknown
  Bacterial polypeptide expressing nucleotide sequence isolated from the Sargasso Sea
catgagctttaatcatcaagaaattgagaagaagtggcaagggtactgggaagagaataaaacattccgtacgccagatgagacagaaaaaccaaaattttacgcactagatatgttcccatatccatcagg

SEQ ID NO: 304412 - DNA, 925 bp, Unknown
  Bacterial polypeptide expressing nucleotide sequence isolated from the Sargasso Sea
gggcgaaaccacattccggttgcgcgattggggtgtatcgcgccaacgctattggggctgtccaataccaatgactcattgtccatcatgcggcgtggtaccggtaccagaaacggacctgccggtcacattaccagaagatatcgatttttcaatcccaggaaatccgctcgcaaatcatcctagctggaaacatactcaatgcccaaaatgtggcggcgccgccgagcgtgaacaagacacatttgacacattttttgagagttcctggtattttctgcgttatgcagatccaacacataaagacggatttagtccagccactgcggcatattggatgccggtagatcaatatattggcggtgttgaacacgcagtcctgcatcttctctattctcggtttttcactcgtgcattaagccgtgttggctatcttgacttagatgaaccgtttgctggtctgatgacacaaggcatggtgtgccatcaaaccttcaaagacaaaaatggaaaatggctatttccaaccgaagtgaccaaagatggagaccagtgggttgaaacaagcaccggcgccgttgcgacagccggacgaactgaaaagatgagcaaatcaaagcgcaatgttgttgacccagaattgattattgagacctatggtgctgatacagcgcggttattcatgctgtctgactcaccaccagaacgcgacatggaatggaccgaatcaggtgttgagggggcatcacgatttctgaaacgtatatggcgactcgcccgtgacgaaagactcgccgcttgcggtacgccgataccaaatacgctgggcgagactgcaacagcagcgttgcggatggcgcataaatcaatactggctttatccgctgatatcgaaaatttccgctttaaccgagccagtagccca

SEQ ID NO: 304413 - DNA, 844 bp, Unknown
  Bacterial polypeptide expressing nucleotide sequence isolated from the Sargasso Sea
aatgatctaaaatgtccagaggattccattattaaaacgattgaatatttagaaaagtacaatttaggtaagagaaaaacaaattttagactaaaagattggggtgtgtctcgacaaagatattggggttgccctattccaatagtttatgatgaaaaaaataatcctgttaaaattccaaaagaaatgcttccggttaaattaccagaaatttcaaaatttgagacttcgggaaaccctttagataaaaatttaaaatggaagaatgtattaattaatggtaaaaattttacaagagaaaccgatacattggatacatttgttgattcctcatggtattttctaagattttgctcaccagaaaaaaaagattatggttttcacacagatgatgttaggtattggatgcctgttgaccagtatataggtggtgttgaacacgcaatattacatttattgtactcgagattttttgtcttaggactcgggtatcaaaatgataaatttaattttcaagaaccatttaagggactattcacacaaggaatggtttgtcatgaaacttataaaaatcaaaacaacgaatggcttagtcctgatgaagtagagactgtagacggcgtaaaagttgaaaaaaataataagaaaaataaagtatttgtcggtccatcagaatcaatgtccaaatcaaaaaaaaatacaattgatcctgagagtatcattgaaaattatggagcagatgctgctagattatttattctttcagatagccctccagaaaaagatgttcaatggtataatgaaggaattaaatcatcatacaaatttattcaaaaactttgga

SEQ ID NO: 304414 - DNA, 862 bp, Unknown
  Bacterial polypeptide expressing nucleotide sequence isolated from the Sargasso Sea
tccaatatgtgaaaatttttcgaaaagtgaaaaatataataattttaaggatgaatgtctcaaggtaggaacaactgaggaggctttagctaatgcagaaaaaattggttttaatactaatttatttgcttctcatcctttcattaagggaaaaaaaattccaatttatgtcgctaattttatcttaatggactatggaactggtgcaatattcggatgtcctgcacatgaccaaagggattttgattttgcaaaaaaatataaccttcaaattactcaggtagtatcaaataatccttctaattctgaaaatttatcagaggcttttattggcgatggaactttaattaattccgattttctaaatgggttaaaagtagaacaagctaaaactaaaattatcaaagaaattgaaaaattaaaaataggtaaaaaaaaaataacttttagattaaaagattggggaatttccagacagagatattggggttgtcctatacctatgattcatttgcaagatggaaaaatcgtacctgtcgataaaagtgaattaccaatcaagctgccagaagatattgatttaaatcaaagtggaaatcctttagaaaatcacagaagttggaaaaatacagttcacaaaaaaactggcaacccagcgattagagagactgacactctcgacacatttgttgattcctcttggtattttttaaggttttgctctccaaaaaaaaagtctgagccttttgatatagaaaaaattaattactggatgcctgttgatcaatatataggtggaatagaacatgcaattttacatcttctttattcaagatttttcatgagggctctaaaaaaaaat

SEQ ID NO: 304415 - DNA, 862 bp, Unknown
  Bacterial polypeptide expressing nucleotide sequence isolated from the Sargasso Sea
agatattggggttgtccaattcctgtggcttataatagtgatgggaatgtagtaccaattcctaaaaaagatttaccagtaaagcttccccaaaatgtagatcttaatgctaaaggaaatcctttaaattctgaaaacgattggaaaaaaataaatattaatggaaaagatttaattagggaaactgatactctagatacatttgtttgttcttcatggtactaccttcgattttgctctccaaaagaaactgaatatggattcaatcaagaagaaattgactactggatgccagttgatcaatatattgggggtatagaacatgcaattttgcacctcctttactcacgtttttttatgaaagctctaggatttaaaaataaagctttcaatattgatgagccatttaaaggcttatttactcaaggaatggtttgccatgaaacttataaagatcaaaacaataattggattagccctgaagaaatagagataagagataaaaaatattataaaaaaaacgaacctaattctaaagttactgtgggaccttccgagtcaatgtctaagtcaaaaaaaaatgtaattgatcccgaaaatataattaataattatggagctgattcagttagattatttattctttcagacagtcctccagaaaaagatgttcaatggtcagagcaaggcatggtttcatcatttaaatttttacaaaaattatggatattgcattcaaaaataaaactaaaactatctaataaaaataatttaattaatgaagatttagaattgaataaatttactaaccaattaataaataaaataacaaataacttagaaagttttagttacaatgtaa

SEQ ID NO: 304416 - DNA, 915 bp, Unknown
  Bacterial polypeptide expressing nucleotide sequence isolated from the Sargasso Sea
aatgggtttttctatagattgggaaagagaaattgcaacctgtcacccgggttattataaacatgaacagcttttttttctagaaatgtataaaaatgggttggcctataaaaaaatgtctgaggtaaattgggaccctattgataagacggttttagcaaatgaacaagtcatagatggtaagggctggagatctggagctttagtagaaaagaaaaacctatcccagtggtttttaaaaacaagtagttattctgaagaattgttatctggtcttgagggattggatatgtggccaaacaaagttaaaacaatgcaatctaattggataggaaaatcagaaggggcagaaatagatttttcaataattaataatcccatattagatgataaatttctaaaagtatatacaactaggcctgatacaatttttggggcaacatttatagcaatatcccctgatcacgatctagcaaaaaaaatacttcggaaagacgctggtgccaaaaaatttagtgaagaaataaaaactatagactttgaaaaaacaaaaattggttataatacgcaaattttaatacaacatccttttttagacaaaaaaatcccgctatttttagcaaattttgttctaatggattatgggttgggagctgtttttggttgtccagcacatgatcaaagagatttagatttcgcaataaaatacaacttagatgtcattcaggttgttagcactaaagaatcagatcaaaattcttttaatattaaaagtgaggcaatgttagacaatggaacaatgataaattctggttttttagatggattggaaaatgaaaaagcaaaaaaagaggttataaaaagattggaggaacagggcactggaaataaaaaaataaattacaaattaagaga

SEQ ID NO: 304417 - DNA, 970 bp, Unknown
  Bacterial polypeptide expressing nucleotide sequence isolated from the Sargasso Sea
tcctcgatggaaaaacaatgaagaagcaaaagatactatagcagagagaatgtcaaaaaatataattgatgggtcaccccaaggtcaaaagaaaattacatatcgcttacgtgattggggtgtttcaagacagagatattggggctgcccaataccaattatccattgtggcgattgtggtgttcaagaagtacctgatgatgatctgcctgtaagattacccgatgatgttgactttagtgtccctggaaatcctcttgagaagcatccaacatggaaaaaagtaaagtgcccaaattgtcaaaaagatgcgataagagaaacagatacatttgatacatttgtagactcttcgtggtattttgcaagattttgtagtccgaaggccaatcagcccgtcaataaagagtcagttgactattggttacctgtggatcaatatattggtggcgtagagcatgctattcttcatcttctatattcaagattttttacgcgcgcaatgaaagaaacagatcatctatccttggatgagcctttttcagggttatttacgcagggaatggtaacgcatgaaacctataaagactcttcaggtaattggctatttcccgaagaagtcctgcttgatagaagcaatccggtgcatatcaaaactggtgaagctgtaacaattgggcctatagagtctatgtcaaaatcgaaaaagaatatcattgacccccaatccattgtagagacctttggtgctgatacagcaagatggtttattttatctgacacccccccagagagagacattcagtggacagataaaggggccgaggcctcatctcgttttattcaaaggatttggaaaattgttaatgatggaatgtccataatttctgggaatactattgatgaaccaaaggagtttacggaagactcagtcaacataagaaaaataactcataaggctataaaagac

SEQ ID NO: 304418 - DNA, 869 bp, Unknown
  Bacterial polypeptide expressing nucleotide sequence isolated from the Sargasso Sea
atttgttattgaaaaagaagcttttacagaggatggtatattatttaattctgattttttgaatgatcttacagttaatgaggcaatagaaaaagttattaaaataattacaaaaaaaaacttgggaaataaaaaaataacatttcgccttaaggactggggagtctccagacaaagatactgggggtgtccaattccagttgtatacaacaaaaaaggcaaggctttgccagtaaaaaaaaaggacttgcctatattattacccgataacatcaatctgaatgcatcaggtaatcctttagaaaaacatcctacgtggaaatttatcaaactttcctcaggagaagaactaattagagaaaccgatactcttgatacctttgtagattcttcctggtatttcttaagattttgttcaccaaaaaacaaaaaatatggttatgaaattaatgatatcaaatattggatgcctgttgatcaatatattggtggtgtagagcatgcaattttacatcttctttattcaagatttttcatgagagcgcttgcatttaataacaaaaaatttaactacaccgagccatttaaaagtttattcactcaagggatggtttgtcatgaaacatataaaaatgaagatggtcaatggttataccctgatgaagttgaaagaaatactgatggagttttcgtcacaaaaaataagggaagaaaagttgtaactggaccttccgagtctatgtctaaatctaaaaaaaatattgtagatccagaagaaatgattcatacatatggagctgactcgatcagatggtttatgttatctgacagccctcctgaaagagatgttcaatggtcagtggaaggtg

SEQ ID NO: 304419 - DNA, 903 bp, Unknown
  Bacterial polypeptide expressing nucleotide sequence isolated from the Sargasso Sea
tacaagaaagatggatcaattaaaactgtgccaaaagacgagctccctgtagaattacctgagagcgtaaatttaaatcacactggtaacccactagatattcatccaacttggaaaaaaacaatagacaaaacaacaggagaagaatgcgtaagggaaacagatactctagacacatttgttgactcgtcttggtattttttaagattctgttctccggagtcaaaggataagccttttgacattaaaaaagttaatgagtggatgccggtagatcaatacattggagggattgaacatgctattttgcatttgctatattctcgattttttacctttggcataaataaatttaccaaagacttaaattttaaagagccttttaaaaaactttatactcaaggcatggtatgccatgagacttacaaagatgaaagtggatcttggttaagcccagatgaaatagagaagttaaacgataaggaggcaataaacattaaatcaaaaaaacctgttaagattggtgccgcagaagcaatgtctaaatctaaaagaaacacaattgatccagaaaaaatgatagataaatttggtgcggactcagtgcgattattcatattatctgatagtcctccagacagagatatcctatggtctgagcaaggtatcgaaggtgcctataaatttttacaaagaatttggaatcttaatattttaattttgaacagaagtgagactaaacgagataaagaaatagagaaagaattcaacagaaaaattaataactatgtaaataaagtttcagtcttaattcaaactttttctcttaatgtagctgtggctaatatttatgaggtatataacttatttaattctactttgagtaaaagaattagtaacgat

SEQ ID NO: 304420 - DNA, 874 bp, Unknown
  Bacterial polypeptide expressing nucleotide sequence isolated from the Sargasso Sea
tattgatggtaaaggttggcgctctggagctgaagttgagcaaaaaaaactatcccaatggtttttcaaaataacaaaatacgctgacagtcttcttgacagtttgaattcaatggatggatggccagataaagtcagaacaatgcagaaaaattggattggcaagtcctatggttgtgaggttgacttcgaaattttatcagatatttcccaatttaacggtaaaaagatcaaaatattcaccactcgacctgacacaatttttggggcaacgttttgtgctttgtctccattccatccacttattgaagaacttattaaagaagaaaagaatatcgagagtcaagtgaatgagatgagagcacaaaaaatcaacgaagagtctattgcaaaaaatgaaaagttaggaattcaaactagtttaaatatcaaacacccatttattaaaggaaaatcgctacctgtatttattgccaattttatattgatggactatggctcaggcgcgatatacgggtgccctgcacacgaccaaagagacctagattttgcaaataaatataacctagaggttattcaagttattgaacccgaggaccagactacatttgataagaaaaatgcatttgtaggtaacggaaaactaatcaactcagattttttgaatggactatcaatagaagaagcaaaaaaaaatattatggaaaaagttggcgctcttcaaataggcaaacaaacaataaattatagattaagagattggggtatttctagacagagatattggggatgtccaattccaattatgtatagagaagatggaaaagttattgaagttccagaggatcaattgcctcttaagcttcctgaagat

SEQ ID NO: 304421 - DNA, 779 bp, Unknown
  Bacterial polypeptide expressing nucleotide sequence isolated from the Sargasso Sea
attgtcaccattagcatcttgcgatgaatatattaatactttatgccctcaatgcggagcagatgcaaaaagggatgctgatacaatggatactttcgtttgctcttcttggtactatttaagatatcctaacgctaattataaagatggcccttttgatccagagggcttaaaactgctccccgtagattgctatataggaggatcagaacacgctacgatgcatttgttatatgcaagatttataactaaggcattgagagatggtgggtatttagattttgatgaaccatttactaaattatatcaccagggcactataacaaaagatggctctaaaatgtcaaaatcgcgcgggaatactgtttctccggatgaatttatagataagtatggttctgatacttttagagcttatttgatgtttatggggccttttgatgaaggtggtgactggaatgataaagggattactgggatagatcgatttctaaagaaaatatggcgattttgtcatttacctgaaaataaagatgagtcagataaaaaagatttaagaattttgcataaaacaattaaatatgtttcaaatgatttaaatgaaatgaaatttaatactgctataagtaaattgatggagcttattaatcatttttctaaccatgatagtatctcgaaatcaattaagtcaaatttgattaaaatgattgcgcctatagttccgcatattgcagaagagctatgggaggtgttaggttcattggggtcggtgtttgatg

SEQ ID NO: 304422 - DNA, 778 bp, Unknown
  Bacterial polypeptide expressing nucleotide sequence isolated from the Sargasso Sea
ccttttaaaaaacttcttacacagggcatggtgctaaaagatggatacaaaatgtcaaaatccaaaggtaataccgtagacccacaaaaatttattgaccaatatggagctgacacaatcagactttatatgatgtttacctctccaccagaacagtcgctggaatggtcggatacagcaattgagggctcatacagattcctaaagcgcatatggaatcttttgtcagaaagaaaacaatttactgaaaagcaaccagatgaatttacaaaacatgagcttgagctccgtcaaaaaagtcataaaactctaaaaaaagttactcatgattatgctgaacgcaattcatttaatacagcaattgcatcaataatggagttattgaatgcagttccagagtcatttaaagcgaatgatgcaaccatagctcaaagattctgtttagatgaggtgattcaatttacattaaaaatgttatcgccaattacccctcatattagtctttatttatggaaagaatattcggaatctgatggcgatgattttgaaaattcttggccaatttataatgaagagtttcttcaattagaagattttcaactcattattcagatcaatggaaaggttcgaggcaaagaaaatgtatctgttgatatagagcaagatgaattagaggtgctagcaaaggcaaatgaaaatgttaaaaaaattctagctaaccagcccataaaaaaggtaatctatgtaaaagaaaaattaattaattttgtaatttaaa

SEQ ID NO: 304423 - DNA, 640 bp, Unknown
  Bacterial polypeptide expressing nucleotide sequence isolated from the Sargasso Sea
gcctgatagagttaagcttatgcaaaataactggataggcaaatcattaggtgccaaaattaactttaaaattatacaaatagatgaaaaaattgaagtttttacaacaagacctgatactttgtttggtgcatcatttattgcccttgctccctcacatcctgtttcgttaaaattatcaaagaaaaattccataattaaaaatttcattaatgaatgtaataaaaactccacttcggaggctgtgattgaaaaaaatgaaaaggaaggtgtttacacaaatttagacgtttcacatccctttaataaaaaaataaaaatacctgtttatatagcaaactttgttttaatggagtatggcacaggtgcgatttttggttgtcccgcccatgatcaaagagatttagattttgcaataaaatataagttgcctgttcttccagttgtaaagccaaaaaattataaaaaaaacgattataaaattactgatacagcatttactgatgatggtattataatcaattcacatttcttaaatggattgaatgttacagatgcaaaaaaacatgcagttgaagagttggaacgactgaattctggagcatcaagtacaacatggagattaagagactggggtatt

SEQ ID NO: 304424 - DNA, 652 bp, Unknown
  Bacterial polypeptide expressing nucleotide sequence isolated from the Sargasso Sea
tatggaaagactaaattttcaagagattgaaaaaaagtggcaatctatttttgataaagaaaaactttacaataataaaagttcgaaaaaattctattgtttagaaatgtttccttacccgtccggaaaaattcatatgggacacgtaagaaattacaccataggagatgttatagctcgatttaaattcatgaatggattcaatgttttgcacccaatggggtgggatgcttttggtttgccagcagaaaatgctgcaaaagaaaataatttacacccgaaaaaatggacagagaaaaatatattagaaatgaaaagacaacttaagcttatgggtttgtcaatagactgggacttagaagtttctacatgtgatgaaagttattataaacaccaacaagaaatattcatcgatttttacaaaaaaggattagttaaaagaaaagaaaattatgtaaattgggatccagtcgaacaaacagttttagcaaacgagcaggttgttaatggaaaaggctggagatcaggtgctatagtagaaagaaaaaaactatctcaatggttttttgatattacgaaattctctaatgacttacttaaaggattaaatgaattggataattggcctgaaaaggtaaaaactatgcaaaaa

SEQ ID NO: 304425 - DNA, 630 bp, Unknown
  Bacterial polypeptide expressing nucleotide sequence isolated from the Sargasso Sea
aatgaagtacaattttctggaaatagaaaaaaaatggcaaaagttctggagtgataatcgagtatatgaagttgagaattcaagtactaagccaaaattctatgttttagatatgttcccatatccatccggtgcaggtcttcatgttggacatccgctagggtatatagctagtgatattttctccagatacaaaaggcataaaggatataatgttctacatcctcagggatatgattcttttggtctccctgcagagcaatatgctataacaactggtcaacatccaaggaagactacttctgacaatataaatatgtataggactcagctagatagaatgggatttggttttgattggagtagagaaataagaacatctgatccagaatactacaaatggactcaatggatatttattttattctttaactcatattactgcccatttgataataaagcaaagagtatagaagatttaattaaagtatttgagagtgagggaaatcaaaaatttaaatcttttttatcatcagatgatattatttttgattctaaagagtgggataattttgaacagcaattaaaatcaaagatattaatggaatataggcttgcctacctatcaga

SEQ ID NO: 304426 - DNA, 615 bp, Unknown
  Bacterial polypeptide expressing nucleotide sequence isolated from the Sargasso Sea
gatgtcaaagtcaaaatataatggaatagaccctgaatcagtaattaataaatatggagcagatacagcaaggatgtttatattatttaaagcaccaccagaaaaagatttggaatggggagatacagatgttgaaggacaatttagatttttaagtaggatttggaagctttatataaattgtgcaaaagatataaatagtaaaagtaagtcctatccagataaagaaaaaactttaataaagtcaatgaacattgctataaaagaaatttcaaatgacatattaaataaccaatttaatactgcgatttcagaactaatgaagttttataattcattatcaaattccattaatgaagtaaacaataatttaaaaaaagatgctttaaaaacattttgtattttattggctccatttgctcctcatattgcagaagaaatatggcatcttataggatttaaaaattctgttcatttagaacaatggccttcatttaacgccgaagcactaaaagaagagtcatatgaactagtaatacaagtaaatggaaaagttcgcgacaaaataaatattgacaatgaaatgaatgaagatcaaattaaggaattgactct

SEQ ID NO: 304427 - DNA, 964 bp, Unknown
  Bacterial polypeptide expressing nucleotide sequence isolated from the Sargasso Sea
aagcttccagaaaaaataaaccttaacactaagggaaatcctttagatcatcaaaaaaaatggaagaatattaaaataaaaggaaaagattataccttagacactgacacacttgatacttttgttgactcttcttggtatttcttacgtttctgctctccagaaaataatgaatatggttttgacaaagaagatataaaatattggatgcctgtcgatcaatatataggtggagttgaacatgcaattttacatttattatattcaagattttttatgcaagctttgggatttaaaaatcaaaattttatttcaccggagccatttaagggattgtttactcaagggatggtatgtcatgagacctacaaggatgaaaataataaatggattagtccagatgaagttttttcagaaaacggaaaagatttctttaaaataaagaataaaaaaaaaataatcgtaggaccatctgagtccatgtcaaaatcaaagaaaaatactattgatccagaaaaaattatggatcagtttggtgctgatgcggtaagattttttattttgtctgatagcccgcctgaaaaagatgttcaatggtcagagcaaggtatgattgcagcttataaatatattcaaaaattctggattttgcataaaaaaataactgaaaaaattcaaaatcaaaaagagaattttgaaagtgaagatttagctatatatacaaataaattgattgaaaaatatacaataagccttgaaaaatttaacatgaatgttttgattgcctacttacacgaaacctataattttttaagtaaagaaatcaataaacacaacattaaagatttggaggaaaattacaaaaaaattttaattttaatgtttcctgttgttccacatttggtttcagaatgtttgaaagatgttcaaaaagaaattgatgtttctggcccgggcacaaaaa

SEQ ID NO: 304428 - DNA, 927 bp, Unknown
  Bacterial polypeptide expressing nucleotide sequence isolated from the Sargasso Sea
ttttggatgtgaaatagattttagaattaaaggcaatcaagatatcaaagagataaaatgctatacaactagacctgatactctttatggtatgtcctttttggctgtatctgtagatcacccattatctaagttatatgaaaatgataataattttttaaaattcaaagaagaatgttctaaaacaggaacaacagaagaagctatagcacaggcagaaaaattgggatttaaaacaaaccttaatgccatcaatccactagatgaaacgttgacagtaccagtatattttgcaaattttgttttaatggactatggctttggagcggtttttggttgtccagcacatgatcagagagatttagattttgccttaaaatataatttaccaattaaaacagttgtaagaccaatagataaagatttaaattttaaagttgaaaacaaagcttacacagaaaatggtatacttataaattctcaaaagttagatgggatgaaagttccagacgagtctattccaaaaactataaaaattttagaagaaaaaaaattaggtaagaaaaagattaattttagattaaaagattgggggatttcaagacaaagatattggggctgtccaatcccaatagcttatgatgaaaataatcaaattttgaaaatacctgaggatcagctgcctgtgaaattaccagatggagtagatctcaatgtaaaaggaaaccctcttgaccatcaagatgaatggaagaatattgaaatatctggaaaaaaatgtgttagggaaacagacacactagatacatttgtagactcttcttggtactttttaagattttgctctagtgaaaattcaaaaattccttttagtgatgaggaagtaaaatattggatgccagttgaccagtatataggtggtgttga

SEQ ID NO: 304429 - DNA, 872 bp, Unknown
  Bacterial polypeptide expressing nucleotide sequence isolated from the Sargasso Sea
aacttgtgatgaaaattactatgtttggacccaatatctatttttagagttatacaaggcaggtcttgtatatcaaaaggaatcagaagttaattgggatcctatagataatacagtcttagccaatgaacaagttgattcagaaggtaaatcttggagatctggcgcagtagttgaaaaaaaattattaaagcaatggtttttaaggattacaaattatgcggatgagttattgaaggatttagaaaaattagataactggccagaaagagtaaaaataatgcaagataattggattggaaagtcaattggcacaaatattaatttcaatatcaatactaatccagaaaagaaattaactgtatttacaacaaggccagatactttatttggagttacttatttagcaatttctgttaatcattcattaattaaagatatttctgataaggaaaccatacaagacatagacaatcttaaacaatatttgaaaaatattaacaataatgaatttgaaaagattggaataaaaactagcttaatagcaataaatccagttaattctgatcctattcctatttgggttgcaagttatgtcctagatgaatacggtactggcgctgttatgggagtgcctgcacatgatcaaagagattttgagtttgctaagaaaaataatattgatattaaacaggtaataataaaggataaaagtgaacaaaataaagagcttgatgaagcttatgtggaaaatggatatcttattaattcaaatcaatacaatggtaaagaaaatactattgctaaattaaaaatttcagaggatggcgtaaataatggatgggccgagaataagattcaatatcgttaag

SEQ ID NO: 304430 - DNA, 388 bp, Unknown
  Bacterial polypeptide expressing nucleotide sequence isolated from the Sargasso Sea
attgtctcaaagatataatcataaaaaaacagaaaaccattggcaacaaaaatggttagataataaaatttttcaatcatctacagatacaaaaagtaaaaaattttacatattagaaatgtttccttatccttcaggaaaaatacacatgggccatgtaagaaattataccctgggtgatgttgttgctagatacaaaaagatgagtggttataatgttttacacccaatgggctgggatgcttttggtttgcctgctgaaaatgctgctataactgaaaaaaaacctccggctgaatggacatacaaaaacataaaggtgatgagatcacaacttaaatcaatgggtttttctatagactggagtcgtgaaatagcaacttgtcat

SEQ ID NO: 304431 - DNA, 972 bp, Unknown
  Bacterial polypeptide expressing nucleotide sequence isolated from the Sargasso Sea
ggaaaagttattcctgtagataagagtgaacttccaataaagctacctgaaaacgtagatttaagttctaagggtaatccgctagaaaatcatcctacttggaaaaaaactaaaaataaaaaaactggcgaaagtgctattagggaaacagatacccttgacacttttgttgattcttcttggtatttcataagattttgctctccaaaattaaaagacaaaccttttgatgaaaaagcctttagctactggatgcctgttgaccaatatataggaggtgttgagcatgcaatattacatttgctttactcaagattttttatgagggcaattaaactaaatgataaaaaaattaaaattaaggaaccatttaaagggctttttactcaaggaatggtctgtcatgaaacatataaaaatgaaaagggtgattggttaagtcctaaagaaattgaaaaaatggacaaatcgaaggtaattattggcccgcctgaggctatgtcaaaatctaaaaaaaatgttgttgatcccgaaagtatgattaaaatttatggagctgatgccataagatggtttatgctttctgacagccccccagacagagatattcaatggtcgaatgagggggtttctagtgctcataaatttgttcaaaaattgtggagtataaatagaaaaattttggaaagaaaagattcaaatgtttctcaaagtgaagaaaaaaaatttatttcaaaatttagtaaatatctgtttaaaatatcaaatttaattgaaaaatttcacttaaatgtagcagtagcaaatttttatgaaataacacatcttgttaacgattcaatttcaaaagatataagcacaaagtgcctaaaagaaattcaaattaaaattatgcgaataatgatgccctttatgcctcatatagcttctgaatgtttaattgaattagaggggagaaaattttattttaaa

SEQ ID NO: 304432 - DNA, 880 bp, Unknown
  Bacterial polypeptide expressing nucleotide sequence isolated from the Sargasso Sea
ggctaacaagattaatgctttaggtgataataataattggataaatacaacatgtccaaaatgtggaatagcggcaaaaaaagaaactgatactatggacacttttatgtgttcatcatggtattttttaagatatccatcttccaaatgttcaaataagccatttgaaaaggttgaaattaataagtggttacctgtagatcaatatgttggaggagtagaacatgcaatattgcatttgttatatgcaagattttttactaaagctttgcgggataataaactatttgaaattgatgaacctttcaaaaaactattaacacaaggaatggttcaggcagcagcctataaaaacaataaaactggtaaatatgtttctccttcagatattactgacctatcaaatcctaaagatccaattgacaattctaaactcgaagttcttttcgagaagatgtctaagtcaaaatataatggaattgaccctgaatcagttattaaaaaatatggagcagatacagcaagaatgtttatattatttaaagcaccaccagaaaaagatttggaatggggagatacagatgttgaaggacaatttagatttttaaacaggatttggaagctatatataaattgtgtaaaagatataaataaaaatagtaaatcctatccagataaagaaaaatctttaataaagtcaatgaacattgctataaaagaaatttcaaatgacatattaaataaccaatttaatactgcgatttcagaactaatgaagttttataatgccttatcaaattcaattaatgacgtaaacaataatttaaaaatagaagctttaaaaacattttgtatattgcttgctcccatttgcacctca

SEQ ID NO: 304433 - DNA, 840 bp, Unknown
  Bacterial polypeptide expressing nucleotide sequence isolated from the Sargasso Sea
aagttgtttcaaagaaagattcaagtacagatgaaaaacttatagaggcttataccggtgatggaaaaatgataaattctgattttctaaataatttaactattacgaaagcgaaagaattaataattagtgaaatagaaaaaaaaaagataggaaagaaaagaacattatttagattaaaagactggggcatatctagacaaagatattggggatgtcctattccaatgatacatcttgatgatggtactatagtaccagtagataaaagtgaacttcctataaaattacctgataagatcgatttaaaattatcaggaaatccacttgagaataataatgattggagaaaaaccaccgataaaaaatctggtaaaccagctctaagagaaacagatacattagacacttttgtagactcttcttggtattttttaagattctgctcacctcaaaacagcaaagaaccattttcagagaaagaggcaaactattggatgtcagtagatcaatatattggtggggtagagcatgcaatattacacttactttattcaagattttttatgaaagccatcaataaatgtaatagaaatattaaatgttctgaacctttcaaaaacttatttactcaaggaatggtctgtcatgaaacttataaagatgtaaatggaaaatggctttatccagatgagattaaaaaaatttctgctaacaaagctgttaaaagatctgacaattcagaggtaaaaattggtccctcggagtctatgtctaaatcaaaaaacaatacaattgacccagagactatgattaaacagttggagcagatgctgtaag

SEQ ID NO: 304434 - DNA, 360 bp, Unknown
  Bacterial polypeptide expressing nucleotide sequence isolated from the Sargasso Sea
tatgaaatacaacccttctttaattgaaaaaaaatggcaaaaaaagtggaatgatttaaagattttcaaagccaaaatagattataacaaacccaagtattacgttttagaaatgttcccatatccatctggtgcaatacacatgggacatgttcgtaattatactttaggtgatcttgttgccagatataagaaggctcaaggctttaatgttcttcatcctatgggatgggatgcttttggattaccagcagagaatgctgcaattgaaaataacacccttccatctaaatggacctactcaaatatcgaaattatgaaaaatcaactcaaacaaatggggttgtcttatgactggga

SEQ ID NO: 304435 - DNA, 730 bp, Unknown
  Bacterial polypeptide expressing nucleotide sequence isolated from the Sargasso Sea
gcgaacggcgtgccgcccgcgaagtggacctacgacaacatcgactacatgaagggccagatgcagtcgatgggcctcgcgatcgactggtcgcgcgaaatcgcgacgtgcaagcccgactactacaagtggaaccagtggctgttcctgaagatgctcgagaagggcatcgcgtacaagaagacgggcaccgtgaactgggacccggtcgaccagaccgtgctcgcgaacgagcaggtgatcgacggccgcggctggcgttcgggcgcgctcgtcgagaagcgcgagatcccgatgtactacctgcgtatcacgcagtacgcggatgagctgctgaacgacctcgacggcctcggctggcccgagcgcgtgaagatcatgcagcagaactggatcggcaagagcttcggcgtgaacttcggcttcccgtatgaactcgacggcgagaagaagctgctgcgcgtgttcacgacgcgtgccgacacgatcatgggcgtcacgttctgcgcgatcgcggccgagcatccgctcgccacgcgccttgcccaggacaagcccgagctgctcgcgttcatcgacgaatgcaagcgcggcggcgtcgccgaggccgacgtcgcgacgatggagaagaagggcgtcgcgacgggcttctcggtcacgcacccgctcaccggcgaaccggtcgaggtgtggatcggcaactacgtgctgatgagctatggcgaaggcg

SEQ ID NO: 304436 - DNA, 866 bp, Unknown
  Bacterial polypeptide expressing nucleotide sequence isolated from the Sargasso Sea
cgatagtaaaggtaatcctcaccctgtaccaaatgagctattacccgttaaattgccggaaaatattaatttagatacaaagggaaatcctttggaccacgtgaaagattggaaatttattgaatacaaaggagaaaaattcaccagggaaaccgatactttagatactttcgtggactcatcatggtacttcctaagattttgttctcctaacgaaaaaaattacggttacaacgaagatgaaataaattattggatgccagttgatcaatatataggaggtgttgaacatgcaatacttcatttgctttattcaagattttttatgagagccataggttataaaaaagaagattttaaatttaatgagccgtttgagggactatttactcaaggaatggtttgtcacgaaacatataaagatgaaaaaggaaattggctaagacctgatgaagttgaaactaaagatggtaaaaaatattttgtcaaaaataaattgggaagtatcgtaactgtaggtccttccgagtctatgtctaaatcaaagaaaaatactatagatccagaacaaataattaaaaattatggagctgatgcagtaagattatttattttatctgatagtccacctgaaaaagatatacaatggtctgagcaaggtatggtagcttcttataagtttatacagaagttatggatgcttcacgaaaaaattaaagataaaataaatcacaagtctgataatttagacttagaaaataactttgaaagattcataaacgaaacaattagtaaatttgactacaatttagaaaaatttaattataatgttttaattgctagtatctacgaaacatataattttt

SEQ ID NO: 304437 - DNA, 872 bp, Unknown
  Bacterial polypeptide expressing nucleotide sequence isolated from the Sargasso Sea
aatgagtcaggaatacacaccgcaaaccttggaactggcgctacaagccgagtgggccgagtccggtcgtttcgccgtgcagcccgatgaggcgcgggaaaagttttactgcctggccatgtttccctaccccagtggcaagcttcacatgggccacgtgcgcaactacaccatctccgacgtgatcgcgcgctaccagcgtatgcagggcaaaaacgtgctgcagcccatgggctgggacgcctttggactccccgccgaaaatgccgccattgccaacaaggtggcgcccgccgcatggactcgggaaaacatcgaccacatgcgcgcccaattacagcgactgggctacgcctacgactgggaccgagaaatcgccacttgcgacccgcagtactaccagtgggagcagtggttctttacccaactctgcgagcgaggcctggtctacaaaaaaatggccacggtgaactgggaccccgtggaccagaccgttctggccaatgaacaggtgatcgatgggcgcggctggcgctcgggcgcagtggtcgagcggcgcgaaatcccgcaatggtttattcgtattactgcctatgcagaagaattactcgagggcttggacacgcttgacggttggcccgaggccgtgcgcaccatgcagcgcaactggattggaaaaagccgcggcgtggagctggcctttgggctggatgaaccggtagccaacctcgatcgcatcgaggtctataccacccggcccgacacgctctacggtgtgacctacgtcagtctggcggcggaacatccgattacgctggcgctggcagagaacaacaccgaactcgctgaattcatcgccgccctgcagcagg

SEQ ID NO: 304438 - DNA, 772 bp, Unknown
  Bacterial polypeptide expressing nucleotide sequence isolated from the Sargasso Sea
ggtgtcgagcatgcggtgctgcatcttctctattcgcgcttctttacccgcgcccttcgcgaaaccggctatctcgattttgacgagccattcgccgggctgatgacacagggcatggtctgccaccagacattccgtgacgaggacggcaagtggctgttcccgaccgaggtcgagcgtgacggcgagagctggcgtcatcttgagacgggcacgccggtgaccgccggccggattgagaagatgagcaagtcgaaacgcaatgtcattgaccccgagctgatcatctccacctacggcgccgataccgcgcggctgttcatgctgtcggactcgccgcccgagcgcgacatggaatggaccgagtccggggtcgagggcgcatcgcgcttcctaaaaaggctgtatcgtatggcaggcgacccgtcgcttgccgccgcttccggtccgctgccgaccgagggtgccggcgccgaactcgtgcgcgccgcgcaccgcgccgtcatggcgatgtcggaggacatcgaggcgtttcgattcaacaaggcggtggcgcagctctacacgcttgccaacgccgtcggcgatcttcgcgaggaaagccccgaggccgccagcgcacggtgtttcgccgtcgaaacgctgacccggcttttggcgccaatggcaccgcatatcgccgaggaaatgtgggaggcgctcggacatgacacgatgctggccgacagcgcctggccggaagccgacccctcgctggtcaccgaatcaagta

SEQ ID NO: 304439 - DNA, 407 bp, Unknown
  Bacterial polypeptide expressing nucleotide sequence isolated from the Sargasso Sea
attggaaactgacactttagatacctttgtggattcttcttggtactttctaagattttgttcaccattagaggcaaacaaaggttttaatattgaggatgttaattattggatgccggttgaccaatatattggtgggatagaacatgcaatattacatcttttatattcaaggttttttaccaaagccttaggttataaaaactcaaaatttgatttgtctgaaccttttaaaggtctatttacccaaggcatggtatgtcatgaaacttacaaaattaacaatgaatggaaaaatccatcagaagtacaatctgacaacggaaaggatttttttctaaaagataaacctaatcagaaagtaatagttggtccatcacaatcaatgtctaaatcaaaaaaaaata

SEQ ID NO: 304440 - DNA, 916 bp, Unknown
  Bacterial polypeptide expressing nucleotide sequence isolated from the Sargasso Sea
acttctatagaaaatcttgattggccagaaaatgtaaaattaatgcaaaaaaactggattggtaaatcttttggatcagagataagttttcctctttcaggcggaccaattattgaggcaattttaggagttaggggcagatttgggactatgcaaggagaggagctaactgcttttacaacaagaattgatactatttatggtgttacataccttgcgatatcaccaaatcatccaatttcacagaatttagctaatcaattttctgacatagatgactttattaaaaaatgtaatgaaacaaagatggctgaagcagatatggctaaggctgataagttgggcttaaaaacaaatttaaaagttaagcatccttttacaggaattgatcttgatgtttggattgccaattatgtccttatggattatggaacaggagtagtgatgggagttccagctcatgacgaaagggatcatgagtttgctctcaaatataatatagatatcaagcaagtcataaaagctgatgaagtgccctcctctgaaaaaggtgagctcattaactctgagaaatttaatggtctgacttcaaaaaatgcaatacaagatattaataacttccttgaaaaagaaaaaattggtaaaggcattgagaattttcggttacgtgactggggtgtcagcagacaaagattttggggatgtcctataccagtagtctataaaaatgatgagcctatttttttagaaaaaatagatctgcctgttgagttaccaaaaataaaagatggagagtccccaaaaccactcagtcaaaataaagatttttttgatattggtcccaatgaatcaagagaagttgatacatttgatacttttgtagactcgtcctggtattacgcaagattacagcagc

SEQ ID NO: 304441 - DNA, 835 bp, Unknown
  Bacterial polypeptide expressing nucleotide sequence isolated from the Sargasso Sea
gatacactatttggattttcttttttagcgttgtcagtagatcatcctctttccaaatattatgagaaaaatgaggattttcagaagtttaaaaaagaatgctcaaaaacaggtactacagaagagtctattgcacaggcaacaaaaataggatttaaaactaacttaactgctatcaatccgttggaaaaagactcaaaagtccctgtctttttcgcaaattttgtattaatggattatggatttggtgcagtgtttggatgtccggctcacgatcaaagagattttgattttgcaaaaaaatataaacttgaaataaaaacagttgttagacctattgataaagatgacacttataaagttgaggatgaggcttatgctggtcccggtgtaattataaactctaaatttttaaatagtttaagcgttccagaagagtcagtgaatgaaacaattaaaattcttgaagacaaaaaattaggtagaagaaaaactaattttagattaaaagattggggaatatcaagacagagatattggggatgtcctattccaatagcatatgatgaaaaaaacaatgtagtaaaaattccaagagaaactttaccagtccagctccctgaagatatagatcttaatactaatggtaatccccttgacgcgcaggagaggtggaaagaaattgagataaatggaaaaaaatgtagacgtgagacagatactttagacacttttgtagactcttcttggtattttttaagattttgttcagcacaaaatttaaaagaaccatttgataaaaacgaattagattactggatgcctgtcgatcaat

SEQ ID NO: 304442 - DNA, 364 bp, Unknown
  Bacterial polypeptide expressing nucleotide sequence isolated from the Sargasso Sea
gatgtcagaaaaatataattccagagtagttgaaaagaaatggcaatcttattggagtgatcatcaattatttgaaagtaagatagtatcagataaaaaaaagtattacatccttgaaatgtttccctatccatctggaaaaattcacatgggacatgtccgtaattatacattgggagatgtaattgcaagatacaaaagagctcaaggatttaatgtgatgcatccaatgggatgggacgctttcggactaccagctgagaatgcagcaattgaaaataaaacttcacctaaaaagtggacttacgaaaatatagagacaatgaaaaatcaattaaagcaaatgggtctttcaattgattgg

SEQ ID NO: 304443 - DNA, 951 bp, Unknown
  Bacterial polypeptide expressing nucleotide sequence isolated from the Sargasso Sea
aataattttaccacaatgggaaagagtcaattttcatgtaattgaaaaaaagtggcaaaagaattggcttaaaaaaaaagactataaaaattctaaaaagaaattttattgtttagagatgtttccttatccatcaggaaagatacatatgggacatgtaagaaattacaccattggcgatgtaatagctcgctacaaatctatgcaaggacacaatgttctacatcctatgggctgggatgcttttggtcttcctgcagaaaatgcagcaagagaaaataatttagatcctaaaaaatggacagagaaaaatattatagaaatgaagagacaacttaaaatgctaggtctttctatcgattgggatcttgaaatatctacttgtgacgaaaaatattataagcatcagcaagaattatttatagacttctataatataggactagtttctagaaaagaaacttatgtcaattgggatccagttgaacaaacagtgctagcaaatgagcaagttattgatggaaaaggatggagatcaaacgcaccagtcgaaagaaaaaaattatcccaatggttttttaatatttcaaaattctccaaagaacttcttgaagatttaaataaattagataattggccaaacaaagtaaaaactatgcagaaaaattggataggaaagtcttttggctgtgaaattgacttcaaaatagaaggtgatttgcctatcaataaaattaaatgttttacaactagaccagatactttatttggattttcttttttagctctttcaattgatcatcctgtatccaaatatttttctaagaattctgagttcatgaaatttaaagaagaatgttcaaaaacaggtacgactgaagagtctattgcacaaggtgaaaagattggatttaaaacaaatttgtttgctacaaatcctttttatgaaaa

SEQ ID NO: 304444 - DNA, 840 bp, Unknown
  Bacterial polypeptide expressing nucleotide sequence isolated from the Sargasso Sea
aagaaaattccagtttttatcgctaactttgttctaatggaatatggtttgggggcaatctttggatgtccggctcacgatcaacgggatttagattttgccaatgaatacaatttagaggttgtaagtgttgttaagccggttaatttaaaaggggaagaatttacagtcaaaaaaatcgcttttactgaaaatggaaaagttatcaattcagattttttaaatggactaacaactgaaaaagcaaaaaataaaattattgatgttttagaagaaaaaaaaattggatgcaaaaaaataaactacaaacttagagattggggaatttcacgacagagattttgggggtgcccaataccaataatctacagagaagatggtgagttaaaacctgttgatatagatagtttgccagtaaagttgccagatgttgataattttaatgagtcagaaagcactttaaaaaatattagtgaatggaaagaaacaaagtgtcaagaaacagggatgaaagcaacaagagaaacagatacttttgatactttttttgagtcttcttggtattattttagatattgtaactcgtcgagccagtacgcgtcgtcttcggtgatgacgagcagctcttcgaatttcgcgccgacgccggcgaagccgagatgcggctcgacggcccacaggcccggcactggcgcgtgctcggagcggcggtcgatcgaccacagcggcgaccagccttgctgtttcgccgcgcggccctggtcgagcagcaggttgcgcgtcgcgttcagcccgaagcgcgcgacgaagcgcggtttcgacagcttgtggatcttcgcg

SEQ ID NO: 304445 - DNA, 588 bp, Unknown
  Bacterial polypeptide expressing nucleotide sequence isolated from the Sargasso Sea
aaaaattctactaaatgtaaatctaatattcataaattttgtggaaagatataattttaaattaattgaggagaagtggcaaaatttttgggaacaaaaaaaaacttttgcaactaaaatagataaaaataaaaaaaaattttattgtcttgaaatgtttccatacccatctggaaaaattcatatgggacatgtaagaaattatacaataggtgatgttcttgctcgttacaaaaatttagagggatacaatgtactacatcctatgggctgggactcatttggtatgcctgcagaaaacgcagcaagacaaaacaatttaagcccaaaacaatggacagaatcaaatattgcaaccatgaggatgcaattaaaaaaactaggattatcaatagattgggacagagaaatatcaacttgttctcccgattactacaaacatcaacaagagttttttttagaactttatgacaaaggtttagtttacagaaaagaacaatacgtaaattgggatccagttgaccaaacagtgcttgctaatgaacaggttatagacggaaaaggttggagatcaggagcagtcgtaga

SEQ ID NO: 304446 - DNA, 374 bp, Unknown
  Bacterial polypeptide expressing nucleotide sequence isolated from the Sargasso Sea
aaaagcaccacaagaaaacgcgcaggacatcgcaattatgcgcgaagcctgtgaatctatcttgttgcttctaaaccctattacgccgcacatcgctcacgagctatggaaagtgttgggtcacagtgaagatatcgatttagcgccatggccacaggctgataaagccgcattggttgaagacgaaaagctaatcatcgttcaggttaacggtaaggtgcgcgctaagatgacaattgctgctgatgcaagcaaagagagcattgaagcatctgcgaaagaacagcctaacgttcagcaattcatcgaaggtaaaaccattcgtaaagtgattgttgtgcctggcaagcttgtaaacattgtagctaactagg

SEQ ID NO: 304447 - DNA, 898 bp, Unknown
  Bacterial polypeptide expressing nucleotide sequence isolated from the Sargasso Sea
ctgtccccagataatgaattaccagttactttaccagatgatattgattttgactcacctggtaatccacttgaaaaacatccatcatggaaacatacgacttgtcctgaaacaggaatgaaagctgtgagagagacagatactctcgatacatttgtagattcttcatggtattttatgaagtattgttcagaaaatattcaaaatcattcttttgatgatgaagatttaaattattggatgcccgttgatcagtatgtaggtggtgttgaacatgcaattcttcatcttctatattctcgattttttagtaaggcattaagtgattctggtgttggtaattttaatgaaccttttgaaggcttatttacacaaggaatggtatgtcatgaaacatataaaacaaaaacaggagaatgggtacttccaagtgatacatatgaaaaaaataatcaattttttagcttagaaacaaacgagcctctaatcaaaggcccgtcagaatcaatgtcaaaatcaaaaaaaaatgtagttgatcctgaggccatcataaatacttatggtgccgatactgcaaggtggtttatgttatctgacagccctccagggagagatatcaactggagtgactcaggtattaagggtgcttggaagttcatcaataaagtttggagtcttataaatgaaaataaagaaatctttaaaacaactattaatgacaatgaatcagaaacaaaaaactatcttaatttaaaaaaaataacccataaaaatttaagggatataaccaagagtattgagtcattccaaatgaatgttgctgttgcaaaaatatatgagatgacaaattttttgactacttttgaagctaaaaataatcttgaaaaaagtgctttaa

SEQ ID NO: 304448 - DNA, 802 bp, Unknown
  Bacterial polypeptide expressing nucleotide sequence isolated from the Sargasso Sea
ttaaattctaagggcaatccattagcaaatcatttggcttggaaaaaaactaaatataaaaaaactggtgaaagtgccacaagagaaacagacactctcgatacttttgttgattcttcttggtattttataagattttgttcaccaaaatttaaagacaaaccttttgatgaaaaagcgttcaattattggatgcccgttgatcaatatataggaggtgtagaacatgcaatattacatttgctatattcaagattttttatgagagcaattaaattaaatgataaaaaaattaaaattaaggagccttttaaaggactttttactcaaggaatggtctgtcatgaaacatataaaaatgaaaaaggtgattggttaagcccagaagaaatgaaaaaaattgataaatctaaagtaactgttggtccacctgaagctatgtcaaaatctaaaaaaaatgttgttgatcctgaaagtatgattaaaatttatggagcagatgctataagatggtttatgctttctgacagtcccccagatagagatattcagtggtcaaatgagggggtggcagcggcacataaattcattcagagagtttggttactaactagcaaaactatagaaagagaaaataagaaatcctctgctgaagatgaaaaaaatttccttgtaaaaattaataaatacttattcaaaattacaaatttaattgaaaaattgcagctaaatgtggctattgcaagcatttatgaaactgttcgttttctggaagaaaacctgaaaaaaacgttagtaaaca

SEQ ID NO: 304449 - DNA, 253 bp, Unknown
  Bacterial polypeptide expressing nucleotide sequence isolated from the Sargasso Sea
atgaataaaaaatacgatcatttagaaattgaaccaaaatggcagaagttttgggatcaaaacaaaacttttaaggttgagattgatcataacaagcctaaatactacatactagatatgtttccatacccatctggacaaggccttcatgttggtcatccattaggttatacagcgactgatatattatctcgatataaacgcatgtgtggttttaatgtactgcatcccatgggctgggatgcgtttgggt

SEQ ID NO: 304450 - DNA, 493 bp, Unknown
  Bacterial polypeptide expressing nucleotide sequence isolated from the Sargasso Sea
aaatcaaaataagttgagaagaaaaacgcatcaaacaatttcaaaggtcacagacgatatcggaagaaggtatactttcaataccgcaattgcagcagtcatggagcttgttaatgaagtttcaactttcaatgtcgatgatgaattggatcgccaagtaatcaaagaggcaattgaaagcatactattattgctttcaccgatcgttccacatatttgtcatcagctttggctggatattaatcatgatcagccgattattgatgctaggtggccaaaatttgactccagtctcctcaaaagtgaaacatcgctaattgtagttcaggtaaacggtaaattgagatccaagcttgaagttgatgcttcaattagtgaggatgaattaaaatcaatggcattgtctgacgaaaaggtagtgcgcttcattgatggaaatgagattaagaaaattatcgtgatacccgaaaagttagttaacatcgtagtttag

SEQ ID NO: 304451 - DNA, 710 bp, Unknown
  Bacterial polypeptide expressing nucleotide sequence isolated from the Sargasso Sea
gcttatgttggtgatggtataatggttaattcctcttttttagacggattaaatactccaaatgaagctatatttaaagcaattgctaaaattgaggaaataaagtctggcaaaaaaaaaattaattttagattaaaagactggggaatatctagacagagatattggggctgtccaatacctattgcctatgatgatcaaggaaattatgaaactgtcccggaagatcaattgccaattaaactgcctgaaaatataaatcttaaaacgagaggaaatcctttagaccatcaagaagaatggagaaaaattacaatcaggggaaaaaaatataaattagacacagatacactcgatacttttgtagactcatcttggtattatcttcgtttctgctctccgaataataagtcttacgggtatgatctcgaggaaattaaatattggatgccggtggatcagtatattggtggtgttgaacacgcgatattgcacttattatactctagattttttatgttggcactcggtcataagaataaaaattttatatcaaaagaaccatttgatggattattcactcaaggtatggtttgccatgaaacatataaggataagaataataattggttaagtcccaacgaagtgttttctgaagatggaaagaatttttttaaggttagcaataaaaaagaaaagattattgtcgg

SEQ ID NO: 304452 - DNA, 836 bp, Unknown
  Bacterial polypeptide expressing nucleotide sequence isolated from the Sargasso Sea
attaagtgcttcacaactagaccagatactttatttggtttctcgtttttggctctatctgttgatcatccactatctgaactgtacaaagatgatgtggaattcaaagaatttaaggatttatgctctaagactggtactacagaagagtcaatagctaatgcagaaaaaataggatttaaaacaaaacttttggcaaaaaatcccttagataaaaatcaaactgttcctgtttactttgcaaattttgttttaatggattatggatttggggccgtgtttgggtgtcccgctcatgaccagagggactttgattttgcaaaaaaatataatcttaagattaagacagttgtaaaaccagtgaatgaagataataattttactgttacaaaagaagcttatacaggtactggtttaattatgaattcagaatttttaaacaatcttaaggttcctgatgaatcgattattgaaacaattaaaattttagagaaaaaaaatttaggtaaaaaaaaaataaattttagattaaaagattggggtgtttcaagacagagatattggggatgcccaattccaataatatatgacgagaaaggaaattataaaaccgttccagaaaaagatttaccagtcagacttccacaaaatattgatttaaattctaaaggaaatcctctttctgcagttgaagagtggaataaaattgaaatagatggaaaaatttatactcgagaaactgatacattggatacgtttgtggattcttcctggtattttttaagattctgttctccaaaaaataaagctgagccattcgatatcgaggatataaa

SEQ ID NO: 304453 - DNA, 307 bp, Unknown
  Bacterial polypeptide expressing nucleotide sequence isolated from the Sargasso Sea
aatggatagatataattttaaaacagtggaaaaaaaatggcaagataaatggagtttatctggtacgttcaaatctaaaatagatcgttcaaaaaaaaaattttattgtcttgagatgtttccctatccttcaggcaaaatacacatgggacacgtcagaaactatacaataggggatgtattatctcgatataaatcacttataggttttaatgttatgcacccaatgggatgggatgcatttggaatgccagcagaaaacgcagctagagaaaataatttagaccctaaagattggacaaataaa

SEQ ID NO: 304454 - DNA, 727 bp, Unknown
  Bacterial polypeptide expressing nucleotide sequence isolated from the Sargasso Sea
aagaagattggaaaaaaacaaattaattttagattaaaagattggggtgtttctagacaaagatattggggatgccctattccaatggcatacgatcttgatggtaatgtaaagcaaattcccaaaaaagatttacctgtaaaattgccagaaaatgtaaatctcaattcaaaaggtaatccattagacttagaaaataattggaaaaatataacaatagatggaaaaaagtatattagagaaacagatacattagatacattcgtttgttcatcttggtattatttaaggttttgctcaccgaaagagacaaaatatggatttaatcaagatgacatagactattggatgccagttgatcagtatattggtggggtggaacacgcaattttgcatcttctttattcgcgtttttttatgaaagcaatcggctacgaaaataaaaatttcaaatttaaagaaccatttgagggattgtttactcaagggatggtttgtcatgaaacatataaggataaaaataataattggataagtcctgatgagatagaaacaattaatggtaaaaaaatgcttaaaaataaaccttctgaggaggttatggttggcgcatcagagtcaatgtcaaagtcaaaaaaaaatactgttgatcctgagaaaataattgaaatttatggggctgatgcggcaagattatttattttatcagatagcccacccgaaaagg

SEQ ID NO: 304455 - DNA, 898 bp, Unknown
  Bacterial polypeptide expressing nucleotide sequence isolated from the Sargasso Sea
atgtttccttacccatctggaaaaattcacatgggtcatgtgagaaattatactattggtgatgttttggcgcgttataaatcactgcttggatataatgtattgcacccaatgggatgggactcatttggaatgccagctgaaaatgcggctaaacaaaataatctaaatcctaaaaaatggactgaagaaaatattcaggttatgaaaactcaattaaaaaaacttggattatctattgattggaatagagaaatttcaacttgttctcctgattattataaacatcaacaaaaaatatttcttgaactatttgataagggtttagtttatagaaaagaaagttacgttaattgggacccagttgataaaactgttcttgcaaatgaacaagtaattaatggaaaaggctggcgatctggagcaatagtagaaagaaaaaaattaaatcagtggttttttaatatttctaaattttctgaagaattacaagaagaccttaaagatttagatcattggcctgaaaaagttaaaataatgcaaaaaaactggataggtaagtcatttggttgtgaaatagattttaaaattgaaggttctaaaaaaattgaaaaaataagatgttatacaacaagaccagatactttatttggattttcatttttagctttatctgttgatcatccactatctaaattctatgaaaaagataaagattttattaaatttaaaaatagttgttcgaaaactggtactactgaggaatcgatagcacaggcagaaaaaataggatttaaaacggaactccttgccataaatcctctagatgagaaaataaaagttcctgtttattttgctaattttgttttaatggattatggatttggtgctgtcttcg

SEQ ID NO: 304456 - DNA, 691 bp, Unknown
  Bacterial polypeptide expressing nucleotide sequence isolated from the Sargasso Sea
atgcaggagtacatcccgaaagaaattgaagcaaagtggcaaaaatactgggaggatcttaatttgttggattttgattctgattctgataacccaaaattttatatgttaactatgctcccatacccttcaggagatttgcatattggtcattggtatgcaatggctccttctgattgttatgcccgatatatgaaaatgaaaggatatgaagtattttttccaataggctttgatgcttttgggctcccagcagaaaatgcagcaataaaaaacaatttacatccaaaatcatggacttatgacaatatcaagcgcatgcaaaagcaacttcgatcaatgggaaatatgtttgcttggaaaaacgaggtaatatcatgtgatcctgaatattacaaatggagccagtggtttttcctcagaatgttggagaaagatttagcatacagggagtatgcacctgttgattactgtaataattgtcagactactctagcacgggaacaggtatggggtgaggacagggtatgtgaacgctgtgaaaatcctgttgtaaaaaaagatttaaatcaatggaaattacggatcaccaattacgcagatgaactgcttgattttgagggactggactggccagaaagagtgcgttcgatgcaggggaactggattggacgcagtgaaggagttgagt

SEQ ID NO: 304457 - DNA, 898 bp, Unknown
  Bacterial polypeptide expressing nucleotide sequence isolated from the Sargasso Sea
tacaaaactatcttctggcgaagaagctattagagaaactgatacacttgatactctcgtagattcttcttggtattttttaagattttgttctcctaaatataaaaaatatggatatgaaattaaggatatcaattattggatgcccgttgatcaatatataggcggtgttgaacacgcaattttacatttactttattcaagattttttatgagagcacttgcttttaagaataaaagttttgattatagtgaaccatttgaaagcttatttactcaaggaatggtttgtcacgaaacctataaaaatgaaaataatcagtggttatatccagatcaaatagaaaaagattctgaaggatattttgtaaccaaaaaagatagaaaaaaggtgatagtaggaccctctgaatcaatgtctaagtcaaaaaaaaatactatagatccagaagaaatgattaatatctatggcgccgattcaattagatggtttatgttatcagacagtccacccgaaagagatgtgcagtggtcgcaggaaggagtctctgcagcttttaaatttatccaaaaactttggaaattaaataatgatatcttgagtagaaaaaactctaattcaaactctgaagatattgttttaaagaaagctgtgaataaaacagtttataacgtaaccaaaaacctagataattttcagtacaatgttgtaatagctaatatgcatgaaatatataatttattttatgatcatgttgttaataataggacctcagataaaacactaaaaaatgaatgggaaaaaataataatgttgttaatgccacttacgccacatttagctcatgagtgttgtgaaaaaataaataaaaaattttactggcctaaatatgaccca

SEQ ID NO: 304458 - DNA, 199 bp, Unknown
  Bacterial polypeptide expressing nucleotide sequence isolated from the Sargasso Sea
atgtctgcaaaatataatccaaaaataattgaaaaaaaatggcagtcgtattggtctgaaaataaactttttgaaagtaaagtaattaaagacaaagagaaatattacattttagaaatgtttccttacccatcaggtaaaatacatatgggacatgttcgcaattatactttaggggatgttattgccagagtttaaa

SEQ ID NO: 304459 - DNA, 795 bp, Unknown
  Bacterial polypeptide expressing nucleotide sequence isolated from the Sargasso Sea
tcgagaactgatactttagatacatttgttgactcttcatggtattttataagattttgttcgcctagacttaaggacaaaccctttgatgaaaaatcttttagttattggatgcccgttgaccaatatatcggtggtattgaacacgcaattcttcatcttctatattcaaggttttttatgagagcaatcaaattgtgtaatgaaaaaattgaagtaaaagaaccctttaagggactttttacacaaggaatggtatgtcacgaaacctacaaaaataaggatggtaaatggttaagtcctgatcaaattcaaaaaacaaaagatggattttcttcaaaaattgatggttctaaagtaaaagttggtccatctgaggcaatgtcaaaatcaaaaaaaaatattgttgatcctgaaagcatgattaaaatttatggagctgatgctgtaagatggtttatactttcagatagtcctcctgagcgtgatgtacaatggtcgactgaaggtgtttcggcagccaataaatttatacaaagaatatggagtttaaacagtaaagttctggaaaaaaaggaggaagaatctgatcctactgaagagaaaaaactgctttcaaattttaatgaatatctatttaaaacttctgacttgattgaaaaatttcagttaaatgtagccatagcaaaaatacacgaattaacaaatcttttagaggataatttgtttaaaaaattaagtaaaaaaacactattggaaacacaaataaaatttataaaattaatgatgcctttt

SEQ ID NO: 304460 - DNA, 322 bp, Unknown
  Bacterial polypeptide expressing nucleotide sequence isolated from the Sargasso Sea
tttgcttaaagtgagatataattttctagaaatagaaaagaaatggcaggaatactggaaaaaaaatgaaacttataaagttggtttttcttcaaaacccaaattttatgttctggatatgttcccctacccgtctggagcaggtcttcacgttggtcaccctctaggctacattgcaagtgacatatactcaagatttaaaagacataaaggatataatgttttacatccacaaggatatgattcatttggacttcctgcagaacaatatgcaattaagactggtcaacatccaaaaaagactacgtctgaaaatatagaa

SEQ ID NO: 304461 - DNA, 815 bp, Unknown
  Bacterial polypeptide expressing nucleotide sequence isolated from the Sargasso Sea
gtttgctctcaaatataatatagatatcaagcaagtcataaaagctgatgaagtcccctcctctgaaaaaggtgagctcattaactctgagaaatttaacggtctgacttcagaaaatgcaatccaagatattaatagcttccttgaaaaagaaaaaataggtaaaggcattgagaattttcgattacgtgactggggcgtcagtagacaaagattttggggatgccctataccagtagtctataaaaatgatgagcctatttttttagagcaaacagatctgcctgttgagttaccaaaaataaaagatggagagtccccaaaaccactcagtcaaaataaagatttttttgatgttggtcccaatgaatcaagagaagttgatacatttgatacttttgtagactcgtcctggtattacgcaagatttacagcagcagataataataataaagctttagatgaaaattcagcatactggcttccagttgatctttatattggcggtattgaacatgctatcttgcatcttctttattcaaggtttttccataaagcgatgagagatattggcttagtggagggtgatgagccttttaaaaaattacttactcaaggaatggttcttaaagatgggtctaagatgtcaaagtcaaaaggcaacacggttgatccacaacaatatattgataagtatggtgcagacacgatacgtctttacatgatgtttaccgctcctcctgagcaaagtttagagtggtctgaaactgctgtagagggagcttttagattcttaaaaaagctttggagcttta

SEQ ID NO: 304462 - DNA, 850 bp, Unknown
  Bacterial polypeptide expressing nucleotide sequence isolated from the Sargasso Sea
caatcctttgaatggtgatcgtgttccagtatgggttgccgaatatgttcttgcaggctatggcaccggagcgatcatgggagtccccgctcatgatcaacgggattttctttttgcacgacgctatgatattccgactccagtagtcgtggttccagaggatcttgatcagccaattcctgaaggcagcgaattggaagaagcactattggtcaaggaaggaagtaagatggtcaacagcaatgaattcgatggcctagtgtggcctgaagggttcgaccgcgtagtccaggctattgaagacaaaggaatcggtaaaaagcaggtcaactatcggttgcgggattggctgatcagtcggcaacggatgtggggcactcccattccagtgatccattgtaaaaattgtggaaccgtccccgttccttatgaggatcttccggtgatgttaccggatgatgctgaattcaaacctaccggggaaagtcccttgaagtatcatccggcatttctcaataccgaatgtcctaaatgcggaggaagcgctgaacgggaaacggatacgatggatacttttatctgctcttcatggtattactacggctacgtttctccgtattggaaaaaaggcgaaaagctgaaaaaggaagatcttccctgggatccagtggcgattcgaaaatggtgtcctgtaaaccagtacaccggagggatagaacacgcgacgatgcaccttctctattttcgatttttcaccaaggtgcttgcagacatgaaactttttgatttcagggaacctgcaatgcgcctttttaaccagggcatgatccttggcgtagatcacgaaaag

SEQ ID NO: 304463 - DNA, 766 bp, Unknown
  Bacterial polypeptide expressing nucleotide sequence isolated from the Sargasso Sea
ttttgattttgcaaaaaaatataaactaaatatcataactgttgtaaggccaacaaatgaaaaagataattttaatgtctcaaatgaaccttacgttgattcgggtatattgattaattctaaatttttagatgggttatctgttcctgatcaatcaataccaaaaactattgattatttagaaaaaaataatttaggaaatagaaaaacaaattacagattgaaggattggggaatatcgagacaaagatattgggggtgtcctattccaattgcatatgataaaaataataatgtaattaaaattccagaaaaagaccttcctgtaactcttcctgaaattgaaaaattaaatactaatggtaacccattagattcggaaaccaaatggaaatctgtaataattgacggaaaagaatgtttgagagaaacagatacgcttgatacttttgttgactcatcttggtactttttaagattttgttcatcaaatgatgaaactaatccttttgatgaagaagaaattaaatattggatgccagtagaccaatatattggtggtattgagcatgcaatattacatttgttgtattcaagattttttgtaagggcaattaatttagacaacaaaaagattgatctaaaagaacctttcaaaggattatttacacaaggtatggtttgccatcaaacatataaagatagtaataataattggttaagccctgacgaggtattttctaaagataataaacaattttttaat

SEQ ID NO: 304464 - DNA, 873 bp, Unknown
  Bacterial polypeptide expressing nucleotide sequence isolated from the Sargasso Sea
aatgtgttctaaaactggaactactgaggaggctatcgcggttagtgaaaaaattggttttcaaaccgacttgaaagccattaatccattaaatccaacccaaaaagtcccagtatattttgcaaattttgttttaatggattatggatttggtgcagtatttgggtgtcctgcacatgatcaaagagattttgattttgcaaaaaaatataatcttgaaattaaaactgtcgtaagaccaaataatgaagatgacaattataaagtatcgggtgaagcctatgctggtcctggagtattaataaattcaaattttctaaatggtcttaaggcgccagatttatccgtaaaaaaaactatagaaatattggaggaaaggaaattaggaaaaaaacaaattaattttagattaaaagactggggtgtatctagacaaagatattggggttgtccaattccaattgcttatgatgaagatggagaaccttatccaattcctgaaaaaatgcttccagtaaaacttcctgaaaatgttgatcttaacgtaaagggaaaccctttagataatgaaaaaaactggaaagaaataaaaattgatggaaaaaaattaaccagagaaacagatactcttgatacgtttgtgtgttcatcttggtattatttaagattttgttctcccattgagaaaaaatatggttttaataaagaggagattgattattggatgcctgttgatcaatatataggcggagttgagcatgctattctacatttactttattcaagattctttatgagagctatttcttatgaaaacaaaaattttaatttattagagccattcaatggtctgtttactcaagggatggtctg

SEQ ID NO: 304465 - DNA, 804 bp, Unknown
  Bacterial polypeptide expressing nucleotide sequence isolated from the Sargasso Sea
tttgaaaaatttaaaaaacttctgttctaaaactgggacaacagaggaatctatatcacaagcagaaaaattaggatttaaaacagatttgttagctataaacccacttaatgagacagaaaaacttcctgtatattttgcaaattttgtcctaatggactatggatttggtgcagttttcgggtgtccagctcatgatcaaagagatcttgatttcgcaaaaaaatataagcttaaagttatgccagttgtcaagccggtagataaacaggattttgaaattaaaaatcaagcatttacaggtagcggaattatatttaactcaaaatttttagacggattaaaagttccagaggaatccattcataaaactatagaaattctagagaaaaaaaagattggaaaaaaaactattaattttcgacttaaagattggggtgtctctagacaaagatattggggttgtccaataccaattgcatataataaaaaaaatgaaataataaaagtacctctcgaaaagttacccataaaactccctgagaacattaatctaaacgttaatggtaatcctttagatcatcaaaatgaatggaaaaaaataaatattaatggtgaagaatgtaatttagaaactgatactttagatacttttgttgactcctcttggtattttttaagattttgctcaccgcaaaattctaaagatgggtttactcaagaagatttagattattggatgccagttgatcaatatattggaggggttgaacacgcaattctacatttactttactcaagatt

SEQ ID NO: 304466 - DNA, 901 bp, Unknown
  Bacterial polypeptide expressing nucleotide sequence isolated from the Sargasso Sea
cgacggaaaggttggagatcaggtgcagttgtagaaagaaaaaaattaaatcaatggttttttaatatttctaaattttcagaagatctacttgatgaactagactctcttgagagttggccaactaaagtaaaaacaatgcagaaaaattggataggcaagtcatttggatgtgaaatagattttaaaattgaaggaaatttaccgataaaaaatataaaatgttttactacaaggccagatacactttttggcttctcttttttagcactttctgttgatcatgaaatctcaaaatattttgctgaagatgaaagctttcaaaaattcaaagacgaatgtttgcatactggaacaacagaagaggcaattgccattggagataaaattggatttaaaactaatcttttagccataaatccattagatacttctaaaaaagtaccagtattctttgctaattttgttcttatggattatggatttggagcagtgtttgggtgtcctgcccacgatcaaagagactttgattttgcaaaaaaatataatcttgaaattaaaacagttgttaaacctaaagaaaaaaatgatgattttaaagttgacaaagaggcttatcctggaccagggattataataaattcagaaatattaaatggtcttgatgcccctaaaaaatctgtattagaaacaataaatattttagaaaaaaaaaatttaggaaaaaagaaaataaattttagattgaaagattggggtgtttctagacaaagatattggggttgtccaattccaatagtttacgataaggaagataatgcaattccagttccaaaaaaaatgttgccagttaaactaccagaaaaaattaatttgaatacaaaaggaaaatccctttgaa

SEQ ID NO: 304467 - DNA, 766 bp, Unknown
  Bacterial polypeptide expressing nucleotide sequence isolated from the Sargasso Sea
gatgcaaacaacgacgactccccgttcgatcgctctgctgtagattattggatggatggcggggttgacctgtacataggggggatagaacacgctgtcatgcatctactctatgctagattcttcacaaaattcaccagagatgctgggatgaacgaggtcggggaaccattcggaaggttggtctgtcaggggatgctcaatgctcctgccccgtactgctccgattgcaattctgagtaccatgttgactacttcgaatccgcttgtccatcctgcggaaaagaactatccagcagatcagcaaaaatgagcaaatctcttggaaacacagttagccccgaagagatgatttccagattcggagcggatacggtaaggctgttcattctattcggtgctaatcctgaggcaggaatggactggtctgatagcgccttggaagctaaccatcgccagatcaactctcttttcgacgccatcgatgaagcaatggcactatccgacgctccttcgaaaattgatagatggctgttatcgagaatgagggctagtcagaatagatggatcgaagcaatgtccgatgtcagtctaagggagggggtgatgatcagtcacttcgaaatgctatcggattggaattggtaccttcgaagagggggtttggatagaactactgcaatgaaattcttagagggatggattccaatgctcgcccccgcaacacctcacattgcagaagaaatctggaataagttcggcggaa

SEQ ID NO: 304468 - DNA, 755 bp, Unknown
  Bacterial polypeptide expressing nucleotide sequence isolated from the Sargasso Sea
atttctagacagagattttggggatgtcccataccaattgcttatgatgaaaatggaaatactattaaaattccaaaagaaaaattacctatcaaattgcctgaaaaaattaatctcaatgtaaaaggaaatccattagatcagcaagaagaatggcagttcattgaaattgatggaaaaaaatacaagaaagaaaccgatacattagatacttttgtagactcttcttggtattttcttcgattttgctcaccgaatgaaagtagctatggatataatattgatgacattaattactggatgcccgtagatcaatatataggtggtgttgaacacgcaatattacacttactatattcaagatttttcatgcaggccataggatataacaaagcagaatttaaatttatagaacctttttcagggctattcacgcaaggaatggtttgtcatgaaacatataaagaccaaaatggtaaatggttgagccctgaggaagttgtgtcaaatgatagaaaagaattttttttaaaaaaagatagaagcataaaagtaaaaattggaccatcggaatctatgtcaaaatcaaaaaaaaatactatagatcctgaaaatatgattacaaattttggagcagatgctgtaaggctcttcatgttatcagatagtccaccagaaagagatattcaatggtccgaacaaggaatgaacgcagcctacagatttataaataaactttggttacttcatcaaaa

SEQ ID NO: 304469 - DNA, 868 bp, Unknown
  Bacterial polypeptide expressing nucleotide sequence isolated from the Sargasso Sea
acagaaaaaaacattaaagaaatgaaaagacaattaaaaatgttaggattgtctatcgactgggaccttgaaatatcaacttgtgatgaaaaatattataagcaccaacaagaattgtttatagatttttataacatgggtctggtttcaagaaaagaaacttatgtaaattgggatccagttgagcaaacagtgcttgccaatgaacaagtaattaatggaagaggctggagatcaaatgcaattgttgagagaaaaaaattatctcaatggtttttcaatatttcaaaattttccgaagaacttcttgaaggtctaaatcaattaaaaaattggccagaaaaagtaaagactatgcaaaaaaattggatcggaaaatcttttggttgtgagattgattttaaaatagagggtaatttacccattaaaactattaaatgttttacaacaagacccgatactttgtttggtttttcttttttggctgtttcagtagatcatcctctttcaaatcatttttctaataattctcaatttaagcaatttaaggaagaatgttctaaaacaggtacaactgaagaatctattgctcaaggtgaaaaaattggatttaaaacagatttgctcgcgattaatcctttgaatgagaaagaaaaagtgccagtgtattttgcaaattttgttttaatggattatggctttggagcagtatttggatgcccagcacatgatcaaagagatttagactttgcaaataaatacaatttaaaagttaaaacggtagtaagacctttggagaaagataataattttaatgtacaaaaagaagcttatacgggaccaggggtaattattaattctgattttt

SEQ ID NO: 304470 - DNA, 846 bp, Unknown
  Bacterial polypeptide expressing nucleotide sequence isolated from the Sargasso Sea
tacagacctcagatccgaaatattatcgttggacgcaatggattttccttaaattatttaattcttattataatacttctaaagataaagcctttccaatttcagaattgatttcagattttgaaagagaggggaatcataaagtatttgcccattgtgaaaaagatactcagttatttggagcaaatgaatggaatgccttttctgaagtagaaaaagaaaagattttactaaaataccgtttgacctatttatctaaaacgcaagttaattggtgcccagctttaggaactgttttggctaatgatgagatcgttaatggtgtttcagaacgcggggggcatcctgttatcaagaagaaaatgacacagtggagtatgcgaattagtgcttttgctaatcgattattagaaggtttagaccaagtcaactggccagactcactaaaagaaatgcaaagaaactggattgggaaatctattggcgccagtattttttttcaaattaaggataacaaaaataaaatagaggtttttacaacccgacctgatactattttcggagtaacctatttgacacttgctccagagcatggattggtcaaatcaataactacgcctgagaaagaaaaagaggtcgaagattatattgcaaaggtttcaactaaatcggaaagggaaaggcaggccgaagtgaaaaatattagtggtgtttttactggaggatatgcgattcacccgttcactaaagttaaaattcctatttggattggggattatgttttagccagttatggaacgggagcagtaatggctgtccctagtggggatcaaagaagattttgat

SEQ ID NO: 304471 - DNA, 859 bp, Unknown
  Bacterial polypeptide expressing nucleotide sequence isolated from the Sargasso Sea
tactattggagatgtaatagctcgttacaaatacatgaaaggtttcgatgttttacatccaatgggatgggacgcttttggtttgcctgcagaaaatgcagcaaagataaataatctaaatcctaaagattggacgcgagaaaacgtaaaagtaatgaaaagccaattaaaaatgcttgggttgtctattgattgggatctggagatatctacctgtgatgaagattattacaaacatcaacaagaactatttattgatttctataatcaaggattagtttcaagaaaagaaacttatgttaattgggatcccatagaaaaaactgttttagccaatgaacaagtaataaatggaaaaggttggagatcaaatgcagttgtagaaagaaaaaaattatcacaatggttttttaatataactaaattctctgatgagcttttaaaagatttagaaaaattatctggatggccagaaaaagtaaaacttatgcaaaaaaattggataggaaaatctattggctgcgaattaaattttaagttagctggtcaaaaaaatagtctatctatttttactaccagaccagacactatttttggtgcaagttttattgcaatatctgtagatcatgaaatctgtaaaagttttattaaaaatcctgattttgaaaaatttaaagataaatgttcaaaaattggaacaacagaagaagctttggcgaatgcagaaaaattagggtttaatacaaatctttttgctgaacatccttttattaaaaataaaaaaatacccatttatgctgcaaactttgttttaatggattatggaaaaggagctatattttggctgtcctgctcatga

SEQ ID NO: 304472 - DNA, 945 bp, Unknown
  Bacterial polypeptide expressing nucleotide sequence isolated from the Sargasso Sea
gtggttcttgtccaaatgtggaattgttcctgaagataaagacagcttacctatcttattgcccaaaaaagctgatttctcaaaaccaggtaacccactagatcgtgattcaacctggaaaaaaacgaaatgtccacaatgcaagatggaaagcaagcgcgaaactgacactatggatacatttgtagatagctcgtggtattatgcgcggtttactaatccggcggctttaacgccaacagacgaagctaacacaaattattggatgaatgtggatcagtatattggtggggtggaacatgcaatattacaccttctttattcgcgtttttttgcacgagctatgaacattactaatcatcttccaaaaaaatctattgagccattctctgccttgttcacacaaggaatggtttgtcatgaaacttttagttcctatagcttaaaaattagcgagaattctgaacaatttttgataggtcaagaactccttggcgagacgactaatgctaaatcctacgtcaaaggagtcattaacgataatgaactaattgtaaaaaaaccaagaaagccatttaaaattggtgaacgaatctttgtacctggtacaaaaataggcgctattataaaagctactgctgaagaatggttttcaccggaggaagttaccagcagaagcttggaaatctctgacaagagtaaagtggtaataaaaactggattgcccgttgaaataggtaattcagtaaaaatgtcaaaatcaaagaagaacgtggtagacccgatcgacataattgaacaatatggggcagatactgctcgatggtttgtcatgtccgatagcccgccagatagagacgttgaatggaccgaagctggcatcgaaggagcatggcgacatgtccaaaaagtttggagagtctctcacgatatttttgctcaaat

SEQ ID NO: 304473 - DNA, 880 bp, Unknown
  Bacterial polypeptide expressing nucleotide sequence isolated from the Sargasso Sea
gatgccggttgatcaatatatcgggggtatagagcacgcaattttacatttgctttattcaagattttttatgcaggcaactaagttaactaataataagataaaagatgaggaacccttcaagggattgtttacccagggaatggtttgccacgaaacatacaaggacataaatgggaaatggataagtccagaggaagtagaaaaaaaggatgatggtaaatttctaaaaaaatctgacaaatctatagtttctgttggcccttcagagtcaatgtcaaaatctaaaaaaaacataatagatcctgaaacaatgattaaaagttacggagctgatgcagttagatggtttatattatcagatagtcctccagaaaaagacgtgcaatggtcaaaccaaggggtaagtgcatcatataagtttttacaaaagatatggaatttaaattctaaaatagttactcgatcagatcaaaaaccttcttctgaagcggaagaaaagcttaaaactgaatttaatagttatttatttaaaattactaatttaattaataattttcagttaaatgttgctgtagcaaatgtatatgaaatctaccgtttaataagctctagtttagaaaaaaaaatcagcaataagtgttttaaaataataatgattgattttatgaaaattttaattccttttactccacatcttgcaagcgagtcattggagatgcttgatcaaaaaaacattgataattggcctaaattagatgaaaaattaattaaaaaacaaaaagttaaaattgctatacaaataaatggtaaaacaagagaaataatcgagatagaaaaagatctatcagaggaagtagctgtaaaagaaagtaaaaaa

SEQ ID NO: 304474 - DNA, 669 bp, Unknown
  Bacterial polypeptide expressing nucleotide sequence isolated from the Sargasso Sea
tatgcaggagtatatcccacaggaaattgaagcaaagtggcaaaaatactgggaagagcataacttgctggattttgattttgattcagaaaatccaaaattttacatgctgaccatgcttccctatccttctggagatcttcatattgggcactggtatgccatggcaccatctgactgttatgcccgttttatgaaaatgaaaggacacgaagtttttttccctataggcttcgatgcttttggactgccagctgaaaatgcggccatcaaaaacaatattcatccaaagtcatggacgtatgaaaatatcaaacgcatgcaaaatcagcttcgttcaatgggaaatatgtttgcctggaaaaacgagattgtctcatgtgatccagaatattacaaatggagtcagtggtttttcctcagaatgcttgaaaaagatttggcttacagagagtatgcacctgttgattattgtaaccattgtaagacaactctagctcgggaacaagtttggggtgaggacagggtatgcgaacgttgtgacaatcctgttgtaaaaaaagatttaaatcaatggaaactacgcattaccaactacgcagatgaactgcttgattttgatggactggattggccggaacgagtgtgttcaatgcaagaaaactggat

SEQ ID NO: 304475 - DNA, 583 bp, Unknown
  Bacterial polypeptide expressing nucleotide sequence isolated from the Sargasso Sea
atggatagatacaacttcaagatagttgaggaaaagtggcaatctaaatgggaatcggaaaaaacgtttgttgttaaaactgatttaaataagaaaaaattttattgcttagaaatgtttccatatccatcaggaaaaatacatatgggacatgtaagaaactatacattgggcgatgtgctttcaagatttaaaatgatgaatggttttaatgtactacacccaatgggctgggattcttttggaatgcccgcagaaaacgccgctagagaaaataatcttcatcctgttgaatggacaagggaaaatatatcaaatatgaaagatcaattaaaaaagattggtttatcaattgattgggaaagagaaatttcaacttgtgaaccagaatactaccgacaccaacaagagttttttctagaactttatgacaaaggattagtttacaagaaagaaaattacgttaactgggatccaatagacgaaactgttttagccaatgagcaagtaatagatggaaaaggttggaggtccggagcacaagtagaaagaaaaaaattaaatcaatggttttttaatattt

SEQ ID NO: 304476 - DNA, 778 bp, Unknown
  Bacterial polypeptide expressing nucleotide sequence isolated from the Sargasso Sea
attatcaaaaaaagatgttaagctggccgcttttatcaaagaacaaagtaaaggctctacagctgaatcagacataactaaggcagaaaagttaggttacaaaacttcatttaatgttttcaatccaattacaaatgaaaatattcctatatggataataaattatgtcctaatggattatggaacgggagctattatgggagtccctggacatgacgagcgggattttgaatttgctgaaaaatataaaattcaaatcaaacgtgtaattgaatctgaagaaccacttccttactctggagatggcaggttaattaattcccaagaattaaataatttaaatgttgatgaagcttttaaaaaaatatcgaaaatgttgagtgataatcattcgggaaaagaactctatcaatacagactaagagattggggtgttagcagacaaagatactggggatgtccaattccaattgtctataaaaatggagaaccaagacccgttcaaaatctgcccgttgaattacctttaggtgataaagatcataaaccactagatcaaaatgaagactttaaaaatattgctgatggagaaataagagaaacagatacttttgacacattttttgaatcctcttggtattttgctcgatacacatctgcagataataaaaacaaaatttttgatgagaatactaactattggctgcccgttgatctatatataggtggagttgaacatgcaatattgcatcttctatatgctcgtttttttcataaa

SEQ ID NO: 304477 - DNA, 925 bp, Unknown
  Bacterial polypeptide expressing nucleotide sequence isolated from the Sargasso Sea
atgtgataaagaatattacaaacatcagcaagaattatttatagatttttataatcaaggtttagtttctagaaaggaaacttacgttaattgggatcccgttgagaaaaccgtgttggcaaacgaacaggtaattaatggtaaaggatggcgatctaatgcagtcgttgaaagaaaaaaattatcacaatggtttttcaatatcactaaattctcccatgaattattgaatgacttagacagtttacctggatggcctgaaaaagttaaacttatgcaaaaaaattggataggaaaatcgtatggttgcgagataaattttaattatgaaaataaaaaaaaaattacagttttcacaacaagaccagacacaatttttggagccagttttattgcactttcagtagatcatcctttaagtaaaaattttactaataatgcagaatttttaaatttcaaaaaagaatgcgataaagccggaactacagaggaagctctggctaatgctgaaaaaattggtttcaagacgaacattagtgttgatcatccatttataaaaaataagaaattgccagtttattttgcaaattttgttttattggattatggaactggtgcaatttttggttgtccagctcatgatcaaagagactttgaattcgctactaaatatgatcttgaaattataagggtcgtatcagacggaaatgataacataaaattaagtgaggcatacactggtaatggtaaaataataaattcagagtttttaaacgggcttgaaattgatcttgcaaaagaaaaaattattaaaacaatagaggaaaaaaattttggtaaaagaaaaacgttatttagattaaaggattggggtatttcaaggcaaagatattggggatgtcccattccaatgctttatttagat

SEQ ID NO: 304478 - DNA, 883 bp, Unknown
  Bacterial polypeptide expressing nucleotide sequence isolated from the Sargasso Sea
aatgtttttagatttctataaggcaggaattgcctataaaaaagagacaattgttaattgggatcctattgaacagacagtattagccaatgaacaggttgttgatggacgtggatggcgttcaggtgcagaagtagaaaaaaagaaaatgaaagggtggtttcttaaaatttctgattttgctgaagacttactcagcgaaatagataatttaaaggaatggcctgacagagttaaagttatgcaaagaaattggattggtaaaagcaatggtgccactataaatttctcaataaataattcagacgataaagtcgaaattttcactactagaccagatacaattttcggcgcaacatttattgctatttcacctcaacatccattgtcattaaaaattgccataaatgacaataaagcaaaaaattttataaacctttgtgaaaggcaatctaacaaagctgaagatatagaaaaagctgataaattaggttatgaaacaagctttactgtctcacatccctttaaaaaagaaacaaatttaaaaatctatattgcaaattttatattgatggattacggaactggagctatttttggatgtccagcgcatgaccaaagagattatgattttgctagaaaatactctttagacattatacctgtagtagaaaatgacaatattcttccttacacaggagatggctcacacattaattccgattttttaaacggattagatacaaaggaggctattgacttaagtataaaggaattgcagaaattaggaattggaaaagaaactgtaacatatagaattcgagactggggagtatctagacaaagatattggggggtgccctatacccatagtattttgtaa

SEQ ID NO: 304479 - DNA, 910 bp, Unknown
  Bacterial polypeptide expressing nucleotide sequence isolated from the Sargasso Sea
atgatcgaaaaatacaatccaaaagttgtagaacaaaaatggcaaaagatttggcaggataaaaaaacttttgaggttgaaattgatcaatctaaacagaaatattatatcctcgaaatgtttccttacccatcgggtaagatccatatgggtcatgtaagaaattacacacttggtgatgttgtcgccagatacaaacgtgcccagggatttaatgtaatgcatccgatgggatgggacgcttttggtttgcctgcagaaaatgcagcaatgcaaaataaaacatcaccaaaaatatggacatatgaaaatattgagcaaatgaaaaagcaattgaagttaatgggattctcaattgattggtctagagagtttgcaacttgtgatgaagattactatttccaacaacaaaagctttttagaatactatatgaaaatggtttagtttatcgaaaagaatcattagtcaactgggatccagttgaacaaacagttttagctaacgaacaagttatagaaggtaagggctggagatcaggagcaaatgtagagcaaaaaaaattatcgcagtggttctttaaaattactgagttttcagagaatcttttgtcagatctatctaaacttgatcgttggccagagaaggttaaatctatgcaatcaaactggattggaaaatcacttggatgccaaattcaatttgaaatttatgataatgataaaactgcgaccaatgaaaaattagaaatctttactacaagacaggacactatttttggagcaacattctgtgcaatatcgcctaatcattcttttgcggagtccttatctcacagcaatgaatctatcaagagcttcattgcagcatgtcagaaaaaaggttttagtgaagagactttagcaaaagaag

SEQ ID NO: 304480 - DNA, 805 bp, Unknown
  Bacterial polypeptide expressing nucleotide sequence isolated from the Sargasso Sea
aataaactttaaattaagggactggggtatttcaagacaaagattttggggctgtccaatacctattatttatagagaggatggagaaatattgtcagttgaagaaaatgagcttcctgttaagcttcctgatattcaaaaatttaatgaatcatcaagtgcattaaacaatattgctgattggaaagaaaccttgtgtccaaagactggtatgaaagcttttagagaaacagatacttttgatactttttttgagtcctcttggtatttttttcgatattgtaatgcaaggctagaaatcccctttgataaaaaagacatagattattggttaccagttgatcaatatattggaggtattgagcacgccatactgcatcttttatattcaaggttttttactaaagcattaagagatcttggatacttcaacttagacgaaccctttaagggcttatttacacagggaatggttacacatattacttttagaaactcaaatcaagattgggtagagcctaaagacgttcaaaaggttggcggcatcttaaaagatactaaaaatttagatgttgaaattggtaaggttgaaaaaatgagtaaatcaaaaaaaaatgtcattgatccaaatgacataattgattcatatggagcagatactgctaggtggttcatgttatctgatagtccacctgaacgagatttacaatggactgataatggaatagctgcatcttttaaatttataaacaagttgtttgatttagttgaaaggttcaaaaactataatttaaaaaagtctgat

SEQ ID NO: 304481 - DNA, 739 bp, Unknown
  Bacterial polypeptide expressing nucleotide sequence isolated from the Sargasso Sea
gcagaaaatgcagcaattgaaaacaaagttagtccaaaagattggacaaataagaatattgatagcatgaaaagtcagctcaaaacacttggttttagttatgattggtcaaaagaattaagaacatgcgactcacaatattataaatgggagcaattaatatttaagaaattctatgatgctggattggtctatagaaaaaaatcccatgtaaattgggaccctattgatgaaacagtattagctaatgaacaagttattgatggcaaaggatggaggtcaggtgcacaaattgaaattaaagaaattgaccaatggtttattaaaataacaaaatatgccgaagagcttctagattctcttgaggaattagactggccagaaaatgtaaaactgatgcaaaaaaattggattggtaaatcacatggggctgaaattagatacaaaatagataaatcagatgattttttaacaactttctcaacaagaccagatacaatttttggagtatcctttattgctatttcacctaatcatccacttgcaatagacctctcaaaaaaggaaaaaaatatttttgattttcttgaaagatgtaaagaaattaaagctgctgaagctgatatggctaaagcagaaaagttaggaatagacactaaacttaaagtaattcatccaataactggtaaaaaattaccagtatggattggtaattttgtcctacttgattacggtacag

SEQ ID NO: 304482 - DNA, 856 bp, Unknown
  Bacterial polypeptide expressing nucleotide sequence isolated from the Sargasso Sea
cgtcaaagatactggggatgtccaataccagtagcttatgatgaagctggcaaagttcacccaatacctagatcaatgttaccggtgaaacttcctgagaatgtagatcttaaggctaaaggaaacccattagatggtcaaaaagaatggaaagagataattataaacggaaaaaaaatgacaagagaaactgacactttagatacttttgtttgctcatcttggtattatttaagattttgctctcctaatgaaaataattatggttttaataaagaggacataaattactggatgcctgttgatcaatacattggaggggtagagcatgcaattttacatttattatattcacgtttttttatgagagcaataaattatgaaaataaaaattttgatataaaggagccttttcaaagtttatttacacaaggtatggtttgtcacgaaacttacaaagatgaagataataattggctaagcccagatgaagtaacaaaaataaatggcaaaattgtaaaaaaaaatgatgaaaacaaaattgttaaagttggtgcatctgagtcaatgtcaaaatcaaaaaaaaatgtaattgatccagaatttattatagaaaattatggagctgatgctgtaagattatttattttatcagacagcccaccagagaaggatgttcaatggtctgagcaaggaatggcttcctcttataaattcttacaaaaactttggattttacataatgagatcaagaataagatatttaaaaataaatatgagaaggatgataagaaaattgaaaaatttataaatcaaatgatttcaaaaataacagttaatctagaaaaatttaact

SEQ ID NO: 304483 - DNA, 856 bp, Unknown
  Bacterial polypeptide expressing nucleotide sequence isolated from the Sargasso Sea
aaagaagaagatataaaatattggatgccagtagatcagtatattggcggtgtagaacatgcaatactgcacttgttatattcgagattttttatgcgagcaatttcaaaagataacaaaaaaattaatttatcagaaccattcgaaggtttatttactcaaggtatggtatgccatgaaacttataaagatcctgaaaacaactgggtcagtccagaggaaattgtgacaattaatggaaaaaaatatttaaaaaataataactcaatacaaattaaagttggtccttcagaatcaatgtctaagtccaaaaaaaatactattgatcctgaaaatattatttcgaattatggcgcagatgcagctagattgtttatattatcagatagtcctcccgaaaaggatgttttgtggtctgaagaaggaatttcttcatcatttaaatttatacaaaaattatggactttaaattcaaaaataattgaagaaattaaaaaaagtcacaatgaagataccaatgatgaaataacaaaatatacaaataagtttttaaaaaaagtaaccaacaatttagaaaatttcagttacaacaagatagtagctaatttacatgagatgcattcttttatgacaaaacaaataaataagaattacaaaaaagaaacattaatagaaaattatcaaaaaattttaatttcaatgcaacctataattcctcattttgcaaatgaatgtttagatttaataaatataaaagattttaaatggcctaaatttgatgagaaatacactatagaagaaacaataaatttggttattaaaattaatgggaagaaaagaggcttaatagagatta

SEQ ID NO: 304484 - DNA, 829 bp, Unknown
  Bacterial polypeptide expressing nucleotide sequence isolated from the Sargasso Sea
gaaaactacgttaattgggatccggttgaccaaactgttcttgcaaatgagcaagtgatagatggtaaagggtggagatctggcgcacaagtagagagaaaaaaattaaatcaatggttttttaatatttctaagttttcagaacaattactaaatggtttagataatttagaagaatggcctaataaagtgaaaacaatgcagaagaattggattggtaaatcttttggttgcgagattgattttaaagttgaaggagatctgccagtaaaaaacatcaaatgttttacaactagacctgatacattgtttggtttttcttttcttgctttatctatagatcaccctttgacaaaatattttgaaaaaaattctgaatttcaaaattttagagataagtgttcaaaaactgggactactgaagagtctattgctcaggctgagaagattggttttaaaacaaatctacaagctcttaatcctatggatcctaaaataaaagttcctgtattttttgcgaattttgtgcttatggattatggattcggggcagtctttggatgccccgcacacgatcaaagggattttgagtttgcaaaaaaatataaattagacattaaaactgttgttagaccaaaagatagaggcagtgattttcaagtagaggatgaagcttttattgatgatggagttatgatcaattcatcttttttggacggtcttgaaacacctggagaagcaattgaaaaaagtattgaatatttaacaaaaaataatttagggaataaaaaaattaattttagactcaaagattggggaatatcacgtc

SEQ ID NO: 304485 - DNA, 842 bp, Unknown
  Bacterial polypeptide expressing nucleotide sequence isolated from the Sargasso Sea
tcatgcaaaaaactggattggtaaatcatttggatgcgaaattgcttttaagactgaaggagatttacctgtaaaagagataaaatgtttcaccacaagaccagatactttatttggattttcatttttagctctttcagtagatcacgaaatttcaaaattttttgagaaagataaaaaattccaagaatttaaaaaggagtgttccaaaacaggtaccactgaggaagctatcgctataggagaaaaaattggttttaaaacaaatatgaaggcagcaaatccactaaatccaagccagaaagtccctgttttctttgctaattttgtcttgatggattatggctttggtgcagtatttggttgtcctgctcatgatcaaagagatttcgattttgcaaagaaatataatttagatattaaaaccgttgttaaaccggatagtgaagatgatgagtatgaggttaaagatgcagcatactctggtcctggtacattaataaactctgagttccttaacaatcttaaagcaccagaagaatctatcatcaaaacaattgatattttagaagaaagaaatattggaaaaaaacagattaattttagattaaaagattggggtgtttcaagacaaagatattgggggtgtccaataccaatggcttatgatgaaaatggaaatgtaaccaaaattccaaaaaaagatttaccagtaaaacttccagataatgtagatttgaattttaaaggtaatccacttgacgcaaaaaatgattggaaaaatataaatatagaaggaaaaaaatatttaagagaaactgatactttagatacttttgtat

SEQ ID NO: 304486 - DNA, 751 bp, Unknown
  Bacterial polypeptide expressing nucleotide sequence isolated from the Sargasso Sea
aaaaatatatcagaagagacagatacgctagatacttttgtttgttcatcctggtattatttaagattttgttcatccaataattcagattatggatataagcaggaagaaattgattattggatgccggttgatcaatacattggtggagtagagcatgcaatacttcatcttttatattcaagattttttacaaaagccttaggatacaaaaataaaaaatttaagtttaatgaaccttttaagggtttgtttacacaaggaatggtatgccatgaaacttacaaagatgaaaacgataactggttaagccctgatgagatagaattagatgggcagcaatattataaaaaaggaaatccaaataataaggtaagggttggtccttcagagtcaatgtcaaaatcaaaaaaaaatgttattgatcctgaaaatattattaataattatggagctgatgcagtaagactttttatattatctgatagcccacccgaaaaagatgtgcaatggtctgatcaaggaatggttgcatcgttcaaatttttacaaaaactttggatacttcataacaaaattaaagaaaaaattgaaaataacaaagaagatggtggggataatgagaaattaaataaatttacaaatcaaatgattgaaagaataacaaataatttagaagattttagctacaatgttataatagcaaatatttacgaaacatataattttattaacaaaataattgaaaaaa

SEQ ID NO: 304487 - DNA, 346 bp, Unknown
  Bacterial polypeptide expressing nucleotide sequence isolated from the Sargasso Sea
aaccgcgctgtcatctacgagggcttgcgcacagtgttacagctactgtggcccattacaccgcaccttagcgagcacctgtggcaggctcttacaggcgaggcgttcaaggaaaatcagtggcccgaggtcgacgacacggccctgagccgcgacgagttggagatcgtggtacaggtcaatggtaaggtacggggcaaaattaacgtgcccgcctccgcagacaatgccgaaattgaggcgatggccaaaagtcaggaaaacgtgcagcgctttctggcagacacgaccatccgtaaagtgattgttgtaccccaaaagctggtgaatatcgtcgcgcaatgac

SEQ ID NO: 304488 - DNA, 981 bp, Unknown
  Bacterial polypeptide expressing nucleotide sequence isolated from the Sargasso Sea
agacctgacactcttttcggagcatcttatatagttttagctccagaacataccttaattcattcatttgtcactgatgaccaaagatcaaaagtggaagtttatattgaggaaacaaaaaagaaatcagattttgatagaactgaagttaataagtataaaactggtgtttttactggaagctatgcaataaatcctttcagcaaagaaaaaattgaaatatggatagctgactatgtacttattagttatggaactggtgctattatggctgttcctggtcacgacgaaagagattgggagtttgcatcaaaatataatcttcctatagtagaagttgttgagggaggagatgtatcaaaagctgcatacactgcaaaaggaaatgccaaaattataaactcttcaaacgataaaacattatccatggatggcttaagcgtagatcaagcaattaaggaagcaattttatttattgaaaaaaattcaatcggaaaagccactgttaattacaaattaagagattggttattctcaagacaaagatattggggagagccatttccattaattcataaaaacgattcagtagagttgataaaagaaaaagatttgccagtaatgctccctgaagttgaaaattataaaccatcagatgatggtaagtctccattatcattagttaaaaattgggttgaagtaaaagatgaaagtggtaatattattggacttagagaaacaaatactatgccccaatgggctggatcttgttggtattttttaagatttacagatcctaataattcaaatgaagcgtggtcaaaagaaagagaaaactattggatgccagtagatttatatattggcgggcaagagcatgcagtacttcatttattgtactcaagattttggcatcatgttttatatgatttagacctagtatcgactaaagaaccatttaaaaaactatataatcaagga

SEQ ID NO: 304489 - DNA, 793 bp, Unknown
  Bacterial polypeptide expressing nucleotide sequence isolated from the Sargasso Sea
ggcgaaaaagagtggaaggaaattaatataaatggaaaaaaacttactagagaaactgacactttagatacttttgtttgttcatcatggtattacttgaggttttgctctcctaaagaaaaagaatatggttttgataaagaggacatcaactattggatgccggttgatcaatatatagggggagtagagcatgcaattttgcacttgttgtattcaagatttttcatgcaagcactttcccataataatgacgaatttaatatattagagccatttgaaggtctttttactcaaggaatggtctgtcatgaaacatataaagatttggataataattggataagccctgatgaaattgaaactataaatggaaaaaagtatttaaagggtgataaatcaaaaatggttaaagttggtccatcagaatctatgtcaaaatcaaaaaagaatacaattgacccagaaaatattatttcaaattatggtgctgacgcagcaagattatttattttatcagatagcccaccagaaaaagatgtacaatggtcagaagaaggtattatttcttcttttaaatttgttcaaaaactatggaatttacaccaaaaaattttagatgaatcaaacaaagatcataaaaaaaataataataatgcgattgagaaatatactaataaatttttaaaagatataacccacaatcttgaaaattttagttataacaagttaatagcaaatttacatgaaaggtattcttttatgcacaagcaaattcaagaaccgtatacaa

SEQ ID NO: 304490 - DNA, 802 bp, Unknown
  Bacterial polypeptide expressing nucleotide sequence isolated from the Sargasso Sea
atcaaatgaaatagtaaatgaacttacaaaattagagttgggtgaagagctaattcaatttagattaagagattggggtgtaagcagacaaagatactggggttgtccaattcctgttatatatgatggtgatgttccaagtgttctaggtgagaatgatatacctgttgaacttcctgagttaaaagaaaatgagcctccaactccattaagtcaaaatgataactttttaaaagtaaaagagggttttaggagagaaagtgatacttttgatacttttatggattcttcatggtattacgcaagattcacatcagctgataatgaagatgagatatttgatgaaaaaaccaaatactggctcccagtggatctttatattggtggaattgaacacgctatattacatctcttatattcaagattttttcataaagctttaagagatattggtttggtcgaaggcgatgagccatttaaaaggctgttaacccaaggaatggttttgaaagatggagcaaaaatgtcgaaatcaaaaggcaatacagtcgacccacaaccatatatcgaaaaatatggggctgatacagttaggctatatatgatgttcacatctcctccagaacaaagtcttgaatggagtgaatcttctgtagaaggctcggctagatttctaaaaaaagtatggaatctgattagtggcagaaaatataagaaattagatgatcaattcaatttttctaaagaggagcttgctttaagaagaaagtctcatgcaacattaaaaaaagtagaaaacgat

SEQ ID NO: 304491 - DNA, 878 bp, Unknown
  Bacterial polypeptide expressing nucleotide sequence isolated from the Sargasso Sea
agaagaatattataaacatcaacaacttttcttcttagaattattagaaaaaggattggtatacagaaaagaaaattatgtcaattgggaccctatagatgaaacagttcttgcaaatgaacaagtaattgatggtaagggttggagatctggcgcaatagtggaaagaaagaaattaaatcaatggttttttaatatttcaaagttctctcaaagacttttagatgatttagataaattaaataaatggccgaataaagttaaagtaatgcaaaaaaactggattggtaaatcattcggttgcgaaattaattttaaagttgaaggagatattccagtaaatgaaattaaatgcttcacaactaggccagatacattattcggtttttcttttttagcggtatcaatagaccatgaaatttcaaaattcttctctaataacaatgaatttaataaatttaaaaaagaatgttcaaaaactggaactactgaagaggcaattgccatgggagaaaaaataggttttaaaacaaacttaatggcaattaatcctttaaattcaaatgaaaaagttcctgtttattttgctaactttgtattaatggactatggctttggagcagtttttggttgtcctgctcatgatcaaagagattttgattttgcaaaaaaatacaaacttaaaattaaaactgttgttaaaccaaataatgaacatgataattatgaggtaggtgataaagcctataccggtggcggcaatataatcaattcagaatttttaaacggattaaaagttcctgaacaatctataactaaaacaatagattttttagaacaaaaaagaattgggaaaaaaaaaataaattttagactaa

SEQ ID NO: 304492 - DNA, 783 bp, Unknown
  Bacterial polypeptide expressing nucleotide sequence isolated from the Sargasso Sea
gatgcttttggtttgccagctgaaaatgttgccattgctaataaggttagtcccaaagcatggacagatcaaaatattgataatatgaaagatcaactaaagtctttagggtttagttatgactggtcaaaagaactgagaacttgtgattcaaaatactataaatgggaacaactaatatttaaaaaattttatgatgctggcttggtttatagaaaaaaatcatttgtaaactgggatccggttgatgaaacagtacttgcaaatgaacaagtgattgatggtaaaggttggagatctggagctcaaatagagattaaggaaattgatcaatggtttatcaaaataaccaaatatgctgacgaattgctcaattcacttgatgatcttgattggccagaaaatgttaaaacaatgcaaaaaaattggattggtaaatctaaaggtgctgagattaaatacaagattgagaactcagacgattatcttacagccttttctacaagacctgatactatttttggagtttcattccttgcaatagctccaaatcatcccattgcaattgagttatctaataaaaataaagaaattcatgattttcttaataaatgcaaagaaattaaagctgctgaagcagacattgcaaaagctgaaaagcttggaatagataccaacattaaagtaattcatccattaactggtgagaaaataccattatggatagggaattttgttttattagaatatgggacgggtgttgtaatgggagtgcctggtcat

SEQ ID NO: 304493 - DNA, 940 bp, Unknown
  Bacterial polypeptide expressing nucleotide sequence isolated from the Sargasso Sea
tctagacaaagatattggggttgtcctatacccatgatatatctggaagatggcagcgtagttccagtagataaaagtgaattacctatagagttaccagacgatgttgatcttaactcaaaaggaaatcctctagacaatcatcctcattggaaaaatacattgcagaaatcaactggaaaaaaggctattagagaaaccgatactttggatactttcgttgattcctcttggtattttttaagattttgctctccaaatcactcttcttctccctttgacgaaaaacaagtaaaatattggatgcctgtggaccagtacataggtggtatagaacacgccattttacatcttctttattctagattttttacaaaaggtattaaaaaatttaaaaaaaattttaacatcattgaaccctttaaaaatttattcactcaaggaatggtttgtcatgaaacttatcaagatcaaaaaggaaactggctttatccaaatgaggtagaaaaagttgactccaatacttacatacaaaaaaaagataaaagtaaagttatagttagtccacctgagtcaatgtctaaatcaaaaaaaaatacaattgatcctgagactatgattaatgaatatggtgcagatgctgtgagatggttcattctgtcggacagcccgccagagaaagatgttcaatggtcagatacaggggtgacatctgcgaataaatttttgcagaagatttggaatttaaattttttaatacataagagaaagaataaagatattgataaaaagcttgaaaaaaagttcgatttggtcatcaagagctttacggcaaaaatagataattctattaagagttttagatttaatgtttcgatagctcatttttatgaaatttatagagtttttaaagatgcttacgaatcccaatataagtaat

SEQ ID NO: 304494 - DNA, 914 bp, Unknown
  Bacterial polypeptide expressing nucleotide sequence isolated from the Sargasso Sea
actggttttcacaacaaggtcagatactttatttggagttacctatttagcaatttctgttaatcattcattaattaaaaatatttctgatcaggaaatcttacaagatatagaaaaactaaaacaatatctgaaaaaaaataaaaacaatgaacttgaaaaaattggaataaaaactagcttagtagctgtaaaccctgtaaattctgaacctattcctatttgggtggcaagttatgttcttgatgaatacggtacaggagctgttatgggcgttccagcccatgatctaagggattttgaatttgcaaagcaatacaatattgatattaaacaagtaattataaaggataaaagtgaactaagtaacgagttagataatgcttatgtagacaatggatatcttattaattcaaatcaatatgatggtatagcaaatactattgctaaattaaaaatttcagaggagggagtaaataatggatgggccgaaaataagattcaatatcgtttaagagattggttaatatctagacaaagatattggggatgtccgatacccatagttaattgcaaaaaatgtggatctgttcctttaaaccaatctgaattacctgtttccttaccaaatgatatagaaatttcggataacaagattaatgctttaggtgataataataattggataaatacaatatgtccaaaatgtggaatagcagcgataaaagaaactgatacaatggatactttcatgtgttcatcttggtattttttaagatatccatcttcaaaatgttcaactaagccatttgaaaagaatgaaataaataagtggctgcctgtagatccatatgtttggaggagtagagcacgccatattacatttgttatatgcccagatttttcactaaggg

SEQ ID NO: 304495 - DNA, 772 bp, Unknown
  Bacterial polypeptide expressing nucleotide sequence isolated from the Sargasso Sea
gatttacaagctcttaatccaatggaccctaaaataaaagtgccagtatattttgccaattttgtattgatggattatggttttggggctgttttcggctgtccagctcatgatcaaagagattttgagtttgcaagaaaatataatcttaaaataaaaaccgttgtaagacccaaagatcaaaataataattttactgtaaaaaatgaggcttttgtagaggacggtataatgattaattcatcttttttggatggtcttcaaacacctggtgaagcggttgaaaaaagtattgagcatttaactaaaaaaaagctaggtaaaaaaaaaattaatttcagattgaaagattggggtatatcgcgtcaaaggtattggggatgtcccataccaatcgcgtacgataaaaatggaaatattgttaaagtcccaaaagaaatgttgcctattaaacttccagataaaattaatctaaatactaaaggaaatcctctagatcatcaaaaagaatggcgaaacataaatattaaaggagaaagttgcacattggatactgatactcttgataccttcgtggactcttcctggtattttttgcgattttgttcacctgataatagggaatatggttttagtgaagaagaaataaaatactggatgccagttgatcaatacataggtggagtagaacatgcaattctacatttgttatattcaagattttttatgcaagcattgagttttgagaaaaagaattttatttcaacagaac

SEQ ID NO: 304496 - DNA, 193 bp, Unknown
  Bacterial polypeptide expressing nucleotide sequence isolated from the Sargasso Sea
aatgaaatacttccacgaacaaattgaagccaaatggcaagaatattgggcaaaaaatcaaacttttgcagcttctaataactctgacaagcctaaatattatgtgttagatatgtttccctatccaagtggtgcaggtttacacgtaggtcatccgctgggttatattgcttcggatattgtagcaagatac

SEQ ID NO: 304497 - DNA, 666 bp, Unknown
  Bacterial polypeptide expressing nucleotide sequence isolated from the Sargasso Sea
attgactttaaattagagggggatttaccagttaaaagtgtgaaatgtttcacaacaagaccagatacgttattcggattttcatttttagctttatctgttgaccatgagatttcaaaattttttacagaaaataaagaatttcagaaattcaaaaaagaatgttcaaaaaccggaactacagaggaggcaattgctattgcggaaaagattggttttaaaacaaatttagtggctattaatcctctggatccaaatcaaaaagtacccgtttattttgctaattttgtattagtagattatggttttggtgcagtgtttggatgtcctgctcacgatcaaagagactttgattttgcaaaaaaatacaatcttaaaattaaaactgttgtaagacccaaggactcagaagagaattttgaagttcaagatgaggcttacgcaggtcctggactaattatcaattctgattttttaaatggtataaaagcccctgaaaattcaattatagaaactataaaaattctagaagaaaaaaatcttggtaagaagaaaataaactttagattaaaagattggggagtgtctagacaaagatactggggatgtcctattccaatattttatgatgaaaaaggagaggctcatcctgttccaaaagatatg

SEQ ID NO: 304498 - DNA, 684 bp, Unknown
  Bacterial polypeptide expressing nucleotide sequence isolated from the Sargasso Sea
gtagaagatatagataaaaaatggcaacttttttggtcaaagaaaaagaatatttttaaaaatacaaataagaaaaaaaaattttattgtcttgaaatgtttccctatccatctggaaaaattcacatgggccatgtgagaaattatgcaattggagatgtaattgctagatacaaaatgatgaagggttttaatgttttacaccctatgggttgggactcttttggtttgcctgcagaaaatgctgctcgagaaaataatttgaacccaatggactggacaaaaaaaaatatttctacaatgaagcatcaactacaattattaggcttatcgattgattgggatttagaaatatctacttgcgatgaagagtattataagcatcaacaagaattatttattgatttttttaacaaaggtttggtagtcagaaaagaaacatacgtaaactgggatccagttgaaaaaacagttttagcaaatgagcaagttattgatggaaggggttggcgatcaaatgcactagtagaaagaaaaaaactacatcaatggttttttaatatctcaaaattttctgaagaattacttgaagatttagaaaccttaaaggagtggccagaaaaagttaaattaatgcaaaaaaactggattggaaaatctttgggttgtgaaattaattttaaa

SEQ ID NO: 304499 - DNA, 313 bp, Unknown
  Bacterial polypeptide expressing nucleotide sequence isolated from the Sargasso Sea
aatggaaagagtaaattttcaagcaattgagaaaaaatggcaagttaagtttaactcctcaaaacttcacaataaaaatggaaaaaaattttattgtttagagatgtttccttatccatctggaaaaattcatatgggtcatgttagaaattacaccataggagatgttgtagctcgttataaatatttaaatggttttaatgttttacatccaatgggatgggattcatttggtctgcctgcagaaaatgctgccagactaaacaatttaaaccctaaaacttggacagaagaaaatataaagacaatgaaa

SEQ ID NO: 304500 - DNA, 915 bp, Unknown
  Bacterial polypeptide expressing nucleotide sequence isolated from the Sargasso Sea
tttggtgcaacatttttgcgcaatatcaccttttcacccactagttgatgatattattaaggaagataaaaagattgagagtcaagtatttgagcttcgtgctcaaaaaataaatgaggaagcaatagctaaaaatgagaagattggaatacaaacaaagttatttataaagcacccatttatagaaaaaaaatttcttccagtttatatcgctaactttattcttatggactatggatcaggtgcaatatatggctgtccagcacatgaccaacgtgacctagactttgcaaataaatacaactgtgaagtaatacaagttatagatccagaggataattcaatttttgataataaaaatgctattactggtaatggtaaacttataaattctgattttttaaatgagcttaacatcgaggatgcgaaaaaagaggttataaaaagaattacaaaattgggtttgggcaaagagacaattaattacagattacgcgattggggaatctcaagacagcgttattggggctgtccaattcctgttatgtatcgggaagatggaaaaataattgaagtaccagaaagtgaacttccattgaaacttccagaagacattgatttaagtaaaccaggtaatcctcttgataatcatccaacatggaaatatacaaaatgtcctttaactggaatgaatgcaataagagaaacagatacattagatacttttgtagattcagcttggtattatctaagattttgttcaccaaaaaatacaaatgatccctttgacaataatgaaataaattattggatgcctgttgatcaatatattggtggggtcgaacatgctatattacatttactttattcacgcttttttactaaagcactagagttagacaatctacatgaacc

SEQ ID NO: 304501 - DNA, 883 bp, Unknown
  Bacterial polypeptide expressing nucleotide sequence isolated from the Sargasso Sea
tgatcaaagagattttgattttgcaaaaaaatataaactggaaattattaaagtagtttcaaatggaaatgatgaagaacttaaagaagcatacaccgggagtggtaaactgatcaattcagattttcttaacgacttaaacattgatgaggctaaacaaaaaataattaaagaagttgaaaataagaaaataggaaatagtaaaactttgtttaggttaaaagattggggtgtttcaagacaaagatattggggatgtccaattccaatgatttatcttgaagacgggactgtggtaccagttgaaaaaaaagaacttccaattgaattacctgatgatattgacttaaattcaaacggcaatcctttagacaatcaccctacttggaaacagactgtacaaatgtctaccggtaaaaaagcagtcagagaaacagacactttagatacatttgttgactcatcttggtattttttaagattttgctctcctgatcataaattatcaccttttgacgaagaaaaagtcaatttttggatgcccgtagatcagtacattggaggtattgaacatgcaatattgcatctgctgtattctagattttttacaaaaggaattaataaatgtaacaaaaatataaaagtaactgaaccatttgaaaatctttttactcaaggaatggtttgtcatgaaacttatagagataaaaacggaaactggctctacccggaagagattgaaaagattaacccgtctaaagcggttaaaagaaaagataaaactgaagttaccgttggatcttcagagtcaatgtctaaatctaaaaaaaatacaattgatccagaagttatgattaataagtacggggctgactctgttaga

SEQ ID NO: 304502 - DNA, 849 bp, Unknown
  Bacterial polypeptide expressing nucleotide sequence isolated from the Sargasso Sea
aatgaagcgctataattttcgagaaaccgagcaaaagtggcagcaaaaatggtctgaagctaagaccttccaagtatttgaaaacactgaccttccaaaatactatgtcttagagatgtttccatatccatcaggccggatccacatgggtcatgttcgcaactacactctcggtgatttacttgcaaggtacaaaaaggcgtgcggctttaacgtgatgcaccctatgggttgggatgcctttgggctgcctgcggaaaatgccgcctttgagaggaatatacatcccgcaaagtggacagataaaaatataagcaccatgcgtgagcaacttaaagcaatgggtctctcgtatgattgggacagagagctatcaacgtgcgatccagaatattataaacatgaacagaagatgttcttggatttcgttaaaaataatcttgcttaccgaaaagaaagttgggtgaactgggaccctgtagagaatacggtccttgccaacgaacaagtcatagacggtaaaggatggcgttcgggagcgcctgtcgaaaagcgccttttgtcacagtggttcttaaaaatcactgaatatagtgacgatttactcaaatcaattgaaactcttgagcggtggccagacaaggtcaaactaatgcaacacaattggataggacgttccgaaggggcaacgatcttctttaacattaacggacatgatgaccgccttgaagtattcacaaccagacccgacacgatatttggtgcttcgttctgcgccattgcagcaaaccaccctatagcttcaagccttgcgaaggccgatgctaaactccaagacttcatatcaga

SEQ ID NO: 304503 - DNA, 425 bp, Unknown
  Bacterial polypeptide expressing nucleotide sequence isolated from the Sargasso Sea
catgacaactagtgaaccatacaatgccaaaaatattgaagcaaagtggcaaaaagtatggaataaacgaaatatttttaaagctaaaaataaaaatagtgataaaaattattatgttttagaaatgtttccttatccttccggaaaaattcacatgggccacgtaagagtttactctctaggagacgtgttggctagatacaaaagagctcagggatttgacgtgctacaccctatgggatgggatgcttttggtatgcctgcagaaaacgcagcatttgaaaataatattcacccagcagaatggacaaaaaagaatattaacagcatgcgaaatcaacttaaggctatgggtttaagttacgactgggatttagaatttgctacctgcgatcctctatacattaaatgtcaacaaaaaattt

SEQ ID NO: 304504 - DNA, 769 bp, Unknown
  Bacterial polypeptide expressing nucleotide sequence isolated from the Sargasso Sea
cgatccgaacagtggtgaaccgcttgaggtgctgttcgaaaagatgtccaagtcgaagtacaacggcgttgatcctgcggcagtgatcgatcgctacggcgcggacaccgctcgcatgttcattttgttcaaagcgccgcccgagaaggatctcgaatgggatgacgccgatgtggaggggcaattccgttttctgcaacggatctggcgtctggtggaatccgccggcacgcgaatcgagaccctcgaccccgaagaacgccccgagcctctggccgacagcgacgctcaggtgcgtcgcgccatccacctggccatcgaagcggtgagtgaggacctgcaggacgagattcagttgaacaccgcgatctcggagctgatgaaactcaccaatgcgatcacatccgtgggtgtttccgaattgagcacctccgtgctgaaggaagccctttcgacgctgcttcggctgctggctccctttgctccccatctcgccgaagagctctggtatcaacttggcggcagctccagcgttcaccgcgccggctggcccgagctggaccccagcgctctggttcaggactcggtggacctggtgattcagatcaagggcaagatccggggaacgattcaggttcccgctgacgccgacaaagctcagctggaggccttggcactggccagtgatgtcgcagccaaatggctggagggacaaccaccccgacgcgtgattgtggtgccggggaaattggtcaacctggtgccctga

SEQ ID NO: 304505 - DNA, 874 bp, Unknown
  Bacterial polypeptide expressing nucleotide sequence isolated from the Sargasso Sea
aaagtcaaactaatgcaatcaaattggataggaaaatctgagggtgctgaaattaaatttgaaataagaaatgctgaaaaccttagtcaaaaccacttaactatatatacaactaggccggatacgttatttggggctacattttgtgctatttcttctgagcatccggttgctaaagaagttgttaaaaaagaccctaatgcggcggagtttataaaagggtgtaaaaatctagattctgacaaagaaaagaagggctacaaaacagaaattaaaataaggcatccgcttctggaaaaagacattcctctgttcatagcaaattttgtattaatggagtatggccttggcgcaatatttggctgccccgcgcatgatcaaagagatttagattttgccaatacttacaaactagatgtgatccctgttgtaaaacctgacaatataaaaaacaaagattttttaattacaaacaaagcattcacagataatggaacaatgattaattcaggttttttaaatggccttagtgacttggaggctaaaaaaacaattttaaaaagactttctgaaaaaggggtagccaagaaaaaaattaattataaacttagggactggggaatttcccgacagagatactggggttgtccaataccagttttatatagagaagatggaaaaataattactgtaagaaaacaagatttgcctcttaagctacccaaaatagacaggttaactggtgagggaaatattttacaaaatttagataagtggaaaaatgtgtcatgtccagaaacaggcctaaaatgcacacgggatacagatacttttgacaccttctttgaatcctcttgtatttctaagatatgca

SEQ ID NO: 304506 - DNA, 834 bp, Unknown
  Bacterial polypeptide expressing nucleotide sequence isolated from the Sargasso Sea
ttgtgaacctgaatattataaacatcaacaagaatttttcttggaattgtatgaaaaaggattggtttataaaaaagaaaactatgtaaattgggatccagtggatgaaacagtattggcaaatgagcaggtaatcgatggaaagggctggaggtcaggggctgtagttgaaagaaaaaaattgagtcaatggttttttaatatttcaaaattctcaaatcaacttctagatggccttaaagatttagatgattggccagataaagttaaaacaatgcaaagtaactggattggaaaatcttatggttgtgaaatagattttaaagtagaaggcgataagaattttaatgaaataagagttttcactacaagaccagatactctttttgggttttcttttttagctctttctgttgaccatcctctagcaaagcaatttgaaaataatgctgatttcataaaatttaggaacaattgcgctaaaacaggaaccacagaagaatcaattgctcaggctgaaaaattaggtttcaaaacacacataatggctattaaccctttagatcctgaagataaagcgccagtttactttgctaattttgttttgatggattatggttttggggccgtatttggttgtcctgcacatgaccaaagagatatggattttgctttaaaatacaaattaaaaataaaaaccgtagtaaaaccgaaagatcacgagggagattttaaagtagatgaaaaagcttatactggttctggccatatgattaattcaaattttttaaatggattaaaagttccagaagagtcaataaaaaaagccataga

SEQ ID NO: 304507 - DNA, 864 bp, Unknown
  Bacterial polypeptide expressing nucleotide sequence isolated from the Sargasso Sea
atctgtggggtgcgaaataaacttcaaagtgtcaggcattgaaaagtttattaaagttttcaccactcgacctgatacaatttttggtgcaacttttttagcggtatctattgatcatccaatatgtgaaaagtacaaaaaattgcctaaatttttggattttaaaaaagaatgctcacaggtaggaactaccgaagaggcaattgctaatgccgaaaagattggttttaaaacagatttacaggctgaacatccttttattaagaataaaaaaattcctatttatatttcaaattttattcttatggattatggaacaggtgcgatatttggatgtcccgctcatgaccaaagagattttgaatttgcaaccaaatataatattgagattattcctgttgtaaaacctaaagatactaaccaggcttatcaaaaaaatgaagcatatacaggcgatggagttttaataaattctgaatttttaaatgacctcacaattttggaagccaaacagaaaatcgttaaagaaattgagaataagaagataggtaaaaagaaaataactttcaggttaaaagattggggagtatcaaggcaaagatattggggttgcccaatacctatgatatatcttaaaaatggtgaagttgtgccagtcgataaaagtgaacttccaattaagttgccagaaaatatagatgtaaattcaaaaggcaatcctttagacacgcatccaacgtggaagaaaactaagtataaaaagacaggtgaagaggcaacaagggaaactgacacgttagatacttttgtagactcttcatggtactttataagattttgttctccaaaaattaaatcaaaggc

SEQ ID NO: 304508 - DNA, 865 bp, Unknown
  Bacterial polypeptide expressing nucleotide sequence isolated from the Sargasso Sea
tcagaattttttaaagacaataatgattttataaaatttaaaaaagaatgttcaaaaaccggtacaacagaagagtctattgctagagcagaaaagatcggttttaagacagatataattgcaattaatcctttagaccaagaaatgcaagtgcctgtttatttcgcaaactttgttctaatggactacggttttggtgctgtttttggctgcccagcacatgatcaaagagatttggattttgctaataaatataatctgaaagtaaaaccagttgtttgccctcatggtgcaaatatagattttaaaattaaaaatgaagcctacactggaccaggaaaaatttttaattctaaattcctagatggtttaaattgtcctgaggagtcaattattgagacaataaacatactggagaaaaaaaaccttggtaaaaagaaagttaattttagattaaaagattggggagtatcaagacaaagatattggggctgcccaattcctgttgcctataatggtaaaggggaagttgtaaaagtacctttgaacaatttaccagtaaaacttccagaaaatattgacttaaaagtcaaaggaaacccattagagcatcaacatgaatggaaaaaaattacaattaatggcgaagattgtattagagaaactgatactctggatacatttgttgactcctcttggtactatttaagattttgttctgctaacaacaaacttaaaggttttgatatggatgaaatatcatattggatgccagtggatcaatatattggtggagtagaacatgcaattttacatttactttattcaagattttttatgagagccttaggagaagataaaaaag

SEQ ID NO: 304509 - DNA, 916 bp, Unknown
  Bacterial polypeptide expressing nucleotide sequence isolated from the Sargasso Sea
atggagatctggtgcgcaggttgaaagaaaaaacctgaaccaatggttctttaatatttctaaattttctgaacaattgcttgatggtttaaaaagtttgcctgaatggcctaataaagtaaaaaccatgcaaacaaattggattggtaaatcatacggttgtgaaattgattttaagattgaagggaacttacctgtcaaaaatataaaatgttttacaacacgacctgatacgttatttggtttttcttttctggctttatctgtggaccatcctttatccaaatatttcgaaaacaatccagaatatcaaaaatttaaagaggagtgttcaaaatcgggtacaacagaagagtctattgcccaagctgaaaagattggttttaaaacaaatttgcaagctcttaatccaatggatcctaaaattaaagtaccagtatattttgcaaattttgtactaatggattatggttttggggctatttttggatgtccagcccatgatcaaagagattttgagtttgcaaagaaatataatcttaatataaaaactgtcgtaagacccaaggatcaaaacaataatttttcagtaaaaaaagaggcctttgtagaggacggtataatgattaattcatcttttttagatggccttaaaacaccaggcgaagcaattgaaaaaagtattgaatatttaactataaacaaattaggtaaaaaaaaaattaattttagattaaaagattggggtatttcgcgtcaaagatactgggggtgtcctatacctatcgcttacgataaaaaaggaaatattgttaaagttccaaaagaaatgttgcctataaaacttccagaaaaaataaatctaaatactcaaggaaatcctttagatcatcaaaaagagtggggaagaaaataa

SEQ ID NO: 304510 - DNA, 541 bp, Unknown
  Bacterial polypeptide expressing nucleotide sequence isolated from the Sargasso Sea
acgggcgccgtcatggcggtgccggcgcacgacgagcgcgactttgagttcgcgcagaattttgagctgcccatcaagcgggtggtgaaggcggccccgaagcagggcaagaagaagaagaagggcgacgcggaggcacaggcacaggcagaggcggcggcggcggcggacgacgaggcggcaatggaggaggccttcacgaccgagggcgtggctgtcaacagcggggacgacttcgacggcctgaccacggccaaggccaagaagaaggtggcggcggcgctctcggacatgggcgcgggcggcgagcaggtcacgtacaagcttcgcgactgggtcttctcgcggcagcgctactggggtgagcccatccccatctacttccccgtcgacgtcgaggacggcgtcgacccgcgcgagggcgagcacacgatccgctacgaccagccgatcgccgtggacgacaccgacctgccgctgcggctgccgcagatggacaactacgagccgggcgacgacccgcagggctgcctcgcgcgcg

SEQ ID NO: 304511 - DNA, 314 bp, Unknown
  Bacterial polypeptide expressing nucleotide sequence isolated from the Sargasso Sea
aatgattgaacgatatagtcaccaaaaagttgaaaacttttggcaaactaaatggaaagaaaatcaagtttttgaatctaaattagataataaaaaaaataaatattatgttatggaaatgtttccttacccctctggtaaaatacatatgggtcacgtaagaaattataccttgggagatgttgtggcaaggtataaaaaaatgaaaggttttaacgttcttcaccctatggggtgggatgcattcggactacccgccgaaaacgcggcgataaaagaaaagaaaaatccttcagattggacttattcaaata

SEQ ID NO: 304512 - DNA, 718 bp, Unknown
  Bacterial polypeptide expressing nucleotide sequence isolated from the Sargasso Sea
catgcctcgctacaatccggctgaactcgaaccgcgttggcaaagttactggcaggagcatcgtaccttcagtactccgcggcttccggcaggtaaaaagttttacgccctcgatatgtttccctatccgagcggcgacgggctgcacgttggacatcctgagggttacaccgccaccgacatcatgagtcgcttcaagcggatgcaagggcaggcggtcatgcatccgatgggattcgatgcgtttggtctcccggccgaagagcatgcgatcaaaacaaataccccgcctcgtattcagaccgaaaagaatattgccaatttccgtcgccaactccgcatgctcggtttcagttacgattgggatcgggagttggcaacgaccgacatcggatacgtccgctggacacagtggatttttttgcaactccacgatacgtggttcgacgaggagcagcagatcgggcggccgatcgccgagttgccgattcccccggacgtctcggccgaaggttccgaggcggtggccgcataccaggatgagcatcgattggcttatcaaacgcatgccccggtcaattggtgcaatgcactcggaacggtgcttgccaatgaggaagtgaaggatggcttgagtgaggtgggaggtcatccggtaacccgcattccccttcggcaatggatgctacgaattacggcgtatgcggagcgtttggaa

SEQ ID NO: 304513 - DNA, 904 bp, Unknown
  Bacterial polypeptide expressing nucleotide sequence isolated from the Sargasso Sea
cttcaggagatttacatataggtcactggtttgctttactcctgcagatgctcatgcaagattcaaaaggctggaaggattcaatgttatgcaccctcagggttttgatgcttttggtcttccagcagaaaatgctgctattaagaataatataaaccccaaaaaatggacttttgacaatattagtaatatgcaaaagcaatttgatatgatgggtaattcttatgattggagtagaaagctaataacctgcactcctgaatattataaatggaatcaaaagttttttgtagagatgtataaaaaaggtttagcctatagaaaaaatggacctgtgtggtgggaccctatagatcaaactacactagccaatgaacaagttgttgatggcaagtcagaaagatcaggagctgatgtggttaagaaattaatgcctcagtggtatttcaaaatcacagattatgcagaagaattattagacatggataaccttgaatggcctgaaaaaattaaacaaatgcaaagaaactggattggtaagtcgagtggggttactataaatttcagtattgaaaactcaaatgaaaaaattagtacatttacaacaaggattgatactatttatggagtaactttcgttgttttggccccagagcatccaattataaaaactctttctttgagtaaaaataaatatgtaaaagaatatattgcgcgatcgcaaaaaatgtcagaaatagatagaacttcaacgattagagagaaaacaggagtaagaacggacgtttgttgtattaatcctttaacaggtgagaaaattcctgtttttgtaggagattatgtcttagcatcttatgggtcaggagcagtaatgggtgtgccagctcacgatgaaagagatttt

SEQ ID NO: 304514 - DNA, 772 bp, Unknown
  Bacterial polypeptide expressing nucleotide sequence isolated from the Sargasso Sea
agatttaaaaaatctaaaggttttaacgtattacatccgatgggttgggatgcatttggaatgcctgcagaaaacgcagccatggaaaaaaaagtacatcctagagcttggacagagtccaatattaaagatatgaaagaacaacttaggccaatgggtttatcaattgattggtcaaaggaattagccacttgcgatcccaattattatgagaagcaacaaagtttattcattgatatggagaaatcggggctggttagcaggaaaatctcaaaggtaaattgggatccagtagacatgactgtgctagcaaatgagcaggttgtagatggtaaaggctggagatcaggagcccttgtagaaagaaaagaactaacccaatggttctttaatatttcaaattactctgaagagcttttaaatggcttagatgctttaaaaggatggccagaaaaagttaggacaatgcaaagtaactggataggaaaaagctctggcgccgagataacattttcaataaaaaattctattactgaattcaagaatataaaagtctataccaccagaccagatactatttttggcatgagctttctagctatttctcccaaccatccaatcgcagtggaactatcaaaaacaaataaaagactaaatgatttctgtattgaatgtcaaaataacttgacgagcgaagaggcattggaaaccgctgagaaaaaaggaatcgacactggtattaaagttgaacatccttttaaaatagacaaga

SEQ ID NO: 304515 - DNA, 692 bp, Unknown
  Bacterial polypeptide expressing nucleotide sequence isolated from the Sargasso Sea
tcagatttatatgttgcagctaatcaatctgataaagaaagttattatgttttagaaatgttcccttatccatcagggaaattgcatatggggcatgttaggaactatgttattggtgattgcttagctagatataagcgaatgaatggatttaatgtgctatatccgatgggatttgatagctttgggttgcctgctgaaaatgccgcaataaagcataatgttaaccctaaatcttggacagcagataatgttgaatcaatgaaagttcagttggagcgtttgggtttaagttatgattggaaccgtgaattggcaacctttagagatgattattatcgttggaatcaatggatttttatccaaatgtataaaaaaggattagtttacaagaaaaagggatgggttaattgggatcctgttgatcaaactgtattggccaatgaacaagttattgacggtaaaggttggcgatcaggtgctgatgttgagaaaaaagaaattgaacaatggtatattaaaattacagattatgcagaagagttgctgcaagatatcgataacaaattaacggattggcctgaacgagttaagtcaatgcagcgaaattggattggaaaaagttttggtactgaaattgattttgatattgttgatgcaaatggtgtaaagcttgatacggttactgtttt

SEQ ID NO: 304516 - DNA, 711 bp, Unknown
  Bacterial polypeptide expressing nucleotide sequence isolated from the Sargasso Sea
attgtcttcgaatataattaaggtttttacaactagacctgatacaatttttggagctactttttgtgctatttcatcagaacatccaatagctttggaaattgttaataacaataatgaagcaaaaatttttcaagaaaaatgtaggcggctaaacccagacaaagaaaaaatagggtttaaaacaaatttattaatagaacatccttttgaaaaaaaaactatccctctttttatagctaattttattttaatggattatggatctggcgctatatttggatgtccgggtcacgatcaaagagatttggattttgcaaataaatataacttacagataattccagtaatattgccaccaggagaaaaggtaaataattttaaagttttaaatgaagcttatattggtgaaggattgttaattaattcatcttttttgaatggcaaaagtattgaaaatgctaaacaattagtcgtaaaaaagctttctgaaaaagggatgggtaaagaaaaagttaattatcgtttaagagactggggtttgtctagacaaagatattggggttgtcctattcctataatttatagagaggacggcgagatacttacagtaagaaaagaagatttgcctgtagagcttccaaaaattgataaattttcaggaacaggaaatgtcttagaaaaaattgatgactggaaagttacaaaatg

SEQ ID NO: 304517 - DNA, 894 bp, Unknown
  Bacterial polypeptide expressing nucleotide sequence isolated from the Sargasso Sea
tcttgatcaattaaaagctccagaacaatcagttttaaaaactattgaaattttagaaaagaaaaaagttggaaagaaaaaaattaattttagactaaaagattggggagtttcaagacaaagatattggggttgtccgattcctgtcgcatataatcaaaaaaatgaaattgttaaggttccattagaccaactaccaatcaaacttccagataatattaacttaaatgtgaatggtaatcccttagatcatcaaaatgaatggaaaaaaataacgattaatggagaggaatgtacccttgaaacagatactttagacacctttgtagactcttcatggtactatttaagattttgttctcctaaaaatgaaaaagaaggtttcaatatagatgatgtaaattattggatgccagttgatcaatatataggtggtgtagaacacgctattcttcatttactatattcaagattttttactaaagccttggcctacaaagataagaaattcaaaatatctgagccatttagtggactatttacacaaggtatggtttgtcacgaaacatataaaattgaaaaccaatggtttagtcctgaagaagtttcttcggataatggtaaagacttttaccttaaaaaagataaaaaaaaagttatagttgggccttcagagtctatgtcgaaatcaaagaagaacactattgatccagagattatggtagaaaattttggagcagatgctgttcggttttttattttgtccgacagtcctccagaaaaagatgttcagtggtcagaacaaggtatgttggcctcatataaatttattcaaaaattttggaatctaaattctgagttgacagataagataaagatgaaagcaaactccaa

SEQ ID NO: 304518 - DNA, 880 bp, Unknown
  Bacterial polypeptide expressing nucleotide sequence isolated from the Sargasso Sea
cagagaatcaggatcaaataagtatatttcaagtaatcttatctcagataatgaagttgataaaattagaatcgatataaagtatgttaaagatgataaccaagtagactataacctattaaagcttgaagattctgattttaaaaattcaacatttaaattagaaaacaatgttttctattgcatcagagaacaagaaaaaatgtcaaagtctaagttcaacgtcgttaatccagatgaaatctgtgatcaatatggagctgatacattaagaatgtatgagatgtttctaggtccaatagagcaatctaagccatggaataccagaggaatatctggagttcattctttcttaaaaaagttttggaatttattttttaaagatggggtatttaatatttcagaagacaaaccttctaaagagtcattaaagtctcttcacaaaacaataaaaaaaattactgaggatatagagaaattaagtcttaatacatgcataagctcatttatgatttgtattaatgagctcagtttaattggttgcaataatcgtgagatacttgaagaattacttatcttaatttctccattttcaccgcattttgctgaagagttgtggagtcaattaggtcacaaagaatccattgttgatcaaaattatccagaatttaatgaaaattatttagttgaaactcagaaattataccctgtttcattcaatggcaaaacaaagtttactattaatcttccaatagatctttccaataaagaaattgaaaatgctgttatgtcatttgaaaaaacaaaagctattttaaacaacgtagaaccaaaaaaagtaatagttgttcctggtaaaattataaatattgttacatga

SEQ ID NO: 304519 - DNA, 754 bp, Unknown
  Bacterial polypeptide expressing nucleotide sequence isolated from the Sargasso Sea
gtttaataataaatccatattgccaatttacattgctaattttgttttaatggattatggaactggtgcaatatttggttgtccagcccatgatcaaagagatttagattttgctaataaatataagcttaaagttctgcctgttgtaaagccaaaaaatattgattctaaaaaatttataataaaaaacgaagcttatacagaagatggaatattatttaattctgattttttaaataatcttacagtaaatgaagcgattaaaaaagctatagaagttttagctaaaaaaaaattgggacaaaaaaaaataacatttcgtcttaaagattggggtgtgtctagacaaagatattgggggtgcccaattccaatagtttataatgcaaaaggtaaagcaataccggtcaataaaaaagatttacctattttgttaccagaagatgttgatttaaatgttggtggtaatccactagaaaaacatcccaaatggaaatttgtgcagcttgcgtctggtaaaaaaggtataagggaaaccgatactctggacacttttgttgactcatcttggtattttttaagattctgttctccaaagtacaaaaaatatggttatcaaatagatgaaataaaatactggatgcccgttgatcaatatattggcggagtggaacatgcaattttacacttactttattcaagattttttatgaaagctttagcttttgataacaataaatttaactatacagaa

SEQ ID NO: 304520 - DNA, 933 bp, Unknown
  Bacterial polypeptide expressing nucleotide sequence isolated from the Sargasso Sea
tcacaaataaataaaaataaaaaaaaattttattgcttagagatgtttccatatccttctggtaaaattcatatggggcatgtaagaaattatactatcggagatgttctctccaggtttaaaagtttaaaaggttttaatgttctccatccaatgggttgggattcttttggaatgccagccgaaaatgctgcaaaacaaaataaccaagatcccaagatatggactgaaaataatataaaaacaatgaaaattcagttaaaacaattgggtttatccatagattgggatagagaaatttctacttgttcagaagaatattataaacatcaacaaaaattttttattgatatgtttaataaaggattagtctataaaaaagaaaattatgtaaattgggaccctattgatcaaaccgtattagcaaatgaacaagttatagatggtaaaggatggagatcaggagctatagttgaaagaaaaaaactaagtcaatggttttttaatatttcaaaatttgccgatgatcttcaaaatgaattggaaagtctagatgaatggcctaataaagttaaaacaatgcagcgtaattggattggcaaatcatttggatgtgaaattgattttaaaatttttggcgaaccaaaaattgataagattaagtgttttacaacaaggcccgatacactttttgggttttcttttctagcggtttcggtagaccatcctatctcagaactttataaaaatgatcctgagtttaaaatttttaaagaaaaatgttctaagactggaactactgaagagtctatagcaaatgctgaaaagataggatttaaaacaaatcttgtagccataaatcctctggataataatcaaaaagttccagtttactttgcaaattttgttttaatggattatggctttggtgca

SEQ ID NO: 304521 - DNA, 889 bp, Unknown
  Bacterial polypeptide expressing nucleotide sequence isolated from the Sargasso Sea
aaaaaggtaattgatgaattattaaaaaaaaatattgctaacaaaaaaaccaattacaagttgcgtgactggggaatatcaagacaaaggtattggggctgccctatacctattttatatagagaggatgggaaaatcatacccgttccaaaggaagagctacctcttacaatgccgaagcttgatcaacttagtagcaagggtaatgttgtgttaaacttagaagagtggaaaaataccacttgtcccaagactggacttaaggctgtaagagatacggatacattcgatacattttttgaatcttcttggtattttttacgatactgcaacccaagatcagaaagtgcatttataaagcaggatgttgattattggcttcctgttgatcaatatattggtggaattgaacatgctatacttcatctgctttattcccgtttctttgttaaggttttaagggatttaaaacttattgacttaaaagagccttttaaaggtcttttcactcaagggatggttactcatcaaacttataaaactaaaagtggtgaatggataaacccagatgatgttattaaaaaaaatgatgaattattttttaaacaaggagaaaaagtatttgtaggcaaggttgaaaaaatgagtaaatctaaaaaaaacgtcattgaccctagtgaaattattcagaaatatggtgctgacactgcccgttggtttatgctttctgatagccccccagatagagatcttgagtggtctgataatggtgtaactggggcattcaaatttattaataaactatgggacacatctgttaaaataaaaaattactctgaaaaaaatactgaagaagatgaaagactagaacttaaattaaatgaaacaa

SEQ ID NO: 304522 - DNA, 937 bp, Unknown
  Bacterial polypeptide expressing nucleotide sequence isolated from the Sargasso Sea
taaaactgtactagcaaatgagcaggtcattgatggtagaggttggagatctggtgcgttagtagaaaagaaaaaactttctcaatggtttttaaaaattagtaaatactcagaagagcttttaaatgatttagataacttaactaactggcctaacaaagtcaaagttatgcagtcaaattggattggtaaatcaataggagtagagataaattttaaattatcaaatcaagaaaactttattaaagtttttacaaccagaccagatacaatttttggtgcaacttttttggctctttcaactgaacatgaattatcgatagatatttctaaagataataaagttatacaaaaatttattaaagaatgtaaaagtttaaatcctgataaaattaaaaagggttttgatacaggtttatttgtaaaccacccatttataaaaggtaaaaaattaccagtatatatcgctaattttgttttaaaagaatatggtctaggtgcaatctttggttgtcctgctcacgatcaaagagatttggactttgctaacgaatatggtctggatgtaattccagttgttaaaccaaacaacattaaagaagatgaatttaaaatcaaagataaggcattcacagaagatggtattattataaattcagactttttaaatggattagtggttgaaaaagcaaaagacataataattgaacaaattgaaaaaattaaaattgggaaaaggaaaataaattataagctaagagattggggaatttccagacaaagattttgggggtgtccaatacctattatttatagagaggatggagagataatcgcagtagaagatagtgaacttcctgttaaactaccagacattaaaaaatttaacgaaacttcaagcgcactaaataatatacctgatggaaagaaactattt

SEQ ID NO: 304523 - DNA, 909 bp, Unknown
  Bacterial polypeptide expressing nucleotide sequence isolated from the Sargasso Sea
catgggacatgttaggaactatactataggacacgttttatcacgatataaaattataaaaggttttaatgttttgcacccaatgggttgggactcatttggtcttcctgcagaaaatgctgcgaaagaaaataatcttgatcctaaagaatggactgaaaaaaatatttcagtaatgaaaagccaactaaaaaaactaggtttatcaattgattgggatagagaaatatctacttgctctgaagaatattataaacatcaacaattatttttcttagaactctttgaaaaaggcttagtttatagaaaagaaaattttgtaaattgggatcctatagatgaaacagtattagccaatgaacaagtaattgatgggaaaggatggagatcaggagcaatagttgaaagaaaaaaactaaatcaatggtttttcaatatttctaaatttgcagaagaactcctagcaggtttggatgagctaaaaaactggccaaataaggtaaaaattatgcaaaaaaactggattggcaagtcttttggttgtgaaatagattttaaaattgaaggtaacccatcaatagataaaataaaatgctttactacacgaccagatacactttttggattttcttttatggcactttcccctgaccatccagtggcaaaaaattttgaaaatgataatgaatttaaaaagtttaaggaagaatgttctaagactggtactactgaagagtctttagcaatggcagaaaaaattggttttaaaacaaatttgtttgcaatcaatcctttaaatcaaaaagagaaagtgccagtttactttgcaaattttgttttgatggattatggatttggagcagtttttgggtgcccagcacatgatcaaagagactttgattttgcaaa

SEQ ID NO: 304524 - DNA, 823 bp, Unknown
  Bacterial polypeptide expressing nucleotide sequence isolated from the Sargasso Sea
aatggtttaaaaattgaagaagggaaaattgcagtgattagaagacttgagaaaatggaaaaaggacgtggtcagacaatatttcggcttagagattggggaatatcaaggcaaagatattggggttgccctatcccaattttatatagagaagacggtaaaattctaacggttcctgatagcgagctaccaattaaacttccagaggatatagatttaaataagccgggaaatcctctagaaaatcatcctacttggaaatttacaaaatgtcctgaaacagggatgaaagcgattagagaaacggacactttggatacttttgtagattcatcttggtattttcttagattttgttctcatgataacaaaaatgctggttataatttagacgatgtaaaatactggatgccagtcgatcaatatatcggtggtgtagagcatgcaatacttcatttattatattcccgatttttttcaagagctattagtcttggatcagattacgaaattaaggaaccattccaaggtttatttacccaaggtatggtttgtcataaaacgtataaaaataaaaaaggtgattggatttttccggaaaatattgttttagaaaatgggaaagttttagataagaatagtggtgaggaagtatttgaagggccatcagagtcaatgtcaaaatctaagaaaaatgtaattgatccagagactgtaataaaactttacggagcagactcggtaagatggtttatgctatcggatagcccacctgaaagagatattcaatggagtgatgaaggtatcagtggatcatattaat

SEQ ID NO: 304525 - DNA, 651 bp, Unknown
  Bacterial polypeptide expressing nucleotide sequence isolated from the Sargasso Sea
catgtctgagaaatataatcctaaagtagttgaaaagaagtggcagtctttttggagtgagcaaaagctttttgaaagccatatcataaaagataaaaaaaaatattacatacttgaaatgtttccatacccatcaggaagaattcacatgggccacgttagaaattacacgctgggggatgttattgcgaggtttaaaagggcgcagggatataatgttatgcatcccatgggttgggacgctttcggtttgcctgcagaaaatgcagcaattgaaaataaaacgtctccgaaaacttggacctatgaaaatatttccacaatgaaagcacagctaaagcaaatgggtctttcacttgactggtcacgtgaacttgcaacgtgtgatgagatttattatcagcaacagcaaaaactttttttaaaattttataatgaaaatttaatttacaaaaaggaatcccttgtgaattgggaccctattgaaaatacagttctcgcaaatgaacaagtaattgatggaaaaggatggcgctctggtgccgaggttgagcaaaaaaaattatcacaatggttttttaaaattactgactacgctgaaagtcttttaaaaagcttggaaaaaatggaaaattggcccgaaaaagtaaa

SEQ ID NO: 304526 - DNA, 1009 bp, Unknown
  Bacterial polypeptide expressing nucleotide sequence isolated from the Sargasso Sea
agatattgggggtgtccaatacctgtaatttactatgatgatggcacatatagagttttagataaatctgaattacccgtattattgccatacgacgtaaatttaaatggtaaaggcaatgctttaattaatcacgaaagttggagaaaagtgaaatgtcctatcacaaataaatatgcccttagagaaacagatactttggatacttttgttgattcatcttggtattatataagatttttaaataacaagcttgataagccatttgataaagaaaccgtaaatgagtacttacctgtagacaaatatattggtggtatagagcatgcaatcctacatttattgtattctaggttttttatgaaagctctgagagatatttataacctaaaagttgacgagccctttaaacagctttttactcaaggaatgattactcataaaacatacaaaacacatgaaggttgggtaatgccaaaggacgttttagaaatcgatggaaagcttttaaaaagggatacaaaagaggccattgaagagggtccaaccgaaaaaatgtcaaagtcaaaaaaaaatgtaattgagccagatgaaatactggaaaactatggtattgacgcaacaaggatttttatgatttcagactctcctcctgacagggaacttgaatggacagatgagggtatacaaagttctaaaaacttagtgagaaggatagaaaagtatttcatgactgaaagaacagaagttttagatgatacaaaaaaaattgtagaaagattcatatataatattgaaaaaaatatttcaactttttcacttaataaatgtatagctgacatatataccctttttaactatttagaaaaaaataaagtataccttcacgatagtgaattaagtaaaaaaattctcatttgtttaaaacctattattcctaggatgtcatcaagtattataaaaaaactatttaaagaggataatgtgaaaaaattggccttcagttgat

SEQ ID NO: 304527 - DNA, 919 bp, Unknown
  Bacterial polypeptide expressing nucleotide sequence isolated from the Sargasso Sea
tcatgaaatttcaaaatattattcagaaaatgatgagttccaaaaatttaagagagaatgttcaaaaactgggacaactgaggaggcaattgccataggtgaaaaaattggatttaaaactgatttagaagcaattaacccactagataactctcaaaaagtacctgttttcttcgctaattttgtattaatggactatggttttggagctgtatttggatgtccaggccatgaccagagagattttgattttgcaaaaaagtataaactgaacatcaagactgttgttagacctgtggatgaaagtgatgattatcaagttaaaaaagaagcttatacaggctcaggcgtaatgataaattctgaatatttaaacaatcttaaagttcctgaagagtcaattttgaaaacaattgatattttagaggaaaaaagaattggaaaaaaacagataaattttagattaaaggattggggagtttcaagacaaaggtactggggatgtccaataccgatggcttatgatgaaaacgaaaatgtaattccaataccaaaaaaggatttgccagtaaaacttcctgaaaatataaatttaaacacaaaaggcaatccactggacgcaactgatgaatggaaaaatattgaaattaatggaaaaaaatacagaagagaaactgacacattagacacatttgtttgctcctcgtggtactatttaagattctgctctccacacgaaacaagttatggatttaaaaaagatgaaatagattattggatgcccgttgatcaatatataggtggcgtagaacatgcaattttacatttattatactcacgtttttttataaaagcattaggttacaaaaacgatgaatttagatttagtgaaccatttcaaggattatttacccaaggg

SEQ ID NO: 304528 - DNA, 901 bp, Unknown
  Bacterial polypeptide expressing nucleotide sequence isolated from the Sargasso Sea
gatgggatgcatattaattctgatttcttaaatggactttacattgaggatgcaatagaagcttctatcaataaaatttcaaaatataatattggagagaaaactacaacttatagaattcgtgattggggcgtttcacgtcaacgttactggggttgtcctattccaataattttttgtgataaatgtggtgaagtacctgttcctgatgaccaacttcctattacattgcctgaagatattacttttactaagcgtggtaatccattagaaaatcatccaaattggaaatttaccgaatgccccatatgcaaaagtaatgcaattagagaaacagatacttttgataccttttttgaatcaagttggtactttgcaagatttacagatttaaacaatacaaaaccatttaccgaagaagctattaaatattggatgccagttgatcaatatattggcggagtggaacatgctgttatgcacttgttatactctagattttttatgcgcgcattaaaatcaatcgattcaattaatattgatgaaccttttacttctcttcaaacacaaggaatggtttgtcatcaaacatttaccaccacaaaaaaacaatgggtatttccaaaagacgtaataaaaaaaaatggtaatctatttcatgttgtaactcatgaacctgtcttggctgggaggacagaaaaaatgagtaaatcaaaaaaaaatgttgttgatccgcaattaattattgataactttggagcagatacagcacgtttttttatgttatctgactcaccacctaatagggacatggaatggtcagagtctggaattgaaggttcatggcgttttttaaataaattatggcgatttgtttatagtttaaatgtaaaaacaataa

SEQ ID NO: 304529 - DNA, 835 bp, Unknown
  Bacterial polypeptide expressing nucleotide sequence isolated from the Sargasso Sea
aaaattggaataaaaactaacttaacagcaataaatccagttaattctgaacccattcctatttgggtggcaagttatgttctcgatgaatacggtacaggtgctgttatgggcgtgcctgctcatgatctaagagattttgaatttgctaagaaaaataatattgatatcaagcaggtaataataaaggataaatgtgaacaaagtaaagagcttgaagaagcttatgtagaaaaaggatatcttattaattcaaatcaatacaatggcatagaaaatactattgctaaaataaaaatttcagaggagggagtaaataatggatgggctgaaaataagattcaatatcgtctaagagattggttaatctctagacaaagatattggggatgtccgatacccatagttaattgcaaacaatgtggatctgttccattaaatcaatcggaattacctgtttccttaccaaaagatattgaaatctcggctaacaagattaatgctttaggtgaaaataataattggataaatactacatgtccaaaatgtggaatagaggcaaggaaagaaactgatactatggacactttcatgtgttcatcatggtattttttaagatatccatcttcaaaatgttctaataagccatttgaaaagattgaaatcaataagtggttgcctgtagatcaatatgttggaggggtagagcatgcaatattgcatttgttatatgcaagatttttcacaaaagccttgagggataatgaactatttgaaattgatgaacctttcaataaactattaacgcaaggaatggttcaggcagcagcctata

SEQ ID NO: 304530 - DNA, 973 bp, Unknown
  Bacterial polypeptide expressing nucleotide sequence isolated from the Sargasso Sea
tattcaaatgaatttaatgcccaagagtcagaagctgctattaaaaaaattactacaaagcttgaagacgcaggaaaggggatgaaagttgttgagtggcgtttgaatgactggggaattagtagacaaagatattggggttgccccattcccataatctataaagacggcaaacctcaaactgcaaatattaaagatttgcctgtgcttctgcctatgaatgaagatacatctactcctcttgcacaaaataacgactttatagatgagttggacggctttaaaagagaaaccgatacatttgatacttttatggaatcttcatggtattacgcaagatatccttcgtctgataacaataagcaagcttttgatgctaggagcaactattggctgcctgtagatatttatatcggagggatcgagcatgctattttacatttactgtatgctagattcttccataaagtattaagggatcttgggtatatcaaaagtgatgagccatttaaaaaattgttaacacaagggatggtattaaaggatggagctaaaatgtcaaaatctaaaggcaatacagttgatcctgaaccatacattgaaaaatttggggctgattcaattagaacatttatgatttttgcaagcccgcctgaacagtctttagagtggtcagatagtggtttagaaggatgtcataagtttttgaaaaggctctggaacctatcaaataaagttaataattttgatgaatctaaattcgacaaaaattctgatagtctgaaattagagaatataaaaatattttccaagataaacgacgactataaaaaaaggcttaacctaaatactattgtttcatcatgtatggaaattttaaataatatttcttcaagaatctcaaacgaaacaattagctgtgagaaaaaagattttgatgaatgctttcaattcttgctcatatcattatttc

SEQ ID NO: 304531 - DNA, 849 bp, Unknown
  Bacterial polypeptide expressing nucleotide sequence isolated from the Sargasso Sea
atcaatggccaaataaagtaaaagtaatgcaaaaaaactggattggtaaatcatttgggtgtgaaataagtttcaaaacagaaggtgatttgcctgtaaaagaaataaagtgttttactacacgacctgatactttatttggtttttcttttttagcattatctgttgatcacgaaatttcaaaatactttaaagacgacaaaaaattccaagatttcaaaaagcaatgttctaaaactgggaccacagaagaggcaatagctatgggagaaaaaataggatttaaaaccagtttaatggccacaaatcccttaaatcataatcaaaaagttccagtttattttgctaattttgttcttatggattatggatttggggcagtatttggttgtcctgcacacgatcaaagggactttgattttgcaaaaaaatatgatctagaaattaaaacggttgttcgcccagaagaagaaaatgatgattataaagtaaaaaatgaagcttatagtggaacaggtgttataataaattccgatttcttgaataaccttaaagttcctgaagagtctataatcaaaactataaatattttagaggaaaaaaaactaggtaccaaaaaaataaattttagattaaaggattggggtgtctccagacaaagatattggggttgtcccataccaattgcatatgatgaaaataaaaatcctatagctataccaaaagaaaatctacctgttaaactcccggaaaatgttaatcttaaatcaaaaggtaaccctcttaactctatggaccattggaaaaatatagaaataggtggcaaaaagtgtggtaagagaaactgat

SEQ ID NO: 304532 - DNA, 953 bp, Unknown
  Bacterial polypeptide expressing nucleotide sequence isolated from the Sargasso Sea
aaaatgcaaaagtaaatggtctgaatcaaattcatttgtagcaaaaaaagatctctcaaaagaaaagttttatatcttggaaatgtttccttatccatcgggaaaaatccatatgggccatgtccgtaactatacactaggagatgttatagcacgatacaaaagaggaagaggctttaatgtacttcacccaatgggatgggatgcttttggaatgcctgctgaaaatgctgctatgcaaaataatattcatcctgctgaatggacttacagcaatattgaaactatgaaatctcaattaaagttaatgggattatcaattgattggtctcgtgagtttgcaacgtgtgacagagattattatcatcatcagcaaaaattatttaagaaactttacaaaaataatcttgtttataaaaaaaaatcgtacgtcaactgggaccctgtagataatacagttcttgctaatgaacaagtcatagatggtaaaggatggcgatctggagctgaagttgaacaaaaagaactctctcaatggttttttaagataaaggattatgccgatcaattactaaatgatttggatcatttaaatcattggccagacaaagttaagctaatgcaaaaaaactggattggaagatctgagggatgttatttacgttttgatattttagatgaaacacataaaaaaattgatcagcaattagaaatatttaccacaagacctgatactattttcggtgcgtctttttgtgcaatttcacccatgcatcctcttgcaaaaaaaatatcaaaaacagataaagctatacagaatttcattaatgaacaaagctcatctgcggtgaatgaggagtcagttgcaagaactgaaaaagaaggcataaagactggcttgagtgttcagcatccatttataaaagaccaagtttttaccttatatacatagc

SEQ ID NO: 304533 - DNA, 355 bp, Unknown
  Bacterial polypeptide expressing nucleotide sequence isolated from the Sargasso Sea
tatggatagagaatataaacctaaaaacattgaaacttttatacaagatatttggaataagagtaatgctttcaagacagatttaaataacttaaaaaataagtattattgtctaagcatgtttccatatccaagtggcaaactccatattggacatgtcagaaattatactattggggatgtaatttctcgtggtcaaaaaatgcttggcaagaatgtatttcagccaatgggttgggattcatttggattacctgcagagaacgctgctatagaaaataagattcacccggcagagtggacaagaaaaaatattaatcatatgagagaacaattatctagactaggttattca

SEQ ID NO: 304534 - DNA, 398 bp, Unknown
  Bacterial polypeptide expressing nucleotide sequence isolated from the Sargasso Sea
tatgaaaaaccaaataccttataatccttcaattattgagccaaagtggcaaaaaaaatggaaggattcaaaaatttataatgttgatttagattctaaagataagaaaaattatttctctcttacaatgtttccttatccttcaggggatttgcatattgggcattggtatgcttttactcctgcagacagctattctcgtttcaaaaaaatgaaaggtttcaatgttctccacactcaaggttttgatgcctttggtttacctgctgaaaatgccgcaatttcaagaaacataaacccaatgaaatggacattcgacaatattgacaatatgagaggacagtttaatttaatggggaattcatatgactggtctagagagttaattacttgcacac

SEQ ID NO: 304535 - DNA, 958 bp, Unknown
  Bacterial polypeptide expressing nucleotide sequence isolated from the Sargasso Sea
aataatataaaagtttttactaccagaccggatacaatatttggtgcttcttttatagcgctttcggttgatcattcaatttcaaaaaaatttgaaaataataatagtttcatttcttttaagtcagaatgttcaaaaatgggaaccacggaagaagctttagcaaatgctgaaaaaattggttttaatacaggtttatttgcattacatcctttcgataaaaaaattaaacttcctatttttattgctaattttgttttgatggattatggaacaggcgctatatttggttgccccgcacatgaccagagagacttagattttgcaaataaatatgatcttaaagtgctgcccgtagtaaaaccaaaaaatatggaagctggtaaatttatcataaaaaatgaggcttttactgaagatggagtactgtttaattcgaattttttagatggtcttgcggttaatgaggccattgaaaaaataataaaagtaattacaaaaaaaaaattaggtaataaaaaaattacatttcgccttaaagactggggtgtttctagacaaagatattggggatgtcctatccccatagtttacaacaaaaaaggggatgcaattccagttaaaaaagaaaatctacccgtgttactaccagataatgttgatcttaatgtaaagggaaaccctttagaaaagcatcctgcctggaaatttactcaactttcttcgggagaaaaagttgttcgagaaactgataccttggatacattcgttgattcttcttggtattttataaggttttgttcatcaaagcataaaggatatggttataaattaagtgatattaaatattggatgcctgttgatcaatatattggcggggttgaacatgcaatattacatttactttattcaagattcttcatgcgagcattagcatataaaaataaaaattttaatt

SEQ ID NO: 304536 - DNA, 517 bp, Unknown
  Bacterial polypeptide expressing nucleotide sequence isolated from the Sargasso Sea
atggatgccaaatggcaacaacgatgggaaacagacgggttgcacaaagtatctgatgagactgataagcctaaatggtatgagatgaccatgtatccgtatccttcaggtgatttacatatagggcattggtacgccatggctcctgctgattgccatgctcgtttcaagcgtatgcagggctacaatgttcttcatccgataggttttgatgcattcggcctgcccgctgaaaatgctgcaataagtcggggaattcatccccatgaatggactatgagcaatatcgacaatatgaggcgccaacttaggtctctaggagctatatacgattgggatagggaagttatttgttgtttgccagagtactataaatggaatcaatggttattcctaaaactgtttaaccagggtctggcatataggtcacaggcgcctgtagtgtggtgtccgtcgtgtcagaccgtgttggcaaatgaacaggtgcttaatggagcttgtgaacgtgcgatacgca

SEQ ID NO: 304537 - DNA, 628 bp, Unknown
  Bacterial polypeptide expressing nucleotide sequence isolated from the Sargasso Sea
gaaaacaatagatgagtcaaaaaaagatgtgattaaaaaactttctgagttgggtgttggaaatgcaaaaactaattatcgtctaagggattggggcctttctagacaaagatattggggctgcccaatacctatgatgtatagagaagatggagaaattattcctgttccaaaaaaagatctgcctgtgaagttgcctcatgtcaatgagctatcgggatctggcaatattttagaaaaaattgaaggttggaaaaatgtgctttgtcctgatactggaatgaaagcaattagagaaacagatacttttgatactttttttgaatcttcttggtattatttaagatattgtaatcctagatttgaagaagctttcataaaagatgatattaaatattggcttcctgttgatcaatatattgggggtattgaacacgctatcttacatttgttatattcaagattctttattaaagctctaagggatgttggttatatagatcttgatgagccttttagtggattatttactcaaggaatggtcactcatcaaacttacaaaaattcaaagaatgagtgggtcaatcctgaagatgtgatttataaagaaaaatcagcagtcgataaa

SEQ ID NO: 304538 - DNA, 630 bp, Unknown
  Bacterial polypeptide expressing nucleotide sequence isolated from the Sargasso Sea
aatggatacagaatataatcattcgaaaattgaacaagagattcaatccgtatgggatgaatcaagtgccttcaaggcagaaatagataagaagaagccaaaatattactgcttatctatgcttccctatccgtccggtaacttacatatgggacatgttagaaattatgcaatcggtgatgcagtttcaagatacaagagacttaaaggtttcaatgttctacagcctatgggttgggatgcatttggtttgcctgctgaaaatgctgcaaaaggaaaagatatccatccaaaagattggacagaaaaaaatatagcaaatatgcgtgaacaacttaaatcgttaggttttagctacgattggtcaaaagaactaaatacatcagatgtctcttactacaagtttgagcaagaattatttttaagattttatgagcacggcttagcatatcgaaaaaaatcactagtgaattgggatccggtagatgaaaccgtacttgcaaatgaacaggtcatagatggtaaagggtggagaacaggagctgaagtcgaattaaaagaaatagacacctggtttttaaaaattacagattacgcagatgagctagaagaaagtttagagacaataga

SEQ ID NO: 304539 - DNA, 758 bp, Unknown
  Bacterial polypeptide expressing nucleotide sequence isolated from the Sargasso Sea
caagattaatgctttaggtgataataataattggataaatacaacatgtccaaaatgtggaatagcagcaataaaagaaactgatactatggatactttcatgtgttcatcttggtattttttaagatatccatcttcaaaatgttcaactaagccatttgaaaagaatgaaataaataagtggctgccagtagatcaatatgttggaggagtagagcacgcaatattacatttgttatatgccagatttttcactaaggccttgagagataatcaactatttgaaatagatgaaccattcaaaaagctattaacgcaaggaatggttcaggccgctgcctataaaaacaataacacgggtaaatatgtttctccttccgatattactgacctatcaaatcctacagatccaattgacaattccaaactggaagttcttttcgagaagatgtcaaagtcaaaatataatggaatagaccctgaatcagtaattaataaatatggagcagatacagcaagaatgtttatattatttaaagcaccaccagaaaaagatttggaatggggagatacagatgttgaaggacaatttagatttttaagcaggatttggaagctttatataaattgtgcaaaagatataaatagtaaaagtaagtcctatccagataaagaaaaaactttaataaagtcaatgaacattgctataaaagaaatttcaaatgacatattaaataaccaatttaatactgcgattt

SEQ ID NO: 304540 - DNA, 1000 bp, Unknown
  Bacterial polypeptide expressing nucleotide sequence isolated from the Sargasso Sea
catgaaaggttttaatgtgcttcatcctatgggttgggatgcgtttggtcttccagcagagcaatatgcgataaaaacaggtactcatccaaaagaaacaactcaacaaaatgtttcaaatttcaaaaaacagataaatagccttggattctcttacgattggtcaagagagattaatactacagatccaaattactataaatggactcaatggattttcatgcaactttataataaaggtttagcttatgaacaggaggttgctgttaattggtgtcctgaactaaaagcagttcttgctaatgaagaagttgttaatggaaagtctgatataggtggacatccagttgtaagactaccaatgagacagtggattttaaagattactgattatgcagagtcattacttgatggattagatgatttagattggcctgaaaatattaaagaacttcaaaaaaattggatcggtaaatcagagggtgtagagttagggtttgaaattgatgggcataatgatacaatcaatgtttatactacaaggcctgatactctttttggtgcatcttatatggttttagctcctgagcataccttaattcattcaattgtctctgatgagcaaagatcaaaagtggaagcttatatagatgaaacaaaaaagaaatcagattttgatagaacagaagttaataaggataaaactggtgtttttactggaagctatgcaataaatccttttagtaaagaaaaaattgaaatatggatagctgactatgtgttaataagttatggaactggcgctattatggctgttcctggtcatgacaaaagagattgggagtttgcatcaaaatataatctccctatagtagaagttgttgagggtggagatgtgtctaaagctgcatttactgcaaaaggtgacgcaaaaattataaattcttcaaacgataaaactttatctatgggatgtttgactgtagatagagctattaag

SEQ ID NO: 304541 - DNA, 758 bp, Unknown
  Bacterial polypeptide expressing nucleotide sequence isolated from the Sargasso Sea
tcaaaataacaaaattttagactcaaatataaatgagttagggtttggaaagatggaaaagatgagtaaatctaaaaaaaatgtagttgatccaaatgatataattaatttatatggagctgacaccgcaaggtggtttatgttatctgatagcccgcctgaaagagatctgcaatggtcagaaactggtattttatcatctcataaatttattaataaactatgggatttatctcaaagataccaattatataaaaccaattcagaaaccggtgatgctaattgtaaaaactctttaagcttattaaccaaagatgttggtaaaaacatacagtcgtttcattttaataaatcagttgccaagatttatgaatatgtaaacctattaaacaattatattgttgaaaaaaatatatcaaaaaattgcttttcttggtcattaaataatctttgtttgattattcaaccatttattccacatgtaagtgaagaaatctggtctgctataggaaacaaagaattgtgcataaaccaagaatggcctaaaattaaaaccgttgatgatgtttcaaatttcaaaatagttgttcaagttaatggaaaaaacagaggtttgtttgagtttgaagagggcacaaccaaggaaaagattatcgaaaaaataaaaagtgatgataaaattatgaaatacgttgagggaaaaaaaatattaagagaaatatatgtgccaaaaaaaatatttaatttagttatatgat

SEQ ID NO: 304542 - DNA, 866 bp, Unknown
  Bacterial polypeptide expressing nucleotide sequence isolated from the Sargasso Sea
aataccaattattaaatgtaatagttgtggagattcgccagttccagtaaaagaacttcctgttgaactaccctatgacattgacttagacacacctggtaatcctcttgatgctcacccaaaatggaagtttgttaaatgcccaaaatgtaataaatctgcagaaagggagacagatacttttgatacattttttgagtcttcatggtattttattagatttactgatcctgatattaaaacaccatttaataaatcaatagctgattattggatgcctgtagaccaatatataggcggcgttgaacatgcagtattacatttattatattcacgtttttttacaagggcacttaaagactgtgggtatttatctatttctgaaccatttaagggattaatgacacaaggaatggtttgtcaccaaactttcaaatcaggagatggtaaatgggtatttcctcatgaagtagaaaagaaaaataataaattttaccatatagtaagtggtaatgaaatatttcctggcagaatagaaaaaatgagcaaatctaaaaaaaatgttgttgatcctttatcaatagttaataaatatggttcagatacagctaggattttcatggtttcagactctcctccagaaagagatatggaatggagtactgctggtgttgaaggctcatttaaatttttaaatcgagttttaagaattgtaaatgagtctcaaaaaccaaaaaagttaattaatttagaccatgtagacaaaaataacataataattaaaaaagtacatcaaaccataaaagatgtcaccgaaggaattgaaagcttcaaatttaatatttgtatagccaaaattatatgag

SEQ ID NO: 304543 - DNA, 964 bp, Unknown
  Bacterial polypeptide expressing nucleotide sequence isolated from the Sargasso Sea
ttggttgcccagcgcacgatcaaagagatttttgattttgcaaaaaaatatgatctagaaataaagactgttgttcgaccaatggacaaagatgagaattttaaagtactcaatgaggcatatccaggaccaggtgttttgattaattcagagtttctaaatggtcttaaagcaccagaagattctatacttgaaacaattaagattttagaaaaaaaaaaattgggaaaaaaacaaataaattttagattaaaagattggggtgtatctagacaaagatattggggatgtccaattccaatagcatatgatgaaaatggtattgcttacccaattcctaaatcaatgttaccagtggagcttcccgaaaatatagatctaaatgttaaaggtaatcctctagataaccaaaatgattggagaaaagtaattatagatggaaaacaattgataagagagacagacactttagatacatttgtatgttcgtcttggtattacttaagattttgttcaccaaaagaagctgaatatggatttaagaaagaagatatcgattactggatgcctgtagaccaatatatcggtggtgttgaacatgcgattttacatttactttactcaagattttttatgcgagctttatccgaaaaaaatattaattttaatatcttagaacctttcaatggtctatttacacaaggaatggtgtgtcatgaaacttataaagatccagacaataattgggtaagtcctgaagaaattgaaaacattgatggaaagaagtatcttaaacaagataaatcaaagttgatttcgattggaccttcagaatctatgtcaaaatcaaaaaaaaatactatagatcctgaaaatataattgccaattatggtgctgactcagcaagactttttatattgtcagatagtcctccagaaaaagacgttcaatggtctgaagaag

SEQ ID NO: 304544 - DNA, 321 bp, Unknown
  Bacterial polypeptide expressing nucleotide sequence isolated from the Sargasso Sea
tatggaaagagttaaattttcattacttgaaaaaaagtggactcctgttttagagaaacgaaaattatatagtaacaagtataaaaaaaacttttattgccttgagatgtttccttatccatcaggcaaaatacatatgggtcatgtaagaaattacacgataggtgatgttttagctagatacaaatttatgaatggttataacgttcttcacccaatgggttgggactcttttggactacctgcggagaacgcagctagacaaaacaagcttagtccaaaagtttggactaataaaaatataggagaaatgaaaaggca

SEQ ID NO: 304545 - DNA, 854 bp, Unknown
  Bacterial polypeptide expressing nucleotide sequence isolated from the Sargasso Sea
tgaaactgttttagcaaatgagcaagtaattaatgggcgaggctggagatctggtgcagttgtagaaagaaaaaaattaaatcaatggtttttcaatatatctaagttttcagaagatttattagaaggtttaaaaaaattggataattggcctcaaaaagtaaaaactatgcaaaaaaattggataggaaaatcttttggttgtgaagtagattttaaaattgagggaaatgaaactataaaaaaaataaagtgttttacgacaagacctgatacgcttttcggattttcatttttagctctatctgttgatcatcctttagctaaattatatgaaaaagacaaaaattttaaaaaatttaaagacgaatgtggcaaaactggaacaactgaagagtctattgcaaatgctgataagctgggttttaaaaccgatttaaccgcaattaatcctttagatagttctattaaagctcctgtttattttgctaattttgttcttatggattatggatttggtgcagtttttggttgtccggctcatgatcaaagagattttgatttcgcaaaaaaatataaattaaatattaattgggttgtaagacctgaagatagtaatgataattttagatctgaagaagcttatactggtacaggtataatttttaattcaaaatttttaaatggtctaaaagttcctgatgaatcaatagttaaaactatagactatctagaaaaaaacaatttagggaaaaagaaaattaactttagattaaaagattggggagtatccaggcaaaggtactggggatgccccattccaatagcatataatgaaaaaaatgaagttgtaa

SEQ ID NO: 304546 - DNA, 907 bp, Unknown
  Bacterial polypeptide expressing nucleotide sequence isolated from the Sargasso Sea
gtagagggtgatttaccagttgacaaagttaaatgttttacaacaagaccagatacattgtttggtttttcttttttagctttgtcaattgatcatgaaatttctaatttttataaaaatgatccagaatttttaaaatttaaagaagattgctcaaaaacagggactactgaggaggcaatcgctgttggagaaaaaattggtttcaaaactaatttaaaagctactaatcctcttaacccaaatcataaagtgcctgtttattttgcaaatttcgtactaatggactacggatttggtgctgtatttggatgtcctgcacatgatcagagagattttgattttgctaaaaaatataatctaaaaatcacgacagtagtaagacctttagataaagatgataattttcaggtaaccgaaaaagcttatccagatccaggtatattaataaattctgattttctaaacggattagaagctcctgaaaaatcagttttagaaacaattaaaatattagaagaaagagaattagggaaaaaaaaaattaattttagattaaaagattggggtgtttctagacaaagatattggggatgccctataccaataatatatgatgaaaatggtaaagagcatgcgatcccaaatgaaatgttgcctgtaaaacttcctcaaaatattaatttaaacgtcaaaggcaatccactagacaaggaaaaaaactggaatgaaataataatagatggaaaaaaatttaaaagagaaacagatactcttgacacttttgtttgctcatcttggtacttcttaagattttgttctcctaagaataaagattatggtttcaataaagaggatattgattattggatgcctgttgatcagtatatcggtggtgtagaacatg

SEQ ID NO: 304547 - DNA, 971 bp, Unknown
  Bacterial polypeptide expressing nucleotide sequence isolated from the Sargasso Sea
gagcttctcgaaggacttaatgagataggtgattggccagagaatgttaaggcaatgcagcaaaattggataggtaaatctgagggtgcagagttttcattaaacatagatgatacagatttaagttttgatgtttttactacaagaccagacacattatttggaatgacttttgccgttctttcacctgagcatcaattaatggatgaagttatttctatttcatcaaatcgtgatgagatagaaaattacattgataatgctaaaaagaaatctgaatttgagcgaatgtcactaactaaagaaaaaacaggagttgatacaggtctttttgtaataaatcctgttaatggaaaaaaagtttcattgtggatagcagactatgtattaattaactacggtactggtgcaattatggctgtacctggtcatgaccaaagagactacgatttcgcaaaaaaatatggaattgaaataattcaagttatatcggataaaaacagggaatcttcaattgaaaaagaagcttttattggtgaaggaatactgattaactcaggagactttgatagtttaaaatcacacactgaaggatcagagaaaattatacagtatttagaagataacaaaattggaactagtaaaacaacttttcgtttgagagattggttaattagccgtcagagatattggggatgtccaattccattaattaattgtgataagtgtggaatggtacctgagagtgaagaaaacttacctgttttactgcctgaaattgatgattataaaaatacaaatgaatcacctcttgcaaaaagtgaagattttattaatacaaactgtcctgaatgtgggattaaagcaacaagagaaacagatacaatggatacttttgttgattcatcctggtatttttttagatttgtagatccaaaaaatgatgatattccatttgatgccaataaagt

SEQ ID NO: 304548 - DNA, 767 bp, Unknown
  Bacterial polypeptide expressing nucleotide sequence isolated from the Sargasso Sea
tatgcacgatttgtttgaaagcgtatatgatcctggccagatcgaggaggccatacaaaaacattgggtgaaaagtaagatttttgaggttgatgaagacgactcaagggaaaaattttactgtctgtgtatgtttccttaccccagcggtcgattgcacatgggtcatgtgaggaactataccataggggacgtcatagctcgctacaaaaaaatgaaaggatttaatgtcctgcagcctatggggtgggacgctttcggtctcccagcggaaaatgctgctattgaaaaccagactcacccagcaaagtggactatatcgaatatagagtatatgcgtaaccaattggagagattaggtttcgcctatgactggagaagagaactatccacttgtgatccaagttactataggtgggaacaatggttttttacaagactgtacgaaaaaggattggtttaccggaaagaagcagaggtgaattgggatccggtggatcagacagtattggctaacgagcaagtaatagatgggtgcggttggcgctcaggggtcccagttgagcgtaagagaattcctcaatggttcttaaaaataactgattatgcggaagaactcctcgacggattagagagtttagagggttggcctgaatcagttaagacgatgcaaagaaattggatagggcgatctgttggggttaacatcacgttcaccctagatggagctagagataatctagaggtatttactacccgacctgata

SEQ ID NO: 304549 - DNA, 898 bp, Unknown
  Bacterial polypeptide expressing nucleotide sequence isolated from the Sargasso Sea
tcaaaagtaaaaactatgcagaggaattggataggtaaatcttttggatgtgagttagattttaaaattacaggtagtaaagatgtagatacaataaaatgttttactacaaggcctgatacattgtttggtatgtcttttttagccatatcagtagatcatcctattgctgaactttatagaaacaatcaagaatttgagaaatttaaaaaagattgttcaaaaacaggaactactgaagaatctatagcacaagctgaaaaattaggttttaaaactaatttaatagctataaatcctttagatgaagcaattaaggtgcctgtatattttgcaaactttgttttaatggactatggttttggagctgtatttggatgtcctgctcatgatcaaagagatttggactttgctttaaaatataatttaaaagtaagtcctgttgtaaaaccaactgaaaaggatgataattttgaaattgataaaattgcttataccggttctggggtaatatataattcaaaatttttggacaatcttaaagttccagatgagtcaattactcaaacaattgatattttagaaaaacaaaaaattggaaagaaaaaaataaattttagacttaaggattggggtgtttcaaggcaaagatattggggttgcccaatacctatagcttataatgataaaaatgaaatagtgaaagttcctgatgaaaaactaccaataaaactccctgaaaaaataaatctaaatgtaaatggaaaccctctcgactatcaatcagagtggaaaaaaattgaaattaatggagagttatgtactttagaaactgatacgttagacacatttgttgactcttcttggtattttttgagattttgttctccaaaataat

SEQ ID NO: 304550 - DNA, 859 bp, Unknown
  Bacterial polypeptide expressing nucleotide sequence isolated from the Sargasso Sea
gcttttgtctcgtcacggtactgggggttgtccaataccaattgtttattgcgagaattgtggagaacaaccggtgccagtagatgagttgccggtaaatcttcccgatgatgttgagttcatgccaactggaagatctccgcttaccactcatgaagagtttctaaatgtgacctgcccaaattgtgggggaggagcgagacgggaaacagacactatggacacgtttgttgattcgtcttggtactttctccgtttcgcagattcaaacaacaagcaaaacccattcgacatagaagctatagaacgatggttgccagtagatcaatacatcgggggagtagaacacgccatcctccatcttatgtacgctcgtttttttacaaaggcgttagctgatcttggggtagcccccaagaatcttcgagaaccgttcagccgtctcttcacacaaggcatgattcgccttggcggaacaaaaatgtctaaatcaaaaggaaaccttgtcgccccagaagaaatcttggatcgtcaaggagccgatgcattaaggcttgctcacttacaagtcaaacctccacaagaagatgttgactgggaggacctcgggatagatggatgctctaaattcattggtcgcatttggcgtcttgctttatcaactaaagacctcccaggagaacgccgagaaggaaacccttcaaccgcagatttagaaattgaaaaagcaacccatcggttaatggatcgaatcactaacgagtatgaccgctggtcatataacacagcgattgctggattcatggagttcactaacactctttaccgatggattcaatcagaagaaggagcgcatggt

SEQ ID NO: 304551 - DNA, 571 bp, Unknown
  Bacterial polypeptide expressing nucleotide sequence isolated from the Sargasso Sea
atgcaggagtacgttccaaaggaaattgaagaaaagtggcaaaaatactgggaagagaaaaatttactggattatgattttgaatcagaaaatccaaaattttacatgctgaccatgcttccatacccttcgggagatttgcacattggtcactggtatgccatggcaccatctgactgttatgctcgttttaagaaaatgaaagggttcgaagtttttttcccaataggttttgatgcttttggacttcctgctgaaaatgcagctattaaaaacaatatccatccaaaatcatggacatatgaaaatattaaacgaatgcagaagcaacttcgttccatgggaaacatgtttgcttggaaaaatgaggttgtctcatgtgatccagaatattacaagtggagtcagtggtttttcctcagaatgttggaggaagatatggcttacagggagtatgctcccgttgattattgtaaccaatgtcagactactctagctagagagcaggtatggggtgaggatagagtatgcgaacgatgtggtaatccagtggtaaagaaagatttaaatc

SEQ ID NO: 304552 - DNA, 883 bp, Unknown
  Bacterial polypeptide expressing nucleotide sequence isolated from the Sargasso Sea
attattggttacagttgaccaatatataggtggaattgagcatgcaatacttcatctattatattcaagattttttactaaagctttgagagatttgggatattttaatttaaatgagccctttataggcctttttacacaaggaatggtaacacaccaaacatataaagatattaaagataattggcttgaaccaaatgaggtaaaaaaaagaggcgatgaattttttgataacgacaataacaaagtaatagttggaaaaactgaaaaaatgagtaaatcgaaaaaaaatgttgtagaccctaatgatattattgagttgtatggagcagatacggcaagatggtttatgctttcagacagtcctccagaacgtgacttacaatggtcagaaacagggataattgcatcacacaaatttatcaataaaatttgggaatttgtaaataaatttgaaaactataatcatagcgaggatctaaaagataactcagcaaagaacaggctcaaaaaattaataacagaagtaaccgctaatattgaaaattttcagttcaataaatcagttgctaaaatttatgaatatgtaaatttacttagtgactcaattatgaaaaaaaatattagtaaagaagcgtttaagtgggcgttacaaaaactctctttgatactacaaccctttgtgccacatgtaagtgaagaaatttggtctcaaataagcgtaaatggtttttgtattaatgaaaattggcccgatgtaaacttcatagaagaaagtttaaatattaatctaccaattcaaattaatggaaaaaccagaggtttattggaagttgataaaaatatagaaaaggataaaataattgaaataataaaaaatgat

SEQ ID NO: 304553 - DNA, 799 bp, Unknown
  Bacterial polypeptide expressing nucleotide sequence isolated from the Sargasso Sea
ttatatgaaaataaccaagattttatcaaatttaaaaaagaatgttcaaaaagtggtacaactgaagaatcattggctgctgctgagaaaattggatttaagacaaatttaatagccgttaatccctttgatgataaaattaaagtcccagtttattttgcaaattttgttttgatggattatgggcttggtgctgtatttgggtgtccagcacacgatcaaagagatttagattttgcaaaaaaatataatcttgatattagaaccgtagtcactccctctttagataaccaaaattttattgtaaagaatgaagcttatacaggtccaggatatatattcaattcatcttttttgaataatttaaaatgtccagatgaatctataataaaaacaattgaacatttggaaaaaaataatttaggaaaaaaaaaaataaattatcgcttgaaagattggggtatctctagacaaagatattggggttgtcccattccaattgtttacgatgaaaataacaaaccacaaaaaattccagaaaatatgttgcctgttgaattgccaaaaatcgaaaaatttaaaaattcaggtaaccctctagacttagatgataattggaaaaaagttaaaattgatgacaaagtgtatacaagagaaactgatacattagatacttttgttgactcttcctggtattttttaagattttgttcacctaacaaaacagattatggtttcaatcaagaagaaatcgattattggatgcctgttgatcaatacattggtggtgttgaacatg

SEQ ID NO: 304554 - DNA, 822 bp, Unknown
  Bacterial polypeptide expressing nucleotide sequence isolated from the Sargasso Sea
aattggtctcgcgattgactggaacagagaaatatcaacatgcagtgatgattattacaaacatcaacaaaaattatttatcgatctctataataaaggattaatttataaaaaagatagctatgtaaattgggatccagtagacaatactgttctagctaatgagcaagttattgatgggagaggctggcgatcaggagcaattgttgaaaagaaaaaattgtcacaatggtttttaaagataactgctttttctaaagagcttttagatgatttgaaaggactagatgaatggccagaaaaagttaaaacaatgcaaaaaaattggataggttattctgatggagctgaaataatatttaaagttgttaataaaaacctggaaattaaagtttttactacaagaccagaaaccatttttggtgcgagtttcattgctgtttcagttgaacatgaacttaatttattatttaatcatgacaaaggattccagatatttagagaaaagtgcctaaaaaatcaatccagaattgataatgaagatgaaaaattaagttttcctaccaagctttttgttgaacatccttttattaaagggaaaactttacctgttttttttgccaattatgttctaatggactacggaaatggtgcaatatttggatgtccagctcacgataacagagactatgattttgcaaaaaagttcaaaatttcgataactaatgtaataaaaactgtaaagaaaaatgaaggtggggaattgccttattcaggaatctctgaaaatgacataatgattaattcagaatttttaaatga

SEQ ID NO: 304555 - DNA, 849 bp, Unknown
  Bacterial polypeptide expressing nucleotide sequence isolated from the Sargasso Sea
cctggaggcaaaagatatggggaaaggggcggtcaactacaagttgcgcgactggattttctcccgtcaacgctattggggtgaaccgattcccttggtttgggtcagcctggaagactttgagaaagccgccaatacggaaggtatcatcaaggatctgctccccgaacgcgccgtaacgacgcaaagagatggagaaaccctctatgcccttccccttcctgcgtccgagctccccctcaaactgcctgaagtggaaaactatcaaccctccggcaccggagaaagtccgctcgccaccatacccgaatggctagaagtgtggtttgatctatccacgggcaaaacagtttcccgatcggaagacaaacctagaggtgaaaattgggtgtccgctactcgggaaaccaacaccatgcctcaatgggcgggttcgtgctggtaccacttgcgctacctcgatccttcgaacaccgagcaattggtctccccggaaaaggaagcttattggggcgggcctgacttttacattggtggagccgaacatgccgtcctacacttgctctatgcgcgtttttggcatcgattccttcatgacgaaggcgtactcgctcatcccgaaccgtacgggaaactcttccaccaaggcttgatactgggtgaagacggaaacaaaatgtccaaaagcgtgggcaacgtggtaagcccggacatcgtgatcgaagcttacggcgctgactccctaagactcttcgaaatgttcctcggccccttggaagcggtcaagccttggagcgagaaaggtatcgaaggagtccacaggttcctgcgcaaggtcaaccgggaatg

SEQ ID NO: 304556 - DNA, 443 bp, Unknown
  Bacterial polypeptide expressing nucleotide sequence isolated from the Sargasso Sea
aatgaaatcaaaaaaatatgtacttgagatgtttccatatccatcaggaaatatccatatggggcacgtacgaaactatgtaattggggatatctgcgctagataccacaaacttaaaggagatgaagttatacacccaatgggatgggacgcttttggcttaccagctgaaaatgctgctattaaatttggaactcacccacaagattggacgctttctaatattgaaaatatgaagacacaacttcaaaagcttgatttagatttaaactgggatagagagcttgctacatgcaatgaagattactacagacaccaacaggaattatttattgacctttacaacgctgggttggcatataaaaaagatgcgctagttaattgggatcctgtagaccaaaccgtgcttgcgaatgagcaagtaattgatggaaaaggatgga

SEQ ID NO: 304557 - DNA, 1069 bp, Unknown
  Bacterial polypeptide expressing nucleotide sequence isolated from the Sargasso Sea
ttagatacatttgtttgctcatcttggtattatttgcgtttttgttctccgaatgaaaaaaattatgggtttaaaaaagacgaaattaattattggatgcctgttgatcaatatataggtggagttgagcatgcaatattgcatcttttatattcaagattttttatgagagctattgaatataaaaataaaaattttgatatcaaagagcctttcaaaagtttatttacacaaggtatggtttgtcacgaaacatataaagacaaaaacaataattggttaagaccagacgaagtggaaaaagttggaaaagacatagttttaaaaagtaatccaaatgagaaagtaattattggggcatcagaatctatgtcaaaatcaaaaaaaaatgtgatagatccagaatttataattgaaaactatggagcagattcagttagattgtttattttatctgatagtccaccagaaaaagatgttcaatggtcagatcaagggatggtttcatcctacaaattcatacaaaaattatggcttctgcataacgaaataaaaaataaaattaacatagaaaacaaagaaaagacaaataatgaattagatttatttacaaaccagataattgctaaaattacagataacttagaaaaatttaattacaatgtaattgtggctaatatgtacaagacttataatttccttatcaaatttttaaataacaataaaaatttaagtaacttagaagaaaattataagaagatcttaatatgcttctcgcctgtcatacctcactttgtaagcgaatgtttaaatgacttaaaggttgatcaagatattttttggccaaaatttgataaatcacaattagaaaatgagaaaattaactttgttgttcaaataaatggtaaaaaaagagcaatattaagtgttaataatggcgtcaatgaaaaagatattttgtcaatgttaaaaaataacagaaacacagaaaaatatttaacacaagttaaaataaataaaataatatttgtacaaaatagacttataaatattttaatagatgaataaa

SEQ ID NO: 304558 - DNA, 1192 bp, Unknown
  Bacterial polypeptide expressing nucleotide sequence isolated from the Sargasso Sea
attgggtaacaaaaaatatattttagaaatgtttccatatccctctgggaacattcatatgggacatgtaagaaattatgtcattggtgatatttgtgcacgctatcacaaattaaaaggtgatgaggtgatacaccctatgggctgggatgcatttggtctccccgctgaaaatgcagccattcaattcaatacacacccacaaaactggacattatcaaatattgaaaatatgaagtctcaacttcaaaaactagatttagatcttgattgggatagagaactagctacatgtaacgaaaattactatagataccaacaagagctatttattgatttatacaatgccggactagcatataaaaaagatgctcttgttaattgggatccgattgatcaaacagtgctcgccaatgagcaagtcattgatggaaaaggatggaggactggtgcagaagtagagcaaaaaaccttatcccagtggttttttaaaattactaactatgctgaagaactactttctgaattagataatttaactttatggcctgaaaaggttaaagtgatgcagagaaactggattggaaagtcaattggggctgaaattgactttcaattaagtagtctcgataaaaagataaaagtttttaccactagaccagatactatatatggtgcatctttcattgctatatccgttaaccatcaaattgtttccaatttattagacaaatcagaaatcctgaagataaaagaacaattcaatggaatagaatatgacaaagaaaaaataggcattccacttggcattaattgtattaatcctatcactaatgatttaattcctttgtatattgctaactttgttctagacaattatggagaaggagcaatttttggatgcccggcacatgatgaacgtgattttgaatttgcccaaaagtatcaactgcctattaagaaagtagttgaatgcaaggataatcagctgccctacactggtgatggaaaaatcataaactcccctcttttaaatggattaaataaagatcaagcaataatcaaaattattgaacaattagaaattaaaaaaattggaaacaagtcaattaattataaattaagagattggggcgtatctagacaaagaaattggggttgccccattcctgttatttactatgaggatggc

SEQ ID NO: 304559 - DNA, 1875 bp, Unknown
  Bacterial polypeptide expressing nucleotide sequence isolated from the Sargasso Sea
ccatggtttctaaaataacagactttgctgaagatttgttaaacgggcttaatgaactagaaaattggccaaaaaaagttctatcaatgcaagaaaattggattggaaaatctattggggcaaccatcaaatttcaaattaataattcagaaaattttattgaagtttttacaactcgtccagatacaatatttggtgcatcttttattggattatcagccgatcacaatataagcatagatttgtctaaggataacaaagaaatttctgaatttattaagctttgcaaacaaactgggacaaccaatattgaattagaaaaagcagaaaaaattggtatcgatactggactaacggttaagcacccatttactgaaaaagaaatccccgtatatatagctaattttattttgttaaattatggtaccggtgctatattcgggtgtccagctcacgaccaaagagattttgaatttgctaaaaaatataatttagaaataaaacaagttgtaagcaaagataaaaatgaagatttatttgaagcatatacaggtatgggaaaaatgattaactcagaatttttagatggcttagaaatagaagctgctaaaaaaacagttatagataatttaaaaaataaaaatcaggctgactattcaataaaatataaattaagagattggggtatctcaaggcaaagatattggggagcacctattccaatcttatattcatcaaatgaaactgttatccccgttgattataaagatcttcccatagaacttcccaatgaagtagattttaatcaagttggaaatcctttagaaaaacatccaacttggaaacatgcagaaaacaaaaaaaataatgaaagtctaattagagaaactgacacttttgatactttttttgaatcttcatggtactttgcaagattttgttcaccaaaatctgataatatgattgatcaacaatttagcaagtggatgcccgtcgacctatatattggaggagtagaacatgcaattcttcatctactttattccagattttttatgcatgcattaaaaaggttagggaagacggaaataagtgagccttttaaaaaattggtaacccagggaatggtcctaaaagatggtgccaaaatgtcaaaatccttgggtaatacggttgatccagaagatataattaaaaaatacggagcagactctgtaagggtttttattctattttctgcacctgttgaaaaagatttagaatggaatgaatcaggtattgaaggtgctagtaggttcttgaaaagaatttggaagataacctatgaaaatatcagtaaaattcaggattcttttaatcaagactttgatagccttgcgatagatgaaagaaattttttaataaaaattcataaaactacagaaaaaataacaaaagatatagaaaacctgcaattcaatacatgtattgctgctttaatggaacttttaaactcagcttacaaatttatagaaaagaacaacaatgaaaagctttttggtttttttatatatcagtttcttcaacttgcaaatccatttattcctcatatcgcaaatgaactatggcaattaagcgaattaaaagaaaaagatattaatctagaatggccggaatttagtagcgaaataattcaaaaagatcaaattatcataggtgttcaagtgaatggtaaaacgcgtgggtccatacctttgctttatgaagaggagaatgaagatgagttaacctccagaataatagagctaaatgaatttagtaagttcttcataaataaggaaatcataaaaaaaatatatataagtaaaaggttgattaatttaatagttaaatagt

SEQ ID NO: 304560 - DNA, 2593 bp, Unknown
  Bacterial polypeptide expressing nucleotide sequence isolated from the Sargasso Sea
atgcacgaaaaatacgttccctccgacgtcgaatccgccgcgcaagggcaatggcgcgccatcgacgcgtacaagacatcggaaaccactgataagcccaagttctattgcgtctcgatgctgccgtacccgtcgggcaaactgcacatggggcacgtgcgcaactacacgatcaacgacgtgatgtaccgctatttgcggatgaacggctacaacgtattgatgccaatgggctgggacgcgttcggcatgccggcggaaaacgctgcgatggcgaacaacgtgccgccggcgaaatggacctacgacaacatcgcttacatgaagaagcagatgcagtcgatgggcctcgcgatcgactggtcgcgcgaagtcgcgacctgcagccccgattactacaagtggaaccagtggctgttcctgaagatgctcgaaaagggcatcgcgtacaagaaaacgggcaccgtcaactgggatccggtcgatcagaccgtgcttgccaacgagcaggtgatcgacggccgcggctggcgttcgggcgcgctgatcgaaaagcgcgaaatcccgatgtactacatgcgcatcacgcagtacgcggatgagttgctgaacgacctcgaaggcctcggctggcccgagcgcgtcaagatcatgcagcagaactggatcggcaagagcttcggcgtgaacttcggtttcccgtatgaaatcgacggtgaacagaagctgctgcgcgtgttcaccacgcgcgccgacacgatcatgggcgtgacgttctgcgcggtcgccgccgagcatccgctcgccacgcgtctcgcgcaggacaagccggaactgcaggccttcatcgaagaatgcaagcgcggcggcgtcgccgaagccgacatggcgacgatggaaaagaagggcatggccaccggtttcaccgttacgcatccgctgacgcaggaacaggtcgaagtgtggatcggcaactacgtgctgatgagctacggcgaaggcgcggtgatgggcgtgcccgcgcacgacgagcgcgacttcgcgttcgcgaagaaatacagcctgccgatcaggcaggtggtcgctgttgaagggaaggattactcgactgatgcctggcaggaatggtacggcgacaaggacggcacgctcgtcaacagcggtaagtacgacggcctgaactacacgcaggcagtcgatgcgattgcggccgatctgaaggaacttggcctcggcgacaagcagatcacgtggcgtctgcgcgactggggcgtgtcgcgccaacggtactggggcacgccgattccgatcattcactgcccgacctgcggcgacgtgccggtgccggaaaaagatctgccggtggtgttgcccgaagacctcgtgccggacggtacgggcaatccgctcgcgaagtcagaagcatttgtgaactgcacctgcccgacctgcggcggcgcggcgaagcgtgaaaccgacacgatggacaccttcgtcgattcgtcctggtacttctaccgctatgcggcgccggacgcgaaaaccatggtcgacgagcgcaccgactactgggcgccgatggatcagtacatcggcggcatcgagcacgcgattctgcatctcttgtattcgcgcttctgggcgaaggtgatgcgcgacctcggtttgatcaaattcggcgagccggccagaaacctgctcacgcagggcatggtgctcaatgaaacctattaccgcgagaacgaagcgggtaagaagacctggtacaaccccgccgacgtcaccgtctcgttcgacgacaagggccgcccggtcggcgccgtgttgaacgaggacggccagccggtggtgctcggcggcgtcgaaaaaatgtcgaagtcgaagaacaacggcgtcgatccgcaattgctgatcgatcagcacggcgcggacaccgcgcgtctgttcgtgatgttcgccgcaccgcccgagcagcagctcgaatggtcgggttcgggcgtggaaggcgcgagccgcttcctgcgtcgcgtatggggtttcggtcacacgaacgaagccgcgctgcgtgccggtggcaagatcgatcccgcgcaactcggcgaagtcgacaaggtattgcgtcgcgagatctacagcgtgctgaagcaggccgacttcgactatcagcgtttgcaatacaacacggtggtgtcggcggcgatgaagatgcttaacgcgctcgacagcgcgaagaacgcgcaaccggcggtgctgcgcgagacgtacagcgtgctgctgcgcgtgctgtatccggtcgtgccgcaccagaccttccagttgtggcaggaactcggttacgccgacgaatttggctcgctgctcgacgcagcgtggccgaaggtcgacgagcaggcgctggaacaggccgaaatcgaactcgtgctgcaggtgaacggcaaagtgcgtggcgcgctcacggtggcgaaagatgcgacgcgtgaagcgatcgaacagctcgccgccgcccatgaagcggtcgagaagttcagcgaaggcaaggcgccgaagaagatcgtcgtggtgccgggccgtctggtgaacgtggtcgtttgaa

SEQ ID NO: 304561 - DNA, 2170 bp, Unknown
  Bacterial polypeptide expressing nucleotide sequence isolated from the Sargasso Sea
aaacaataaagtccagccctctgaatggaccttagaaaatattgagagtatgaaaacgcaattatccagattgggttttgcttacgactggaaaagagaatttgcaacttcgcaatcagattactataaatgggagcaatggttttttctgcaaatgttagataaaggcttagcctatcaagaagaagcagaagttaattgggacccaatagatcaaacagttttagcaaacgaacaagtaatagatgggagaggatggcgatctggagcagaagttgaaaaaaagaaactaaaacagtggtttttgaaaataactgattattcagaggaactcctagaaggaatagaaactctcaaaggttggcctgagcaagtaagaatccaacagaaaaactggataggcaagtctgagggtatgaacttcagcttcaaagtaaaagacagtgatgaaattataaatgttttcactacaagaccggacacgattatgggggtttctttcatagctatttctgcctcacataagttaagtattgatgtgtctgaaaaggatgataagttcaagtcattcatcgaaaaacaaaaaaaagtaaaacaatctgaagcagagtttgctaaacaagaaaaagaagggctttttactgaactttatgccatacatcccttcacaggagatcaaataccaatttggatagctaactttgtacttagtgactacgggtccggagctttaatggctgttcctgctcatgatcaaagagacttcgagtttgcgaataaatatgatctgccgatcttgccagtaattaaaaacagatctgatgcctctgacacccttgaagaagcttatcttgaaaaaaatactttaatcaattcaaaggagtttaatggtttaaatttcggtgaagcttttgaggctattgagaaaaaagcagaagaattgggttgtggatatagagagaccaatttcagattaagagattggggagtttctcgacaaagatattggggagcaccaataccagtgctgcatgatagtgaaaacacttatccttcaaaaaccttacctgtagaactaccatctaaagttgaatttaaaggcgtcagttctcctttgcacaatatgcctgaatttttaaatgtagaggttgatggaaaaaaactaatacgagaaacagacacatttgatacgttctttgagtcttcatggtactacgccagatttgctagctttgattctaacgaatctatgctggatgagcgtgttaaatattggttaccagtcgatcaatatgtgggtggtatagagcatgctgtactgcatctcttgtattctagattcttttttaggtgcatgagagatatgggtcttgttgaaggagatgagccttttactaatctactttgtcagggaatggttctgaaagacggagctaaaatgtctaaatcaaaaggaaatactgttgaccctcaaggtttaattgaaaagtatggagcagatactgtaagactctttgttttatttgctgcaccacccgaacaatctctggaatggtctgatcagggtgtacaaggagcccatagatttataaatagaatttggaagatagttaatagatatttagaggctgatcacataacagactttaattttgaagatttgaatcaagatcagaaacaactacgtaataaaactcacaaaacactggtaaaagttaaagatgattatttgaggaggcatagctttaatactgctatagcagctattatggaattatctaatgctattcctacaaaatatctagaagaaagcgctagtaataaagaaagggcaatagctgcagaggctatagaagcaatattgctaatgctatcgcctataactccacatttgtgccaacacttgtggtgggagctatatcctggagattccatagtagacaaagaatggcctgaagcagatggaagtcttttagaagaagattccatcagaatagctattcaaattaatggaaagttaaggtcggaaatagaaattgaaaagaatatggtgtctgaagaaattgaagagattgctttaaatgatttaaaaatcttaaaacatctagaaaatgccgaagtaaaaaaagtgatttatgttcctggaaaaatagtgaacatagttatatga

SEQ ID NO: 304562 - DNA, 643 bp, Unknown
  Bacterial polypeptide expressing nucleotide sequence isolated from the Sargasso Sea
ttgtcgaccgtgaacagccgttactcgcctgcggaccttgaacaacgctggcagacgacctggcgatcagagggcttggatgtcactccggagcctgaagacggaaagggtttctacgccctgtcgatgtttccctacccctcagggaccttgcacatgggccatgtgcgcaattacgtcatcaccgatgtgatcgcccgcgttcaacggatgcgtggccactcggtgttgcacccgatgggatgggatgccttcggtcttcccgccgaaaatgccgcgatagaacgcaacgttgatcccggcgattggaccgatcgcaacatcgatcagatgcgatcgcagctggatcgcctcggcttgtcgatcgactgggaccgtgagcaggccacctgccacagcgattactaccgatggacccagtggttgttcctggagctcttcgatggcggtctggcctaccggaagaacgcaacggtcaactgggatccagtcgatcaaaccgttcttgccaacgagcaggtcgatgccgacggacgttcctggcgatccggtgcactggtggaacagcgacagttaaatcagtggttcctgcggatcacgcagtacgccgaagccctgctcaaggacctcgatcagctgagcg

SEQ ID NO: 304563 - DNA, 1047 bp, Unknown
  Bacterial polypeptide expressing nucleotide sequence isolated from the Sargasso Sea
gagacctgatacattatttggtttttcgtttatagctttgtcagttgaccatgaaatttcaaaattttatgaaaaggatcctaaattcttaaagtttaaagacgattgttcaaaaactggaacaactgaggaagcaatagctgtgggggaaaaaattggttataggacaaatttatttgcaattaacccacttgatcaaacacaaaaagtacctgtttactttgcgaactttgtattaatggattacggtttcggtgctgtttttgggtgtccagcgcatgatcaaagagactatgactttgctaaaaaatatgatttgaaaattaaaactgttgtaaaaccggaaaatgaaaaagatacctatactgtagataatgaagcatacactgaaaaaggaataataattaattcagaatttttaaatggtttaaaagctccagtggactctgtcattgaaacaataaatattcttgaacaaaaaaatttagggaaaaaaaaaattaattttagattaaaagattggggtgtatctagacaaagatattggggttgtccaataccagttgcatatgatgaaaatgataaaattcatatgatcccagataaaatgttgcctgtgaaacttcctcaaaatattaatttaaatgtgaaaggtaaccctcttgatagtgaaaaagaatggaaagaaattatcatcgatggaagaaagctttttagagaaactgatactttggatacatttgtttgttcttcctggtattttttaagattttgttcaccaaataattcagattatggctttgataaagaagatataaaatattggatgcctgtggatcaatatattggtggggttgaacatgcaattttacatctactttactctagattttttgttagagcgatttcaaaagataacaaaaaaattgatttagatgaaccattcagtggtttgttcacacaggggatggtttgtcatgaaacctataaagataaaaataataaatgggatagtccagatgaaattgagactattaatgggattaa

SEQ ID NO: 304564 - DNA, 1576 bp, Unknown
  Bacterial polypeptide expressing nucleotide sequence isolated from the Sargasso Sea
gatgcaagagcaatataatccctcagaaattgaagccttagtgcaaaagcactggcacgacaacaaaacctttgaagttactgaagatgcgaacaaagaaaagttttattgcctttcgatgttcccctatccttcaggtcgactccacatgggacacgttcgcaactataccataggcgatgtggttgcccgcttccagcgtcttcaaggcaaaaacgtgctacaacctatcggttgggactctttcggtttgcctgcagaaaacgccgcaatcaacaacaaaacagctccagcaccatggacttatcaaaacattgagtacatgaaaaaccagctaaaattgctgggttttggctacgactggagccgtgaaatcgccacttgtaccccagaatattaccgctgggaacaatggttcttcactaaactgtacgaaaaaggcttagtttacaagaagaccgcttctgttaactggtgccctaacgatgaaaccgtactggctaacgagcaagtacaagacggatgctgctggcgttgtgatacccctgtagaacaaaaagaaattccacagtggttcattaagatcaccgcctacgccgaagagttgttaaacgacatcgacaccttagacggctggcctgagcaagttaagaccatgcagcgcaactggattggtcgcagcgaaggcgtggaaatgaccttcggagtggcaggtagcgacaagtcattcgacatctacactacccgtccagataccctgatgggcgtaacctacgtggcgattgctgcgggtcacccattagcggagttagcggctcaaactaaccctgagcttgcccagttcgttgaagagtgcaaaaacagcacaacatcagaagccgatttagccaccatggaaaaacgtggtgtggcgactggcctatacgccattcaccccatcactggcaaacaagtacccatttgggcggctaacttcgtactgatgaactatggcaccggtgccgtgatgtctgttccaggtcacgaccaacgcgattacgagtttgctaaaaagtacaacttagccattgaagcggttatcaaacctgttgacggcgagttagacatcagcgaagcggcttacaccgaaaaaggcgtgctgtttaactctggtgagttcgacggtttagactttgacggtgccttcaatgccatcgccgacaagttagtcgctgaaggtaaaggcaagcgtcaagtaaactaccgtctacgcgactggggtgtttcacgtcagcgttactggggcgcaccaattcctatggtgaccttagccgacggtactgttatcccaacacctgaagatcaactgccagttattctgccagaagatgtggtgatggacggtatccaaagcccaatcaaagccgataaagaatgggcgaaaacccaagttaacggtcaagatgcgctgcgcgaaaccgataccttcgatacctttatggaatcttcttggtattacgcccgttactgcagcccacaggctgaccaaatgttagacccaaccaaggctaactactggttacccgtggatcagtac

SEQ ID NO: 304565 - DNA, 1757 bp, Unknown
  Bacterial polypeptide expressing nucleotide sequence isolated from the Sargasso Sea
aaaagttgtcacaatgggtttttcaatattacaaaattttcagaccaactcctcaaagatttagataatttagatggatggcctgaaaaagtaaaattgatgcaaaagaattggataggaaaatcatttggctgtgagatcaattttaatataaaaaataaagatcaaaaaattaaggtttttacaacaagacctgacactatttttggagctagcttcatagcgttatcatcagatcatccattaagcaaagattttaaaaattcaaaagaattcaaaaattttagagaggaatgtaataaatcaggtacaacggaagaggcgttggcaaatgcagataaaataggattcaaaaccaatttagaagttgagcacccatttattaaaaacaaaacaattccagtttactttgctaatttcgtcttaatggattatggaaccggggctgtttttggttgtcctggtcatgatcaacgcgatttcgactttgcgaaaaaatataaattagaaatcataaaagttgtatctgatgggaaagaaagtgaattaactgaagcatacactggaactggtttaatgattaattcagattttattaatggtttagacgttgaaaaagcaaaaaacagaataattgaagaaatagaaaaagttagcttagggcaaagaaagactttatttaggctaaaagactggggtatttcaagacagagatattggggttgtcctataccaatgatttatttagaaaatggagaagtggtacccgttgacaaaagcgagttgccgatagaacttccagaggacattgatttaaaatctcaaggaaatccattggatgttcatcctaaatggaaatatactgttgaaaaatcttcgggcaagaaggctattagggaaactgacactttagatacatttgttgactcgtcttggtattttctaagattttgctctcctaaccataaactttcaccattcgaccagaaagaggttaaatactggatgccagtagatcaatatatcggtggaatagaacatgcaatacttcacttattatactctagattttttacaaaaggtattaatgtatgcactaaagattttaatatctcagaaccttttaaaaatttatttacacaaggaatggtttgtcatgagtcttatagagatgaaaaaggtaattggttgtatccaaatgaaattgaaaaaattgacgctaataatatcgtcaagagatcagatagaagtaaagttttagtcggacctcctgagtcaatgtcaaaatcaaaaaaaaatactattgatccagaaacaatgataaatcaatatggagctgacgctgttagatggtttattttatcagatagtcctccagaaaaagacgttcaatggtcagacactggagtagactccgcaaataagtttttgcagaaaatatggaatttaaattatctaatttctaaaaaagaagagggcgcttctgatgataaaataaacagtaaagttactctagaaataaataatttcgtgtacaagatagatgaatctataaacaatttcaggtttaatgtaacgatcgctaacttttatcaagtttacaacactcttaaaaattatttaagtttagaagttagtaaacaaactttgactgactgtataataaagattatgaagcaaatgttaccctttacgcctcatttagctaatgagtgtttagaattgttcgaatgtcaaacagttaattcatggcctaa

SEQ ID NO: 304566 - DNA, 1561 bp, Unknown
  Bacterial polypeptide expressing nucleotide sequence isolated from the Sargasso Sea
cggctccgtggccgaggccgacatggccaccatggaaaagaagggcgtggccaccggccagttcgtcattcatccgctgactggcgacaagctgccggtgttcgtcgccaactacgtgctgtggggctacggcgaaggcgcggtcatggccgtgccggcgcatgatgagcgcgacttcgagttcgccaacaagtacgacctgccgatcacgcaggtctacgccggtaaaggcaaggactacgacgccagcacctggcaggactggtacggcgacaagaccggcctgaccaccatcaactccggcaagtacgacggtctggacttcagcgccgccttcgacgccatcgtcggtgacctggaagccagcgcgcacggcgcgcgcaagacccagttccgcctgcgcgactggggcatcagccgccagcgctactggggctgcccgatcccgatcatccactgcgacagctgcggcgacgtgccagtgccggaagaccaattgccggtggtgctgcccgaagacgtggtgccggacggcgctggctcgccgctggcgaagatgcccgagttctacgagtgcagttgcccgaaatgcggcgcaccggccaaacgcgaaaccgacaccatggacaccttcgtggaaagctcctggtacttcgcccgctacgccagcccgcactacgagggcggcatggtcgacccggctgcagccaatcactggctaccggtggatcagtacatcggcggcatcgagcacgccatcctgcacttgctgtatgcgcgcttcttccacaagctgatgcgcgacgagggcctggtctcctccaacgagccgttcaagaatctgctgactcagggcatggtggtcgccgagacctactaccgcaccctggaaaacggcggcaaggactggttcaacccggccgatgtcgagctggaacgcgatgccaaggccaaggtcatcagcgccaaactcaagtccgacggcctgccggtggaaatcggcggcaccgagaagatgtccaagtcgaagaacaacggcgtcgacccgcaggccatgattgatgcctacggcgccgacacctgccgcctattcatgatgttcgcctcgccgcccgacatgagctgcgaatggtcggatgccggcgtcgagggtgccaaccgcttcctgcgtcgtgtctggcgtctggcccagggccatgtcagcgccggtctgccgggcaagctggatgtctccgttctcagcgacgaacagaaagccgtgcgccgcgccattcacctggcgatcaagcaggccagcaacgatatcggccagcaccacaagttcaacaccgccatcgcccaggtgatgaccctgatgaacgtgctggaaaaggccgccaccgccaccgaacaggaccgcgcgctggtgcatgaaggtctggaaatcgtcactctgctgctggcgccgatcaccccgcacattagccacgagctgtggcagcgcctgggccatgccgatgcggtgatcgatgcgcagtggccgcaggtcgatgaatccgccctggtgcaggacagcctgacg

SEQ ID NO: 304567 - DNA, 1498 bp, Unknown
  Bacterial polypeptide expressing nucleotide sequence isolated from the Sargasso Sea
aatgattaaatcatataatccaaaacatattgagaagaaagcacaaacctattggaagcaagaagaaacattcaaagtcagcactgaggtaaaaagcctcagaaaagataattattactgtttaagtatgtttccatataccagtggcaatatccacatgggtcatgttaggaattatacgataggtgatgtaaaatcaaggcttaaaaaaatgcaaggatttaatgtcctacaacctatgggttgggacagttttgggctaccagcagaaaatgcagcaattaaagataaaagtcaccctgccttgtggactaataaaaacattgaaagcatgaaaaaagaatttgaagaaatgggttttgcatatgactggagcagagagcttgcaacctgtgatgaagattattacaaatggcaacaatggctttttattgaaatgagaaaaaaaggcttggtatataaaaaagatgccattgtcaattgggaccctatcgatcaaacagtattggccaatgagcaagtcatagatgggagaggatggagatccaatgctttggtagaacagaaaaatattgcgcaatggttttgtaaaataacagcatatgcagaccaattggataaggacttagagagtttaacgaaatggccagacgcagtaaaaacaatgcaaaaaaactggataggaaaatccaaaggtacgaatgtacattttaaaattaaagacagaagtgaaacattgtctgtatttacaaccagggccgatactctatttggtgccacatttatggccatagcaatagaccacccggtcgctgctgacattgcaagagaaaataaagacattgagagctttataaaagaatgtcaaaaacagtccacagcagaagcagacatacaaacagcagaaaaaaaagggataatgacaaacctagtggccattaatccagttaacaacgaggaagtccctatttggattgcaaattatatattaatgagctatggaactggagcaattatggctgttccagcagaagataaacgggacagagaatttgctgaaaagcatgacctaaagatcatagaagtttacagtgatgatgagaagccagtattgatcaactctggaaaatataatggactggaacaaaaaaaagcattaaaagcaattgttcaagatttagtagacagcaaaaacggtgaaagcatcaccacataccgcttacgcgattggggtatatccaggcagagatattggggtgttccaattcctgttatcaactgtaaagactgcggtgccgtttctgagaaagaagaaaatttaccaatacagctaccaaaggatatccaatatgaatacggaaagccattattaaaagaatgtaaagaattttatgaaacaaactgtccaaagtgtggtaaagcggcgcatagggagacagatacatttgatacattttttgattcatcttggtattatcattattacattagccaaggt

SEQ ID NO: 304568 - DNA, 2671 bp, Unknown
  Bacterial polypeptide expressing nucleotide sequence isolated from the Sargasso Sea
ctggcggttgttgccgccgcaggatatgggtattctattgcgatttcccagctgatttatctatccatttcacagatccggatgtcaccaatgcaagagcaatacgttccccaatccatagaaccagcagtgcaaaagcactgggatgccaagaaaaccttcaaggcggtggagaaagtagacaaggaaaagttctactgcctctccatgttcccctatccgtctggtcgtctacacatggggcacgttcgcaactacaccataggtgatgtgatctcccgttatcaacgcctcaatggcaagaacgtgctgcaacccatcggttgggacgcattcggcctgccggcggaaaacgccgccatcaagaacaacacggcaccggcgccctggacctacgaaaacatcgaatacatgaagaaccagctgaagatgctgggtctgggttatgactgggatcgcgagctggccacctgcaagccggactactaccgctgggagcagtggttcttcaccaagctctacgagaagggtctggtctacaagaagacctcttccgtcaactggtgcccgaacgacatgaccgtactggccaacgagcaggttgtcgacaactgctgctggcgctgtgacaccccggtggagcagaaagagatcccccagtggttcatcaagatcaccgactacgccgaagagctgctgaacgatatcgacaatctggaaggctggcctgagatggtcaagaccatgcagcgcaactggattggccgctccgaaggggtcaacatcagcttcaatatcgagggtcaggctgagcacctggaggtctacaccacccgtccggacaccttcatgggcgtgacctatgtcggtatcgccgccggccacccgctggcgctgcaggcagccgagagtaaccccgagctcgccgcctttatcgaagagtgcaagaacaccaaggtggccgaggccgagctcgccaccatggagaagaagggcatggccaccggcctctacgccattcacccgctggatggccgcaaggtgccggtctgggtcgccaacttcgtgctgatgaactacggcaccggcgccgtgatggcggtaccgggccacgacctgcgcgaccatgagttcgccaccaagtacgggctcgagatcaagccggtcatcaagccggtcgatggcgagctgccgaacgtgatcgacgccgcctacaccgacaagggcgtgctgttcaactcaggcgagttcgacggcctcgagttccagccggcattcgatgccatcgccagcaagctggagagccttggctgcggcaagcgcaccgtcaacttccgtctgcgcgactggggtgtctcccgtcagcgctactggggtgcccccatcccgatgctgaccctggccgacggcacagtcgtgccgaccccggaagatcaactgccggtgctgctgccggaagacgtggtgatggacggtatccagagcccgatcaaggccgacgccgagtgggccaagaccacctacaacggtcaggaagcgttccgcgagaccgataccttcgacacctttatggagtcctcctggtactacgcccgctactgctccccggactacgacaagggcatgctggatccggcggcggccaaccactggctgccggtggatcagtacatcggcggcatcgagcacgcctgtatgcacctgctctacgcccgcttcttccacaagctgctgcgtgacgcaggcctggtgaacagcgacgagccgttcaagcgcctgctctgccagggcatggtgctggccgacgccttctactacaaagacgagaagggcggcaacgtctgggtcagcccgaccgatgtcaaggtggagcgtgacgacaagggtcgcatcaccaaggccgtcgacaatgaaggtcgtgaagtgatccactccggcatgaccaagatgtccaagtccaagaacaacggcatcgacccgcagctgatggtggagcgttacggcgccgataccgtccgtctgttcatgatgttcgcctcgccggccgagatgactctggagtggtccgactccggcgtcgagggtgcccagcgcttcctgcgccgtctgtggcgcatcaccttcgagcacgtcagtgccggggcggctcccgcactgaatgtggcggcactcagcgccgaccagaaggccgtgcgccgcgagctgcacaagaccatcgccaaggtgagcgacgacgtgggtcgccgtcagaccttcaataccgccatcgccgccatcatggagctgatgaacaacctggccaagctgggcagcgacgagcaggatcgcgccctgatgcaggaagcgctggaagcggtggtggtcatgctctaccccatcaccccgcacatcggcttcgagctgtggaagatgctgggcaagggcgacgacgtggatcacgccgtctggccggtggccgacgaagcggccatggtcgagaccgagaaactggtggtggtgcagatcaacggcaagatgcgcggcaagctgaccgtgccggccgagatcagccaggccgacgtcgagaagctggccatggccgatgcctcggtacagaagttcaccgacggcctgaccgtgcgcaaggtgatctacgtgccgggcaaactgctcaacatcgtggccaactgat

SEQ ID NO: 304569 - DNA, 1894 bp, Unknown
  Bacterial polypeptide expressing nucleotide sequence isolated from the Sargasso Sea
aatgcaaaaaaactggatcggaaaatcattcggctgtgaaattaattttaaaattgaaggagatcttcctgtagatgaaatcaaatgttttactacaagacctgataccttatttggtttttcttttttagccttgtctgtagatcatgaaatatcaaagcattttgtgaatgataacgagtttattaaatttaaaacagaatgttctaaaactggaacaactgaggaggctatagcaatgggtgagaaaatagggtttaaaacaaatttacttgcaataaatcctttaaatcctagtcagaaagtacccgtttattttgctaattttgttttaatggactatggttttggagctgtttttggatgtcctgctcatgatcaaagagattttgattttgcaaaaaaatataatcttcaaatcaaaacagttgtacgcccaaatgaggaaaattctaactttgaagttaaagaaaaagcctatactggcaacggtgttatagttaattcagaatttttaaatgacttaaatgtgccagaagaatcaatcataaaaactattgatattcttgaaaaaaaaaaatttggaaaaaaacaaattaattttagacttaaagattggggtgtttcgaggcaaaggtattggggctgtccaattccagtcgcctatgacaatgataaagtggttcctattccaaaaaaagatttgccagtaaaacttccagacagtgttgatcttaattcaaaaggtaatcctcttaattcaaaagaagattggaaaaaggttatgattaatggaaaagaattaattagagaaacagatacgttagatacttttgtatgttcttcctggtattatttacgattttgttcaccaaaagaaactaattatggatacaatcaagaagaggtcgactattggatgcctgtagatcaatatattggaggaatagaacatgcaattttgcatttgctttactcgcgtttttttatgaaagctttaggttttaaaaataaaaattttaacatagaagaaccatttaccgggttatttactcaaggaatggtttgtcatgaaacttataaagatcaaagtaataattggctaagtcctgaagaaattgaaattaaggaaaaaaaatatgttaaaaaaaatgaccccaaaaataaagtaattgtaggaccatctgaatctatgtctaaatcaaaaaaaaatgttatagatcctgaaaatattatcaagagttatggagcagactcagtaagattatttattctttcagatagtccaccagaaaaagatgttcaatggtctgaacaaggaatggtttcttcatacaaatttattcaaaaattatggattttgcacacaaagataaaaaaaagattactaaaccaagaaaaaaatatctctatagatataaatttgaataaatttactaatcaacttttaaataaagtaacaagtaacttagacacttttagttataatgttattattgctcatatgtatgagacatataactttttaataaaacatattgaaaaaaatattagtccaaaagatttgtatgaaaattatataaagatactaactatgttttccccaattattccacattttactagcgaatgtttagttgatataggatttaaagaaaaaattgtttggccagaaatagataaaaattatcttacagatgaaaacttagattatgttattcaaattaatggaagaaaaaggacaataattaatgctaaaaaagatttaagtgaagaaaaaattttaaatattgctaaaaatgataaagtgttacataaatatttaataaataaacccattaaaaaagtaatttttgttaaaaatagattgttaaatattttagttaatgaataa

SEQ ID NO: 304570 - DNA, 1642 bp, Unknown
  Bacterial polypeptide expressing nucleotide sequence isolated from the Sargasso Sea
aatgatcttgaaaaactagataagtggccaaataaagttaaaataatgcaatctaattggataggtcgttctgtaggtgctgaaatcgacttccaagtatctaatagtgttgataaaataaaaatttttacaacaaggcctgatacaatatatggtgctacttttttagctttatcaactgatcacaagatatcaaagggattatctaaaaaacaccctactattaaaaagtttatagaggagtgcaaagttataaaccctgataaggtcaaaaaaggttataatacaggccttactgttgaccacccttttatcaaagaaaagaaaattccagtttttatcgctaactttgttctaatggaatatggtttgggagcaatttttggatgtccggctcacgatcaacgagatttagattttgccaatgaatacaatttagaggttgtaagtgttgtgaagccggttagtttaaaagaggaagaatttatagtcgaaaaaatcgcttttactgaaaatggaaaagttatcaattcagactttttaaatggactaacaactgaaaaagcaaaaaataaaattattgatgttttagaagaaaaaaaaattgggtgcaaaaaaataaactacaaacttagagattggggaatttcacgacagagattttgggggtgcccaataccaataatctacagagaagacggtgagttaaaaccagttgatatagatagtttgccagtaaagttaccagaggttgataattttaatgagtcagaaagtactttaaaaaatattagtgaatggaaagaaacaaagtgtcaagaaacagggatgaaagcaataagagaaacagatacttttgatactttttttgagtcttcttggtattattttaggtattgtaatgctagatctgaaaaaccttttgaaaaagaagatattgattattggctgcctgttgatcaatacattgggggtatagaacatgctattttacacttactttattcaagattttttacaaaagctttaagggatttaggttattttaaactaaacgaaccatttgacggtttgtttactcaggggatggttacccatcaaacgtatagaaacaaaaataatgaatggttagagcctggagaggttaaaaaggttggtgatagtttttttgatgaagaaaatattgaggtaaaaatcggtaaaattgaaaaaatgagcaaatcaaaaaaaaacgttattgatcctagtgaaattataaatctttatggcgcagatactgcaagatggtttatgttgtcagacagcccgcctgatagagatttgcagtggactgaaaccggtattgcatcatcatataagtttattaataagatttgggacttgttaagtaagtataaaacctattctgtaaaaaccaaaactgatgaaaatgttttagacagtttcagattattgacaaatgaagtatctcaaaatattgaaaattttcaatttaacaaatcaattgctaaaatatacgagtatgtgaacttgttgattgatagtttgataaaagacattttaaataaagatgattttaactggtccttaaaaagacttgcaatattattacagccgttcatcccacatattagtgaagaaa

SEQ ID NO: 304571 - DNA, 412 bp, Unknown
  Bacterial polypeptide expressing nucleotide sequence isolated from the Sargasso Sea
aatgagtaaaatcaatgtagaagaaattgacaaaaggtggcaaactttttggtcaaataaaaaaaattcttttaagaacaccgataaaaataaaaaattttattgtcttgaaatgtttccgtacccttctggaaaaatacatatgggacatgttaggaattatgcaattggagacgtaattgcaagatacaaaatgatgaagggatttaatgtactacacccaatgggttgggattcttttggtttacctgcggagaatgctgctagagaaaataatttaaaccctagtgagtggactaaaaaaaatatttccacaatgaaacaccagctacaattattagggctatctattgattggagtttagaaatttctacttgtgatgaatcatactacaagcatcaacaagaatta

SEQ ID NO: 304572 - DNA, 1483 bp, Unknown
  Bacterial polypeptide expressing nucleotide sequence isolated from the Sargasso Sea
aaacttagactggccagagaatgtaaagtcaatgcaaaagaattggattggcaagtcatttgggtcagaaataaaatttgctttgcttaatagtgatgagttaacagcttttacaacaagaattgatactatctatggcgtaacatttatagctatttcgccaaatcatccaattgctcaaaatcttgcaaaagataacacagagacaaacgaatttataaaaaaatgtaatgcaacaaaaatggctgaagcagatttggctaaagcagataagcttggacttaaaacaaatttaaaagtacgacatcccttctccgatgataatcttgatgtttggattgcaaattatgtcctcatggattacgggacaggagtgattatgggtgtaccagctcatgatgaaagagactatgaatttgctaaaaaatataacattgaaattaagcaggtcattgaaagtgatgaattgccatcgcctataaaaggtaaacttatccactcagatatttttaccggacaagaatcggatgaagcgattaaaaatattaatgattacttagaaaagaatgctatcggaaaaagcattgaaaattttagattaagagactggggcgtaagcaggcaaaggttttggggatgtcccatacctgtagtcttcgataatggtgaacctatttttttagaaaaaaaggatcttccagtggaattaccaaaaattaaagatggagaatcccctaaaccgttaagccaaaataaagatttttttgatttgggatctggaaagactcgtgaagttgatacatttgatacatttgtagactcatcatggtactacgcaagatttactgctgcagataatgatgaaaaagctctagacgatgattcaaaatattggctacctgttgacctttacataggcggaattgaacacgcaattttacatctcttgtattcaagatttttccataaagcaatgagagatattggtcttgtggagggtgatgagccttttaaaaaacttcttacacaaggcatggtattaaaggatggatttaaaatgtctaagtcaaaaggaaataccgtagatccacaaaagttcattgataaatatggagctgataccattagactttatatgatgtttacatctccgcccgaacagtctttagagtggtcagatactgcaattgaaggctcatatagatttctaaaacgaatttggactttaatatcagatagaaaaatatttttagaagaaccaccaaaagatttttcaaaacttgagcttaaacttcgtcaaaaaagtcatcaaactttgaaaaaagtaactaatgattatggagaacgaaactcttttaatacagcaatagcgtcaattatggagttattgaatgcaatacctgattcgtttaaattagacgacgcaacctcagcagaggtgttttgtctggacgaagttatccaatttacgctcaaaatgctg

SEQ ID NO: 304573 - DNA, 586 bp, Unknown
  Bacterial polypeptide expressing nucleotide sequence isolated from the Sargasso Sea
tatggaaagaataaattttcaagtaattgaaaaaaaatggcaagaaaaatttaaaactgctaaactttacaacaaggataaaaaatcaaaaaagttttattgtcttgaaatgtttccatacccttctgggaaaattcacatgggtcatgtaagaaattatactattggagatgtgcttgctagatacaaatatctaaatggcttcaatgtgttacatccaatggggtgggatgcatttggtttgcctgcagaaaatgcatcaaaatcaaacaaccttcacccaaaagaatggacaaataaaaatataaaagtaatgaaagatcaacttaaattactgggcctttccattgattgggatttggaaatatcaacttgtgacaaagagtattataagcatcaacaagagctatttattgaattctacaatcaaggcttagtatcacgaaaagaaacctatgttaattgggatcctgttgaaaaaacagtattggctaatgaacaagttataaatggaaaaggatggagatctaacgctactgttgaaagaaagaaactatcacagtggttttttaatattacaaaattt

SEQ ID NO: 304574 - DNA, 1461 bp, Unknown
  Bacterial polypeptide expressing nucleotide sequence isolated from the Sargasso Sea
agttttgatgctatattttcagcacaagaatggaacagttggagcgaaaaacaacaacaaaagattcttatgaattataggttaacctacctttctgaaacatgggttaattggtgccctaagcttggaacagtattagcaaacgatgaaataaaagaagggttttctgaaagaggaggtcaccctattgagcaaaaaaaaatgacccaatggagtatgcgaataacagcatacgcagaaagattgttaaaaggtttaaataatttagactggacagactcaatcaaagaaatacaaaccaactggataggtaaatcccaaggagcgtcagtatttttttctcttgaagatagtcaagaaaaaatagaggtttttaccactaggccagatactatttttggtgtttcttttttggtgttagctccagaacacccattggttccagttatcacaacaaccgagcaaaaaaacaaagtagaaaaataccaagaaaaagcagcagcaaaatccgaaagagacagagtgagcgaagtgaaaacaatttctggagaatttacaggagcatatgccaagcacccctttaacggaaataaagtacaagtgtggataggagactatgttttagcaagttacggaacaggagctgtcatggctgttccatgcggcgaccaaagagattgggatttcgccaaacactttaaaatagacattatcaacatatttaaaaacaaaaacatttcaaaaggtgcttacgttgaaaaagacgcaacaattactaactctgaatttttaaatgatttaccagtaaaaaaagcaattaaatcagcaatttatgaactgggtaaacaaaacaaaggcttaggaaaaacacaatataaaataagggatgcggttttttctagacagcgttattggggagagccttttcctgtttattataaaaatgaaacaccttatttgatcgaagaaaacaaagtagtagagctaccagaggttgataaatacttacccacagaaggcggagaccctccactagctagagcgaaaaaaaaatcatggaatgttagtggatatggggatagaatggaatacaatacaatgcccggttgggccggaagtagttggtatttcataaggtatttagaccctaaaaacaacgagagctttgtttctaaagataaaatggagtattggcaaaatgtggatttgtatattggaggagcagagcacgcaacaggacatttattatacgcaaggttttggtcaaaaatattgtttgatttaggacacatttcatttgatgagccatttaaaaaattaataaaccaaggcatgattcaagggaattcagctttggtttatcgggacaacaattcaggaaagttcatttcaaaaggtaaaatcaaaaaccaaaaaacaaaatccattcatgtagacattaattttttaaatggcgaccaa

SEQ ID NO: 304575 - DNA, 385 bp, Unknown
  Bacterial polypeptide expressing nucleotide sequence isolated from the Sargasso Sea
aatggaaagatataattttaaaattgtcgaagaaaaatggcaaaataattgggaaaaaaataaatcttttaaaactcatttagatttaaataaaaaaaaattttactgcttagaaatgtttccatacccttcgggtagaatacacatgggtcatgtaagaaattatacaataggtgatgtattggctagatacaaatctatgaatggatttaatgtattacatccaatgggatgggactcgttcggtatgcctgcagaaaatgccgctaaagaaaataatctacatccaaaaagttggactgagaacaatattttgatgatgaaaaagcagcttaaaaaacttggtttatctttagattgggatagagaaatctctacatgtagc

SEQ ID NO: 304576 - DNA, 1654 bp, Unknown
  Bacterial polypeptide expressing nucleotide sequence isolated from the Sargasso Sea
ttttcatttttagcattatctgtagatcatccaatatcaaaatattttgaagaagatgaaaaatttattaatttcagaaaagaatgttcaaagactggcacaaccgaggagtcgattgctcagggtgaaaaaattgggtttaaaactaatcttatagctattaatccatttgacgaggataaaaaagtacctgtattctttgctaactttgttttgatggactatggttttggagctgtttttggatgtcccgctcatgaccaaagagatatggattttgctctgaaatatcaattagagattaaaactgttgttaaaccatttgataaagacgaaacctttaaagttaaagacaaagcctatgtagatggaggcgagataattaactcaagatttttaaatgggttaaaagttccaggggaatcgattattaaaacgattaatattcttgaagaaagaaagctaggtgaaaaaaaaattaacttcagattaaaagattggggtgtttctcgacaaagatattggggatgccctattcctataatgtacgatagtgcaggtaatcctcaccctgtaccaaatgagcttttacccgttaaattgccggaaaatataaatttagatacaaaaggaaatcctttggaccacgtaaaagattggaaatttattgaatacaaaggagaaaaattcactagggaaacggatactttagatactttcgtggactcatcatggtacttcctaagattttgttctcctaatgaaaaagattacggttacaacgaggatgaaataaattattggatgccagttgatcaatatataggaggtgttgaacatgcaatacttcatttgctttattcaagattttttatgagagctataggttataaaaaagataactttaaatttaatgagccgtttgagggattatttactcagggaatggtgtgtcacgaaacatataaagatgaaaaaggaaattggctaagacctgatgaagttgaaactaaagatggtaaaaaatattttgtcaaaaataaattagaaaatgttgtaactgtaggaccctctgagtccatgtcaaagtcaaagaaaaatactatagatccagaacaaataattaaaaattatggagctgatgcagtaagattatttattttatctgatagtccacctgaaaaagatatacaatggtctgagcaaggtatggtagcttcttataagttcatacaaaagttatggatgcttcacgaaaaaattaaagataaaataaatctcaaatctcatgatctagacttagaaaatgactttgaaagattcataaacgaaacaattagtaaattcgactacaatctaaagaaatttaattataatgttttaattgctagtatctacgaaacatataattttttaaataatattttggaaaataaaattaatggagaaattttattgaaaaattacataaaaattttaaccattctttccccaattatacctcattttgcaaccgagtgttttgacaatttgggtataaataaagttccaaattggccggaagtagacaaaaataaaactaaaattgataaagtaaattttgtagttcaaataaacggtaagaaaaaagccacaattcttcaaaatttaacat

SEQ ID NO: 304577 - DNA, 599 bp, Unknown
  Bacterial polypeptide expressing nucleotide sequence isolated from the Sargasso Sea
catgaaaaaagaatattctccaatcgaaaatgaaaaaaaatggttgccattatggaattctttaaaagcatccaaacaaacaaaagaaaaaaagtatatccttgaaatgtttccatatccatctgggcatctgcatatgggtcatgtaagaaactattcaattggggatgttcaagccagattttaccgaatgcaaaactacgaagtgttgtatccaatggggtttgatagctttggattaccggctgaaaacgctgcgattaaaaataacgttaacccattagaatggacagaaaaaaacattcaacacatgaaagagcaactaacaaagttaggctgtagttacaattggaacaatgaaatctcaacctctagagttgattactacaaatggaatcaatggctgtttaaaaaattatatgaaaacaagctcatttatagaaaaaaaagctacgtaaattgggatcctattgaccaaactgttttggcaaatgaacaagtcattgatggcaaaggttggcgctccggtgcaactattgaaaaaaaagaaattgaacaatggtacattcgaataactaaatatgcagaagaattactaa

SEQ ID NO: 304578 - DNA, 1204 bp, Unknown
  Bacterial polypeptide expressing nucleotide sequence isolated from the Sargasso Sea
aatataaataagcttgtggaaagatataattttaaaattgtagaacaaaagtggcaagacttttggaaaaaaaataattcttttaaagctaaaattgaaaagaataaaaaaaaattttattgtcttgaaatgtttccatatccttctggtaagatacatatgggtcatgtaagaaattatacaatcggtgatgtattagcgcgttataaaaaaatgcaagattataatgttttacacccaatgggttgggactcttttggtatgccagctgaaaatgcggcaagagagaatcaattagatcctaaagagtggaccgaaaaaaatatagaaaatatgaaatctcagctaaaaaaacttggattgtcaattgattgggatagagaaatatcaacatgtagatccgaatattacaaacatcaacaaatgttttttttagaactctatgataaaggacttgtgtacagaaaagaaaattatgttaattgggatccagtagatcaaactgtattagctaatgaacaagtgattgatggtaaaggttggcgatctggagctattgttgaaagaaagaagttaaatcaatggttttttaaaatatctaatttttcaaatgatttgcttgaaggtctaaagaaactaaatgattggccaaataaagttaaaattatgcaaaaaaactggattgggaaatcatttggttgtgaaattgattttaaaattgaaggtgacccctcagttgaaaatattaaatgttttacaacaaggcctgatactttatttgggttttcatttttagcattgtcagttgatcatcccattgctgaactttataaaaataactctgaattcaaaaaatttaaagatgcatgttctaaaactggaacaactgaagagtcaatagcacaagctgaaaaaataggtttcaaaacaaatttgatggctctcaatcctttagataaaataaaaaaagttcctgtgtattttgctaattttgttttaatggactatggttttggtgccgtgtttggttgtccagcacatgatcagagagatttagattttgcattgaaatataatttagaagttttacctgtagtaaaaccaaatgatgctgatgataaatttagtataaaagatgaggcttatacaggaacaggtaaaatatttaattctagttttttaaatggtttaaatgttccagaag

SEQ ID NO: 304579 - DNA, 1302 bp, Unknown
  Bacterial polypeptide expressing nucleotide sequence isolated from the Sargasso Sea
aatgaataacgaatatagaccaaaccaaatagaaactgacatacaaaaaaagtggtcagacacgaatgcctttgaagtttccgaggacccagcaaaagaaaaattctattgtctttcaatgttcccctaccccagcggcaaactccatatggggcacgttcgtaattacacaataggcgatgtcattagccgttatcaacgcatgcagggtaaaaatgttttgcagccaatggggtgggatgcatttggtttgcctgcggaaggggctgcaattaaaaacaatgtacctcccgctaaatggacctatgaaaatattgattacatgcgcggacaattaaaacgactcgggtttgcttatgattggaaccgggaattagcaacatgtgaccctgattattatcgttgggaacaatggttctttacaaaactttatgaaaaaggattggtttataaaaaaacatctgttgttaactgggaccccgttgaccaaactgttttagcaaacgaacaggttatcgatggtaaaggctggcgttctggcgccacagttgaacgtcgtgaaataccacagtggtttttaaaaattaccgattacgcagatgaacttcttgaaggcctagaaaaactctcaggctggccggatgcagttaaaacgatgcaggcaaattggattggtcgctctgaaggtgtcgaagttgattttaaagtcgaaggtgcgggtgaatcattacgtatctatacaacacgtcccgatactattatgggagtaagttacatggcagttgcagcggaacacccgttagcaaaatcagcggctaaaggtgatgatgccatcgctaaatttattgatgagtgtaaaagtagcggaacctccgagcttgaacttgaaactatggaaaaaaaaggtatgccgcttaacattaacctccgtcatccgataagcaatgaaatcattccgctctgggtttcaaattttgtgttaatgggatatggcacgggggcagtgatggccgtacctggtcatgaccaacgtgactgggagtttgcaaataaatatacgctacctattaaacaagttatctttccggtagatggcaatcaacatgatataactgaatcagcctatatagaaaaaggggtgcttaaaaattcagggcaatttgatgaactaagttcagaagatgcctgtaatgcagtcgcagaatttgttgaaaaaaataaatgcggtaaccgaaaaattaattatcgtttaagagactggggaatttcgcgacaacgttattggggggtgtccgattccct

SEQ ID NO: 304580 - DNA, 574 bp, Unknown
  Bacterial polypeptide expressing nucleotide sequence isolated from the Sargasso Sea
atggaatacgatcatcttaaaatagagtcaaagtggcaaaatatttggttgaaggaaaaaaccttcaagaccaatatagaccgaaataaggaaaaagtctatatactagacatgtttccctatccttctggagcagggttacatgtaggtcatcctttaggttatacggctacagatatatactcaagatttaaacgcctccaggggtttaacgtattgcatcctatgggttgggacgcttttggacttcctgcagaacaatatgccatcaaaaccggcactcatcctaaaaatacaaccgaagataatattaaaaatttcaagcgccagattcagatgcttgggtttagctatgattgggatagagaaatcaatactacagatgaaaaatattataaatggacacaatggatatttttgcaattatataaaaaaggtctagcatacgaggcagaggtgcctgtgaattggtgcccggaattaaaagcagttttagcaaatgaagaagtagtagatggaaaatcagaaattgggggtcatccagttgttagaaagcccatgagacaatggatgt

SEQ ID NO: 304581 - DNA, 2013 bp, Unknown
  Bacterial polypeptide expressing nucleotide sequence isolated from the Sargasso Sea
ttcctgttgaaagaaaaaaattaaatcaatggttttttaatatttcaaaattttctaatgaacttcttgaaggactggatgaattaaaaaattggcctgaaaaagttaaaactatgcaaaaaaattggattggcaaatcttttggctgtgaaattgactttaaaatagaaggtgatttaccaattgaaaaaataaaatgttttaccacacgacctgataccttatttggattttcttttttagctttatctgtcgatcatcctatttcaaaacattttctaaataatcctgaatttaataaatttagagatgaatgttcaaaaactggtacaactgaagaatctattgcacagggtgaaaaaatagggtttaaaacaaatttatttgcttctaatcctttggacgaaaatcaaaaagtccctgtatattttgcaaattttgttttaatggattacggttttggcgcagtttttggatgcccagctcacgatcaaagagatttagactttgcaaataaatataaactaaaagttaaaacggtagtaagaccacttgatgaaaatgataattttacagtaacaaaagaagcttatactggatcaggtactgtaattaattctaattttttagatggtttaaaagctccaaatgaatcaattaataaaactatagaaatacttgaagaaaaaaaattaggtaaaaaaaaaataaattttcgactaaaagactggggtgtatcaagacaaagatactgggggtgtccaatacctatggcctacgataaaaatggggaagtatatcctattcctaaaaaagatttaccagtcaaattaccagagaacataaatttaaattctaaaggtaatccactcgacagtatgaataaatggaaaaaaactaaaatagatgggaaagaactaattagggaaacagatacattggatacttttgtagattcttcatggtattttattagattttgttctcctaataatgaaaaatatggttttgattatgaagaactaaaatattggatgcccgtagatcagtatattggaggtgttgaacatgcaattttacatcttctctattcaagattttttacaatggctttaaattataaaaataaaaatttcgatttaaaagaaccatttaaaggattgtttacacaaggaatggtatgtcatgaaacttataaagatgaaaataacaaatggctgagtccagatgaagtggagaataaagatggaaaaaattttttcataaagaaaaatccaaaaaaaaaggtaattgttggtccttcagaatcaatgtcaaaatctaaaaaaaatactatagatcctgaagaaattattaaaaattatggcgcagattcagttagattattcatgttatctgatagtcctccagaaaaagatgttcaatggtctgaccaaggaatgatggcatgttataaatttatacaaaaactctgggttttgcataataaaattaaattaatattaaaaaaaaatgataaaaattccaatcaaactgaagatatttcgaaatttactaatcagctaattgatagaataaatttaaatttagaaaaatttaattacaatgtaatcatagccagtatttatgaagcatataattttttaaaccaaaaaattaattctccgctaaatagagatcaattatttgaaaattatattaaaattttatcagtattattccctgtgattcctcattttgcatcagagtgtctaaaagatttaaatgcagactacaatgcaaaatggccaatgatagataaaaaatttcttgtaaatgaaaataccaatatagtaattcaaataaatggcaaaaaaagatcaattattaattgtaaaaaaggaacgacagaaaaaattttaatgaaaaaaattaaagaagatattaaactaaataaattcctagaaaataaaaaaaatattaaaagtatttttattaaagataaactgataaatttaattataaaagaatgaa

SEQ ID NO: 304582 - DNA, 1524 bp, Unknown
  Bacterial polypeptide expressing nucleotide sequence isolated from the Sargasso Sea
taatactgattttatcaagtttaaagatcaatgttcaaaaactggaacaacagaggagtccatagctcaagcagaaaaattaggttttaaaactaaattagaggcttttaatccattagatgaaaatgaaaaagttccagtatattttgctaatttcgttcttatggattatggatttggtgctgtattcggctgtccgggacacgatcaaagagatttagatttcgcattaaaatataatttaccagttagaactgttgtaagaccaaaggaagagaaggatgattttaaagtcaaaaacattgcgtatacagatcaaggtgtaataataaactctaaatttttaaataatttaaaagttcctgatgaatcaataactgaagctataaaagttattgaaaaaaaaaaaattggaaaaaagacaattaattttagattaaaggattggggtgtttcacgtcaaagatattggggttgtccaataccaatagcttacgacaaagatggaaatgtacatgttgtaccaaaagatatgttgccaattaaacttccagaaaaaataaatctgcaggctaaaggaaaccctttaaatcatgagacacagtggaaaaaaattactattgatggaaaggaatgtgaaagagaaacagacactctcgatacttttgttgactcttcctggtattttttaagattttgttcccctcatgatgcaaattatggctttgattataaagcaatagactattggatgccagttgatcaatatataggaggtgtagagcatgcaattttacatttactttactcaagattttttatgagagctataaattataataatgaaaaattttcaattaaagaacctttcgaaagcctatttactcaagggatggtttgtcatgaaacatataaagatgaagatcaaaattggttaagtcctgatgaagttgatacgaatgacggcaaaagatattttgtaagaaaccaaccttcaaaaaaagttgaggttggacctgctgagtcgatgtcaaaatccaaaaaaaatactatagatcctggtagtatgattgataactttggtgcagattcagttagattatttattttatcagatagtcctccggaaaaagatatacaatggtctgagcaaggaatggtagcttcacataaatttatacaaaaactatggcttttaaacagtaaaataaaagaaaaaataagtaaatgttctaataagaaggatcaagatggagatcttgaaattgaaaaattcacaaatcacttaatttttagaatgaacaacaatttagaaaaatttaattataatgtaataatcgcaaacatgcatgagacatataattttttaactagaattttggataaagaatttaataaagatattcttagagaaaattttagaaaaattctctcagttatgtaccccgtgatacctcatataataaacgagtgtattgaaaataataatttcgaaccaattaaaaaatggccagatataaataa

SEQ ID NO: 304583 - DNA, 1198 bp, Unknown
  Bacterial polypeptide expressing nucleotide sequence isolated from the Sargasso Sea
tatggcatataatcacaaatctatagagcaaaaatggcaaaaatattgggatgaaaatgaaattttcaaaaccgatgactttttagataagcctaagtattatattttagatatgtatccctatccatcaggatctgggcttcatgtaggacacccacttggatatatagctaccgatatacttgctagatataaacgccatcaaggatataatgtgctacatcctatgggttgggatgcgtttggcttacctgctgagcaatatgccataaaaaccggtacgcatccatcagttacgacaaaagaaaatattaataattttaaacgccaaattaaaatgcttggattttcttatgattggactagagaaataaataccacagatccaggttatgttaaatggacacaatggatattcattcaactatacaataaaggcttagcttatgaagcggaagtgccggttaactggtgccccgaactgaaagctgtcctagcaaatgaagaagtgattgatggaaaatctgatattggtggccatccagttttaagagtgcctatgcgtcaatggatgcttagaataactaagtatgccgaatcattattgtctggtctagatgatgtagactggcctcatagtattaaagagcttcagcgtaattggattggaaggtcagaggggaccaaagttttatttgaacttccatcaatcagcaagcatcttgaggtttttactacacggcacgatacactttttggtgcaacttatattgtaatagcaccagaacatccattagttgaagatcttttaatagaagatcaaagaacattagtaaagcagtacattgaggaaacatctaaaaaatctgacctagatagaaccgagcttaataaagagaaaaacggagtttttttaggcacctatgctataaatcctgcaaatggtaaggaaataccaatatggatatcagactacgttattatgggatatggaacaggagccataatggcggtaccaggcgaagatgaaagagattgggaatttgcaacaaaatacgacttaccaattataagaacagttgaaccaagtaaagacttttcaggtggcgcatacactggagatggtccagctataaatagtgaattcttaaatggactctatatagatgaagctaaagaaaaaatggcttcatggctt

SEQ ID NO: 304584 - DNA, 1096 bp, Unknown
  Bacterial polypeptide expressing nucleotide sequence isolated from the Sargasso Sea
cgccaatatatttaaagtagaaaaaaaagataataaaaaaaaatattatgtgcttgagatgtttccttatccctctggaaaaatccatatgggacatgtaagaaactatacacttggtgatgttgttgcgcgttacaaaaaaatgatgggctttaatgttttccacccgatgggttgggatgcttttggactccctgcagaaaacgccgctatgacagaaaaaaagaatcctgaagattggacctataccaatataagttacatgcgaaaccagcttaagtctatgggcttttctattgattgggatagagaattggcaacttgtcaccctggttattacaaacatgagcagctcttttttttagaaatgtataaaaatggtttagcttataaaaaaatgtcagaggttaattgggatccagtagataaaacagttttggcaaacgaacaagttattgatggaaggggttggcgctctggtgctctggttgagaaaaaaaatctttcacaatggtttttaaaaacaagcaactactcggaagagctattagatgatttgagctcgctggatatgtggccaaataaagttaaggtgatgcaatctaactggattggtaaatcagaaggtgcagaaatagttttttctttagttaagaatgattttttagacgataagcatcttagagtttatactacaagacctgatacaatttttggtgcaacatttattgctatttcagccaatcatgattttgcaaaaaaaatattgaaaaaagataacaatgctaaaaaatttaataaggaaattaaagttatagactctgaaaaaacaaaggtgggatacaatacaaacatttttattaaacacccttttttagataaaaagataccgctatttatcgcaaattttgttctaatggattatggtctaggggctatatttggctgtcctgcccatgatcaaagagatttagattttgcactaaagtataatttagaggttattcaggttgtgaagcccataaaatcaaaacaaaactctaatggtatcaaaaatactgcaatattagaaaatggtttgatgatcaattctggg

SEQ ID NO: 304585 - DNA, 1300 bp, Unknown
  Bacterial polypeptide expressing nucleotide sequence isolated from the Sargasso Sea
gaggttaagagactggggtgtttcaagacaaagatactggggatgtccaataccaataatcaaatgtaataattgcggggacatacctgttccaacagaagaactcccagttgaattgccctctgacattgatttagatacacctggcaaccctctcgatgctcaccctgactggaagtttgttaaatgcccaaagtgtaataagtctgcagaaagagaaactgatacttttgatacattttttgaatcctcatggtactttattagatttacagaccctgatattaacattccatttagtaaatcagtagctaattattggatgcccgtagaccaatatataggcggagttgaacatgcagttttacatttattgtattcacgtttttttacaagagcacttaaagactgtggttatttatcaatttcagaaccatttaagggactaatgacacaaggaatggtttgtcaccaaacatttaaatcagaagatggcaaatgggtctttcctcatgaagtagaaaagaaaaataataagttttatcatacagtaaatggtagtgaagtgtttcctggcagaatagaaaaaatgagcaaatctaaaagaaatgttgttgatcctttgtctatagttaagaagtatggttcagatactgccaggatttttatggtgtcagactctcctcctgaaagagatatggaatggagtactgctggtgttgagggctcttataaatttttaaatagagttttaagaattgtaaatgagactaaaaagccaaaaaaattaattaatttagatcttgtagataataagaatgctgtaattaaaaaaatacatcaatccataaaagatattacagaaggaatagaaagcttcaggtttaatgtgtgcattgcaaaattatatgaattaacaaatatgatatctaaacttgactcaaaaactgatttcgaaataagcttaaagttttatggacttgaaatattagcgcaacttatttcaccatttgctccccaccatgctgaagaaatatggagtttaatgggacacaaaattctaatatgtgatacagaatggccaaaattcgataaaagatttctaagtgttgagcaaatcagtattggtgttcaaattaatggaaaattaaggggcaatataagttataataaaaatgctaaaaaagaagaaattaaagaactagctctttctttatcatcagttaaaaatagactgggtggtgaaaaaccgaagaaagtaattattgttcctgaaaggatcgtaaatattgttgtttag

SEQ ID NO: 304586 - DNA, 1155 bp, Unknown
  Bacterial polypeptide expressing nucleotide sequence isolated from the Sargasso Sea
ttatagtcaggtaaatgaattgagatcccaaaaaattagtgaagagtcgatagccaaaaatgagaaagtaggaattcagacagagttatttatcaaacatccgtttattgaaaataaactgcttccagtctttatagcaaacttcatattaatggattacggatctggggctatttatggttgtcctgcgcacgaccaaagagatttagattttgcaaataaatataatttagaaattatcccagtgatagatccatctgataagatcgaacttgataaaaaaactgcttacactggaagtggtaaacttattaattctcaatttttaaatgatctttccattgaagaagctaagaaagaaattatcaatagagtagaagaactacatataggaaagaagactactaattttagacttcgcgattggggtgtctccagacaaagatattggggatgcccaattcctattatgtatagagaagacggtaaggtaattgaagtccctgaggaccaactaccactggaattgccagatgatattgacttaagcattcctggcaatccttttgataatcatccagagtggaaattcacaaaatgtcctgaaacagggatgaatgctataagggaaacagacacacttgatactttcgtcgactcagcatggtattttttaagattttgctcaccgctcgaaaaaaaagatccttttaacttagatgaaactaattattggatgccagttgatcaatacgttggtggtgttgagcatgccattttacatttattatactctagattttttactaaagcactcaacattaaaggaatagatgagccttttgatagcctatttacgcaaggcatggtttgtcatcacacatttcaaaatgagtctaatgactgggtttatcctgatgatgtagaaatgagagattcaaaatattttcaaatatctacaggtaaaccggtcacaatgggagacattgagtcgatgtcgaaatcaaagaaaaatgtaattgatcctgaaacaataataagtacatatggagctgactcagcaaggtggtttatgttatctgacagtccacctgaaaaagatattaattggactgactcgggtatcaatggagcgtggaagatatgtcagaaaat

SEQ ID NO: 304587 - DNA, 1990 bp, Unknown
  Bacterial polypeptide expressing nucleotide sequence isolated from the Sargasso Sea
atttttactaagttagaacaaaatggtcttgtatatagaaaaaaatctttagttaactgggatccagtggatgagactgtcttagcaaatgaacaagttattgatggtaagggatggagatctggtgcaactattgagcttaaagaaatcgatcaatggttcttaaagatcactgactatgctgatgaattattgtcatcaattgaaaacttagattggccagataatgtaaagtcaatgcaaaaaaattggataggaaagtcattcggtacagaaataaaatttaatttgcttaataacgaggagttaagggcttttacaacaagaattgacaccatatatggtgttacatttatagctatttcaccaaaccatccaatagctcaaaacttagcaacaaataatccagaaattaatgaatttattaagcaatgtaatgcaacaaaaatggctgaggcagatatggcgaaagtagataagctgggccttaaaacaaacttaaaagttcaacatcctttctcagatacaaagctcgatgtttggattgcaaattatgtcctgatggattatggaacaggagtagtaatgggtgtgccagctcatgacgaaagggattatgagtttgctaaaaaatacaatattaaaattaaaaaggttgttgagagtaatgaattaccttcacctaaaaaaggtatccttattgattcagatatttttactggacaagagtcagatgaagcaataaaaaatatcaatgattacttagaaaaaaatgatgttggaaaaggtatcgaaaattttagattaagagactggggcgtcagcaggcaaagattttggggatgtcccatacctgtagtcttcgataatggcaagcccatttttttagagaaaaatgatcttccagttgagttgccaaaaataaaagatggagaatcaccgaaaccattaagtcaaaataaagatttttttgacctagggtctgggaagactcgtgaagttgatacatttgatacttttgtagactcatcatggtactacgcaaggttcacagccgcagataataataatgaagctttagatgaaaattcaaaatattggcttcctgttgatctttatattggtggtattgaacatgcaattttacaccttttgtattcaagattttttcataaagcaatgagagacattggtcttgttgaaggcgacgagccttttaaaaaacttcttacacaaggaatggtattaaaagatggatttaaaatgtctaagtcaaagggaaatacagtggatcctcaaaagtttattgataaatatggggctgacaccattaggctttacatgatgtttacttctccacccgaacagtctttggaatggtcagatactgcaattgagggctcatatagatttcttaaacgcatttgggttctagtatcagatagaaagatatattctaaaaaatcaccaaaaacttttacaaaacttgagcttaagcttcgtcaaaaaagtcatcaaactttaaaaaaagtaactaatgattatgcgcaacgaaactcttttaatacagcagttgcctcaatcatggaattgttaaatgcaataccagattcttttaaatcagaacacgcaactgaaacagaggtattttgtttagatgaagtcattcaatttacactcaaaatgttgtcgccaataactccgcatataagcctctatttatggaaagaatatacagactctgatggacatgattttgagaattcttggccaaattacaatgaagattttcttaaagtagaggattttcaattaatcattcaggtaaatggaaaggtcagagggaaggaacatatttcaattaatgctgatcaaactgaaatagaaaagctatctaaagaaaatgaaaatgtaaaaaaagttctagctaataagcccataaaaaaggtaatctatgttaaagaaaaactaattaattttgtaatttaaa

SEQ ID NO: 304588 - DNA, 1267 bp, Unknown
  Bacterial polypeptide expressing nucleotide sequence isolated from the Sargasso Sea
ttgccctgcacatgatcaacgagatttagattttgcaaataaatataaactgaaagtaaaaccagtagtttgccctcctaatgaaaatgcagattttcaaataacaaatgaggcttatactggaccaggaaaaatttttaattctaaattcctagatggtcttaattgccctgaagagtcaattattgaaacaataagtatattagagaaaaaaaagctcggtaaaaaaaaaataaattttagattaaaagattggggagtatcaagacaaaggtattggggctgtccgattcccattgcttataataacaaaggagaagttattaaaattcctttgaatgatttacctgtaaaacttccagagaatattgatctaaaagtaaagggaaaccctttagatcatcaacatgaatggaaaaaaataacaattaatggcgaaacttgtgttagagaaactgatactctggatactttcgttgactcatcatggtactatttaagattttgttctgctaacaacaaacttaaaggttttgatatggatgaaatatcatattggatgccagtcgatcaatatattggtggagtagaacatgcaattttacatttactctattcaagattttttatgagagccttaggagaagacaagaaaaaatttattaatgttgaaccatttgaaggattatttacacaaggaatggtttgtcatgaaacctacaaagataaaaataataattggttctttcctgatgaagtagagacaaatgatggaaaaaaatactttttaaaaaacgatccatcattggaaattaaagttggaccaagtgagtctatgtccaaatcaaaaaagaataccattgatcctcaaataatgattaataattatggagctgatgcagtgagattatttattctatccgatagtccacctgaaaaagatattcaatggtctgatcagggaatgatttcagcttataaatttatccaaaaattttggacgctacataaaaaaattattaatcataaattcaataataaaagcaaaataaaaaatttggaaaatattaattcatttacaaatgaggcaattaataaaattacaaaaaatcttgaaagttttcattttaatgtaatcatagcaaatctacatgaaacatataattttcttataaaatgtatcgacgataaaaattcaaaaaaagaatttctaggtaattattcaaaaatcctaaaagttctttcaccaattatcccacatataata

SEQ ID NO: 304589 - DNA, 1501 bp, Unknown
  Bacterial polypeptide expressing nucleotide sequence isolated from the Sargasso Sea
atggaaagggcaaattttaaaaaaattcaagagaaatggaaagacaaactcgatctaaataataatagtaaaaataaaaagttttattgtcttgagatgtttccgtatccatcaggaagaatacacatgggacatgtaagaaattatacaatgggtgatgtagttgcaaggtataaatcattaaaaggttttaatgtattgcatcctatgggttgggatgcttttggtttaccagctgaaaatgcctctagagaaaataatttatctccaatgaaatggacaaaagaaaatattgatcaaatgaaaaaacaacttaaaatgttaggcctttctatagactggagtaaagagatagcaacttgtgatccaagttattataagcatcaacaggaactgtttatagatttttataataatggattaatttcaagaaaagaaacttatgttaattgggacccagtagagaaaactgttttggcgaatgagcaggtagtaaacgggaagggttggagatcaaatgctttggttgaaagaaaaaaactttatcaatggtttttaaacattacgaaattttctgatgacttattagatgggctaaaaagtttagatggttggccagataaagttaagttgatgcaaaaaaattggattggtaaatcttttgggtgtgaaattatatttgatatagataacactgaggaaaaaataaaggtttttacaactcgaccagatacaatttttggggctacgtttttagcaatatctcctgatcatcaaattgcaaaaaaattttatcagaatcaagactttttaaaattcaaagaaatttcctcaaaaattggtacaacagaggaagcgattgcattggccgaaaaacacggttttgatactaaattaaaagctaaacacccttttattaaaaataaattaattccagtttacattgctaactttgttttaatggaatatggagaaggggctatttttggttgtccagctcatgatcaacgagacttcgagtttgcaaaaaaatataatttagaaattatacaagtggtaaaatcagatagcgaaaaagatacactgccttatacttctggaggaaaaattataaattcagatacgctaaacggtatggatgtagaaaaagctaagattgaagtaattaaaaaagtagagaatttgaaaataggaaaaaaaaaaattcaatatagattaaaagattggggtatttctaggcaaagatattggggttgtccgattccaatgatacatctcaaaaatggacaaatagtgccggttgataaaagtgaacttccaataaaacttccagataacattgatctaaaatcatccggaaatccactggaaaatcataaagaatggaaacgaactatttataaaaaaacaggcgaaccagctttaagagaaacagataccttagatacttttgtagattcttcgtggtattttattagattttgttcgccaagaaaataaa

SEQ ID NO: 304590 - DNA, 1196 bp, Unknown
  Bacterial polypeptide expressing nucleotide sequence isolated from the Sargasso Sea
tttccttatccttctggaaaattacatatgggtcacgtaagaaattatacgattggtgatgttatatctagatataaaagaatgaaaaactttaatgtatttcagcctatgggttgggatgcttttggtctgcctgcagagaatgctgctattgcaaacaaagtaagtccaaacgattggacaaaccaaaatattaaaaacatgaaatcacaactacaatctcttggttttagttatgattggtcaaaagaacttagaacatgtgactcaagttactataaatgggaacaattaatttttaaaaaattttacgacgcgggtcttgtttatagaaaaaaatctatggttaattgggatcctgaagataagaccgttctagcaaatgagcaggtaatagatggaaaaggttggcgctctggagctcaaattgaaataaaagaaatagatcaatggtttataaaaatcactgactatgctgacgagcttctatcttcacttgaagagcttgattggccagaaaatgttaagcttatgcaaaagaattggattggaaaatcatttggtgctgagattgaatataaaattgatgctagtaaagaatcactaataaccttctcgacaagaccagatactatcttcggagtatcttttcttgcaatatctcccaatcatccccttgcaataaagatcgctaaagataatgaaaaaatatcgaactttcttgaaaaatgtaaagaagctaaggctgcagaagctgatatggcaaaggcagaaaaacttggtattgatacaaatctaagagtaattcatcctttaactggagaaaaattaccagtatggattggaaattttgtattgcttgactatggaacaggggttgtaatgggagttccagctcacgattcaagagattatgaatttgcaaaaaaatataatcttaatatcaaagaagtgattcaaaataatgaagaggagttaccaagaactgaaaatggaattttaataaattcagataaatttaacggtctttcatcagaagaaggatcaaaaaaaattatcgaagaattagttaaattaaaatctggtaaacagcttattcaattcaggctcagagattggggagtaagtaggcaaagatattggggttgtccaatacctgttatttatgaaaacggcgatccaaaagttattgacga

SEQ ID NO: 304591 - DNA, 547 bp, Unknown
  Bacterial polypeptide expressing nucleotide sequence isolated from the Sargasso Sea
atgaattataaacataaagatatcgaatccaagtggcaaaaatactgggatgataataaaacctttaaagccatcgaagataccggtaaagaaaaattctacattcttgatatgtttccctatccatccggatcaggattgcatgttgggcatcctctaggctatacagccactgatatatattcgcgctataaaaggctgcagggttataatgtacttcatccaatggggtgggatgcatttggattgccagcagagcagtacgcattaaaaacaggtactcacccaagagaaaccacagaaaagaacatctacagatatagacagcaactgaaaatgcttggattttcttatgactgggacagagaaataaacaccactgagcctagttattataaatggacccaatggattttcttacaattgtataaaaagggcctagcttatgaggcagaggtacctgttaattggtgtccagagcttaaggctgttctatccaatgaggaagtagttaatggtaggtctgatattggtgggcatccggtac

SEQ ID NO: 304592 - DNA, 862 bp, Unknown
  Bacterial polypeptide expressing nucleotide sequence isolated from the Sargasso Sea
gttgagtagatataacttcaaattaatagagaaaaaatggcaagatgactgggataaaaataagcaatttaaagtaaaggtagacaataaaaagaaaaaattttattgtttagagatgttcccttacccttctgggagaatccacatggggcatgtaaggaactatacaattggtgatgttttagctagatataaatcattattaggatttaacgttttacatccaatgggctgggattcatttgggatgcctgccgaaaatgctgcaaaacaaaataatttaaatccaaaagattggactgaagaaaatattaatacaatgaaaaaccagttgaaaaaacttggtttatctattgattggggaagagaaatttccacttgttctcctgaatattataaacatcaacaaaaaattttcttagatttgtacgataaaaatttaatctatagaaaagaaagttatgttaattgggatcctatcgatcaaacagtgcttgcaaatgaacaagtaattaatggcaaaggatggcgctctggtgcagttgtagaaagaaaaaaattaaatcaatggttttttaaaatttcaactttttctgaagaattgctcgctgatttagatactttagatcaatggcctgaaaaggtaaaaacaatgcaaaaaaattggattggtaaatctttcggatgtgaaattaatttcaagattgaaggttcaaaaaacgttaaatcaataaaatgctatacgacaaggccggacactctttttggtttttcatttttagctgtatctatagatcaccctttatctaaattttatgaaaaagataaaaattttatttctttcaaagatgagtgctcaaaa

SEQ ID NO: 304593 - DNA, 907 bp, Unknown
  Bacterial polypeptide expressing nucleotide sequence isolated from the Sargasso Sea
atgcaatatgatcatttaaagattgagaccaagtggcaaacacattggcaaaaaaacaagacctttaaggtagaaatagataccaccaaggaaaagctgtatatccttgatatgtttccatatccatctggttctggtctacatgttggacatccattaggatatactgccactgatatatactcaagatttaaaaggctccaaggatataatgtgctacatcctatgggttgggatgcattcggtcttcctgctgagcaatatgcgatcagaacaggtacacatcctaagaagacaactgaagaaaatgtaaagaatttcaagcgtcaaataaagatgctagggttcagctatgactgggatagagagataaatacgacagatgaaaagtattataaatggacacaatggatctttttacagctattcaataaaggattagcgtatgaggctgaggttccagtgaactggtgccctgaattaaaagctgtattagcgaacgaagaggtagtagatggaagatctgaaataggaggacatcctgtaataagaaaaccaatgcgccaatggatgtttcgcataaccgaatacgctgaatcattgcttgaaggtctagaggacttagattggcctgaaaatgtaaaagacctccaaagaaattggattggaagatcagaagggtctgaagtagaatttaaattaccagctataaatgtcaatataatggtatttacaaccaggcccgatactttatttggagcgacgtatatggtattggctccagagcatcctttagtattggaattagtaacagaggaatacaggcaggatgtagaacgatatattgagaatgcgcaaaagaaaagtgatctagatagaggagaactaaataaagataagactggtg

SEQ ID NO: 304594 - DNA, 1337 bp, Unknown
  Bacterial polypeptide expressing nucleotide sequence isolated from the Sargasso Sea
tatggggtgggattcttttggaatgccagcagaaaatgcagcaagagaaaataatcaagatccaaaagtttggacagaaaataatattgcaacaatgaaaaaacagttgaaacaattaggattatcaattgattgggatagagaaatttcaacctgctctgaagactattataaacaccaacaaaaattttttattgaaatgttcaataaaggtttagtttataaaaaagaaaattatgtaaattgggatcctgttgatgaaacagtacttgccaatgaacaagttatagatggaaaaggttggaggtcaggcgcagtagtagaaagaaagaaattaagccaatggttttttaatatatcaaaatttgccgacaaccttcaagaagagttgaacaatatggatgagtggccaaataaagttaaggttatgcagcaaaactggataggaaaatcatttggttgcgagattgattttcaaatactgggagaaagcaaagtaaataaaattaagtgttttactactagaccagacacattatttggtttttcatttttagctctttcagtagatcatcctatgtctgaatattataaaaatgatccagatttcaagatatttaaagagcagtgttctaagacaggaacaactgaagaatctatagctaatgcagaaaaaatagggttcaagactaaactttcagcaaaaaatcctttggacgaaactaaaagtgttccagtttattttgctaactttgttttgatggattatggatttggtgctgtatttgggtgtcctgcgcatgatcaaagagattttgactttgcaaaaaaatacaatttggaaattaaaactgttgtaaaaccttcggatgaaaaagatgatttcgttgtgacaaaagaagcatatactggttcaggttcaattataaattcaaaatttttaaacaatttgcaagtacctgatgaatcagtaatagaaacaattaaaatcttagaagaaaaaaagttaggaaaaaagaaaataaattttagattaaaagattggggaatttctagacaaagatattggggttgtcctatcccaattatttatgacgagaatggttcatataaaccaatacctgaaaaggaattaccagtaaaattaccacaaaatattaatttaaatactaaaggaaatcctctttcaaaagtcgatgaatggaacaaaattaaaatcgatggtaaaacctattacagagagacagacactttagatacatttgtagattcttcttggtattttttaagattctgctcacctaaaaatgagagcgaaccatttgatattgaagatt

SEQ ID NO: 304595 - DNA, 874 bp, Unknown
  Bacterial polypeptide expressing nucleotide sequence isolated from the Sargasso Sea
atgcaggagtatatcccacagaaaattgaagcaaagtggcaaaaatactgggaagagcataatttgctggattttgattttgattcggaaaatctaaaattttacatgcttaccatgcttccctatccttctggagatcttcatattgggcactggtatgccatggcaccatctgactgttatgcccgttttatgaaaatgaaaggacacgaagtttttttcccaataggcttcgatgcttttggacttccagcagaaaatgcggccatcaaaaacaatattcatccaaaatcatggacgtatgacaatatcaaacgcatgcaaaatcagcttcgttcaatgggaaatatgtttgcctggaaaaacgagattgtttcatgtgatccagaatattataaatggagtcagtggtttttcctcagaatgcttgaggaagatttggcttacagagagtatgcacctgttgattattgtaaccattgtcagacaactctagctcgggaacaggtttggggtgaggacagggtatgcgaacgttgcgacaatcctgttgtaaaaaaagatttaaatcaatggaaactacgcattaccaactacgcagatgaactgcttgattttgatggactggattggccggaacgggtgcgttcaatgcaagaaaactggattggccgcagcgaaggagttgagtttgctttaaaaatagatggttcagaggagcttttttttagggtttttactacaagacctgacactgttttcggcatgactttctgtgtgctagcaccggagcatgaattagtggatcaaatcacaaaagacgaaaacaaagagagtgttgaagcttataaatctgctgctaagcacaaagacg

SEQ ID NO: 304596 - DNA, 1198 bp, Unknown
  Bacterial polypeptide expressing nucleotide sequence isolated from the Sargasso Sea
tatggataaaatcaatacctctgacatagataaaaaatggcaatctttttgggctcggagaaaaaacaaattcaaacatactaataaagaaaaaaaattttactgccttgagatgtttccttatccttcgggaaaaattcacatgggacatgttaggaactacgcaattggcgatgtgctggctagatacaaaatgataaatggatttaatgttctacatccaatgggatgggacgctttcggtcttccagctgagaatgctgcaaaagaaaataatttaaatccaaaagattggacaaaaaaaaatatatctacaatgaaacatcaacttcaattattaggtctttctatagattgggatttagaaatttccacttgtgatgaggattattacaagcatcaacaagaattatttattgatttttataataaaggcttagttgtgagaaaagaaacatatgtgaattgggatccagtagaaaaaactgttctagccaatgaacaagttattgacggtaaaggttggcgttcaaatgcagtagtagaaagaaaaaaattgtttcaatggttttttaatatttccaaattttcagatgaattacttgaggatttaagttccttaaaagaatggccagaaagagtaaaattaatgcaaaaaaattggataggtaaatctgtggggtgcgaaatagattttaaaatatataaaaatgataaatccgttaaagtttttactactcgtcctgatacaatatttggcgcaacttttttagctatatctgttgaccatcctttgtgtaaagattacttaaaacattcggatttcttagatttcaaaaaaaaatgctctcaggtcggaaccactgaggaggctattgctaatgctgaaaagattggttttaaaacagatttagaggctgagcatccatttattgaggggaaaaaaattccaatttatgtttcgaattttatacttatggactatggaactggtgcaatatttggatgtcctgctcatgaccaaagagatcttgattttgcaactaaatacaaaattgaagtaatacaagtagtcaagcctaaagatataaataatgaaaaaataaataatgtagcttacacaggtgaagggtcaataattaattcggattttttaaacaatttaacaatttctgaagcaaaagaaaaaattgtaaaa

SEQ ID NO: 304597 - DNA, 1012 bp, Unknown
  Bacterial polypeptide expressing nucleotide sequence isolated from the Sargasso Sea
tatgtttccgtatccatcagggcaaggtctacacgttggtcatcctttaggttatactgcaactgatatactatcaagatataaaaggatgaaaggttttaatgttttacacccaatgggatgggatgcatttggtcttcctgcagagcaatatgcagtagagactggaactcaccctgcaagtacaacaaaaaaaaatatagaaaaatttaaatcacagattatgagtctaggtttttcatatgattgggatagagaaataaatacaactgatcctaagtattataaatggacacagtggatatttttacaattgtataaaaaaggattggtatatcaagatgaagtgccggttaattggtgtccatcgttaggaactgttctggcaaatgaagaagtaattgatggaaaatcagaaagaggcggacatcctgttgtacgaaaaccaatgaaacaatgggtgttccgtataacagattatgcagaatcccttttaaaaggtctagatgaagttgattggcctgaaaatgtgaaggaattacaaaaaaattggattggtaagtccgatggagccaatgtgatatttgatattccctctattgatgaaacaataagcgtgtttacaacgagacctgacacattatttggtgcaacatatatggtattagcgcctgagcatcccctagtggatatgttaacaaaagaagagcgtaaaaaggacgttctaaaatatgttgagataacttctcataaatctgatttggaccgtggtgaattaaataaggataaaaccggagtatttattggttcacatgctgttaatccgcttaataatgaagaaatacctatatggatatcagattatgttcttatgtcctatggaactggtgcaatcatggctgttccaggacatgatcaacgggactatgaatttgctcaaaagtttaatttaccaattacacaggtggtatctggtggagatatatctgaaagcgcgtttacggatattgat

SEQ ID NO: 304598 - DNA, 1927 bp, Unknown
  Bacterial polypeptide expressing nucleotide sequence isolated from the Sargasso Sea
taatttaaatgaatggccagataaagtaaaaacaatgcaaaaaaattggattggaaaatcttttggttgtgaaatagactttaaaatagaaggttctaaagaaattaattcaataaaatgttatactactagaccagatacactttttggtttttcttttttagctttatcagtagatcatccaatttcaaagtattatgaaaataataaagattttgaaaaatttaaaaaagaatgttctaaaactggtaccactgaagagtcaattgctaatgcaactaagattggatttaaaacaaatttacttgctgtaaatcctttagatcagaagaacaaagtcccagtatattttgcgaactttgttttaatggattatggttttggagcagtatttggatgtcctgcacacgatcaaagagattttgattttgcaaaaaaatataatcttgaaattaaaacagttgttaaaccaactgacatggaagataacttcaaagttaaaatagaggcttatactggatctggaattttaattaactctaaattcttaaatggattaaaggtacctgaggattctataaatcaaacaataaaagttttagaagagaaaaaattaggaaaaagaaaaacaaattatagattaaaagattggggtatatctcgtcaaagatactggggttgtccaatacctattgcctatgatgaaaataataaaataataaaaatacctgaaaatgaattaccagttaagcttcctgataatattgatatcaatacaaatggaaaccctttagatgctcaagaaaaatggaaaaaaattattatagatgggaaaaaatgtgtaagagaaacagatactctggacacttttgtagactcatcttggtactatttgagattttgctcagctaaagataattcagaaccttttaacaaatctgacattgattattggatgccagttgatcaatatattgggggagtagagcatgcgattttacatcttttgtattcaagattttttatgaaagctttaaatttaaataattcaaaaataaaatttactgaaccattcaaagggttatttacgcaaggaatggtctgtcatgaaacatacaaagatcatgataataactggcttagtcctgacgaagtaatttctgaaaatggaaaagatttttttgaaataaaagatcgtaataaaaaagtcaaagttggtccttctgaatcaatgtcaaaatcaaaaaaaaatactatagatccgcaaaacatcattgatcaatacggtgctgatgctgtaagattttttattttagccgatagcccacccgaaagagatgttcagtggtctgaggaaggaatgagatcatcatataaatttatacaaaaattttggttgttaaatgaacaaatattaaaattagataaaattcaatctaatgaacaaagtcaagatttagaaatttttacaaaccaatcaataaataaaataaatcaagccctagaaaaatttagatataatgtaattatcgcgacttatcatgaaatttactcctattataaaaaaataattgaaaaggaaaaaaattttaaaaatttaaaaaaaaattttcaaaaaatattgctaattatgatccctgttactccacatttagctaatgaatgcttagaaaggttaaattatgatttaaatataagttggcctggtatagaacaaaaatatttgcagcaagactgtaatgatattgtgattcagataaatggaaaaaaaagaggtataatctctgttgaaaaaaatcttcaagagaaagacatcataaaacaaatcaaaaatgaaaaattaatagacaaatatcttaatgatggaaagttgataaaaacaatatatgttaaaaacagattaataaattatatagttaaattatga

SEQ ID NO: 304599 - DNA, 1143 bp, Unknown
  Bacterial polypeptide expressing nucleotide sequence isolated from the Sargasso Sea
aatgtttttcaaccaatgggcgtgggatgcttttgggttgccagcagaaaatgcagcaatagaaaataaagtaagtccaaaagattggacaaatacaaatattgataatatgaaaaaacaacttaaatcattaggtttcagctatgactggtcgaaagaattaagaacatgtgatccaaaatactataaatgggaacagttaatatttaaaaagttctatgatgctggattagtgtatagaaaaaaatcaatagtaaattgggacccagttgataaaacagtattagcaaatgagcaagtaatagatggaaagggatggcggtctggtgcacaaattgagattaaagagattgatcaatggtttatcaaaataactgagtatgctgaagagcttcttgattcactggatggtttggactggcctgaaaatgtaaagttaatgcaaaaaaattggataggaaaatctaatggggctgaaatcaaatataagattgatgaattagatgaatatctaacaactttttcaacaagaccagatactatttttggagtatcttttcttgctatttcaccaaatcacccactagcaattgatctatcaaaaaaagataaaaatattcttgaatttcttgaaaaatgtaaagacataaaagcagctgaagcagatatagctaaggcagaaaaattaggaatagatactaaaattaaagtcatacatcctcttacaggagagaaattaccattatggattggcaattttgttcttcttgattatggaacaggtgtggtcatgggtgttcctggacacgatttaagggattatgaatttgccactaaatacggattagatattaaacaagtaattaagacaaatgatgatgatctgcctataactgaaaatggtattttaattaattcagataaatatgatgggatgagttctgaagaagcttctaatgaaataattaaagagcttgttaagttaaattctggagcgcatttaatccaatttagattaagggattggggtataagccgacaacgatactggggttgtccaatacctgtagtctatgaaaatgatgtgcctaaagtgattgaagaaaaagatatgccaataaaacttcctgaacttgataagga

SEQ ID NO: 304600 - DNA, 2596 bp, Unknown
  Bacterial polypeptide expressing nucleotide sequence isolated from the Sargasso Sea
catgcacgagagatacgtacccgccgacgtcgaagccgccgcccagggcgactggcgcgcagccgatgcctacaagacgcaggaagattcgcagaagccgaagttctactgcgtgtcgatgctgccgtacccgtccggcaagctgcacatgggtcacgtgcgcaactacacgatcaacgacgtgatgtaccgctatctgcggatgaacggctacaacacgctgatgccgatgggctgggacgcattcgggatgccggccgagaacgccgcgatggcgaacggcgtgccgcccgcgaagtggacctacgacaacatcgactacatgaagggccagatgcagtcgatgggcctcgcgatcgactggtcgcgcgaaatcgcgacgtgcaagcccgactactacaagtggaaccagtggctgttcctgaagatgctcgagaagggcatcgcgtacaagaagacgggcaccgtgaactgggacccggtcgaccagaccgtgctcgcgaacgagcaggtgatcgacggccgcggctggcgttcgggcgcgctcgtcgagaagcgcgagatcccgatgtactacctgcgtatcacgcagtacgcggatgagctgctgaacgacctcgacggcctcggctggcccgagcgcgtgaagatcatgcagcagaactggatcggcaagagcttcggcgtgaacttcggcttcccgtatgaactcgacggcgagaagaagctgctgcgcgtgttcacgacgcgtgccgacacgatcatgggcgtcacgttctgcgcgatcgcggccgagcatccgctcgccacgcgccttgcccaggacaagcccgagctgctcgcgttcatcgacgaatgcaagcgcggcggcgtcgccgaggccgacgtcgcgacgatggagaagaagggcgtcgcgacgggcttctcggtcacgcacccgctcaccggcgagccggtcgaggtgtggatcggcaactacgtgctgatgagctatggcgaaggcgcggtgatgggcgtgccgggccacgacgagcgcgatttcgcgttcgcgaagaaatacggcctgccgatcaagcaggtgatctcggccgaaggccagcagtactcgctcgacgcatggcaggagtggtacggcgacaaggaaacggccgtctgcgtgaacagcggcaagtacgacggcctgcgctatacggatgcggtcgacgcggtcgcggccgacctgaaggccggcggcttcggcgacaagcaggtcacgtggcgcctgcgcgactggggcgtgtcgcgccagcgctactggggcacgccgatcccgatcatccactgcccgtcgtgcggcgacgtgccggtgcccgagcaggatctgcccgtcgtgctgccggaggacctcgtgccggacggctcgggcaacccgctcgcgaagtcggaagcgttcctgaattgcgcgtgcccgaagtgcggcgcggcagccaagcgtgaaaccgacacgatggacaccttcgtcgattcgtcgtggtacttctcgcgctacacggcgccggacgccgagacgatggtcgacgcgcgcaccgactactggatgccgatggatcagtacatcggcggcatcgagcacgcgatcctgcacctgctgtattcgcgcttctggaccaaggtgatgcgcgacctcggcctcgtgaagttcggcgagccggcgaagaacctgctcacgcagggcatggtgctgaacgagacgtactaccgcgaagacgcttccggcaagaagacctggtacaacccgctcgacgtgacggtcacgcacgacgacaagggccgcccggtcggcgcgacgctgaacgcggacggccagccggtcgtgctcggcggcatcgagaagatgtcgaagtcgaagaacaacggtgtcgatccgcagctgttgatcgaccagtacggcgcggataccgcgcgcctgttcacgatgttcgccgcgccgcccgagcagcagctcgagtggtcgggtgcgggcgtcgaaggcgcgagccgcttcctgcgccgcgtgtggagcttcggtgcgacgaaccgcgaagcgctcgccgcgcgcgcgggcttcgatgcggccgcgctcggcgaagccgacaaggcgctgcgccgcgagatctacagcgtgctgaagcaggccgatttcgactaccagcgcctgcaatacaacacggtcgtgtccgctgcgatgaagatgctgaacgcgatcgacggcgcgaagggcgcgacgcccggcgtgctgcgtgaaacgtacggcgtgctgctgcgcgtgctgtacccggtcgtgccgcacgtcacgttcgagctgtggaaggcgctgggctacgcggaagaattcggcccgctgctcgacgcaccgtggccgaaggtcgacgaggccgcgctcgagcaggccgagatcgaactcgtcctgcaggtgaacggcaaggtgcgcggcgcgctgaaggtggcgaaggacgcgagccgcgaggcgatcgaagccgcggcggtggccgacgacgcgttcgcgaagttcagcgaaggcaagccggcgaagaagatcgtcgtcgtgccgggccgcctcgtgaacatcgtcgtctga

SEQ ID NO: 304601 - DNA, 1679 bp, Unknown
  Bacterial polypeptide expressing nucleotide sequence isolated from the Sargasso Sea
aatgaataattcatacaaacctgctgaaatagaaaaaaaagctcaagaattatgggcaactgaaaagtgctttgaggtaaccgaagactcgaagaaagacaagttttattgtctcactatgtttccttatccaagtggccagttacacatgggacatgtaagggtttttacaatcagtgatgtaattgcaagatatcagagaatgattggcaaacatgttcttcagccaatgggttgggatgcatttgggatgccagcagaaaacgcggcaataaagagaaacattccgcctgcaaaatggacttataagaatattgactatatgagaacccaattaaaaaggttgggttatgcgtatgattggacaagagaggtgactacgtgcagacccgaatattataaatgggagcaatggctttttgttcgtctttttaaaaaaggaatcgtttacagaaaaaatgcgatagtgaattgggatccagttgataaaacagtattggctaatgagcaagtgatcgatggaagaggatggagatcagatgcaatagtagagaggaaagaaataccccagtggttcatgaaaataactgcctatgccgatgagcttctcgatggtcttgaccaacttgagggttggccaacctccgttaaaacgatgcaaaaaaattggataggaaaatcagaaggactcgaaatctctttcgatatagagaatagcaaggatgcactaaaaatattcacaaccaggccagacacactcatgggcgcgacatatatggcggttgcggcagagcatcctcttgcctttgatgcagcttctgaaaatagcgatattgcaagttttattgaggagtgcaaaaaaaacaaagcatcggaagcagccatggaaacaatggaaaaaaaagggatgcctctgaatgttttcgccattcacccaataactggtgaaaaaattccaatttgggtggcaaattttgtcctaatgacatacggaagtggtgcaataatggcggtgccggcacatgatcaacgtgattgggagtttgcaaaaaaatacgatctagaaataaagaaagtgattgagcctgctgataaaaacttcgataccgcaaaagctccttttttagatcatggaactctgattaattcgatggactatactgatatgagctctgaagaagcatttactgagatagcaaaattttttgaatcaaccaagaaaggaaggcgagtaacgaattttagactaagagactggggtgtatcgagacaaagatattggggtacaccgataccaataatttactgtgaggactgcggctcggttcctgttccagaagaacaattgccagttgtattgcctgagaatgttgaatttagtggaacaggctcacccttaaaagatatgccagaattttacaatgttgattgccccaactgcaaaaagagtgcgagaagagagacagacactttcgatactttttttgagtcatcatggtacttttcaagatatgcctgccccgatgctgaagaaggtatgctagacaagagagaaagttactggatgccggtagatcaatacacaggtggaattgagcatgccattctgcacttactgtattctcggttttttcaaagattgatgcgtgatgaagggttatccaaggagagcgagccct

SEQ ID NO: 304602 - DNA, 953 bp, Unknown
  Bacterial polypeptide expressing nucleotide sequence isolated from the Sargasso Sea
tttgagttataatcataaatccatagagagtaaatggcaaaaattttggttagaaaatcaaacttttaagtctgaagatgtatctagcagtaaacctaagtattatgttcttgatatgtttccttatccatcaggtgcaggtcttcacgttggtcatgctttaggatatgtagcaacggatattgttgctcgctataagcgcatgaaaggctttaatgttcttcatcctatgggttgggatgcgtttggtctaccagcagagcaatatgctataaaaacaggtactcatcctaaagtaacaacccaacaaaatgtagaaaactttaaaaaacaaataaacagtctaggtttttcatatgattggtcaagagaaataaataccacagatccagggtactataaatggactcaatggatttttatgcaacttttcaataaaggtttggcatttgaacaagaagttgcggttaattggtgtcctgaattgaaagctgttctcgctaacgaagaagtagttaatggaaaatctgatattgggggtcatcctgtaatcagacttccaatgaagcagtggatattaaaaattactgactatgcagagtcgcttcttgacggattagatgatttagactggccagaaaatataaaagaacttcaaaaaaactggattggtagatctgaaggtgttgaattaggttttgaaatagatggtagtaacgatttaataaatgtatatactacaagacctgatacactttttggagcatcttatatggttttagctcctgaacatactttaattcattcattggttacagataaacaaagggaagaagtagagtcatatattgaagaaactaaaaagaaatctgactttgatagaacagaaattaacaaagataaaactggtgtttttactggctcatatgcaataaatccatttacaagagaaa

SEQ ID NO: 304603 - DNA, 1080 bp, Unknown
  Bacterial polypeptide expressing nucleotide sequence isolated from the Sargasso Sea
aatgcttcctgaagttgaaaattataaaccatcagatgatggtaagtctccattatctttaattaataattgggttgaagtaaaagatgaaaactcaaatattattggacttagagaaacaaatactatgccacaatgggctggatcatgttggtattttttaagatttactgatcctaacaacactaatgaagcttggtcaaaagaaaatgaaaactattggatgccagtagatttatatattggtggacaagagcatgcagtacttcatttattgtattcaagattttggcatcatgttttatacgatttaggtttagtttctacaaaagaaccattcaaaaaattatataatcaaggaatgattcttggagatgatggtacaaaaatgagtaagtctcgagggaatgtaataaatcctgaggaaattatggatgaatatggtgcagattctatgagactttatgagatgtttatgggtcctttaaataaatcaaaaccatggagtacaaaaggattacaggggtgttataggtttattaataaattatggtcaattatttcagatgatgaaggttttttgtcctcaaaaatctccaacgatgtagaaccagataaagagacactttttttacatcatcaaacaattaaaaagttaggtgaagatattgaaagtttacactttaatactgcagtttctcagttaatgatttattgtaatcatttacaaaaatgcgattctattccaaaagaccttattgaagacttatcgattataatatgtccgtttgtaccacatctctcagaggagttttggagcttattaggacatagtgattcaataacttatgaatcatggcctgactatgatgaaaatttgattgaattagacgaagtaactatagctgtccaagttaacggaaaattaagagcgaatattagtgttgcaaaagattcaattgaaaaagatgttgtttctaaagcattgaccttagaaaacgttgaaaaatttacaagtgatggatctatcgttaaaacaatctatattgctaatagattattaaattttgtcgtcaagta

SEQ ID NO: 304604 - DNA, 1192 bp, Unknown
  Bacterial polypeptide expressing nucleotide sequence isolated from the Sargasso Sea
aatttcgcgacaacgttattgggggtgtccgattcctattattaatacaaaagatggtcaagccctctctgttcctgaggaccagctccccgttgtgctacccgagaatatagaatttgagggtatcagctctccaataaaatcaatggaagaatttattaatattgatgccccagacggcagtggtagtggcgaaagagaaaccgacacttttgataccttctttgaatcttcctggtattttgcacgatactgctgcccggataataacaaggtgatggcagatgagcgcgccaattactggcttcccgttgatcaatacattggtggtgtagaacatgccatcctacatcttctatacgcacgatttttccataagctaatgcgcgatttagggttattagaatgtgatgagccatttactaatttacttactcagggaatggtgttgaaagatggtgctaaaatgtctaaatcgaaagggaatactgttgacccgcaatccttaattgatgaatacggggcagatacggttcgtttatttatgatgtttgcatcacccccggaacaaagtcttgaatggaaggatgaaggtgttgagggcgcgcatcgttttctaaaaaaactatggaagtttgcgagtacacatattaatgaaggtcaatctccaactctggatcccgcttcaatgactgatgtgcaaaaagagttgcgtcgtaagattcatatgacaattaataaagtaaatgacgatattggtcgtcgatatacttttaacacagcaattgctgcggtaatggaaatgattaatgctttatcacgaagtgagttgaaaagcgacaatgaccacgcaattatgcgtgagggtattgaaacagctgttctgctgctttctccaatcgttccgcacataactgatgcgctttgggttgaactcgggcattgcgaacccctaattgacaccgcatggcccaaatcagattcagatgcattagagcaaaatgagatagaaatggttgttcaaattaatggcaaacttcgtggaaagataaccgttacaaaaaattcaaaacaaaaagaaattgaaaatcaagcagttgaagatgaaaaagtaaaacgaaatttagaaggtaaaactattaaaaaaatcatcgtaatcccagaacgattagtgaacatcgtagtatcatag

SEQ ID NO: 304605 - DNA, 2449 bp, Unknown
  Bacterial polypeptide expressing nucleotide sequence isolated from the Sargasso Sea
aatggcggaaatagaaattccttatgatcctgccaagatagaagaaaaaatacaatcatactggaaagaacatgagaccttttcagtaactgaggaccctgataaagaaaagtacttttgcctaagcatgtttccttatcctagcggatccatccacatgggccatgttagaaactataccattggggatgtcataagtagatttcagcgtatgcttgggaaaaatgttcttcaaccaatgggttgggacgcatttggactacctgcagaaaatgcagctataaaaaatgaaattcaaccttctgaatggactaaagaaaatataaaaaatatgaaaacccaactctcaaaaatgggttttgcttatgactggaaaagagagtttgccacttcagatgaaaattactataaatgggaacaatggtttttcttacaattggttgaaaagggattggcttatcaagaagaagccgaagtaaattgggatccagttgatcaaactgtcctagcaaacgaacaagttattgatggtaaaggatggaggtcaggtgctgaagttgagaagaaaactctcaaacaatggtttttaaagattactgattatgctgaagaacttcttgaaggtacagataaactagaaggttggcctaatcaagtaagactccaacaaaagaattggataggtaaatcagaaggtatggaatttagctttgcaatagacggatctgataagcgcatagaaatttttacaactcgacctgacactataatgggtgcgtcattcatagcaatttctacatctcattatttaagcctagaaatgcaggaagaaaataatgatgtcaaaaaatttgttcaagagctcaataaagtaaagaatgcagaggcagacttagctaaacaagaaaaaaaaggaattaaaactaaattccatgcgatccatcccttcacaaaagaaaaattacccatatggattgctaacttcgtattaagtgattacggctccggtgcactcatggcagttccaggccatgaccaaagagattttgaattcgcaaagaaatataagcttcctattaagcaagttataaccggtaaaaagggagatgatataaagttagaagccatacttgaaaaagatgtcttaattaattctggagaatttaatggtctatcttttgatgaagctttcaaagcaattgaaaagaaagcaactgaacttaattgtggaaaaagatctacaaattttagactgagagactggggtatatctagacaaagatactggggatcccctattccaatcttgaaagacaaagataattttgttcctgcgaaagaattgcctgtaagactcccattagaagttgaatttaaaggtgtcaactccccactaaaggatatggatgaatttataaatattgaacaagacggtaagtcctttaaaagagaaactgatacttttgatactttttttgaatcttcttggtattacgctaggtttgcaagttttgatagcgaaaattccatgttggacgaaagagcaaaatattggctacctgtagaccaatatattggaggtatagaacatgctgtgcttcatcttctttattctagattcttcttcagatgcttaagagatattggaatagtggaaggcgatgagccttttgataacttactttgtcaaggaatggttttgaaagacggttctaaaatgtctaaatctaaaggcaatacggtggatccagagggtttgattgaaaaatatggtgcagatacggttagattatttgttatgtttgcagctcctcctgatcaatctctcgaatggtctgaccaaggagtgcaaggtgcttatagatttattaatagaatttggaaaattgcccatcatcatattgattccggaataccagattctgcggcaattggatctgaagatcaagaagtaagaaaactcagaatcaaaacacaccaagttttaaaaaaagtaaaggatgattatcttagaaggcatagctttaatacggcaattgcatccattatggaattatcaaacaacataccaagagaattcttgaataaggatactgataatgacaaaagaaaagcagcggatgaagcaataaaagcaattatcttaatgctctctcccataactccccatctttctcaacatttatggtggcaatttgaccaagataatttagtagttgatatcgcgtggccggaagcaaaagaagagtttctgcaagaagatgtcattaatattgccattcaagtaaatggaaaattaagatctgaaatacaagtaagtcaagatgctcaagaagatttaatcaaggaattggcgatagaagatcaaaacattaaaaaatatgtatctgattctcccattaagaaagtaatctatatacctagaaagctaataaatatcgtcatataa

SEQ ID NO: 304606 - DNA, 1411 bp, Unknown
  Bacterial polypeptide expressing nucleotide sequence isolated from the Sargasso Sea
tattgcctttccatgttcccatacccatctggtaaattacatatggggcatgttagaaattacaccattggtgatgtaatttcacgatataaaagaatgcaaaattacaatgtttttcaaccaatgggttgggacgcttttggtcttcctgcagaaaatgctgcaatagaaaacaaagtaagtcctaaagaatggaccaatcaaaatattcaaaatatgaaaacacaacttaaatctcttggtttaagttatgactggtcaaaagagttgagaacttgtgatgaaagttattacaaatgggagcaacttattttcaagaagttctttgatgctggactagtttatagaaaaaaatcaatggttaattgggatcctgttgatgaaacagtgcttgcaaatgaacaagttatcgatggaaaaggttggaggtccggagcacaagttgaacttaaagaaatagatcaatggttcataaaaattacaaactacgccgatgaattgcttgagtctcttgataagttagattggccggagaacgtcaaattaatgcagaaaaattggataggtaaatcaaatggggcagaaataaagtttcaaataataggtacaaaagattatttaataacgttttcaactaggccagatacaatttttggtgtctcttttttagcactatctccaaatcatcctatggcaatagaaatttcaaaagagaatgaaaaaataaagaaatttttagaagtatgcaaagaatccaaagctgctgaggcagatatggcaaaagcagataaacttggaattgatactggtgttcgagcaatgcatccaattacaaaagaagagatacctatctggattggtaacttcgtactcttggattatggaacgggtgttgtaatgggtgtgcctggccatgattcaagagattttgaatttgcttctaaatataatttagatataaaacaggtcattcaatctgaccaaacagaagatttaccaatacttgataaaggtatgttggttaattctgataaatttaacggcaaaacatctgaagaagcttctaaagaaatagttcaggagcttattgacaatggttatggcgaggaattagtgcaatttagattaagagattggggagtaagcagacagagatactggggatgtccaattccagttgtttataaaaatggtgagcctgaaatcattggtgaaaatgatatgccagttatcttacctgaacttgatgatggagcagctccagtcccactaagtcagattaaagattttgttgaacttgggaatggcataacaagagaaactgatacttttgacacatttatggattcttcctggtatcacgctagatttacttctgctggtaactcaaaacaaatatttgatgaaaata

SEQ ID NO: 304607 - DNA, 1441 bp, Unknown
  Bacterial polypeptide expressing nucleotide sequence isolated from the Sargasso Sea
gagaaaggttccgatatgggtgggcaatttcgtaatcgcatcatatggtaccggcgcagttatggcagtacctgggcatgatgagagagattttgatttcgcaaaaaagtatgacattccaataaagcgtgtactggttatgacagaggatggttctgctgactctgaattagaagaggctgaatgcgatttgggttggatggtaaattccgggatggatggattcgatggcctttatggcgatgatgcaaagtccgcagtgtgtcaagcattagagaacataggtgcaggtaatagtacaatcaattggaaaattaggccttggctaatcagtaggcagagatactggggcaccccaattccaattattcattgtgattcttgtggggtggtacctgtccctgaagaccaactacctgttgaactacctcgagacgttgtttttgatggaaaagggaatccgttagaatcgagtgaatctttctgtaatgtcgaatgtcctaagtgtggtgagcctgcaaggagagagacagatacaatggatactttcgtagactcatcctggtacttcttgcgatatacagatgctatgcaaaatgaaacttgtttcgacccaaagattgcaaatcattggatgaatgtagatttctattgcggtggaattgagcatgctcaaatgcatctgatttatgctaggttttggacaaaagcactacgagacattggattacacaacattgacgagccatttgaagaactgttatgccaaggcatggtgaataaagcagctccatggtgtgaaccttgtggaattactttgtctgttgctcatgccggtcaaaagtgccctcaatgtaatttcatcttaactgaaaggagtgcaaagatgagtaagagtctaggaaacactgtttcgccagaagaaatgattgagaaatatggcgcagataccgtaaggctgtttattctgttcgccgcaaatccaactgcaggcatggattggtctgatactgctcttgaagcaaatcatagacaaatgattcaactattcaatatgcctgaaatgattttacaatgggacggagatcaatctcaaattgatacctggctattagctaggataaagcagagaatgaatgaatggcgagatgctatggaagcgtacgacctgcgcggtgcagtagaggtaagtcactttgatttggtaaaagacatcaactggtatcgtcgtagaggcggtaataatcaagcagtagggcgcaaagtattgtactgttggactcatatgatttcaacaacttctcctcatatggctgaggattggtggaagatgcttggtaatgaagatttgatcgcaggacgtattttccaaattgaagatgatcttgaagtaaatgaacaaaaagcgctaatcgatgagagataccttagagcatttcta

SEQ ID NO: 304608 - DNA, 2150 bp, Unknown
  Bacterial polypeptide expressing nucleotide sequence isolated from the Sargasso Sea
ctccacaatgagagatcaacttaaatctttaggagcggtctatgattggagtcgggaagtgatttgctgcaatcctgaatattatgaatggaatcaatggctgtttttgaaatttttcgagcaaggattagcttataaacaaaaagcccctgtagtttggtgtccctcctgcaatactgtgttggccaatgaacaagtagttaatgggaattgtgaacggtgcgacacagttatcacgagaaaagatttagaacaatggtttttgaaaattactgattatgcagatgaattgttagattttgaagggttaattgaatggcctgaaaaaattttgaccatgcaacgtaattggataggtaaaagtgaaggcgttgagattcaatttgacttaataaatccagaaaacactaatcttgcaagtacagaaataaccacgtttactacaaggatagacaccatctttggcgttactttcatggcgattgctccagaacatgagtttgtagatagtttgacgactaagactaactcggatgcagttaagaaatacatagaacaggctcgtaagacctcggaaatagatagactgtccacagaaaaagtgaaaacaggacagctgttagggtcatatgcaattaatagatttaatggagccaaaattccgatatacattgcagattatgtattaccaaattatggaactggagcagtgatgggagtccctgcacatgatgacagagattttgtgtttgcttcgaactatggtatcgatatagttcaagttgtctcgcagaatgatgagactgatataggtttgacagaggcttatgttgaagacgggaaattgattaattcgggagaatattcagggctcaataatagggatgcaataaaggtcctaggcgatcaaatcgagtcgaaaaaatggggaaagaaggcagtaacctatcggattagggattggttgatttcaaggcaacggtattgggggactccaatacccatggtgacttgtaaagattgtggcattcaaccagtagagacaacctccttgcctgtggaattacctccaaacgcagatttcactccctcgggtgaatcaccattggctaaaattgaatcgttcgttaagactacttgcccaaaatgtggaggcgtagcggatagggaaacggacacaatggatacattttttgattcatcttggtatatgtatcgatacttgaatcctaaatataaagaaggtccctttgaaaacaaagaagtctcctcgtggatgcctgtggatcagtacactggaggagctgaacacgcggttatgcacttgttgtattcacgttttttcaccaaagctcttagagatatggggctagtagattttgatgaaccattcttgcggttatacaaccaaggcataatattaggtcaagatcacgaaaaaatgagcaagagtaggggaaatgttatcaacccggatgacgttgtaggcataatgggtgctgatgccgttcgtgtatttctaatgtttattggtccttgggatcagggaggtccatggagcaatgtgggtatcaatggagttgctcgatggttaaatagaatttggggaatagcttcagaaaaatacgtcacatctgctgatagtgtttttgaccatgagatggaatccgaaactcaacaagcggttcataagaccataaaaaaagtttatgaggatttagataaatttaaattcaataccgcgatagctgcactgatggagctttcaaatcatttgaccaaagtttggaacgccaaaaatgtaagtgttgaagtctggaatgatagtatcaaacagtttttgttaatgctcgctccgattgcccctcatctatcagaagaactttgggaaatgaatggttatgagtttagtatccataatcaaaaattcccagattgggaagaatccttagttgtagatgaatctatcactctaattgttcaaattaacggaaaattgagagatacaatcagtgtagattcaggcattagtgaagaaatggcgcaggaagctgcaatgtctagtgagaaaatacagggacatataaacgggacaacgataaagaaggtaatttatgttccagatagacttattaacattgttgtttaga

SEQ ID NO: 304609 - DNA, 1312 bp, Unknown
  Bacterial polypeptide expressing nucleotide sequence isolated from the Sargasso Sea
atgcctgaaagagatcttccttatgaaccgggagacattgaagagcaggttcaattatattggaaagaaaatgattctttttctgttactgaagatccggataaagaaaaatatttttgcttgagtatgttcccttatccaagtggatcaatacacatgggtcatgtcaggaactattctatcggtgatgctataagtagattccataggatgcttggtaaaaatgttctacaacctatggggtgggatgctttcggcctccctgcagaaaatgctgcaatcaataataaagttcaaccttctgactggactcttgaaaatattgcaagcatgaaaaagcaacttacaaggctaggttttgcttatgactggaaaagagaatttgctacttcagaatcagattactataaatgggaacagtggttctttcttcaaattctggaaaagggattagcctatcaagaagaagcggaagttaactgggatccagtagatcaaactgtcttggcaaacgaacaagttattgatggaaaaggatggcgttctggtgctgaagttgaaaagaaaagactaaaacaatggttcttaaaaattacagactatgcagaagagttattagaaggaacagataaattagatggttggccagagcaggtaaaaatacaacagaagaattggataggaaaatctgaaggaatgaacttcagtttcgctgtaaaagatgaagaatcaaaaattgaagtatttacaactagaccagacacaataatgggggtttcttttattgccatatctgcatcacattttttaagtcttgagatagcagaaaataataaagaaatttttaacttcattactaaacaaaacaaaattaaacaatcagaagctgaatttgccaaacaagaaaaggaaggatttttcactgggaagtatgctatccatccttttacaaagaaagaaattccaatttggattgctaatttcgttcttagtgattacggctcgggtgccttaatggctgttcctgctcatgatcaaagagattttgaatttgctacaaaatataaattaccaatcttgcctgttatacaaagcgatgaaacagatagtgataccttgggtcaagctacagttgaaaaaaatatcttaattaactcagatgaatttgatggtttagactttgatcaagcctttcaagccattgaaaaaaaagctgaagaattgactgcggccataaagagactaacttcaggcttagagattggggagtttcaaggcaaagatattggggtgcacctatcccggtattaag

SEQ ID NO: 304610 - DNA, 2569 bp, Unknown
  Bacterial polypeptide expressing nucleotide sequence isolated from the Sargasso Sea
aatggattatagccccaaaaagatagaaccttattggcaagatttgtggtcgaaggaaaaaccttttgccgccaaaaaatcagataaaaatttaccaaaaaaatatattttagagatgtttccttatccatcaggaagaattcatatggggcatgttaggaactatacgataggggatgtaataacgagatatagaattacaaaaggtgataatgttttgcatcctatgggttgggatgcatttggtatgccagcagaaaatgctgctatggagaataaaatccatcctaaggagtggacctataaaaacattgatagtatgagagatcaattaaagtcacttggtctcgccattgactgggatcgtgaatttgcaacatgtgaccatgaatacattaaacaccaacaaaatatctttattgacttctataaaaataatcttgtttacagaaaagaaagtgaagttaattgggatccagtagataagacagttttagcaaatgagcaagtgatagatggattgggatggagatcaggagctgttgttgaaagaagaaaattaaatcaatggtttttaaaaatttcggatttttcggatgatttgcttgatggattagaaaagttagataagtggcctgataaagtaaaacttatgcagaaaaattggataggaaaatcatcaggggcagttttcagctttaagattcttggaaaatttacaaaaattgctagtgaaatcaaggtatataccaccagacccgatacattatttggtgcaagtttttgtgctgttgcgcctgaccatgaaatagccacagcaatatcacaggataatgacgatgctcttaattttataaaagaatgtcaaaaaattgcgtcgtctgaagaagcaattgaaaaagttgaaaaagaggggtttgatacaggtatacttgttcaacatccatttgatgaaaatataaagcttccggtttacatagccaatttcgtattgtcatcatacggaacaggcgcaatatttggttgtccggcacacgatcaaagagatttagattttgctaataagtatggtcttccagttttacctgttgtttgtccagcagatgtagacgaacaagatatgttaattaaaaatgaagcgtatattggggatggtacaattataaattcaaattttctcaatggcttaagtatagaaaaagctaaagaaactgccattgataagcttaaagaattgaaaattggcaagaaggaaattaattatagattaagagattggggtatttcaagacaaagatactggggatgccctatcccaattatgtatagagaagatggagaaataattccagttccagagagtgaattgccaataactttacctgaagatatagacttttcaataccaggaaatccattagaacgacatcctacttggaaacacacaatatgtaagaagactggtcttaaggcgataagagaaactgatacatttgatacttttattgattcttcgtggtattttgcaagattctgtgatcttgataattcaaaaccaattaataaagatgaagcaaattactggttacctgtagatcaatatattggcggcattgagcatgcaattttgcatttactatattcaagattttttactagggcgttgaaaattaccggacatttagaaattaaggagccttttgatggtatgttcactcaaggaatggtttgccatgaaacatatacaaatgaaaaaggtgaatgggtggagccataccttgttataaaaaatgagaaagataattcggcttaccataaagaaactggtgagaaaatttcaattgggtcgccagaaaaaatgtctaaatcgaagaagaatatagttgaccctgacgatattataaaactttatggcgcagacacagccagatggtttgttctttctgactctcctccagatagagatatcttttggactgaggcaggtatcgactcttctaataaatttataaacaaaatttggagaactatattagattttaaagaaattataaaaaagaaatctccgaaagacccagacgaacaaatacaatataagaagatcttacataaatacataagagatataacttttaatcttgaatcaatggcatttaataaagccattgccaatgtttattctcttataggtgagctatctaagtcagaaaccaaagagaatataagcagtgaaactgcatatgaaattttacaatcattaattattattttatctccatttatcccgcatttggctgaagaatcttggtcacaattaggttttaaagggttagcttgtaaacaatcgtggcctgaatttgaagaaaacctaataaaagataaaaatgcaaaattaattgttcaaatcaatggaaagaaaagaggtgaaataagcatcccaattgaaaccgaagaagaggtggcaattgatgcagcaaaagaaaacaaaaaaataaaaggtgatttagctgaaaaggaaattaaaaaagtaatttatgttaaaggaaggatacttaattttgtcatttaa

SEQ ID NO: 304611 - DNA, 1354 bp, Unknown
  Bacterial polypeptide expressing nucleotide sequence isolated from the Sargasso Sea
tttgggatgacatttgccgttatatctccagagcacgaattagtaaatcaaattatggaacaatccgataaaaaagatgagatacaaaattatttagactcaattgtaaataagtcagaattcgaaagaatgtctattacaaaagaaaaaactggagtagataccactttgaaagttaagaatccaatcacaaatgaggaagtacctttatggatagcagactatgttcttataaattatggaactggtgcgattatggcagttccagctcatgatgaaagagattatgaattcgcaaaaaaatatgatattgaaattcgacaggtaattatagataaagaaaaaacaataaatgtagacaatgaagcctttacaggtaatggagtccttatcaattctgaagagttcaatgagttgagctctcatgaagaagcaagtaaaaagataaatgactttttagtaaaaaataagattggcgatgaaaaaacaacatatcgtttgagagattggttaatcagtagacagaggtattggggctgtccaattccattaatcaattgtgatgactgtggattattaccagaaaaatatgaaaatttaccagtattacttccagaaattaaagattatataaatacagatggatctcctttgtccaagagcaaagaatttgttgaaactgattgtccaaaatgttctaagaaagctctccgtgaaactgacaccatggatacttttgtagattcatcctggtattacatgagattcttagacccaaagaacgataatgaacctttcgaatctgattttataaatgaatggttaccggttgatcaatatataggtggtgtcgaacatgctattcttcaccttctttattcaaggttttttgtaagagccttgagggatcttggttttatgaaaattgatgaaccatttcataatcttttctctcaggggatgattaactttggtggggcaaagatgtcaaaatcaaaaggaaatattgtggatccagaatcatattttgcaactcatggggctgacgcattaagattatatattctttttatggcacctcctagcgatggggttgaatggaatgatggtggtatagaaggaactaagagattcttaaataagttctgggataatatggtcaaaattattgatcaaaaagacacctctgatacttttagttcaaaagatgaggaaattgagagaaaaattaatcaaacaataaaatctattactcaacatcttgagaaatttgagtttaatacagcggtatctgatcttatgaaattaaacaatgacttaagcgattatctaaaggaagataatacgatcagat

SEQ ID NO: 304612 - DNA, 1437 bp, Unknown
  Bacterial polypeptide expressing nucleotide sequence isolated from the Sargasso Sea
tgaacaaacagtcttagcgaacgaacaagtaattaatggaagaggatggcgctcaaatgctatcgtagaaagaaaaaaattatctcaatggttttttaacatttcaaaattttctgaagaactcttgtctgatttagataaattagaaaattggccaaacaaagtaaaaactatgcaaaaaaattggataggaaaatcttttggatgtgaaattgactttgatgtcgaaggaaatttgcctattaacaaaattaaatgcttcacaacaagacctgacacattatttggtttttctttcttagctttatccgttgatcaccccctatctgaatatttcataaaagatcaagaattcataaaatttaaagacgaatgttcaaaaacaggaactacggaggaatccatagctcaagctgaaaagattggttttaaaactaatctattagccatcaatcctttagacaaaaataaaaaagtaccagtttattttgccaactttgtcttaatggattacggttttggtgcagtatttggatgtccagcccacgatcaaagagattttgattttgccaagaaatataatttgcagattaaaacagtcgttaaaccttttgaagaaaaagatagttacgaagtcaaagatgaagcttattctggtggcggtacaattataaattcagatttattaaatggtttaaaagtgcccaacgagtctattactaagacaatagatcttctccagaaaaagaaattaggaaagaaaacaataaattacagattaaaagattggggcatatcaagacaaaggtattggggctgtccaattcccgtagcttatgatgaaagggggaaagtgttcttaatacctaaaaaagacttacctgttaaattgcctgagaaggtgaacttaaattttaaaggaaaccctttagacaacgccaaagattggaaaaaagtaaaaataggtggaaataatctcacaagagaaactgacactttagatacatttgtagactcatcctggtattttatgagattttgctcaccaaattttagtgaaggaccatttgatttaaaaaaactaaactattggatgcctgttgatcaatacatcggaggggtagagcatgcgattttacatttattgtattcacgtttttttatgaaagcgatcaaaacaactaatcaaaaagttaaagactctgaaccatttagaggattgtttacccagggtatggtttgccatcaaacttataaagatggtaaaggaaaatggatttctcctgacgaaattgaaaaagataacttaggaaatattataagcaaaaatagtaaagaaaaaataatagttggaccttcagaagcaatgtctaaatcaaagaaaaatattatagatccagaaagtatgatcaagatatatggagcggatgcagtaag

SEQ ID NO: 304613 - DNA, 1024 bp, Unknown
  Bacterial polypeptide expressing nucleotide sequence isolated from the Sargasso Sea
ttgaatttatggcccgacaaagtaaagacaatgcaaaaaaattggataggaaaatcatttggttgcgaaatagattttcaaattaatggttcaaaagaggtaaaatcgattaagtgttatacaacaaggccagacacattgtttggattttcttttttagcattatctgtggaccacccaatatcaaaatattatgaaaataacgaaaaatttattgaattcaaaaaagaatgttcaaaaacaggaaccacagaggagtcaatagcacaagctacaaaaataggttttaaaactactttagaggcagttaatcccttagataacgagttaaaagtccccgtctattttgctaactttgttttaatggactatggttttggagcagtttttggatgccctgctcacgaccaaagagattttgactttgcaaaaaaatatgatcttaaaattaaaacagtagttaaacctgcagacaaaacagataattatcaggttcaaaacgaagcttatactggagcaggtgtaatcataaactctaaattcttaaatggtctttcagtgccagaaaaatctataacagaaaccatcaagattttagaggataaaaatttaggtaagaaaaaaactaattatagattaaaagattggggcatttctagacaaaggtattggggatgtccaattccaatagcttatgacaatcataataatattattaagataccagaggaaaatttgcctgttgagcttccagactctattgacttaaacacaaatggtaatccattagactctcaaacaaaatggaaaaaagttaagattaatggcaaagagtgtattagagaaacggatactttagatacttttgtagattcttcttggtattttctaagattctgttcagctaaaaataaagaaaaagcttttgatgtaaacgaagtagattattggatgccagtagaccagtatattggtggggttgagcatgcaattttacacctttctatattcacgtttttttatg

SEQ ID NO: 304614 - DNA, 2176 bp, Unknown
  Bacterial polypeptide expressing nucleotide sequence isolated from the Sargasso Sea
atgattgattcaaaatataacccaagagaaatagaagaatcagcccagaattattgggaggataagagagtttttgaatcgattgaggatcaagagaaggaaaaatattactgtctttgcatgtttccttacccgagtggacgattgcatatgggacatgttaggaattacacaattggtgatgtcgtatctagatatcagagaatgcatggcaagaatgttttgcagccaatgggatgggatgcttttggtttaccagctgagggtgcagcaataaaaaataatatggctccatcaaagtggaccagacaaaacattgaatacatgaagtatcagttaaagatgcttggttttgggtatgattggagcagagaacttgctacttgcgatcctgattactacaaatgggaacaatggatgtttacccgtttgtttgagaagggtattgcatatcgaagcgatgccatagtcaattgggatcccgttgagaatacagttcttgcgaatgagcaagtgattgatggaaaaggttggagatctggtgcaaccattgagcgaagaaatatgcctcaatggtttcttaggataacggattactgtgaagagctactcgaaggattagatgatctagactggccagagcaagtcaaagtaatgcaaagaaattggattggtcgatcagaaggctatgaaatcgactttgagattcctcacttagatacagctatcagtgtttacaccactagaacagatacactctttggtgcaacctatcttgcattggctccagagcatccgattgttcaagagatagccagcttagataacaatgtgcaagaatttctagaagatacaaaatcacaagcagtatctgaagaagctttggagaaaatggaaaagaaaggtgttcccctcggctttaatgcaatcaatcctatcaatggtgaagagatcccagtatggactgcaaactttgtgctaatgacctatggaacgggttcaatcatgtctgtgcctgcacatgatcaaagagatcatgattttgcaaaaaaatatgatttacatattcagcctgtaataagatcaaatgacaaagattcaaatcatgatttcaacaaagaagcctatattgaagaaggtatattgtttaattcaggaaattatgatggagtcagctctgctcaagcaaaagatcagataggagaattacttactgataaaaatgcagcaaagaaagtcattaattatcgtttaagggactggctcatttctaggcaacggtattggggtgctccaataccagtgttgacaaacgagcagggcgatcttgtttcagagtctgatgaaaatcttcctgtctctttaccggaggaggtagaattcgatggagttcattctccattgaaaacaatgagtgatttttatgaggtgaatgacagagatattccattggttcgtgaaacagatacgttcgatacttttatggaatcttcttggtactacgctagattttgttcaagcgattctgacaaagcgatgttggatgatagagctaaatattggcttccagttgacctctatattggtggaattgagcacgcgatcttacacctcctgtatgcaaggttctatcataagctacttcgagatgagggtctcgttgaaggaaatgagccatttaaaaggctattaacccagggcatggttctaaatgatggcgcaaagatgtcaaaatctttaggcaatacagtcgatccagaggagatgattcaaaattacggcgcagatacggttcgtttattcatgatgtttacctctcctccagagcaatctttagagtggtcagatacagcaatcaacggctcatatcggtttttaaaaaagttatggaaactgataaaaacccatcaagactctataaaagatattcctagtatttcgtcgaatgaaaattttaatggaaatcaaaataagttgagaagaaaaacgcatcaaacaatttcaaaggtcacagacgatatcggaagaaggtatacttttaataccgcaattgcagcagttatggaacttgttaatgaagtttcagctttcaatgtcgatgatgaattggatcgccaagtaatcaaagaggcaattgaaagcatactattattgctctcaccgatcgttccacata

SEQ ID NO: 304615 - DNA, 1626 bp, Unknown
  Bacterial polypeptide expressing nucleotide sequence isolated from the Sargasso Sea
aatgagttcaaattacaaccctcaatcaattgaaaaagatatccaagataaatgggataagcaaaataaatatgtcactagggtggatgaaagaaaaaagtattattgtctatcaatgtttccatacccatctggaaaacttcacatggggcatgtaagaaactacaccattggagatgtaatttctcgatataagagaatgagaaattttaatgtatttcaacctatgggttgggatgcatttgggctaccagcagaaaatgcggctattgcaaataaagtaagcccaaaagagtggacaaatcaaaatatagaaaatatgaaagtccaacttcaatctcttgggtttagttatgactggtcaaaagaactaaaaacctgtgaaccaaattactataaatgggagcagctgatatttaaaaaattgtttgatgctggtctagtttatcgaaaaaaatccttagtgaactgggatcctgttgatgaaacagttttggcaaatgaacaagtaattgatgggaaaggatggagatctggtgcacaaatagaaattaaagaaattgatcaatggtttataaaaatcactaaatatgcagaagagcttcttgattcattggaaaatcttgattggcctgaaaacgttaaaagaatgcaaagaaattggattggcaaatctaatggggcagaaattaaatacaagatagataattcaaaagaatttctaactactttttctacaagaccagacactatatttggagtttcctttcttgctatttctccaaatcatccgctcgcagttaacttagcaaaaagcaacaaagagatatatgaatttttagaaaaatgtaaagagattaaagctgcagaggcagatattgctaaagcagataaattaggaatagataccaatataaaagttattcatcctttaactggtaaaaaaattcctgtatggattgggaattttgttttgctagaatacggtactggggttgtcatgggcgttcctgctcacgatgctagagatcatgaatttgcaactaaatataatttggacattaaacaagtaattgaaactgataataatgatttccctattttgcaaaaaggaaaacttataaattctgaaaattttaatggtatgcaatctgatagcgcctcaaatgaaatagtaaatgaacttacaaaattaaagttaggtgaagaactaattcaatttagactaagagattggggcgtaagcagacaaagatactggggttgtccaattcctgttatatatgatggtgatgttccaagtgttctaggcgagaatgatatacctattgaacttccagaattagaagaaaatgagcctccaaccccgctaagtcaaaatgaaaaatttttaaaattaaacaagggttttagaagagaaagtgatacttttgatacttttatggattcttcatggtattacgcaagattcacatcagctgacaatgaagatgagatatttgatgaaaaaaccaaatactggctcccagtggatctttatattggtggaattgaacacgctatattacatctcttatattcaagattttttcataaagctttgagagatattggtttggtcgaagg

SEQ ID NO: 304616 - DNA, 969 bp, Unknown
  Bacterial polypeptide expressing nucleotide sequence isolated from the Sargasso Sea
ttatggattcatcttggtattacgctagatttacatcttcaaacaataataatgaaatttttgatgaaaacactaaatattggctaccagtagatttatatattggtggtatagagcatgctatattgcatttgctatattcaagattttttcataaagctcttcgagacattggattagttgaaggtgatgaaccctttaaaaggttgcttactcaaggtatggttcttaaagatggtgcaaagatgtctaaatcgaaaggtaatactgtcgacccgcaatcatacattgagaaatatggagcagataccgttaggctttatatgatgtttacatcaccacctgagcaaagtttagaatggagcgaatcatctgttgaaggtgcttcaagatttttaaagagaatttggagtcttattgaaggaaaaaaatatattaaactggatatgaaatttgaattctcgaaagaagaaattgagttaagaagaaagtgtcactctacattaaaaaaagtagagcatgattatgaatcaagattttcttttaatactgctattgcagcaataatggagttgctaaattttattccagatgaattcaaaaaagataatgctacagatgctcaaaagttttgtcttaatgaagcaattctattttctctaaaaatgctatttccaatatctccccatatttgcgaatatttatggaccagttttgtaaatgatggatcatgcatcgagtcatcctggccaaagtatgacgaagctattattgaatcagatgaattcgagttaataatacaagttaatggtaaagttcgcggaaagttaaatattagtaaaaatttagatgaagaaactgttaaaaatttatcattagaagtcgaaaatgttaaaaataacatagcagatagtgagattaagaaagctatctttgttaaagataagcttataaattttgtaatttaaa

SEQ ID NO: 304617 - DNA, 1159 bp, Unknown
  Bacterial polypeptide expressing nucleotide sequence isolated from the Sargasso Sea
gtaattccagtaattttacctaaagataagaccgaaaaagaatttaaagtaagtgacgaggcatatgtaggtgatggtcagattattaattcagatttcttaaatggtttaaaaattgaagaagggaaaattgaagtgattagaagacttgagaaaatggaacaaggacgtggtcagacaatatttaggcttagagattggggaatatcaaggcaaagatactggggctgccctattccaattttatatagagaagacggtaaaattttaacggttcctgatagcgagctaccaattaagcttccaaaagatatagatttgactaaaccgggaaatcctcttgaaaatcatcctacttggaagtttacaaaatgtcctgaaacaggaatgaaagcaatcagagaaactgacactttggatacttttgtagactcatcttggtattttctgagattttgttcacatgataacaaaaatactggttatgatttagacgatgtaaaatactggatgccagtcgatcaatatatcggtggtgtagagcatgcaatacttcatttgttgtattcccgttttttttcaagagctattagtcttggatcagattatgaaattaaggaaccattccaaggtttatttactcaaggtatggtttgtcacaaaacttataaaaataaaaaaggtgattggatttttccagaagatgtcatgttagaaaaaggcaagattttagataagaatagtagtgaggaagtatttgaaggaccatcagagtcaatgtcaaaatctaagaaaaatgttatcgacccagagaccgtgataaaactttacggagcagactcagtaaggtggtttatgctatcagatagtccgcctgaaagagatattcaatggagcgatgaaggtatcagtggatcatataaatttatgcaaaaaatatggaatatttctgaaacaataaataatttagatcctaaaactaaaatggatgatgaaacaaaaaatgttttggacaaatctataaacaagctaattaaagatgttacattagcaattgagagttttcactttaatgtagcagttgctaaattttacgaatttataaatattttaagtaaagtactacatgacaaaaacgaagataaaatttacttgcaaa

SEQ ID NO: 304618 - DNA, 1750 bp, Unknown
  Bacterial polypeptide expressing nucleotide sequence isolated from the Sargasso Sea
catgcaagagcaataccgcccggaagagatagaatccaaagtacagcttcactgggatgagaagcgcacatttgaagttaccgaagacgagagcaaagagaagtattactgcctgtctatgcttccctatccttctggtcgactacacatgggccacgtacgtaactacaccatcggtgacgtgatcgcccgctaccagcgcatgctgggcaaaaacgtactgcagccaattggctgggatgcgttcggtctgccagcagaaggtgctgcggttaaaaacaacaccgcgccggcaccgtggacgtacgacaacatcgcatacatgaaaaaccagctcaaaatgctgggtttcggttacgactggagccgtgagctggcgacctgcaccccggaatattaccgttgggaacagaaattcttcaccgagctgtacaaaaaaggcctggtgtacaagaaaacgtctgcggtcaactggtgcccgaatgaccagaccgtactggcgaacgaacaggttatcgacggatgctgctggcgttgtgataccaaagtcgagcgtaaagagatcccgcagtggttcatcaaaattaccgcttacgctgacgaactgctgcgtgacctggataacctggatcactggcctgacaccgtgaaaacgatgcagcgcaactggattggccgttctgaaggcgtagaaatcaccttcgatgtgaacgattacgacaacacgctgaccgtttacacaacccgcccggacacctttatgggtgcgacctatctggccgttgccgcaggtcacccgctggcgcagaaagccgctgcaaataacccggaactggccgccttcattgacgaatgccgcaacaccaaggttgctgaagccgaaatggcaaccatggagaagaaaggcgtcgacacgggctttaaagccgttcacccgcttactggcgaagagatcccagtttgggcagcaaacttcgtcctgatggaatacggtacgggcgcagtcatggccgttccgggccacgatcaacgcgattacgagtttgcgactaaatatggcctgaccatcaagccagtaattctgaccgctgaaggcgcagagccggatctgtccgaacaagctctgaccgaaaaaggggtactgtttaactccggtgagtttgacggcctcgacttcgaagcagccttcaatgccattgctgacaagctggtggctcttggcgtgggtgagcgtaaagtaaactaccgtctgcgtgactggggtgtttcccgtcagcgttactggggcgcgccgattccgatggtgacattggaagacggtaccgtactgccgacgccagaagaccagttgccggttattctgccggaagacgtggttatggatggtattaccagcccaatcaaagccgatccggagtgggcaaaaaccaccgttaacggcatgcctgcactgcgcgaaaccgacactttcgatacttttatggaatcctcctggtactacgcgcgctacacctgcccgcagtacaacgaagggatgctggatccagaagctgcaaactactggctgccggttgatatctacattggtggtattgaacacgccatcatgcacctgctctacttccgcttcttccacaagctgatgcgcgatgcgggtatggtcaactctgacgaaccggctaaacagctgctgtgccagggtatggtgctggccgatgcgttctattacgttggtgcaaacggtgagcgt

SEQ ID NO: 304619 - DNA, 834 bp, Unknown
  Bacterial polypeptide expressing nucleotide sequence isolated from the Sargasso Sea
tgtactctagattttttcacaaagcgttaagagacattggtttggtagaaggagatgaaccttttaaaaaattacttactcaaggtatggttcttaaagatggtgcaaagatgtcaaaatctaaaggtaatactgttgacccccaatcctatattgaaaaatatggagcagatacagtaagactctatatgatgtttacttccccaccagaacaaagtcttgaatggagtgagtcatcagttgaaggtgcgtcaagatttcttaaaaaaatctggaacttagttaatggaagaaaatataaaaaatttgataaaaaactagaatttaataaagaagaaatgtctattagaagaaaatctcatgcgacattaaaaaaagttgaaaatgattatgaagttagatttgcatttaatacagcaattgcagcaataatggagcttataaattttatacccgatgaatataaacatgaggatgctagcgatgctcaaaaatattgtttggatgaggtaataattttcacattgaagatgctctcaccgatttctcctcatatttgtgaacatctatggaatgatttttatctagatgaatcatccattgatgcatggtggcctaagttcgatgaaaatttactagaagcagaggaattcgaattaattattcaagtaaatggtaaagttagaggaaaaataaatatagataaaaacatagaacaaaaagaaattgagactacagcactaaatgtagagaatgttaaaagtcatattggttcttcaaaaattaagaaaactatctatataaaagaaaagcttattaattttgtaatttaaa

SEQ ID NO: 304620 - DNA, 2407 bp, Unknown
  Bacterial polypeptide expressing nucleotide sequence isolated from the Sargasso Sea
atgagctcaacctataatcacaaaacaatcgaagaaatcattcaaaacaaatggaatgaagaaaaaagatatgtttctaaaatagataaaagagaaaaatattactgtctgtcaatgtttccttacccttctggaaaattgcatatgggtcacgtaagaaattatacgattggtgatgttatatctagatataaaagaatgaaaaactttaatgtatttcagccaatgggttgggatgcttttggtctgcctgcagagaatgctgctattgcaaacaaagtaagtccagacgattggacaaaccaaaatattgaaaacatgaaatcacaactacaatctcttggttttagttatgattggtcaaaagaacttagaacatgtgactcaagttactataaatgggaacaattaatttttaaaaaattttacgacgcgggtcttgtttatagaaaaaaatccatggttaattgggatcctgaagataagaccgttctagcaaatgagcaagtaatagatggaaaaggttggcgctctggagctcaaattgaaataaaagaaatagatcaatggtttataaaaatcactgactatgctgatgagcttctatcttcacttgaagaacttgattggccagaaaatgttaagctgatgcaaaagaattggattggaaaatcatttggtgctgagattgaatataaaattgatgctagtaaagattcactaataaccttttcgacaagaccagatactatcttcggagtatcttttcttgcaatatctcccaatcatccccttgcaataaagattgctaaagataatgaaaaaatatcgaactttctcgataaatgcaaagaagctaaggctgcagaagctgatatggcaaaggcagaaaaacttggtattgatacaaatctaagagtaactcatcctttaactggagaaaaattaccagtatggattggaaattttgtattgcttgactatggaacaggggttgtaatgggagttccagctcacgattcaagagattatgaatttgcaaaaaaatataatcttaatatcaaagaagtcattcaaaataatgaagaggagttaccaagaactgaaaatggaattttaataaattcagataaatttaacggtctttcatcagaagaaggatcaaaaaaaattatcgaagaattagttaaattaaaatctggtaaacagcttattcaattcagactcagagattggggagtaagtaggcaaagatattggggttgtccaatacctgttatttatgaaaacggcgatccaaaagttattgacgaaatggatatgcctgttgagctaccaaaacttaaaaagaattcgccacctattccattaagtcaaaatgaagattttataaatttggataatagtatcttaagagaaagtgatacattcgatacctttatggattcatcttggtactacgctagatttacatcttcaaataataataatgaaatttttgatgaaaatactaaatattggctaccagtagatttatatattggtggcatagagcacgctatattgcatttgctatattcaagattttttcataaagctcttcgagacattggactagttgaaggtgacgaaccttttaaaaggttgcttactcaaggtatggttcttaaagatggtgcaaagatgtctaaatcgaaaggtaatactgttgacccgcaatcatacattgagaaatatggagcagataccgttaggctttatatgatgtttacatcaccacctgagcaaagtttagaatggagcgaatcatctgttgaaggtgcttcaagatttttaaagagaatttggagtcttattgaaggaaaaaaatatattaaactggatatgaaatttgaattctcgagagaagaaatagagttaagaagaaagtgtcactatacattaaaaaaagtagagaatgattatgaatcaagattttcttttaatactgcaattgcagcaataatggagttgctaaattttattccagatgaattcaaaaaagataatgctacagatgctcaaaagttttgtcttaatgaagcgattctattttctctaaaaatgctatttccaatatctccccatatttgcgaatatttgtggaccagttttgtaaatgatggatcatgcatcgagtcatcttggccaaagtatgatgatgctattatagaatcagatgaattcgagttaataatacaagttaatggtaaagttcgtggaaagttaaatattagtaaaaatttagatgaagaaactgttaaaaatctatcattagaagtcgaaaacgttaaaaataacatagcagatagcgagattaaaaaagctatctttgttaaagataagcttataaattttgtaatttaag

SEQ ID NO: 304621 - DNA, 1107 bp, Unknown
  Bacterial polypeptide expressing nucleotide sequence isolated from the Sargasso Sea
tacctcttaatgaaagtgaattaccgcttgagctacctgaagttgataagtacgaacctagtgggaccggtgaatctcctttggcaaatattaaatcatgggttgaagttaaagattcagaatctaatattattggacttagagaaactaatacaatgcctcaatgggcggggtcctgttggtattacttaagatttattgatccaaataatttagaaaaagggtgggatccagaaaaagaaaagtactggatgcccgttgatctgtacataggtggcgcagagcacgctgtccttcatttattatattctcgcttttggcatcatgtcttatatgatttgggactagtatctacaaaagaacccttcaagaagctatttaatcaaggaatgatattgggttcagatggttcaaaaatgagtaaatccaggggaaatgttgtgaatcctgatgaaactgttgatatgtatggatctgatgcattgcgaatttatgagatgtttatgggtcctttagataaaggaaaaccatggagtacaagcggattgcaaggatgttctagatttattaaaaaattatggagtatcttagttgataatgaaggtgatctttcacggcatatagatgatagtgccgctgataagaaaacaaatcaaatgcttcatcaaatgattaaaaaagtttcggataaccttgaccaattacattttaatacttgtgtatctgaattcatgatttttacgaatcatatacaaaagctagataagataaatcgagaattaattcgatcatttataataatattaaatccttttattccacatttcgctcaggagatgtggaaattaattggtgaaactactgaattaagttatgaggactggccgaaatatgatcacactctaattattaatgatgaactcactattcctattcagattaacggaaaaagacgttcagaaattagtatttccaaagatgaatcagaatcgagtgttctagataaagctaaatccgatgataaaattgcagctttcattggcaagatggaagttgttaaatcaatatacgttaaagaaaagattgttaatctagtagttaaataac

SEQ ID NO: 304622 - DNA, 889 bp, Unknown
  Bacterial polypeptide expressing nucleotide sequence isolated from the Sargasso Sea
atgcaaaaaaattggattggtaaatcatttggatgtgaaatcgattttaaaattgaaggaaatttgccaattaatgaaataaaatgttttactactaggcctgatactttgtatggtttctcttttcttgctgtttctgttgatcaccctttatctaaatattttaatgataaaaaagattttttagaatttaaaaaacagtgttctaaaactggaacaactgaagagtcaatagctttaggagaaaaaattggcttcaaaacagatttgtttgctattaacccattagataataatcaaaaagtaccagtatactttgcaaactttgttttaatggattatggatttggagcggtatttggatgtcctgctcacgaccaaagagatttagattttgcaattaaatataaattgccagttaaagcggtagtaaaaccaattaatgaaggtgataattttaaagttggaaaagaagcttacctagactcaggaataatttttaattcagatattcttaatggttttaaggctcctgatgaatcaataattaaaacaatagaaattttggagaaaagaaagctaggtaagaaaaaaattaactttcgcttaaaagactggggtatctcaaggcagagatactggggatgtccgattccaatcgcctatgactcagataataatgttgttaaaattccaaaagaacaactaccagtaaaacttccggaaaatataaacctaaactgtaagggcaaccctctagatcaccaaaaagattggaaaaaaatagaaataaatgaaaccacatgtttgcgagaaacagataccttagatacatttgttgactcttcatggtattttttaagattttgttcaccaaaaaaattctaat

SEQ ID NO: 304623 - DNA, 1392 bp, Unknown
  Bacterial polypeptide expressing nucleotide sequence isolated from the Sargasso Sea
taaactctaaatttttaaacaatttaaaagttccagatgagtctataaatgaagcaataaaaattcttgaagagaaaaaattaggtaaaagaaaaactaattttagattaaaagattggggaatatcaagacaaagatattggggatgtcctattccaatagcatacgatgaaaataacaatgtggtaaaaattccagaagaactcttaccagttaaacttccagacgatgtagatcttaatactaacggtaatccgcttgatagccaggaaaagtggaaggaagtcgagataaatggaaaaaaatgtatacgtgaaacagatactttggatacttttgtagactcctcttggtattatttaagattttgctctgcacaaaatattaaagaaccgttcgataaaaatgagttagattactggatgcccgttgatcaatatattggtggtgttgaacacgcaatattacatcttctttactcacgtttttttatgagagctataagtttaaataataaagatacaacattaaaagaaccgtttgaaggtttattcactcaaggtatggtttgtcacgaaacttataaagataaagataataattggatttatcccgatgatgtttccagcaaagatggcaaaaactattttctaaataataacccgactgaaaaagtcattgttggtccttcagaatcgatgtcaaaatcaaaaaaaaatactattgatcctgaaaaaattattaaaatgtatggagctgatgctgtaagattattcattttgtctgatagcccacctgaaaaagacatacaatggtctgatacaggtataagtgcatctttcaaatttcttcaaaaattatggtcattaaacgaaaaaattattaataataaaaagaaattctcaaactttgataacgaactagaaagatttacaaaccaaataattaaaaaactaagtgacgacttagacagatttggttttaatgttactatcgcttcaattcataaaattcactcttttttaaatcaacacacaaataaagaggactggggaagtaattttcacaaaaattatattaatattttaaaggttattaatccgataattccacatttttcaaatgaatgtcttgagaaactaaaaatatcaacagaagttatagaatggcctaaagtagatcaaaaatatctagagcaggaaatattcaatatcgttactcaaataaatggtaaaaaaagaaaagttttttcaatcagtaaatcgcttgataaaaaaacattaattgaaaatatcaaaaatgacgagcaaattaaaaaataccttgataataaacaaattataaaaacaatatatatagaaaataaattaattaactttattatcaactaat

SEQ ID NO: 304624 - DNA, 2440 bp, Unknown
  Bacterial polypeptide expressing nucleotide sequence isolated from the Sargasso Sea
tatgaacagtcaatttgaatataaaaaaatagaaaagaaatggcaggatcactgggaaaatagtgaaactgttaagtgtgatttaaaatctgacaaaccaaaattttacaacctttgtatgtacccatatccctctggagatctgcatatgggacatataaggaactatacgatcggtgatgttattactagatataaacaaatgaatggcttcaatgttttatctcctatgggctgggactcatttggccttcctgccgaaaatgcagcaattaaaactggtattcatccaagagaatttacggaagaaagaattgctaatatgaaatctcaaattatcagattaggttctttatatgattgggatagggaagttgcagcccactctgttgattattacaaatggactcaatatctatttataaagttgtttgaaaatgatttggcttacaaggaggacgcaccagtaaattggtgtaattcatgcagaacagttctagctaatgaacaagttatagaaggctcttgtgagcgatgtgatacagctgtagagccaaaaaatttaaaccaatggtttctgaagatatccgaatattctgaagaattattacaaggccttgatgagattggtgattggccagaaaacgtgaagacgatgcaaagaaactggattggaaaatctgaaggctctcaatttgaattaaacataattggaacagaccttacttttgatgttttcacaacaagacctgatacattgtttgggatgacttttgctgtcatatctccagagcacgaattaattaatcaaattatggagcaatctgataaaaaagatgagatacaaaattatttagactcaattgtaaataagtcagaattcgagagaatgtctattacaaaagaaaaaactggagtagataccactttgaaagttatgaatccaatcacaaatgaggaagtacctttatggatagctgactatgttcttgtgaattatggaactggtgcgattatggcagttccagctcacgatgaaagagattatgaattcgcaaaaaaatatgatattgaaattagacaggtaattatagataaagaaaaaacaataaatgtagacaatgaagcctttacaggtaatggagtccttatcaattctggagagttcaatgacttaggctctcacgaagaagcaagtaaaaagataaatgactttttagtaaaaaataagattggtgatgaaaaaacaacatatcgtttgagagattggttaatcagtagacagaggtattggggctgtccaattccattaatcaattgtgaagactgtggattattaccagaaaaatatgaaaatttaccagtattacttccagaaattcaagattatataaatacagatggatctcctttgtccaagagcaaagaatttgttgaaactgattgtccaaaatgttctaagaaagctctacgtgaaactgacaccatggatacttttgtagattcatcctggtattacatgagattcttagacccaaagaacgataatgaacctttcgaatctgattttataaatgaatggttaccggttgatcaatatataggtggtgtcgaacatgctattcttcaccttctttattcaaggttttttgtaagagccttgagggatcttggttttatgaaaattgatgaaccatttcataatcttttctctcaggggatgattaactttggtggggcaaagatgtcaaaatcaaaaggaaatattgttgatccagaatcatattttgcaactcatggggctgacgcattaagattatatattctttttatggcacctcctagcgatggggttgaatggaatgatggtggtatagaaggaactaagagattcttaaataagttctgggataatatggtcaaaattattgatcaaaaagacacctctgatacttttagttcaaaagatgaagaaattgagagaaaaattaatcaaacaataaaatctattactcaacatcttgagaaatttgagtttaatacagcggtatctgatcttatgaaattaaacaatgacttaagcgattatctcaaggaagataatacgattcagatagatctaaaagattcaattttacgaaatatattaatccttttatacccaatgtccccacatattgcttcggaaatattccaagattattttgatagtgatataagtcaggagaaatggccaacctttgatgaaacaaaactagagaatcctgtttatgaactcgtgattcaaataaatggaaagaagaggcacgcattaatcgttaacacaggaattgaagaagatgaagttaaagaaatttgtactactaattttgatattgatttttcaaatgccaaaaaagtaatatttattaaagataaattaattaatatagttcaataa

SEQ ID NO: 304625 - DNA, 1053 bp, Unknown
  Bacterial polypeptide expressing nucleotide sequence isolated from the Sargasso Sea
cttggattgttctgatgctgaccttccttacacagatgatggaattatgattaactcaaaatttcttgacggattaaaaaaagatcaagcaatagaagcaattgtaaattatttggaaaaagaaaaattaggtaacagaaaagttaactataaattaagagactggggtgtttcgagacaaagatattggggttgcccaataccagtaatttattatgaagatggaagttttagagtcttagataaagaggagttacctgtcgagttgccgtacgacatcaaaatggacggtaaaggaaacccattagtgaaagagaatggctggagaagtgttatatgctcaaaaacaggaaaaaaagccttaagagagacagatacttttgatacttttgttgactcttcttggtacttcataagattccttgataataaaaattcaaaagaaccttttgatagggaaattgttgataagttgatgcctgttgacaaatatattggaggtattgaacatgcaatattgcatttactttatgcaaggttttttacaaaagcgctaagagatatttataagttaaaagtatctgaaccatttaaagagttatttactcaaggtatgataacccataaaacttacaaaaatgaggttggctcctgggttttaccaattgatgttgcaataaaaaataatgaattaatccagatatcaacaaatcaaaagattatagagggtccatctgaaaaaatgtcaaaatcaaagaaaaatgttgttgatcctgaagagataattaaaaattacggcgttagtgcaactagggctttcatgatttcagactcaccgcctgatagagatctagaatggacagatgcaggaattcaaagctcaaaaaatttaactaatagaatagaaaggtttttttcaaacgatactaatacaaaaaacccaacagaagatgatcaaaaatttatttataaatgtttatacgatatggataacaatatttcaaatttatcattaaataaatacatagcgaatatttttacactctttaatta

SEQ ID NO: 304626 - DNA, 250 bp, Unknown
  Bacterial polypeptide expressing nucleotide sequence isolated from the Sargasso Sea
atgagttctaactataagccccaattgattgaaaaaaccattcaagataaatgggataaagaagaaagatttatcgctaagatagatgatagagaaaaattttattgtttatctatgttcccctatccttctggaaagcttcatatgggtcatgtaagaaactacacaattggtgatgtaatctcaagatacaaaagaatgaatgattttaatgtttttcaacccaatgggctgggatgcttttgggtgc

SEQ ID NO: 304627 - DNA, 1099 bp, Unknown
  Bacterial polypeptide expressing nucleotide sequence isolated from the Sargasso Sea
cgttaattgggatccagtagaccaaactgtgttggcaaatgaacaagtcatagacggtagaggatggagatctggtgcaattgtagaaagaaaaaaattaagtcaatggttttttaaaatctctaagttttctgaggaattattaaaaggacttgataaattagaaaattggccaaacaaagttaaagtgatgcaaaaaaattggattggaaaatcctttggttgtgaaattaactttaatattgagggtaattcctcaataaaaaatattagatgttttaccactagaccagatacattgtttggattttcttttttagcagtctcaatagatcatcctatatcaaaattttatgaaaaagatgagaaatttcaagaatttaaaaaacaatgttcaaaaactggaacaacagaagagtcaattgcacaagccgaaaaaattggtttcaaaacaaatcttattgcgataaatccatttgataaaaatataagagttccagtttattttgcaaattttgttttaatggattacggttttggagctgtttttggatgtccggctcatgatcaaagagattttgagtttgcacaaaaatataatcttccgatcaaaactgttgttaaacctaaggaattcaaagaagattttaaagttaaagatgaggcttatgttgaagatggggttatgataaactcatcttttttaaatggtttaaaaactcctggcgaggctatctctaaagcaattgaagaaatagaaaatagaaaaacaggtaaacaaaaaattaattttagacttaaagattggggtatatctcgacaaagatactggggttgtcctataccaatagcttacgatgataaaggaaatattattccaatccccaaggaacatttaccaattaaactgccagaaaaaattgatttaaaaacaaaaggcaatcctttggatcaccaaacagagtggaaaaaaattttaattgatggaaaaaaatataatcttgagacagatacacttgatacatttgtagactcctcctggtattaccttagattttgttcgccaaaaaatgataactatggttataactttgaagaa

SEQ ID NO: 304628 - DNA, 1183 bp, Unknown
  Bacterial polypeptide expressing nucleotide sequence isolated from the Sargasso Sea
ttattgtatatacaacacgtccagatactttattttggtgcaacatatatggttttatccccagagcatccacttgttgatagtatagtaacaagtgagaataaagccaaagtagcagagtataaaaaattagcatcaaataaatctgattttgatagaggagaggttaataaagacaagaccggagtgccactaggtgcctatgccataaatccagtaaataataaagaaataccaatctggatcgctgattatgttctaatgagctatggaactggcgcgattatggccgtacctggacacgatgaaagggattatgaatttgcaagaaagtttgaccttccaattgtcgaggtagtttccggcggtgacattgaaaaagaagctcacactgacgcaaaagatggtataatgatcaattcatctaatgattctggtcttaatctaaatgacatgaaagtatccgaagcaatatcagctactattgaatggctagagtccaataagaagggggaaaaagccatacaatacaaactaagagactggctattttcaagacaaagatattggggtgagcccatgcctattgtccatggtgataacggtgagattattgctcttaatgattttgatttaccgctaacgctccctgaggtagataaatatgaacctacaggcaccggtgagtcaccacttgctggaattgctgattgggtcaatacagaaagcggtaaaagagaaaccaacacaatgcctcaatgggcagggtcatgctggtattatttacgttttatcgatccattaaatgatagagctgcatgggacaaagataaagaaaaatactggatgccagtcgatctttatgttggtggagttgagcatgcagtgctgcacctattatactccaggttctggcatcatgtgctttatgaccttgatctggtttctacaaaggaaccgtttaggaaattatacaatcaaggcatgataggtggtgaagatggtcaaaaaatgagtaaatctagaggaaatgttgtcaatcctgatgatgtggtcgagaagtatggggcagatagttttcgattatatgaaatgttcatggggcctttagataagtctaaaccttggaatacaaaagggctgcaaggttgttatcggtttacacagaaaatctggaaaattt

SEQ ID NO: 304629 - DNA, 2581 bp, Unknown
  Bacterial polypeptide expressing nucleotide sequence isolated from the Sargasso Sea
atgcaagagcaatataatccctcagaaattgaagccttagtgcaaaagcactggcacgacaacaaaacctttgaagttactgaagatgcgaacaaagaaaagttttattgcctttcgatgttcccctatccttcaggtcgactccacatgggacacgttcgcaactataccataggcgatgtggttgcccgcttccagcgtcttcaaggcaaaaacgtgctacaacctatcggttgggactctttcggtttgcctgcagaaaacgccgcaatcaacaacaaaaccgctccagcaccatggacttatcaaaacattgagtacatgaaaaaccagctaaaactgctgggttttggctacgactggagccgtgaaatcgccacttgtaccccagaatattaccgctgggaacaatggttcttcactaaactgtacgaaaaaggcttagtttacaagaagaccgcttctgttaactggtgccctaacgatgaaaccgtactggctaacgagcaagtacaagacggttgctgctggcgttgtgatacccctgtagaacaaaaagaaattccacagtggttcattaagatcaccgcctatgccgaagaactgctaaacgatatcgacaccttagacggctggcctgagcaagttaagaccatgcagcgcaactggattggccgcagcgaaggcgtcgaaatgaccttcggtgttgctggtagtgacaagtcattcgacatctacactacccgtccagataccctgatgggcgtaacctacgtggcgattgcagcaggtcacccgttagctgaattagcggctcaaactaatcctgagcttgcccaattcgttgaagagtgcaaaaacagcacaacgtctgaagccgatttagccaccatggaaaaacgtggtgtggcgactggcctatacgccattcacccaatcactggcaaacaagtgcccatttgggcggctaacttcgtactgatgaactatggcacaggtgccgtgatgtcagttccaggtcacgaccaacgcgattacgaatttgcgaaaaagtacaatctgcccatcgaagcggttatcaaaccagttgacggcgagttagacatcagcgaagcggcttacaccgaaaaaggggtactgtttaactctggtgagttcgacggtttagactttgacggtgccttcaatgccatcgccgacaagttagtcgctgaaggtaaaggcaagcgtcaagtgaactatcgcctacgcgactggggtgtatcacgccagcgttactggggcgcgccaattcctatggtgaccttagccgacggtacagttatcccaacacctgaagatcaactgccagttattctgccagaagatgtagtgatggacggtatccaaagcccaatcaaggccgataaagaatgggcgaaaacccaagttaacggtcaagatgcgctgcgtgaaaccgataccttcgatacctttatggaatcttcttggtattacgcccgttactgcagcccgcaggctgaccaaatgttagatccaaccaaggctaactactggttgccagtagatcagtacattggtggtatcgaacacgcctgtatgcacttgttatacttccgcttcttccacaagttgctgcgtgacgcgggtctagtcaacactaacgagccagcaaaacaactgctgactcagggcatggtattggccgatgctttctactacaccaacgacaaaggtgcccgtgtatgggtgtcgccgctggatgtagtgaccacagaaaaagacgacaagggccgtatcactaaggccatcgacaaagacggtaacgagctggtttacaccggtatgagcaagatgtctaagtcgaaaaacaacggtatcgatcctcaggtgatggtagagaaatacggcgccgacacagttcgtctgtttatgatgttcgcctctccaccagaattaacgctggaatggcaagagtcaggcgttgagggcgcgcaccgctttatcaaacgtctgtggaaactggccagcgattatgtggcgcaggacaacagcgaagcactagacgttagcaaattaactagcgagcaaaaagcgctgcgccgtgaagtacacaagactatcgctaaggtgaccgatgatatcggccgtcgtcaaatgttcaacactgcggttgccgccgtgatggaactgatgaaccacctgcaaaaagcgccacaaaccacaggtcaagaccgagccattatcggcgaagccttaactgcggtagtgcgtttactgtacccaatcatcccacacgtgagctttaccctgtggaatgagttgggcaacaccaacagcatcgaagacagccaatggccagttgtcgatgaatctgcactggtagaagacagcaaactcatcgtggtacaagtgaacggtaaagtgcgcgctaagatcacagtcgcagccgatgctgaccaagcatcagttgaagccttgggtatggcggacgagcaagtcatcaagtacttagatggtgttacggttcgtaaagttatctatgtacccggtaaactgctcagcatcgttgccaactaac

SEQ ID NO: 304630 - DNA, 1585 bp, Unknown
  Bacterial polypeptide expressing nucleotide sequence isolated from the Sargasso Sea
aaaattttctgatgaacttttaaatggtcttgaccaacttaaaaactggccaaacaaagtcaaagttatgcaaaaaaattggataggaaaatccttcggatgtgaaatagattttaaaattgaaggagatttacctataaaagaaattaagtgttttacaactagacctgatactctttttggcttttcttttttagcagtttctgtagatcatccaatatcaaaatattttgaaaaagatccaaaatttgctgattttaaaaaagaatcttctaaaactggtacgacagaagaatcaattgctcaaggagaaaaaataggctttaaaactaaactactagctattaatccacttaatccaaagcaaaaagttcctgtttatttcgctaactttgtattaatggattatggatttggagctgtttttgggtgtcctgctcatgatcaaagagatttagattttgctataaaatataatctttcattcaaaacggttgttaaaccaattgatgaaactgatgaatttaaagttaataatgaagcttatactggtgcgggtaaaataataaattcagattttttaaatgatcttaaagttccagatgaatctattataaaaacaattgaaattttagaagaaaaaagaattggaaaaaaaaagattaactttagattaaaagattggggagtttcaagacaaagatactggggttgcccaataccaattgcttatgatccagatggaaatgtattaactataccaaaggatgaacttccagttaaattgcctgacgaaatagatcttaagtccaagggtaatccattagataaaaaaaaagattggaaatcagtaataattgatggaaaaaaatgtattagagaaacagatacacttgatacttttgtagactcttcttggtattttttaagattttgttcacctaaaaataatgattatggttttgatctagaatccataaaatattggatgcctgtagaccaatatattggcggtgttgagcatgcaattcttcatctactatattcacgtttttttatgagagctataaatcataaaaatgaaaaattttctataactgaaccatttgaaaatctttttactcaaggaatggtttgtcatgaaacttacaaagataaaaataataactggctaaaccctgaagaggtagatacaaaagatggaaaaaacttctttataaaaaatcagccagaaaataaagttttagttggttcatctgagtccatgtcaaaatctaaaaaaaatacaatagatcctgaaaaaatgattgaaaattttggagctgatgcggtcagactttttatactgtctgatagcccaccagaaaaagatattcaatggtcagaacagggaatggttgcttcatataaatttatacaaaaattttggctgctacacataaaaattttggataaaattaatgaaagcacaattacaaaaaatcaaaaaattgatttagaattaacaaaatacacaaatcaactcatatataaatttaacaacaatcttaaaaaatttaattataatgtaataattgcaaatatt

SEQ ID NO: 304631 - DNA, 2320 bp, Unknown
  Bacterial polypeptide expressing nucleotide sequence isolated from the Sargasso Sea
atgcttaaagaacaatataatcctgaacaaatagaatccaatattcaatctgaatgggaaaagataaataaatataaggctactccagatgatagagagaagtattattgcttgtctatgttcccatacccatctggaaaactgcatatggggcatgtgaggaattatacgattggcgacgttatttctagatataaaagaatgagaggattcaatgtcttccagcctatgggctgggatgcctttggactgcctgctgaaaatgcagctattcagaataaagttgatccacaaagttggactgaacaaaacattgagaatatgaagtcacaactcaaaagacttggatttagctatgactggtcaaaggagcttaaaacctgtgatccaaactattataagtgggagcaagaaatttttagtcttcttcacaagcaaggtctagtttatagaaagaaatctctagttaattgggacccagtcgatgagacagtacttgcgaatgaacaagttatagatggaaaaggatggagatcaggagctactgtagagttaaaagaaattgatcaatggtttttaaaaattacagattatgctgatgagcttcttaattctatagaaaatcttgattggccagaaaatgtaaaatcaatgcaaaaaaactggattggtaaatcttttggatcagagataagttttcctctttcaaatgaagaggagctaactgcttttacaacaagagttgatactatttatggggttacataccttgcgatgtcaccaaatcatccaatttcaaagaatttagcgaatcaagatacgcaaatagatgacttcattaaaaaatgcaatgaaacaaagatggctgaagcagatatggccaaggctgataagctgggcttaaaaacgaatttaaaagttaagcatccttttacgggaattgatcttgatgtctggattgcaaattatgtcctaatggattatggaacaggagttgtgatgggagttccagctcacgacgaaagggatcatgagtttgctctcaaatataatatagatatcaagcaagtcataaaagctgatgaagtgccctcctctgaaaaaggggaactcattaactctgagaaatttaatggtctgacttcagaaaatgcaatccaagatattaataacttccttgaaaaagaaaaaataggtaaaggcattgagaatttccgattacgtgattggggtgtcagtagacaaagattttggggatgtcctataccggtagtctataaaaatgatgagcctatttttttagagaaaacagatctgcctgttgagttaccaaaaattaaagatggagagtcgccaaaaccactcagtcaaaataaagatttctttgatattggtcctaatgaatcaagagaagttgatacatttgatacttttgtagactcgtcctggtattacgcaagatttacagcagcagataataataacaaagctttagatgaaaattcagcatactggcttccagttgatctttatattggcggtattgaacatgctatcttgcatcttctttattcaaggtttttccataaagctatgagagatattggcttagtagagggtgacgagccttttaaaaaattacttactcaaggaatggttcttaaagatgggtctaagatgtcaaagtcaaaaggcaacacggttgatccacaacaatatattgataagtatggcgcagacacgatacgtctttacatgatgtttacagctcctcctgaacaaagtttagaatggtctgaaactgctgtagaaggagcttttagattcttaaaaaaactttggagctttacccatgataaaaagtttaaaaaagcaaagatacaaggtgagctggataaaagtcaaaaagactttagaagaaagattcatttaactatcaaaaaagttactgatgattatgaaaatagatatgcttttaacacagtaattgcagcttgtatggagcttttaaattcaacgcctaatcaaatcaaaggtgaaatatcatctgaaaatgatcaattctgccttaatgaattcattgcatcagttctgcaaatgctttatccgatagcgccacatatatgtgaaactttatggaataacttttttgaaaatagctcaggaattgaggaaagctggccaacatttgatgaaaatctaatggttactgatacatttgagctagtagtccagattaatggaaaagtaagaggaaaaatagaaatatcatcaaacttagagcaagacgaaatcgaaagtgttgctaagtctattaaaa

SEQ ID NO: 304632 - DNA, 1050 bp, Unknown
  Bacterial polypeptide expressing nucleotide sequence isolated from the Sargasso Sea
tatgaaagaatatttcgagcgctataattttgaagttaatgaaacaaaatggcaagatacatggaataaaataaatgcatttaaagctgaaatagatccatctaaacctaaatattatgtcttagaaatgtttccttacccatcaggtagaattcatatgggacatgtaaggaattatactttgggtgatgtagttgctagatataaaagatctaaaggctttaatgttctccacccaatgggttgggatgcttttggcttaccagcagagaatgctgctagagataagaatatacatccatccgattggacatatgaaaatatatctaatatgcgctcagaacttaaacgtatgggactatcaattgactgggacagggaaatagcaacatgtcatcctggctactataaattccaacaacaattatttattgatatgtttaataaagaccttgtgtataggaaaaaatcaatggtcaattgggaccctgtagacaagactgttttggcaaatgaacaggttattgatggaaaaggatggaggtcaggtgctcctgtagaaaagaaagaactgtcacaatggttttttagaattactaaatatcaaaatgaactactcgatgaattaaataaattaaaaagatggcctgaacgagttagattaatgcaagaaaattggattggtaagtcacaaggggctcagattgaatttgaaattgatgattcatcagagaccttacctgtatatacgactaggcctgatacaatttttggtgctacattttgtgcaatttcgcctgagcatcccctttctttaaagctttctaaaaagtcaattaaagcaaaagaattcatagaagaatgcaataaacttggaactagtgaagccattattgaaaaggcagaaaaaaaaggttttaaaactgatttatatgcaatccatccttttaaacaaactaagttacctatttttatagcaaattttgttttgatggagtacggaacaggagcaatttttgggtgccctgctcatgatcaaagagatttaga

SEQ ID NO: 304633 - DNA, 1533 bp, Unknown
  Bacterial polypeptide expressing nucleotide sequence isolated from the Sargasso Sea
tatgttaaatgaatataatccaaaaatagttgaaaaaaaaattcaagataaatggaataaatcagataagtataagtcagcagttgataacagagaaaagttttattgtttatcaatgttcccatacccatcagggaaactgcatatggggcatgtaagaaactatacaattggtgatgtaatctccagattcaaaagaatgcaaaattttaatgtttttcaaccaatgggttgggatgcttttggccttccagctgaaaatgctgcaattgaaaatgaagttagtccaaaagattggactgatcgaaatataaaaaatatgaagaatcaactacagtcattaggatttagttatgactggtcaatggaactaaggacatgtgaaccaaaatactacaaatgggagcaattaattttcaaaaaattttatgatgctggtttagtttataaaaaaaagtcgctagtgaattgggatccagttgatgaaactgttttagcaaacgaacaggttattgatggcaagggttggcgttctggtgctcaagttcaaattaaagaaattgatcaatggtttatcaaaataacatcttatgcagaagaattattagattcacttgaagaactagattggcctgaaaatgtaaaattaatgcaaaaaaattggataggaaaatcttatggtgcagaagttgaatataaaatggaggaaggtggcgatagccttaaaaccttttcgacaagacctgataccatttacggtgttacttttctagcaatctctccaaatcaccaattatcaatagatctttctgaaaaagatgaaaacatcaaattatttcttgaaaaatgtaaagaccttaaaactgccgaagctgatatagctaaagccgaaaaacttggaattgatactggtaaaaaagtaattcatccaattacaaaagagaaattacctgtttggatcggtaactttgtcttattagattatggtaccggtgtggtaatgggcgtgcctggacacgatgaaagagattttgaattcgcaacaaaatataaaataaatattaaacaagtaattaaaaatgataaggatgatttgccaatttcagacaaaggtatattaataaattctgacaactttgatggtatgacttctgaagatgcatcaaaagaaataattaataaattaatagagcttgattgtggaaacagtttaattcagtttagattaagagattggggtattagcagacaaaggtactggggttgcccaataccagtggtctatgatgatcatgaaccagtggtagttaatcaagaagaaatgccaatcaaacttcctgaacttgaacaaggtacaagaccaataccactaagccaaaatgaaaatttcataaatttaagcactaatcaaaaaagagaaactgatacttttgatacttttatggattcatcttggtattacgcaagatttacctcagcagataacgataaagatatttttgactctagaactaattattggttgcctgttga

SEQ ID NO: 304634 - DNA, 1276 bp, Unknown
  Bacterial polypeptide expressing nucleotide sequence isolated from the Sargasso Sea
ctcaggatgctggaaatggatttggcctaccaagaatttgctccggtcgatttctgtaatcattgccagacgactcttgcaagagaacaggtttggggagatgaacgtctttgtgaacgttgcgggaacacggtaatccgtaaggaactcaatcagtggaaacttcgaattaccaattacgcagacgaattgctcgattttgatggattggactggcctgaacgtgtgcgtttgatgcagacaaactggatcgggcggagtaacggggtcgaatttgatatctatttggatctaccaggcggtttacagttccgtgtttttaccacacggccagataccgtattcgggatgactttttgtgtgcttgctccagagcatgaattggtcgaacaaattgtaacggatgaccagaaagaggaggtgtctatttactgtgaaaacgccatgagaaaggacgaaatcgaaagaatgtccgaatctcaggaaaaagacggagttttcacaggagcctacgccatcaatcctttgaatggtgatcgtgttccagtatgggttgccgaatatgttcttgcaggctatggcaccggagcgatcatgggagtcccggctcacgatcaacgggattttctttttgcacgacgctatgacattccgactccagtagtagtggttccagaggatcatgatcagccaattcctgaaggcagcgaattggaagaagcactcttggtcaaggaaggaagcaagatggtcaacagcaatgaattcaatggtctggtgtggcctgaagggtttgaccgcgtagtccaggcaattgaagacaaaggaatcggtaaaaagcaggtcaactatcggttgcgggattggctgatcagtcggcaacggatgtggggcactcccattcctgtgatccattgtaaaaattgtggagccgttcccgttccttatgaggatcttccggtgatgttaccggatgatgctgaattcaaacctaccggtgaaagtcccttgaagtatcatccgggattcctcaataccgaatgtcctaaatgcggtggaagcgctgaacgggaaacggatacgatggatactttcatctgctcttcatggtattattacggctacgtttcaccatattggaaaaagagcgaaaagctgaaaaagaaagatcttccctgggatccaaaggcgattgaaaaatggtgtcctgtaaaccagtacaccggagggatagaacacgcgacgatgcaccttctctattttcgattttcaccaa

SEQ ID NO: 304635 - DNA, 559 bp, Unknown
  Bacterial polypeptide expressing nucleotide sequence isolated from the Sargasso Sea
atgaatgaatataactttcaaaaaattgaatcaaaatggcagaatcattggtcagaaaataattcaataaaatgcgatattaattcaaaagaaaaaaatttttacaatttatgtatgtatccatatccttctggagatttgcacatggggcatattagaaactatacaatcggcgacgtaattacaagatacaaaatgttgaatggatacaacgttttatcaccaatgggctgggattcatttggacttccagctgagaatgcagcaattaaaactggaatacacccaaaaacatttacagaagaacgtataaataatatgaaagatcaaataattagacttggctcactctatgagtgggatagagaagtatctgctcacagcaaggactactataagtggacacaatttatttttattaaactttataaaaataagttagcttacaaaaaagatgctcctgttaattggtgtgattcatgtaagactgtattagcaaacgaacaagttattgaaggaaattgtgatagatgcgatgccgtagttgatcaaaaaaatc

SEQ ID NO: 304636 - DNA, 1305 bp, Unknown
  Bacterial polypeptide expressing nucleotide sequence isolated from the Sargasso Sea
tggagcgatttttggatgtccagctcatgatcagcgtgatttcgacttcgccaaaaagtataatttggaaattattagggttatatccgacggtaaagacaaaagattagaggaagcttatactgaaaatggtttattggttaactcatcatttttaaatggtttagaggttgataaagcaaaacaaaaaataatagataaaattgaaattgaaaagatgggaaagaaaaaaactttatttcgcttaaaagactggggtatttcaagacagcgttattggggttgtccaattccaatgatttatctaaaagatggaagcgtaaagccggtagataaaagtgaattacctgttatgctgcctgaagacatagatttagagtctcagggaaatccactagatagtcatcctacttggaaaaaaactaagcataaaaaaaccggggaaatggctgtaagagaaactgacacattagatacttttgttgactcctcttggtattttttaagattttgttctcctaatcataaagatgctccttttgactcaaaagatataaattactggatgcctgttgatcaatatataggtggagtcgaacatgcaattttgcatttactttattcacgtttttttactaaaggaattaatcaagttcgtagagattttaacatagacgaaccttttaaaaatttatttacacaaggaatggtttgtcacgaaacttataaagataataaagggaattggctataccctgaagaaattgaaaaaatagataacaataatgcagtaaaagctagtgataaaagtaaagtagttattggtgcatcagagtcaatgtctaaatctaaaaaaaatacagtcgatcctgagtcaatgataaaaatttatggggcggatgctgttaggtggtttattctttcagatagcccaccagaaaaagatgttcagtggtcagacgtaggtgttttatctgcaaacaaatttctccaaaaattatggaatttaaatttattaataattaatcgtgaagaaacgaagaataacgagaatttattaaaaaagttcaattcagagattacaaaacttattggaaagatagacacatcgattaaagagtttaaatttaacgtttctatagcgttattttatgaaacatataaaactattaataattttcaaaaagaggagattaataaaaaatctttaatagaaaatttaacaaaagttatgaaattaatgttaccttttgtgccacacctagcgaatgaatgtcttgaattattaaattgtaaaaataaaaa

SEQ ID NO: 304637 - DNA, 1427 bp, Unknown
  Bacterial polypeptide expressing nucleotide sequence isolated from the Sargasso Sea
aaatgagcaagtaattgacggtaaaggttggcgatctggagcagtggtagaaagaaagaaattaaatcaatggttttttaatatctctaaattttctcaaaaacttttggatgatttagaagaattaaatgagtggccgaataaagttaaagtaatgcagaaaaattggattggcaaatcatatggttgtgaggttaattttaaaattgaaggggatattcctgtaagtgaaattaagtgttttacaacaagaccagatactctatttggtttttcttttttagctatatctgcagatcatgaaatttcaaaattctttgttaatgacgaagaatttaacaaatttaaaagagaatgttcaaaaactgggacgaccgaggaagcaattgctatgggtgaaaaaataggttttaaaacaaatttattagcaataaatcctttaaatcctaaacaaaaagttcctgtttattttgccaattttgtgctgatggactatggttttggagcagtttttggttgccctgctcatgatcaaagagattttgattttgcaaaaaaatataaacttgaaattaaaactgtagttaggccaaaggataaagataataattatgaagtaattgataaagcttatgatggtgatggaattataattaattcagaatttttaaatggattaaaagtaccagaagaatctataattaaaacgatagatattttagaaaaaaaaaagtttggtaaaaaacaaattaattttagattaaaagattggggtgtttcaagacaaagatattggggctgccccattccagtggcttatgataatgatggaaaagtagttgcaattcccaaaaaagatttgcctgtaaaacttccggaaaatgtagatcttaatgctaaaggaaatcccttaaatactaaaaatgattggaaaaaagttaatgttaacggaaaagatctagttagagaaactgataccttggatacatttgtctgttcctcgtggtattatcttcgtttttgttcaccgaaagaaaatgattatggtttcaatcagcaagaaattgattattggatgcctgtcgatcagtatataggaggcatagaacatgcaattttacatttactttattctcgttttttcatgaaagctttgggattcaaaaataaaaaatttaatatcgaagaaccatttaaaggactttttacacaaggaatggtttgccatgaaacgtataaagatcaaaataataattggatcagtccagaagaaatagagataaggggaaaaaaatattataaaaaaaatgatcctaattcaatagttattgtgggaccttctgagtcaatgtctaagtcaaaaaaaaatgtgattgatcctgaaagtataatcaataattatggagcagactcagttagattattta

SEQ ID NO: 304638 - DNA, 1069 bp, Unknown
  Bacterial polypeptide expressing nucleotide sequence isolated from the Sargasso Sea
gacttagaacagcttgaagaatggccagaccaagtacgcgcaatgcaggcaaactggattggccgctctgaaggtgttgaaattaccttcgatttagcgtcagcggttaacgacattgccgatttgacggtatataccacgcgtccagataccttctacggcgttacttacgttgcagtggctgcgcagcaccctcttgccgaattcgcagcaaaatcgaacccagatttagcggcctttatcgacgaatgtaaaaacaccaaagttgctgaagctgaattagcaaccatggagaagaaaggtttcgccacgggttttgaggttgttcacccactaaccggtgaaaagcttccaatttgggtcgctaacttcgtgttgatggactacggttcaggcgcggtaatggccgttcctggccacgaccagcgcgattgggaatttgcgactaaatacaacctacctattcaacaagtcattgcgccaaacgcaggtgatgaagataagtgcgaccttaccgcctctgcatttactgaaaaaggtagcttgatcaattcagctaagttcgacggtcttgagttcgatgccgcatttaatggtattgctgatgaacttgaaagcaaaggctgtggaaagcgcaaagtaaattaccgtcttcgtgactggggcgtaagccgtcagcgctactggggcgcacccattccaatgctaaatttggaaaacggtgaatctgttccggttcctgctgaccaactaccggttgttttgcctgaagacgtagaaatgaatggcgttacctcgccaattaaagctgaccctgagtgggcaaaaaccacatacaatggcgaagccgcgttacgtgaaacggataccttcgacacctttatggagtcatcgtggtactacgcgcgctatgcctgtgctactaacaacgacgccatgcttgatccaacatcagctaactactggttaccagtagatcagtacattggtggtatcgagcacgctatcttgcacttactttactcgcgtttcttcacaagttgttacgcgatgaaggcttgggtaactc

SEQ ID NO: 304639 - DNA, 969 bp, Unknown
  Bacterial polypeptide expressing nucleotide sequence isolated from the Sargasso Sea
cttgcgacgcgcgagcgcgcgtctccatcgtcgcgtcgtgacgtcctcggccgcccgctcgtccccgagcgcgcgcgtcggcggcgccgatgcgcgacggtgcgtctcgacgcgagacgccgcgacgacgcgcgcgcgtgccgtcgcgcccgcgtcgtcggatgccgagggcgcggcgagcgagagcgcgggcgggtacccgttcgcgacgatcgagcccaaatggcagaggttttggagctcggagcgcacgtttaagacgccgagagaggttgacacgtcgaaaccgaaattttatgcgttggacatgttcccgtatccctcgggtgcgggtttacacgtcggacatcccgagggatacacggcgacggacatcgtggcgaggtataaacgcatgacggggcacaacgtcttgcacccgatgggatgggacgcgttcggtttgcccgccgaacagtacgccatcgagaccggaacgcacccaagcgtgacgacgaagacgaacgtcggacgatttcgcgagcagttgcaaagtttgggtttttcgtacgattgggacagagaggtggcgacgtgcgacgcgacgtattacaagtggacgcagtggatttttttgcgtctgttggagaaggatttagcctaccaggcggaggttcccgtcaactggtgccccgccctcggcacggtgctcgcgaacgaggaggtgatcgacggattgagcgagcgcgggaaccacccggtgattcgtaaaccgatgaaacagtggatgttaaaaatcaccgaatacgccgatcgattattggaggatttggacgaactcgattggccggattccatcaaggagatgcagcgcaactggatcgggaaatcggagggcgcacagctctccttctccgtcgacggattcgccgcggatgccgagaaattggaggtgtacacgacgcgtccggacacgctcttcggcgctac

SEQ ID NO: 304640 - DNA, 1900 bp, Unknown
  Bacterial polypeptide expressing nucleotide sequence isolated from the Sargasso Sea
atggacaaagttaatgttaaagaaatagacaaaaagtggcaagacttttggtcaaataacaaaaaagtattaaaaataaaagataaaaagaaaaaattttattgtctagaaatgtttccttacccatctggaaaaattcatatggggcatgtgagaaattatacaattggtgatgtattggctagatataaaaagttatgtggatttaatgtactccatcctatgggctgggattcttttggtatgccagctgaaaatgcagcgagggaaaacaagttagatccaagaaaatggacccaagaaaatattgctacaatgaaaaggcaattacaatctctcggtttatcaattgactgggacaaagaaatttcaacctgtgatgaagagtattacaagcatcaacaatcgctatttatagatttatttaataaaggtttagtagttaggaaagaaacatatgtcaattgggatccggtcgaagaaaccgttttagcaaatgaacaagtaattaatggcagaggctggagatcaaatgctgtggtggaaagaaaaaaattatctcaatggttttttaatatttctagattctctgacgaacttttgagtgatttagaaacacttaccggttggcctgaaaaggttaaacttatgcaaaagaattggataggtaaatcaacaggatgcgaaatagattttgagataagtgagaaagaaaaacttaaaatttttacaactcgtccagatactatatttggcgctacttttttagcaatatctgtcgatcatcctctttgtaaaaaatttgaaagtcaaaaagaatttattcaatttagagaaaagacttctaaagtgggtactacagaagaagcaattgctaatgcagaaaaaattggttttaatacaggtttgaaagccagacatccttttattaaaaataaaaatataccggtttatgttgccaattttattttaatggattatggaacaggtgcgatatttggctgtcctgctcatgatcaaagggactttgattttgcaaaaaagtataatcttgaaattattaaagttgttgaagataagactaaggaaaaagaaaaagagctaaaggaagcatacgttggagatggaaaactcattaactctgaatttttaaataatttgaatgtagatgaggcaaaagataaaataatagataaagttcaaaaaaataagatcggtaaaaagaaaattacttttagattgaaagattggggtatatcaagacaacgatactggggttgtcctatacctatgatttacttgaaagatggtactgttattccagtagaaaaaagcgagctgccagtaagattacccgatgatgtagatttaagttcgaaagggaatccattagaaaatcatccatcttggaaaaaaactaaatataaaaaaactggagagagcgctactagagagacagatacgcttgatacttttgtagactcatcttggtattttataagattttgctctccaaaattgaaagatatgcctttcgataaagatctattaagttattggatgcccgtagatcagtacataggtggtgtggaacatgcaattttacatttgctttattcaaggttttttatgcgagcaataaaattaaatgatgaaaaaataaaaataaaagaaccttttaaaggtctctttactcaaggaatggtttgtcatgagacatataaaactaaagatggaaactggatcagcccagatgaaatagataaaacaaataaatccgagataattgttggaccacctgaggcaatgtctaaatcaaaaaaaaatgtagttgatcccgaaagtatgatcaagatttatggtgcagatgcaattaggtggtttatgctttctagatagt

SEQ ID NO: 304641 - DNA, 1465 bp, Unknown
  Bacterial polypeptide expressing nucleotide sequence isolated from the Sargasso Sea
caaaatttagctagtgaaaacgatgacataaatcaattcataaagaaatgcaatgaaatgaaaatggctgaagcggacatggcaaaagctgaaaaactaggcttcaagactagcgtaaaggctaaacaccccctttccggcattgaccttgaggtatggattgcgaattatgttcttatggattatggaactggagtagtcatgggtgttccagcacatgatgaaagagactttgagtttgcacaaaagtatgagatacctattaaacaagtcattgaagcagatgatttgccctcttctgctaaaggaaaattgataaattcagatgatttcaatggggaagaatcggatgaagctatagacaatataaatagcttaattgaaaaaaacggaataggtaatagcataattaattataggctgagagattggggtgtaagtaggcaacggttttggggatgtcctattccagtaatctatgaaaaagataaacctatctttttaagaggtaatgagcttccagtagagttgccaaaaatgaaagctggtgattcgccaaaacctcttaaccaaaacaaaaatttttatgatttaggaaatggtaaatcgcgagaagttgatacatttgatacttttgtcgattcgtcttggtactatgcaagatttaccaccgctggtaataataaaaaagcgtttgatgagaattcagaatattggttgccagttgatatttatattggagggatagagcacgcaatattgcaccttctgtattcaagattttttcataaggctatgagagatatgggtcttgtaaatggtgatgagccttttaagaaactgctaacacaaggaatggtgttaaaggacggaacaaagatgtcgaagtctaaaggcaataccgttgatcctcaaaaatatattgatcattatggagcagatactataagactatatatgatgtttactgccccaccagaacaaagcttagaatggtcagatagtgcaattgaaggtgcgtctagatttctcaagaaattttggaggttatgtgaaaatagaacaaatacagattatcaaaatatcccaagtgattttcaacagagtcatttggatttaagagcaaaaactcataacaccataaaaaaagttactactgattatgaagatagaaactcattcaatactgttatagccgcaattatggaattaataaatgctatacccgaagaatttaaatccagtgaagcaacttcaacagatatattttgtctaaatgaagttatcaatgtgtccctacaaatgttatctccaattgttccgcatattacatttgatatttggacccgttttaatccacatttagatccaaaactcttcgaaaaatcatggcccgcgttcgatcaaaaattaactgaaaaagatgactttgaactcattattcaagtgaatggtaaggtaaggg

SEQ ID NO: 304642 - DNA, 1576 bp, Unknown
  Bacterial polypeptide expressing nucleotide sequence isolated from the Sargasso Sea
gctgacgtggaacaaaaaaaattatcacagtggttttttaatattactgattttgctgaagatcttcttaagagtctcgatgagcttaaaaaatggccagaaaaagtcaaaaccatgcaaaaaaattggataggcaagtctgttggctgtgaaataacttttaaaattttttctggtaatttaaagcttaaaaactcacatttaaaaatttttacaacgcgtcccgatacaatttttggggctaccttttgcgctttgtctccatttcacccacttgttgatgaattaattgagaataataaagcaatcagcaatgaagtcgcaaaattgagatcccaaaaaattaatgaggaatctatctcaaagaatgaaaaaataggcattgatacaggtatttttattgagcacccatttataaaaggaaagcaactacctatttatatagcaaatttcatccttatggattatgggtccggtgctatatatggatgccctgctcatgatcaaagagaccttgattttgctaataaatacagtttagaaataattcaagtaattaatccaacatcaaacgaagaatttgatcgtaaaaatgcaattactgatgatggaactctcatgaattctgattttatcaatggccttaatgttcctgatgcaaaagaaacaattattaataagttggtcgaattaaatattggcgaacagaaaattaattatcgtttaagagattggggcatctcaagacaaagatattggggctgccctattccaattatgtacagagaggacggtgaagtcattgaagtgccagaagatgaacttccgataaagcttcctgaggatgtagatttaagtattccaggaaaccctctcgataaccatccgacgtggaaatatacaaaatgtccgaagactggaatgaacgcaattcgtgaaactgatacgcttgatacttttgtagactcagcttggtattttttgagattctgttcaccaaattcaaacaatccttttgatgagttggaaagtaagtattggatgcctgtcgatcaatatgttggaggggttgaacatgcaatattacatttattgtatgcaagattttttacaaaagctttggggaaagaaaatttaatagaaccttttgagagcctttttactcaagggatggtttgtcatcacacatataaaaatgattcaggaaattgggtttttccagaagatgttaaaaaagaaggtaataagttaagtcaaatatcaacaggagaaactgtcaacgagggtccgatagaatcaatgtcaaagtcgaaaaaaaatgtcatagaccctgaaactataattcgttcatttggtgctgatgctgcccgctggtttgtattgtctgatagtccacctgaaaaagatattaactggtcagaatcaggcatacaaggctcatggaaaatatgtcaaaaaatctggacattagtgaatgagaacaaaaaatatttatcttcaaaagattatagtgaaaatatgaccctttctgatgaagcaagagaattaatgtatctgatcaatcagaaccttgagg

SEQ ID NO: 304643 - DNA, 1277 bp, Unknown
  Bacterial polypeptide expressing nucleotide sequence isolated from the Sargasso Sea
atctgatggagtatttagcttgaatgatttgaaagttaaagatgctatagaaaatacaatatcctatttggaaaagatccaaaaaggaaaaagggcagttgagtataaactgcgagattggcttttttctcgtcaaagatattggggagagccttttccaattattcacctggaaaaaggatataagccagtatctgaagaagaattaccagttttattgccagatgttgaaaaatatcaacctactggaacaggagaatcgcctttagccgctatagatgaatgggtgaatactatagatacagaaacaaatacaccagccaccagagaaacacatacaatgcctcaatgggcaggatcatgctggtattatctacggtttctcgatccaaataacgataacaaaccttgggataaagacgctgaaaagtactggatgccggttgatttatatataggaggtatagaacatgccgttcttcatttgctttattcacgtttctggcatcatgtgttacatgatttagggttagtatcaacaagagagccatacaaaaaattatttaatcagggtatgatccagggtgaagatggtcaaaaaatgagtaaatcaagaggaaatgttatcaaccctgacgatgttatagaagaatatggtgcagattctatgcgattatacgaaatgtttatgggcccattagataaatcaaaaccctggtctacaaaaggcttacaaggatgtgctcgatttgccaaaaaagtatggaaagtttttaataacactgataaacattcagatcaaaaagaatctgatgatactacaagattattgcaccaaactatagctaaagtaagtaatgacttagataatttgcggtttaatacagctatatcgcaaatgatgatctttactaatcatttgcaagaacaagagactataaataaagggaccttaaatacatttttattattattaaatccgtttattccacatatgtctgaggaattaaatgagcaaatggattcatttgaaagtttatcttatgcacaatggccaaattttgatgaaaatctagcaaaagaagatttaattactatagctatacaagttaatggaaaacttcgtggaagtattcaagtagctgatgatatagatgataaaaccttaaaatcaaaatcttcaaagattgatagtgtaaaaaaatatctagatggtaaggaaatcataaaaaagataattgtaccaggtagactagtaaatttcgttgtaaaatagc

SEQ ID NO: 304644 - DNA, 286 bp, Unknown
  Bacterial polypeptide expressing nucleotide sequence isolated from the Sargasso Sea
atggaaagatataactttaaaaaaacagaaaaaaaatggcaagactattgggataaaaataagtcttttaaatgtgaaattaataaaaataaaaaaaaattttactgcctagaaatgtttccatatccttcaggtaaaattcatatgggacacgtaagaaactatactattggagatgttttatctagatttaaatccatggaaggttttaatgttttacatccaatgggttgggactcttttgggatgcctgctgaaaatgccgcaaaagaaaacaatcttcatc

SEQ ID NO: 304645 - DNA, 1810 bp, Unknown
  Bacterial polypeptide expressing nucleotide sequence isolated from the Sargasso Sea
aatgaatgattttgattttcaacaaattgaaaagaaatggcaggattattggtcagaaagcaatattattgaatgcgatcttgattcagaaaaacctaaattttataatctctgtatgtatccatacccttcaggggatttgcatatggggcatgttcgaaactatacaattggcgatgtaattactagatataaattattaaatgggtttaatgttttatctccaatgggatgggattcctttggcttaccggctgaaaatgctgcaatcaaaacagggattcatccacgtgagtttactgaagaacgtattgaaaatatgaaagatcaaattatacgattaggttcactttatgactgggatagagaattagctgcacattcagaggattattataaatggactcaatttctttttatcaaattgtttgagtctggtttagcttataaaaaggacgctccagttaattggtgtgattcttgcacaactgttttagctaatgaacaggttatagatggcaattgtgaaaggtgcgatacagaagttagtccaaaaaacttaaatcagtggtttctgaaaatttcaaactattctgatgagttgctgtctggattagaaaaaattggggactggcctgaaaatgttaagactatgcaaaaaaattggattggaaagtcagagggtgcacaattccaattaaatgttagtaattctgacatttcttttgaagtctttactacaaggccggatactctttttggtatgacttttgcagtcatttctcctgaacatgaacttatggaaaaaataattgaaatttctgataataaaactgaaattaaagaatatatcgaaaaagcaaagtcaaaatctgaatttgaacgaatgtctatatcaaaggagaaaacaggtgttgatacgcatttaaaggtaattaatccaatgacaaaagaagaggtacctctatggattgctgattatgtattaattaattatggaacaggtgcaataatggcagtgccagcacatgatcaaagagattatgattttgcaaagaaatacaatatagaaattcgtcaagtaatcatgaacatggaaacaaaaaaagatattgagaaagaagcatatgtaggagagggggtattaattaattcaggagaatttaatgatctcaattcacatgttgatgcaagtgaaaatattattacttatttagaaaaaaataaaattggagataaaaaaactacctttagattaagggactggttaataagtagacagagatactgggggtgtccaattccattaattaattgtgaaagttgcggtttaattcccgaggatgtgacaaaacttccagttgttcttccagaaattgaaaattacataaatactgatggatctccactttcgaaaagtgaagaatttattaatgctgaatgtccaaaatgtaaaatacctggaattagagagacagacacaatggatacttttgttgattcctcatggtactatttgagatttttagattctaaaaatgatgaagaaccttttaaatctgaatttataaataattggcttcctgtagaccaatatataggaggtgttgaacatgcaattctacatttactatattctaggttctttgttaaagccttgagagatttaggaattattgaaatagatgaaccatttaataatttattttctcaaggaatgataaattttgagggagcaaaaatgtcaaaatcaaaggggaatatagtagatcctgaagcttattttaaatctcatggagcagatgctctt

SEQ ID NO: 304646 - DNA, 2440 bp, Unknown
  Bacterial polypeptide expressing nucleotide sequence isolated from the Sargasso Sea
tatgaacagtcaatttgaatataaaaaaatagaaaagaaatggcaaaatcactgggaaaatagtgaaactgttaagtgtgacttaaaatctgaaaaaccaaaattttacaatctttgcatgtacccatatccctctggagatttgcatatgggacatataagaaattatacgatcggcgatgttatcactaggtacaaacaaatgaatggctttaatgttttatctcctatgggctgggattcatttggtcttcctgccgaaaatgcagcaattaaaacgggtattcatccaagagaatttacagaagaaagaattgcaaatatgaaatctcaaattatcagactaggttctttatatgattgggatagggaagttgcagcccactctgttgattactacaaatggactcaaaatctatttattaagctgtttgaaaatgatttagcttacaaggaggacgcaccagtaaattggtgtaattcatgcagaacagttctagctaatgaacaagttatagaaggctcttgtgagagatgtgatacagctgttgagccaaaaaatttaaaccaatggtttctaaaaatatccgaatattctgaagaattattacaaggccttgaagagattggtgattggccagaaaacgtaaagacaatgcaaaggaactggattggaaaatctgaaggctctcagtttgaattaaacataattggaacagatcttagttttgatgttttcacaacaagacctgatacattgtttgggatgacttttgctgtgatatctccagagcatgaattaatcgatttaattatggaacaatccgaaaaaaaagatgagatacaaaattatttagactcaattgtaaataagtcagaattcgagagaatgtctattacaaaagaaaaaaccggagtggatacgacattgaaagttacgaatccaatcacaaatgaggaagtacctttatggatagcagactatgttcttgtgaactatggaaccggtgccattatggcggttccagctcacgatgaaagagattatgaattcgcaaaaaaatacgatattgaaattagacaggtaattatagataaagaaaaaacaataaatgtagacaatgaagcctttactggtaatggagttcttatgaattctggagagttcaatgacttgagctctcacgaagaagcaagtaaaaagataaacgaatttctagtaaaaaataagattggcgatgaaaaaacaacttatcgtttgagagattggttaatcagtagacagaggtattggggttgtccaattccattaatcaattgtgaagactgtggattattaccagaaaaatatgaaaatttaccagtattacttccagaaattaaagattatataaatacagatggatctcctttatccaaaagcaaagaatttgttgaaactgattgtccaaaatgttctaagaaagctcttcgtgaaactgacaccatggatacttttgtagattcatcctggtattacatgaggtttttagatcctaagaatgaaaaagaaccttttaattctaactttattaatgaatggttaccggttgatcagtatattggcggggtagagcatgcaattctacatttattgtattctcgattttttgtcaaagcccttcgcgatcttggcctaatgactattgatgaaccttttcacaatttattttctcaaggcatgataaattttggaggggcaaaaatgtcaaaatctaaaggtaatattgtagaccccgaagaatattttgctacacatggagctgacgcgctaagattatatattttgtttatggcacctccaagcgatggagttgaatggaatgatggaggcatcgagggtactaaaagatttttaaataaattatgggacaacttattaaaaatcataaatcaagaagatatagaaaaagaattaagtgaggatgacaagtccttagaaagaaaaataaatcagactattaaatctgttacccaacattttgaaaagtttgaatttaatactgctgtatctgatttaatgaaatttaataatgaccttagtgaatatttaaaacatgaatctattttgccaaaagaattaaaagatgtactcataaaaaatatacttatacttttatatcctatgtctccgcatatggcatctgaaatttatgaaagttattttgacagtgatataagtactgagaaatgggcaaattttgatgattcaaaattagagaaccctatgtatgaattagttgtacaaataaatggtaaaaaaaagcatgcaattatggttgaaacaggaattgaggaagacgatgcaattacactgtgtgaaagtaatttcgatataaactttaaagaagcaaaaaaaataatttttattaaagacaaaataattaatgtagtgcaataa

SEQ ID NO: 304647 - DNA, 1855 bp, Unknown
  Bacterial polypeptide expressing nucleotide sequence isolated from the Sargasso Sea
catgaaagagtatgatccaaaagtcattgatcaatctattcaagattactgggattcaaataatgctttcgaggtagatccagatactaataaagataaattttactgcttgagcatgctgccctacccgtctggaaaaatccatatgggtcacgttaggaattatacgattggtgatttaatctctagattcaatatcagattaggaaaatgcgtcatgcaaccaatgggttgggatgcttttgggttaccagcagaaaacgcagcaatagaaaacaaagtttctccaaaagactggacctatcagaatatagaaacaatgagaagtcagcttaaacaattaggatttgcctatgactggcgtagagaattttctacttgtgatgagagctactataaatgggagcaagatctgttttgtaaaatgtttgaaaagggtttggttattagagaaaaagctgaagtaaattgggatccagttgataaaacagttttagcaaacgaacaagtcatcgacggtcgaggctggagatctggggctccggtagaaaaaaaattccttaatcagtggtctctaaagataactgactatgctgatgaacttctttcagaattaaggaatctttctggctggcctgaacaagtaaagctaatgcaagagaattggattggtaaatcaaagggaatggtattccaatttgaaaactcagtgatagataagccaattgaagtttttactacaaggccagacaccatcatgggtgtcagctttattgcactttcatcagaacatgaaatcacgaagagaaaactatccgagaatgaagatttacaactctggatagaagaaaagagtaaagtaaaaaaagcagaaaaagatcaagcactacaggaaaaaaaaggtttttttcttaacgaatttgcctatcacccagtcacaaaagaaaagatacccatttgggtagcaaacttcgtgctttcagattatggatcaggtgcattgatgggcgtacctggtcatgatcaaagagattttgaatttgccacaaaatattcactgcctatcgttagagtaatttcttccgagaacgaagattctgatcaagcatctacagataaagggaaattgattaattcgggtcaattcgatggtttaagttttgaagatgcattcataaaaatacaaaaatttgcagagcaaaataattttggaagatttgaagaaaatttcaggctcagaaattggggtgtttccagacagagatcttggggcgctcctattccaatgatgatttctgagaatgaagatgacaacgatgccattcctttttcagatctatccgatgatgagctaaaggcagagtcaatagagagaaatggaaaaaaatacgttaaagaaaaagatacgcttgatactttttttgaatcctcttggtattacgcaaggtatgcatcttttaaatcagataaagatatcttagatgatgaagcaaattattggttaccagtcgatcagtacatcggaggaattgaacatgcaatacttcatctgctctactcaagatttttctgcaaagttcttaacgaattaggatatttggatacaagggagccgtttacgaatcttctctgtcagggaatggttcttatggatggtgcaaaaatgtctaagtcaaaaggtaatgtagtgaatccagatgatttaattgaagaatacggtgctgactctttaagattgtttatgatgttcgcagcccctcctgaacagtctttagagtggtccgatagtggcattaaaggctcatttaaatttatcaataaactttggacaatgtcccaaaaacatttttcaact

SEQ ID NO: 304648 - DNA, 697 bp, Unknown
  Bacterial polypeptide expressing nucleotide sequence isolated from the Sargasso Sea
gaggagatgattcaaaattacggggcagatacggttcgtttattcatgatgtttacctctcctccagagcaatctttagagtggtcagatacagcaatcaacggctcatatcggtttttaaaaaagttatggaaactgataaaaacacatcaagactctataaaagatattcctggtatttcgtcgaatgaaaagtttaatggaaatcaaaataagttgagaagaaaaacgcatcaaacaatttcaaaggtcacagacgatatcggaagaagatatactttcaataccgcaattgcagcagtcatggaacttgttaatgaagtttcagctttcaatgtcgatgatgaattggatcgaaaagtaatcaaagaggcaattgaaagcatactattattgctctcaccgatcgttccacatatttgtcatcagctttggctggatattaatcatgatcagccgattattgatgctaggtggccaaaatttgactccagtctcctcaaaagtgaaacatcgctaattgtagttcaggtaaacggtaaattgagatccaagcttgaagttgatgcttcaattagtgaggatgaattaagatcaatggcattgtctgacgaaaaggtagtgcgcttcattgatggaaatgagattaagaaaattatcgtgatacccgaaaagttagttaacatcgtagtttagt

SEQ ID NO: 304649 - DNA, 2383 bp, Unknown
  Bacterial polypeptide expressing nucleotide sequence isolated from the Sargasso Sea
aatgaaaatagaatacgatcattcaaaaattgaaaaagatattcaatctaaatgggataaatctaatgcctttactgcaaaaatagataatgaaaaaccaaaatattattgtttatcaatgcttccatatccatcaggcaacttgcatatgggacatgttagaaattatgcaataggtgatgctgtctcaaggtacaaaaggcttaagggtttcaatgttctgcagcctatgggttgggatgcttttggtctacctgcagaaaatgccgcaaaaggaaaaaatattcatccaaaagattggacagaaaagaatataaaaaacatgcgtgaacaacttaagtcattaggatttagttatgactggtcaaaagaactgaatacttcagatgtctcttattacaagtttgaacaagaacttttcctaaaattttatgaacgaggtctagcttatcggaaaaaatcacttgttaattgggatccagtcgataaaacagtccttgcaaatgagcaagttatagatggcaagggatggagaacaggagctgaagttgaattaaaggaaatagatacctggtttctaaaaattacagattatgcagatgaattagaagaaagtttagcaaccatagattggccagagaatgttattaatatgcaaaaaaattggattggaaaatctaaaggcgttgagattaaatttacaacagatactaataaagaaattaaagcctttacaactaggcctgataccctctttggcgtaaccttctttggtatttcacctaatcaccctattgttaaagaattatcaaagaatgataaagatttagtagagtttttgtcagagatcaaaaaagtatcatctgcagaagcagatttagctaaagcagaaaaattaggctacaagacagaaattaatattgttcaccccattacagaaaaaaagatacctgtttggataataaattatgtgctaatggattatggaacaggcgcaattatgggagttcctggacatgatgaaagagattttgaatttgctcaaaaatatgaaatacctataacaagagttatagactctaaagatgaacttccatattctggccaaggaaaattagtaaattcaaaagattttgatgggcttgattcagataaagcttttgatgaagtaactaaaaaattagaaaaaaataatgcagctaaaattttatatcaatacagattaagagattggggagttagcagacaaagatattggggctgccctattccaataatctataaagatggcaaagctatgcctagcgaagaattgccagttgagctgcctgtatctgtagatggtgaatatagtcctcttcatcaaaatgaagaatttaaaaaagcagataatgggtttgagagagagaccgatacatttgatacctttatggaatcatcgtggtattttgcacgctacacatcggcaactaacgataaagaaatctttgatgaaaatacaaaatattggctgccagttgatctctatataggaggagtagaacatgcaattcttcatttactatattcccgtttcttttttaaagcattaagagacatgaatatagttgaaggagatgaaccgtttaaaaaacttctgacacaaggaatggttcttaaagatggtgcaaaaatgtctaaatcaaaaggcaatacagttgatccaaaagaatatgtaacaaattatggtgccgattcaataagaacattcatgatatttgcaagtccacccgaacagtctcttgaatggtcagataatggtctagaaggttgtcataaatttcttaaaaggctttggaacttatcaataaatattaatgagcttgatgaagaacaatttaaagataataaaaataatcttacagatgaatgtaaaaaattgtttaaaaaaataaatgatgattatgagaaaagacttaatctcaataccattgtttcatcttgcatggagattctaaataatattaatggacgttttgatgataaaaacgtcaattgctcaaaagaagatctcctaagtgtatatgatttcctattgcttgctttgtacccgatagctccacatatctgtgaaacactatatgcagaagttcttaagaaagatattgcacaagcgaaatggcctgaagataatttctttgttgctaacctttcagaatcaaattatctagttcaagttaatggtaagttaagagcaaatattatgatgccaatagacttgaaagaagatgaggtaaaagaaatagctttaacaaatgaaaatgtggccagacatctagaaaataagaatataattaaagtaatttttataaaaaataaattaattaattttgttcattcgtag

SEQ ID NO: 304650 - DNA, 958 bp, Unknown
  Bacterial polypeptide expressing nucleotide sequence isolated from the Sargasso Sea
atgtcagaatacgtccctaaagaaattgaagctaagtggcaaaaatcttgggaagagagcggatcttttgaacccgatttcgaaaccgagaaatcacgttattacatgctgacgatgcttccctatccatccggggatctgcacattgggcactggtatgccatggctccttctgacacctatgcccgatttttgaagatgcaggggaatgaggtattttttccgattggtttcgatgcattcggccttccagcagaaaacgctgcaatcaaaaacaacatccatcccaaagactggacttacaaaaacattgagcggatgcgtctccaacttcgttcgatgggaaacatgttcgcctggaaaaatgaggtcgtttcctgtgatccggattactacaagtggagtcagtggttttttctcaggatgctggaaatggatttggcctaccgtgaatttgctccagttgatttctgtaatcattgccagacgactcttgcaagagaacaggtttggggagatgaacgcctttgtgaacgttgcgggaacacggtgatccgcaaggaactcaaccagtggaaacttcgaattaccaattacgcagacgaattgctcgattttgatggattggactggcctgaacgtgtgcgtttgatgcagacaaactggatcgggaggagtaacggggttgaatttgatatcgatttggatctaccaggcgatttaaagttccgtgtttttaccacacggccagataccgtattcgggatgactttttgtgtgcttgctccagagcatgaattggtcgaacaaattgtaacggatgaccagaaagaggaggtgtctatttactgtgaaaacgccatgagaaaggacgaaatcgaaagaatgtccgaatctcaggaaaaagacggagttttcacaggagcctacgcccatcatccgttgaatggtgatcgtg

SEQ ID NO: 304651 - DNA, 1052 bp, Unknown
  Bacterial polypeptide expressing nucleotide sequence isolated from the Sargasso Sea
ttttgagtcttcgtggtactacttaagatattgtaatcccagaaacagcgagccttttcttaaagaagatattaattattggttaccagttgatcaatatataggaggaattgaacacgccatacttcatttattatattctagattttttgttaaagcgctaagagatttaggatacgttaatattgatgagccttttgagggtctttttactcaaggcatggtaacgcatcaaacttataaaagtaaggatggtggttggcttgctccagatgaggtaattagagaaaatgataatttcgtggacttaaaaaatagtcatgtgagtgttggcaagattgaaaagatgagcaaatctaaaaaaaatgttatagatccaagtaaaactatagatatgtatggggcagatacagcgagatggtttatgctatctgatagcccacctgaaagagacctggagtggacagagtttggtatttctagttcttataaatttataaacaaaatatgggaactttcttcagtgttgtttttaaataattataatgagaaaaacgactctgatgataataaaattaaaactgacattaacaacacaataaaaaaagtaactgataatatcgatttgtttcattacaataaagctattgccaacattcatgagtttattaatagtgcacaaaagtttattataaataaaacaatatctaaaaaagaagcaattgattcttttaaaaaactttcattaattattcagccatttattcctcatttaagtgaagaaatttggcaaaaatttggcggagagggactagccatcgagcaagattggccgcaagtaaacgagagtttattggtaaaaaatttcaatattgccatacagataaatggcaaaacaaaagatgttctttccgcaacaaaagagctggataaagatagtgttgttaacattttaaaagaaaataataaaatatcaagattgctaaaagacaaaaggattgtaaaaacaatatatgtttctggaaagattattaattttgttacaaattaaa

SEQ ID NO: 304652 - DNA, 1534 bp, Unknown
  Bacterial polypeptide expressing nucleotide sequence isolated from the Sargasso Sea
ttgaaactagatttaaagctgttcacccctttacaaaagaaaaagctacctatatggattgcaaattttgttctaagtgattatgggtcaggcgctctaatggcggtaccaggccacgaccaaagagattttgaattcgctaaaaaatataacctgcctataaaacaagtcatagagggaaatgaaaaggatgacataaataaagaagctattcttgaaaaaaataaattaataaactctgatgagtttaatggactatcttttgaagaagcctttaaggcaatagaaaaaaaagcaattgaattaaattgcggtaaagagtctacaaattttaggctaagagattggggagtatctagacaacgatattgggggtcacctataccgatcctaaaagatgaaaaaggttttgttcctgctaaagatttaccagtcaagcttcctttagaagtgaaatttaaaggcgttaattctcctttaaaagacatgaaagaattcatagatattgagcaagatggtaaatctctaaaaagagaaactgatacttttgatactttttttgaatcttcttggtattacgcaagatttgccagcttcgatagcgaaaactctatgctggatgacagggcaaagtattggcttcctgtagatcaatatattggtggcatagaacatgcagtccttcatcttctctactcaaggttcttttttaggtgcttaagagatcttggaatagttgaaggagacgaaccttttaaaaacttactttgccaaggcatggtgcttaaagatggatccaagatgtctaaatctaaaggaaatactgttgacccagcagacctaattcaaaaatatggtgcagatactgttaggttatttgttatgtttgctgctcctccagatcagtccctagaatggtctgaccaaggagtccaaggagcttatagatttatcaatagaatttggaaacttgttcatacgcatataaatgctgaaatccctgataccactgaaatagaatctgaagatccagaaataaaaaaacttagattaaaaactcaccaggtattaaaaaaggtaaaggatgattacctgaggagacacagctttaatacagcaattgcagctattatggaattatctaacaatataccgaacgaattcttgcttgcggatgctgtcactgataagagaaaagcagcggatgaagcaataaaagcaatcatcctaatgctttcccctataacccctcatttatctcaacatttatggtggcaattagatcaagatagtctgattgtagacgcgcaatggccagaagcaaaagaagaaatgcttgaagaggatgttgtgaaaatagttattcaggtcaatgggaaattaagatcagaaatagacgttgatctagatcttccagaagaggaaattaaaaaaatagctctagaagataaaaatataaaaaaacatatctccgattcggaaataaagaaagtaatttatgtccctgagaaactaattaatatcgttttatgaa

SEQ ID NO: 304653 - DNA, 253 bp, Unknown
  Bacterial polypeptide expressing nucleotide sequence isolated from the Sargasso Sea
aatgactgaatcatataaccccaaaatagtagaaaaagcagcccaatctttttggtatgaaaagaatagttttgcagtaaaagaaagtgaaaaacctaaatattattgtctttcaatgtttccatatccgtctggaaaattgcatatgggtcatgtcagaaattatacgattggggatgtgatctcaagatttaagcgtatgcgaggtttcaacgtgcttcagcctatgggttgggattcatttggtttgcct

SEQ ID NO: 304654 - DNA, 1349 bp, Unknown
  Bacterial polypeptide expressing nucleotide sequence isolated from the Sargasso Sea
aatgagttctacatataatccaaaattcattgaaaaaaagattcaaaaaaaatgggatcaagaaaaaagatatgaatcaaaaatagataatagggaaaaatactattgtctgtctatgtttccttatccatctggtaaattacatatgggccatgttagaaattacacaattggtgatgtaatttctcgttacaagagaatgaaaaattttaatgtatttcagccaatgggatgggatgcttttggtttacccgcggaaaatgctgcaatagctaataaagttagccccaaagaatggacagataaaaatatcgaaaatatgaaggctcaactaaggtctttaggtttcagttatgattggtcaaaagaactaagaacttgtgattcaaaatactataaatgggaacaactgatatttaaaaaattttttgatgctggcttagtttatagaaaaaaatcacttgttaactgggacccagtcgatgaaacagtgctagcaaatgaacaagtaattgatggtaagggttggcgttctggcgctcaaatagagattaaagaagttgatcagtggtttattagaataactaaatatgctgatgaattgctaaattcacttgatgatcttgattggccagaaaatgtaaaattaatgcaaaaaaactggattgggaaatctaaaggtgctgaaattaaatacaagattgagaactcagatgattgccttatagccttttctacaagacctgatactatttttggggtttcattccttgcaatagctccaaatcatcctattgctattcagttatcaaataaaaataaagaaataaaagagtttctaaataaatgcaaagaaattaaagcggccgaagctgatattgctaaagctgagaagctaggaatagataccaacattaaggtaattcatccatttacaaaagagaaaataccattgtggataggtaattttgttttattagaatatggaacaggtgttgtcatgggtgtgcctggtcatgattcaagagattatgagtttgcaaaaaaatatgaattacaaattaatcaagtaatagatactggtgaaaaatctctgccaattgttgagaaaggaaagcttataaattctaaaaaatatgatggcatgacttctgatgaagcaattaaagaaataataaacgatcttgttaaaatgaattctggctctgaactcattcaatttagattacgagactggggtgtaagtaggcaaagatattggggctgtcctataccggtaatttatgaggaagaatctccaaaagttattgagaaagaggaaatgccaatagaacttccagcgctgagga

SEQ ID NO: 304655 - DNA, 1381 bp, Unknown
  Bacterial polypeptide expressing nucleotide sequence isolated from the Sargasso Sea
agaaaaaaattaaatcaatggttttttaacatttctaaatttgctgatgaacttttagagggcctagaggaactaaaaaattggcctaacaaagttaaaattatgcaaaaaaactggataggaaaatcatttggttgtgaaatagattttaaaattgaaggcaacccttcaatagataatatcaaatgttttaccactagacccgatactttgtttggtttttcttttctagcactttctcctgatcacccaatagctaaaaattttgaaaatgacaaaaaattccaaaaatttaaggaagaatgttctaaaaccggaacgactgaagaatcattagctatggcagaaaaaataggttttaagactaatttatttgctattaaccctttaaataaaaaagaaaaggttccagtttattttgcaaattttgttttgatggattatggatttggggcaatttttggttgtccgggacatgatcaaagagatctggatttcgctattaaatataatcttcctgttaaaactgtagtcaagcctgataatgtcgatgatttcaaagttgaaaatgaagcttatacgggatcgggagttataattaattcagattttttaaatggtttaaaagctccagaagaatctattataaaaacaatagaaatacttgaaaaagataaaataggaacaagaaaaataaattttcgtttaaaagactggggtgtatcaagacaaaggtattgggggtgtcctatacccattgcgtatgatgaaaaaggagaaataataaaattaccaaaagaagaacttccagtaaaattacccagcaaaattaatttaaatactaaaggaaaccctcttgataaccacaaagattggaaaaaaataaaaattaatggaaaaaattatataagagaaactgacacattagatacttttgttgattcttcttggtattttttaagattctgctccccaaaaaatgataattacggttttgatataaacgatataaattattggatgccagttgaccaatatattggtggcgttgaacatgcaatattacatttgttatattcaagattttttatgagatctattaattataaaaatgcaaatttcaaaattacagaaccatttgaaggcttatttactcaaggaatggtttgccacgaaacatacaaagatctagataataactggtatagcccagaagaaatagaaattagggataaaaattattacaaaaaagatgatccaaattcaaagataattgtaggaccatctgagtcaatgtctaaatcaaaaaaaaatgtaattgatccacaaaacaaaataaataattatggcgctgattcagttagactatttatctttcaga

SEQ ID NO: 304656 - DNA, 929 bp, Unknown
  Bacterial polypeptide expressing nucleotide sequence isolated from the Sargasso Sea
cagatatgataatgaaatctttgatgaaaataccaactattggttacctgtagatttatatattggaggtattgaacatgcaatccttcatttactctattcaagattctttcataaagcattaagagatataggtcttctagacggagatgagccttttaagcgattgcttacacaaggcatggttctaaaagatggggcaaaaatgtctaaatcaaagggcaatactgttgacccacaaccttacattgaaaaatatggagccgatacagtaaggctatacatgatgtttacttctcccccagaacaaagtcttgaatggagtgaatcttcagttgagggtgctgcaagatttctaaaaaaaatttggaatctcgtaaatgatagacaaaatgtagaacttaataataaatttgactttagcaaggatgagcttgagctaagaagaaagtctcattctacattgaaaaaagttgaacatgactatgaagttagattttcttttaatactgcaatcgctgcaatcatggagctactaaactcaattcctgaaagctataaagaagaaaatgcaaccgattctcaaaaattttgtttaaatgaagcaatagtcttttcattaaaaatgctatctccaatagcgcctcatatctgtgaacatctttggaataattttcaaacaaatgaatcatgtattgaatcttcttggccaaaatttgatgaagatataattgaatctgaagaatttgaattaataattcaagttaatggtaaggtgagaggcaaaattaatatagataagaatttagaagaggaagaaattaaaaatattgcccttgaagtagataacgtaagtaacaacattggtgagaatcaaattaaaaaagttatttatgtaaaagataaattaattaattttgtgatttaaa

SEQ ID NO: 304657 - DNA, 1458 bp, Unknown
  Bacterial polypeptide expressing nucleotide sequence isolated from the Sargasso Sea
agttttttattgatatgtttaaagccggtcttgcttataaaaaagaagctgaggtcaattgggaccctgtagacaaaacagtgttagccaatgagcaagtaatagatggcaaagggtggagatcaggagctgttgttgaaaagaaaaaattatcccaatggtttttaaaaataagtaagtattctgatgaactattgaaggatctagataatttagaaaattggccaaacaaagtaaaaataatgcagtctaattggattggtaaatcaataggagcagaaatagactttcatgtttcagagggtgaaacaaaaattaaaatatttactacaaggccagacactatctacggagcaacatttttagctctttcaagtgaacatgagttggtaactaaaatttcaaaaaataatgatagcttaaaaaaatttataaaggattgtgaaaccatcaatccagataaagttaaaagaggttttgatactggtttatttgcaaaccatccttttattgagggtaaaaaacttcaaatttttgtagctaattttgttcttaaagaatacgggttaggagcaatttttggttgtcctgcacatgaccaacgagatcttgattttgcaagagagtataatcttgatgtaataccagttgttaaaccaacaaatataactggaaataatttcaaaatcacgactgaagctttcactgatgatggtgtaatgattaattcaccttccataaatggattaagtataaatgatgctaaagataaaatcattgaaaatattgagaagaaaaaaattggaagaagaaaaataaactttaagttaagagattgggggatttcacgccaaaggttttggggttgtccaatccctataatttatagagaggatggagagatattagctgttgaagaaacagagttgcctgtaaaacttccagacatcaaaaattttactgaatcatccagcgcgctaaaaaatatctctgactggaaagaaactgtttgtcctaaaacaggattgaaggctataagagagacagatacatttgataccttttttgagtcttcttggtattattttcgctattgtaatgcaagattagaaaagccctttgataggaaggatatagactattggttgccagttgatcaatatattggtggtattgaacacgctatattacatcttctttattctaggttttttacaaaggctcttagagatcttaattattttaatttagatgaaccttttaaggggttgtttacacagggaatggtaactcatgttacttacaagaataaaaatggtgattggttagaaccaaaggatgttgaaatagtaaatggcgcctttaaagataacaatggccaagaagttagaactggaaaaatagaaaaaatgagtaaatctaaaaaaaatgttgttgatcctaatgaatattattagt
